United States Patent Application Publication US 2007/0161031 A1 - sequence listing, part 6

SEQ ID NO: 6514 - DNA, 2300 bp, Homo sapien
tccccctctttcctcttctcctcctcccatctcctccctctttcctctcctcctcccgtcttctcccctttattttttcttgtgggagaattcccatcttttcttgcatgctcattgactcatccatgcttcatatattttttcaactttttattatggcaaagttcaaacatatatcaaagtacagtacaccccatatacccacagcacagcaatgcacccaccttcatgctctcccctgaattaattggaagtaaatcccaaatatcatgtcatgtcatttgtgtattttattttattttatatcactaaagttaaggatttcccttctttctttctttctttctgtctttttttttttttgacagagtcttgctgtgttgcccaggctagagtgcaatggtgcaatctcagctcactgcaacctccgcctcctgagttcaaacgattctcctgcctcagcctcccgagtagctagcattacatgcgtgcgccaccacacctagctaatttttgtatttttagtagagatagggtttcaccatgttggccaggctggtcacaaactcctgccctcaggtgatcagcctacctcggcctcccaaagtgctgggattacaggcgtgagcccccacgccaggccgggatttcccttcttaaccatagccacaatactatcatcagatgaaaaacaaacaaacaaactcttagttgtcatcgagtctacaatctggttcatatccccagctgccacgtgcctgtgtcttgatcccccacacacgtgacagttggccgtttggctgggtctctgcatcaggccatgctccgtgcatggatgtcctatgtttacatctccttgatgtccctccctcctgtttttcccttgcagagtattactcatttcctcctagtcccctctagcatggattttcctggctgcattcctctgccctggggatttcctataaaccacgaattgatttgatctcgagatgcctgatcacgttcagcacagtttttttcaacacgacgcttaatgggggttttgtgtctttccacagcagggtgcacagggcctgttgttccttgtgacattagtggacattgattctcaatgcctggatccattcatgtaaaaggcattgctagatggtgacgttccatcctctttcacttaatcaccggaaggcttctcaaaagagaaacttccccttgtctactatgtggttacccaacaggattggtttgttttaggataaatcccaggttttttatattttcaaaataatgatttttttcccctgctgtcttccaaaggtgactggcgaaggtcattattgccacgtattatttgataggaacgtatttggtgatttcagaacctttcagttattaactttattgatattgaaattgccccatctttggccaatgggggccatagttggctcaggggccccctgcacaccccagtacctctgctggtattcttccttctgccctgaccatgtgtgcacctaggacatttcctacactagacctcaaatcgaccatttctcccgggagctccaggttcccttcactaggaaataatatttagtgatcacaatctggaggtcagacctgctttgcttttctttcttttcttttcttttttttttttttttttgagacagagtctcactctgttgcccaggctagagtgcagtggtgtgatcttggctcactacaacctccgcctcctgggccttcttcctctccgtggagcctggagacctccccccatcagagctgcacagagatgccgctttgtctttctaggctgcatagctttccatcgtgctcatgggccagggtgcactcacacagccccctctggagggatttgggggtgtttcaagcctttgttgcaacaagtagcttgttgtttcttttcttcatttttaagagacatattctgccacacatttctaagtggtttttagagtgcaaatgtttgggttttgatggtggaggtggtggtgcttctttaattagattacctcctccatatgccagacatggaaaagttgttctttccttcattaattgaaaaaaaacaaaacaaagaaagacgtattaatttttttaaacatacgggatgccatcatgggtgctggtgccctctgtgttctgggtgccatcctgggacgcagcagtgagcgagaagatgcctgccctcaggagcccaatgccagagcgggaactgcagagtcaagtgaagcacgatgcatgtctcacagggctggtggcctcccagg

SEQ ID NO: 6515 - DNA, 2300 bp, Homo sapien
ccgggaggcgagacaagagcaaggccgtggctgtcactgagggcaaggggcagtcccggtttcagcaggaaaggggaattcgttccttgctgttgtttggacagcgtcgtgttcgcatcttgctctgcacagggacagagggggctcctccgtggtccgtgaaatccttgtgttcagtggaacaccatggcctccctgcgggctgctgttcccacagagctcaggctcctgtgcggggatgggaaggttaggatgggcctatggggagtggaccgagggccctgggggcctcaggctgagagtattggggaagccaccggcgggttaggcaagggcctcgggacagccgaggggcgggggtggacactgggccacccgtagggaagacccattgttaggagaaagctgaggacaccctggacccagctgtgatggagaagggagaagtgggcagactcagggtatttcggaagttggattgggtagatctcagccagatggtgatgagcgacgctgctgtgagccaggcagagcgggctgctgcaggtgcgagcctggggctccgggcagagggcatggagcgggcagccaaggggcccgggcacccaaccttcagaggccgagcacagataaggcttcacagaggtggggcagggaggtgggaggatccaggagcccaggtgtctcagagccagctggtccgagaggtggggcaggatgagaagcagggatggctgctggaccagtgaggagtggtggggacctacggcaagacagtctcagtagagaagacggcagaagcctggtggagagggttaaggaggacgggacgggagcacatggacagagcaggattcctgacagccgaagctacccatgatttccaagccccaaagctacagcactgggctccccatgacccctcatggggtcagacatggctcctgggtgtccacacacactgtccactgggccagtgccaccaggatctgtccgtggccatgcgtgcacagagaggcgaagccatttgcctgaggagtcccagcagcggggatgagatcctgatgcaggactcacaggccacactccatcttgcccgctccctggggcagctgccgttgggctaaaaatgcagagagccctgagttcagatctgacctctgccgcatagcagccgtgtgaccttggacaagtcacttgtcccctctgtggagggggaggaccagggtccccgttccctggggctgcggtgaggtgcaagtctggagtgagtaaggggagccccgccaccccaagtcatgtattctggagctgtggtgagggttagatgtctcagaaaaggaagagatgagggggccttcgtgaggggcacacaggcttcggaagtgaggggtgagttcacatgcccgtgtcggttttgcaggagcaggctcacctccaaactcacccagttgtccacattcaatatctgaaggcttctgtatatcaatcagacctcaataaagtggttcaaaaacagaaaaagaaatgttacaataaccttttttaaaaaatggaagagcaggccaaatccctgcctcccctggcagctgtgaagacagggtgggctgcagtctctctgttccctgggcccagggtcccacgatgcacagacaggtttcaacagcaggtgttgggaggctgcaccctggactttgaggagggcagggcatggggtccctgggcaaggagcagagacaggagcgggcctggacctgggctgcgggtgctccaggggtggggtggagacgcattgggaagagttcacatctgatggggctgagtcagcctcatgaggccatggaggccaggtcaggggtttacaccctaaggggtggcaggtacagcctcctccagccagagctgccactgtcccgccaccccttcctcccggctcttccgggcagggcctgactgcagcctgtctgctgcagctgggcgaggcgtcccaggtggagacagtgtcagaggagaacaagagtctgatgtggaccctgctgaagcagctacggccaggcatggacctgtcccgcgtggtgctacccacgttcgtactggagccgcgctccttcctgaacaagctctccgactactactaccacgcagacctgctctccaggtgcgcgccatgccgggaggggcaccccacacctcgtcctgcatctgcatgagaccctgcagcacccccagcccctacctgccctgtgggggcttccagagaatcccatggctgatctcagcccactgtttctgcagctgta

SEQ ID NO: 6516 - DNA, 2300 bp, Homo sapien
ccttgttcttccatccccccatggcagccccggaagtgctggtgggggggatggagggtgccaggcgggaaacgagtggagcgcccttctctgacttctgccctcatatccttggcatcaggccaacctgggctcctagccctgggccggcccctgtgccctgtcccgcatacccacctctctctttcaggcagagtacaggctgtgcaacgggtcagacaaggaatgtgtgtcccccaccgccagggtcaccaagaaggagactctcaaggtgagcccgggcccggggagggtgcagcagtgtcactgtcagaccgacggccacctgagccagggaggtcaccctccccacctgtcaaaaggaggggacaaaccgcacctggtcgcctccacaccccctacttcctcctacttcctctcctgcccctgcccctggacccatccctgggctggacggtgggaggagctggggcagctcggtgccttctcccatgacccaccgcgggtgccccgggcccaggcgcagaaggagaactaccggcaggagaagaagcgcgccacacggcagctgctcagcgctctgacagaccccagcgtggtcatcatggctgacagcctgaaggtaggtgatgcccggcctccggccacccaggacacgggtcagcgtgctgctgccataacaaaggaccataaaccaggtggcctgaaacgatggaaattcacttccctgcatctagccgttatcactgcagcctctgctccttcctcatgaggcctttccttatccacctgtctctccccctttttataaggacaccagtggtaggaattagggccaccttactccagtgtagccccatcttcacctgattatgtctgcaaagaccccatttccgaataaggtggggcctggccagtgggcggagggcgctggggagggagacattgctctggcttctgggagaggaccccacatcagggccgggtgtcctgtgttcagacctcacggagaccgtggccattcactcgcctctgagcctccatttccccttgtgtacagtggaggtaaaactgcccaactccgaggctgctgggcaacgcataccagataagtgtgcccagccctggtgtctgcagagcccaggcccatgtaggctccttctacccgcataccaaaatgatgaatcaaaagttaggtgcaaaagtgagtatttagaatgagaaaagaagacaactactttcagaatttacagagctgccaggccgggtgcagtggctcacacctgtaatcccaacactttgggaggctaaggcgggtggatcacctgaggtcaggagtttgagaccagcctgtccaaaatggcaaaaccccgtctctactaaaaatacagaaattagccaggcatggtggcgggcgcctgtaatcccagctactcgggcggctgaggcaggagaatcgcttgaacctgggaggcagagtttgcagcgagccaagatagcaccactgcacctccagcctgggcaacagagactctgtctcaaaaaaaaaaaaaaaaagaatctacaaagctgccagttacaagtcacaccactcattgctggttcctccctgaggcccttgaccttgaacttgacccacgtgaccctcacaagtaaatctgtccctgctgccacgtatttctttgcattcaccataacatatgggctccttttaaaaactgaacaaggaccctgccctgagttccactctgagtcctggggcaccgcttgccgtggcttggcccctgctcgggtacacgatagacacaggacatcaccccagggagtgagggtgaggaaggggtgagttccgaactggtgtgggggagtgagggaggggaagggcccctcggcagcccaccctggtctgtgcctggctccccgccaagccatcaagatgccccagggatggcggccccagagggtgggcatcgacgccagcatcctccctgcagatccgcggcaccctgaagagctggaccaagctgtggtgcgtgctgaagccgggggtgctgctcatctacaagacgcccaaggtgggccagtgggtgggcacggtgctgctgcactgctgcgagctcatcgagcggccctccaagaaggacggcttctgcttcaagctcttccacccgctggatcagtccgtctgggccgtgaaggtgctgcggaggggtggggttgaagacagaggccccgtagggccaaggggctcattcctagggccctggtggagggtggagccaaccagctgaatggccccc

SEQ ID NO: 6517 - DNA, 2300 bp, Homo sapien
agacctctgacgccttcatttcctgcgttggccaccaggcacagatgctgtgtccatctgacaggagaggaagcggggtcccaggaggaacaagccactgcctggtgacagagcttctttctggcagcagcaggattcggacctacctcttgctgggggcaacctcttcggctcactgcctctccaaaaccaggcaagaggctggaaatggggctttctggaaaaatgcagagcctgctgggaagtggggcagacaactgacacctgtcactgagcctggcaggtggcgtgttcttcatttcttgcatggccatctggctgtcagacactacccagtgagaggctcaaccctcgtcctgctccaccccagccccaccctgctgtcatctatggccccttcccccaccctcaggtgcctctttgacttttgacctctgccctcagcagtgtcatttcatgaaacccaggccctggacagccagcatcaagcaactggcaaccttccctactgccgcccctgagacctccgccctagggataggggctttgttttcttccctaattccctttggattggctccagcaaccagcaagttaccaggcagcagcacctcagctttgggcggagtcttcaaagagcagacccagcagttgtatgtggatcccagctgcacagaccctctcctgcagaggcagaggccgcctgccacaggccacgcggagcagggtcccaccatggccctgagcatcttgactgagcagttctgcatcccaaggcctcacaaggtgactatggaatggcaatgctagccctgggggtaagcttagggcaagtccgatcagcccactcgcctccgtaagccgtgggttcctgtgatccgcacacaagcggctggtgctgctatccccaggaggatacccaccaacttgtctaacggggtgggcaaggccagggctgagacgggaaggggtctggcttgttgtgggcagagcacctgcatgctgtgccgttcccccttcaggtgctggaaggagccttcctgggccgctcgccctccgcagccctgctgggaggtcttgcagacgcccatgatagccaggcttgcggcctcccgaatgcaactgcagcgtgaaaccgtagaaacacacgtgtcagtggcagttctgcctggggaggagcccagggctctctgcggagggtcagttctgtccctgttaaggttctgtgtggaaaagactccacgccctcttggggtctacctacatctggggatgcccgagcccagctcccagtttttctggtcatttggggacataccataggaaggacctgcagtgcacctcaggcttggacactagggatgcaaacgccctggggccagccctgggcccacacccaatttagggtctacaggcagggagccaggggccaggggaggacttctcagctcccaaggggatgctgtttaggggaattagaatgtcttttatatacaagagaactgaggggtctaaaaaggtctctggggggtagaagaaggtgaggagaaaacacaggaagaaatgcacatgaggggaggttcttgtcaaaagggtcctgagaaagacgtacagttagagtgtgactgagggtccttcttagcacataaggggcagggacaacgggctcagatgtctggggctcctcttgtgttctgatggctcctgagacggggagaaacggcgacagtttcctgggttcaggaagggagaggaggcgcctcgcaccctggctagggtgggctgggggcctgcacccctaagttggagaaccccacgaagctgaccccactcaccgctgcccaccccgccaagcctcctggccattttcagcggagtgtcccgacctctggccgcccgggtgggtgtgagccccggagcgcgcgcggggggttgggggatgaggagaagcggcagccggtggggggcagcccctgggcgcccgctccgcgcggcgattcggcccgggttttgcggccgccgcgcctcctcctcccgcctccgggctccctgggcctcctccctccgccgcgccctcgctccgcctcgcgcggggggaccatctgctggcatttcctgcagccaggcccgcgccgccagtggagcccccgcgcgcccggccggcccggagcaccgagctcgcggcacggtaggaggtaggagcgcggcggcccggggggcggcagggcggcggggggatggcgggctgggaaggatccggagggccccgccgggcagggccggagcgaaccgagggccgc

SEQ ID NO: 6518 - DNA, 2300 bp, Homo sapien
gatggccttcagaccaacagtgcccacactccctgctgagcttccagtcctgagagcacggtctagggagaactggcagcgggcaggcgggcacgggacttggcgtggccagaacacattcatcccggggaaggaagaaaaaccagcaaaggtgcgtgcctctgggttgggggactacatgtaagcttttcttctttccagttgttaaccttcttcaaagtttccataaacgagcaacgttttacttttctagtggaaaaagaacaactttatgcaaaggcagctgcagaatgtcccacccggcaccaagagcacccattgaatgccttcatttgggcaaaaaagaaaatttctgcaggtctttatttaaaaaaatacataactggagtgcttttcatcaaaaatgtccccatttgggtggaaaaaaattttggcgatttctctttttagtattttccgtagggcttgaatgttttaaaaatgaccagaaagtattttatttcatggtcagaaaacacatcaaatggtttgcactttggaaacttggatccccttccttccttccttccttcctcgcttccttcctccctccctcctcccctcccctccccttctctcttctcttctcttctctttctttctttcttgctttcttgctttcttgctttcttgctttctttctttctttttccttcctttcttccttcctttctttctttctttctttctttctttctttctttctttctttctttctttttccttccttccttctttccttcttttcttttctctctctctctttctctctctctctgtctctctctctctctctgtctctctctctctctctccaaagcaaacacttggggcaaaagctccagatgatccagggctgaggagggagggtgagagcagaggtgggagacgggagcaacccgcagagagcggatggccctggggacgcaggagaggccgggtggggaccagtgtgggaggggatgggaggggaccgaggggatggaggctcctgcatccgccggcccacggggctgggtctgttctgtgcagaagcagcaccacctggtggcctctgctggtgacatcaggcacctgccagtcctgggcctcagagagggggacagagccctgggtgtggtccccgcggggtgggcaggacaatgatggctgagcagggcggggagtaaggagtagttccacctcaactctgtagggggcgaatcagagcctcagccagcaggtggcatggacggcgcccacctagcccaggagtccggaagcctgggttccaatccggccactgtgggctggtggctggctctgttttattgtgcagttttctcccctgtgactcaggtgcagcagggtggggaggggccgggtaaggggatctgggctgggcctgggggcgtggtgcctgtcctcacccctattcaggaggcttctcctttctctctccttgcctgacctctctccagctccattttctgcctccctcatcctcagcaggcctggctggggggtggtcagggccaagtctctccagctgtgtccagcccttgggtgctcagggtaagagctaggtggtgggcggggctcctcctggtcctgaaagcatctgggtgtggggtgagcgagggtcggtgggggtgggcacctcctggcaggccctgtgggcggggcaagcccacttataggagacccatgggcagggactgtcccctggcacccagctcggcgccctcccccagggccctccgcagtaccgacctcagcggctcccgcttcccgggctgtcggcccaaccccgagtagatgaggggcttggagctgctgttgacgcaggccagcagcgtggccagcggggaaaacacgggcagcaggaagttcagcaggggctgcaggctccagtagaagaccgagggcaggccacagaagaagagcaggagcagcgcgcccaggacgatgccgtagagcctgggccgcgggcgagtggagcagcaggtcacccagacaaagaggaccacgccagccgtccaggcgacgcgggccagcaccaggaaccaggtgacgctggccacgtggtagcgcgggcagaccagggggcacgcgctgttgcgcagcaggccgcaggcgttggcgggcagcggcacggccggcagggtcggggtccacaccagggcgcagaggacggccgaggcgtgtctgggccggcagccctggtagcaggcggggaagaggtcggagaggcagcgctccacgctgaaggccgccagcag

SEQ ID NO: 6519 - DNA, 2300 bp, Homo sapien
gccgctctgcagggatgcgccggggcgcgcggggcccggccgccatggtgcagctggaggggcctcgggtccgcggagcccggaacccacccgggcagcccggttcctcccgagccggtaccgcgggttccagtccgcccctccctgtctctcaggaggcctggcccctacactcaccatctcctggcctccagagagcctggcgtttcacttctggatctcccggtgcctgcgggtcacacgacctacggctagcaggggacacagagccgcggggacaggaagtggagctctgtcgggacaaaggccccgctagatcccggaagccgtcctctcctctccagacatgtgcctgattggacagtccccgcccctactcctctgattggatagggcatcacgccccgccccctcaggccctgagtgacaggagctgtaatcagacaatgggccgaatgagacagcaaggacaggtgctggccgcgatcttttggagcggggcttcctgcctgcgctgtccggccccacctagaggatatttacatttcatcttgtgactgcggttatgtttatttataaataataaatatatgttattcaccaatggaaagaagaaaataaagacaatcattttgaatttttatattttatggccttcctggcttttggtcctttgaacagacagcctgaaatttcaaaaaggattcaagcctctaagaattaaaatgtaagccatgtgtgaatcttaaattttctagtagccacgttttaaaatgtactaagaaacaggtgaagttgattgtaataatttaacccagtatgtaaccattttcctctatggtcaatatacaattggtaaggaagtatatattttggggtactaaatctttgaagctcactctgtattttaccttttcagcacatttcagttcagaccagctgtattcctgttattcaatagccacacatgatcaatagctgccacactaaagtgcagctctgaggtctaacctcccttatgtcaggaagtggagggtctgaaagtcccttttcagccagaggtgagggaacagcctcttgctacaaacatctctcctccggtcgaagggtggacgagatggtgatcctagagagcataggggaaagcaaaagaaaatatccacgggtagaggactgctgcccatcaataatggggccctaagaggagagaacacatcttcagatctgtccatagccttgacctccaacatttagatatggaggaaatagactagaggcagacttatcttgctatttggccttagccctaatgatcaagctgtgattgtctgtttcttcccgtggttggggggctgtgtgagtaaaagcaccaatcacatatatacatgtgtacatgcatttctgtatgacggaacattatcttacaaaagatccaactttaaataaggggggagaattagtacctataaagtgctttcttcttgcaggtaactaggaatcaacctttcattgaatcctggcaccctatctgccctgggtgcatgtattagttagctattgcataacaaatcaccgaaaacttaatagctcatgattgagttcatcagccattcacgctgaactcaactgagctattcttgtcacaactggactgcttcatgtatgtatggccagctgctggttgactaggtggctctgcttctggggatgagatggctatcaacagtggcaccttccttctccccaccatggtatgtcatcctccagctggctaatctcataaagatagcaaggttctgatagcttgatctcataaagatagcaaggttctgagaaacacagaagcatttaagaccttttgagcctaggcccaaaactagcacaaaagctgtcatattcgcagttgatacggtctggctgtgtccccagccaaatctcaacttgaattgtatctcccagaattcccgtgtgttgtgggagggaccggggaagggggtaattgagtcatgtgggcgggtctttctcatgctattctcatgttagtgaataagtctcacgagatctgatgggtttatcaggggtttccacttttgctttctcctcatttttctcttgccgccaccacgaaagaagtgccttttgcctcccgtcatgattctgaggcctccccagccatgtggaactgtaagtccaattaaacctctttttgttcgcatgttcaggaatgtctttatcagcagtgtgaaaacaaactaatacaacagttttctatagccagagaaaatagtgccagccagatg

SEQ ID NO: 6520 - DNA, 2300 bp, Homo sapien
ttcattactctctgtatctatgctctttattgtgtgctcttacagctcctcccatcaagaggccgaatgtgtttcccaaactttgcatctggctggcactattttctctggctatagaaaactgttgtattagtttgttttcacactgctgataaagacattcctgaacatgcgaacaaaaagaggtttaattggacttacagttccacatggctggggaggcctcagaatcatgacgggaggcaaaaggcacttctttcgtggtggcggcaagagaaaaatgaggagaaagcaaaagtggaaacccctgataaacccatcagatctcgtgagacttattcactaacatgagaatagcatgagaaagacccgcccacatgactcaattacccccttccccggtccctcccacaacacacgggaattctgggagatacaattcaagttgagatttggctggggacacagccagaccgtatcaactgcgaatatgacagcttttgtgctagttttgggcctaggctcaaaaggtcttaaatgcttctgtgtttctcagaaccttgctatctttatgagatcaagctatcagaaccttgctatctttatgagattagccagctggaggatgacataccatggtggggagaaggaaggtgccactgttgatagccatctcatccccagaagcagagccacctagtcaaccagcagctggccatacatacatgaagcagtccagttgtgacaagaatagctcagttgagttcagcgtgaatggctgatgaactcaatcatgagctattaagttttcggtgatttgttatgcaatagctaactaatacatgcacccagggcagatagggtgccaggattcaatgaaaggttgattcctagttacctgcaagaagaaagcactttataggtactaattctccccccttatttaaagttggatcttttgtaagataatgttccgtcatacagaaatgcatgtacacatgtatatatgtgattggtgcttttactcacacagccccccaaccacgggaagaaacagacaatcacagcttgatcattagggctaaggccaaatagcaagataagtctgcctctagtctatttcctccatatctaaatgttggaggtcaaggctatggacagatctgaagatgtgttctctcctcttagggccccattattgatgggcagcagtcctctacccgtggatattttcttttgctttcccctatgctctctaggatcaccatctcgtccacccttcgaccggaggagagatgtttgtagcaagaggctgttccctcacctctggctgaaaagggactttcagaccctccacttcctgacataagggaggttagacctcagagctgcactttagtgtggcagctattgatcatgtgtggctattgaataacaggaatacagctggtctgaactgaaatgtgctgaaaaggtaaaatacagagtgagcttcaaagatttagtaccccaaaatatatacttccttaccaattgtatattgaccatagaggaaaatggttacatactgggttaaattattacaatcaacttcacctgtttcttagtacattttaaaacgtggctactagaaaatttaagattcacacatggcttacattttaattcttagaggcttgaatcctttttgaaatttcaggctgtctgttcaaaggaccaaaagccaggaaggccataaaatataaaaattcaaaatgattgtctttattttcttctttccattggtgaataacatatatttattatttataaataaacataaccgcagtcacaagatgaaatgtaaatatcctctaggtggggccggacagcgcaggcaggaagccccgctccaaaagatcgcggccagcacctgtccttgctgtctcattcggcccattgtctgattacagctcctgtcactcagggcctgagggggcggggcgtgatgccctatccaatcagaggagtaggggcggggactgtccaatcaggcacatgtctggagaggagaggacggcttccgggatctagcggggcctttgtcccgacagagctccacttcctgtccccgcggctctgtgtcccctgctagccgtaggtcgtgtgacccgcaggcaccgggagatccagaagtgaaacgccaggctctctggaggccaggagatggtgagtgtaggggccaggcctcctgagagacagggaggggcggactggaacccgcggtaccggctcgggaggaaccgggctgcccgggtggg

SEQ ID NO: 6521 - DNA, 2300 bp, Homo sapien
cagacccatcccaggttaggacatgctgtggattctcaggtgactccatctcaggatacagggactgagagggtgtatgcaatatctcagacccagaaactgttgattctgtctaaaaacacagcaataaccacatcccaccctcttgatttaaatgaaagtgtttgggggaataaaagatgaaccttttttttttttctttgtcagatcttgcgctcatttggttctggtggggaacaacagctgtgagagaacacgtgtattcaaatagaattaattcccctctcttattctcgcagctgagcagggctcaagtgcctctcatctgaaagaggtaataagattttgtctgtctcctcatctaccttttgcaagtacactgaacaaattagctctcgggactcttccaaatggagttttatgagggatttgctaaggtaaacgttttagactttgaacacagttcagatttcaggggcagtactgaaatctgaactgtgttgctaactgcccagcctttcaactcaagacacaataactttgaactaaaataattatatttttgttgttttccactctgtcccccacgtctatatcaccaccacccccaatcccgccccccaggagctaactcctccttcctgtccctgcaagatcaaaactcctcctggaagccccgctagctctgtctgctcgccttcgtggcagatatcgctattgtacttttatacttatttgtgtgataagtacctcaatgtccacttcttccacgagcccctgagcccctggagggcctggaccacacctagtttttctcactgttacatctcccttgccagacacatggtaggcgcttaataagtatttggtgaacgaatggcttgtttggtgacagtccaaagggtgggggacagagggaaaactccctcctatcgggccccggacgggtggcgctgatggagaggaggctaggataacgcctccaggaccgaagcgcgcacccataaggcccctgccaaaaagaccttcctgaaggcggaggaactgcgagagtgcctacgttggcccaaggcctgaccggacgatcccggggaccctcgccctaaccggccccgactcccgggccccaaacccggactcggccccgcctgaagctccggatcctggggcccgtccctggctccgcgtcggcagaccgtgggctcgctcctgggcctgcctcaaactctccgcaggtaacgcctcccgaacttgagccacgctccaatcccctcctcaaacccctccccgtttctcacaccctggacccctcgctccgtctcggccccgccccaagcccagctccctctcggcccctgagcccagccccgacccgcctcccagtccctgggtccctcccgacaccggcccctccctaagctccgcctcccagggcccgcctcctgagcgcagccagcagcccggactcggccccgcctcccggaccctgggcccctccccacgtaggcccgtcctaagctccgcctcccagagtccgagcagcgcctggccacgtgctacgacatagtcaacgccccgccctggccccgcctcctgagccgttctccgggtctggccttagccccgccctaggacctgtctcctgggctctgctccgagtctcgcctcctgaacccaatcgtcctttacccccaccctaacgcccgcctccaggactcttatcctgcccccacgcaaggccccgcctccaggacgtctccaacctggatgtttccgaagccccgcttccaggatcgccctgtcctggccccgccccaggacacgccaacctgaactctccccaggacctgccccaacgacgcttctcctggccctaccccaggcctcgccctcaagacgctcattctggccccaccccaggcccccgcctcataacgctcatcctggccccgccctagagccgctcccacgactctcatcctaagcctacccccaggccccgccccctctctgcccccgcgcactgccctgggcccgcccccttttcagtccaggctcggcttccgcccggtctcccggcaacgctgcggccccgcccccgtcatggtgcccgaggagaacgcggggaccgaactcttgctgcagagtttcgagcgccgcttcctggcggcgcgcgcactgcgttccttcccctggcaggtgggcggcggggcgagcggagaggcccgcggggctcgcgggagtccaggggcagacgggatgggtctccgtgctgaagcctccagcgctcccgccacgtg

SEQ ID NO: 6522 - DNA, 2300 bp, Homo sapien
cagttactgataagcaggacatcccacaaacagattttcagcgaattggctttcagcaaattgatcatttggcaaagtggtcattaggcaaatgggtcatttggtgaagaggtcatttagtaaatcggctttcaacgacttgccctatgagatttctctagagtgagcattttcttgggttcaatgtacacttcatttccataatgaatactcactggcggctagatggaaaacttcccagggaaccaggagcagccagaacagcctcttaataatcaggcaattaaaaaccctctggtttcttaacaggagggaggtacagacggcatctgctctgcaaggcacagtgatcgggctcagcattgtcactggagctcttgcggttctgtttgctgctagtgtgacatacacagcccttcgtcggaaaaaggacagagtggtctttgggtctcccgtagttgatcatcatatgtcgtgataacccatgacaactccttgccacatgccacgggaggtccagcactccaagaacccagcagccagggccggcttcatgggcttgaacctggacagtcccacagggacacagaggagtccccactgtggtttaataatctgccatcaccatcttgaaattctttattttttaacaagggtggccagggatagtggctcatgcctgtaatcctagcactttgggaggccagggcaggcagatggcttgagcccaaggagtttgagaccagcctgggccacatagcaagaccccatctctacagaaaatacagaaattagccaagcctgtagtcccagctacttgtaggctgagatgggaaaattacctgagcccagggaggtcgaggttgcaggagctgagattgtaccactgcactccagcctggatgacacagctggatcttgtctagaaaaataaccacaagaccgagcacggtggctcttgcctgtaatcccagcactttgggaggctgaggcaggcgatcacttgaggtcaggattttgagaccagcccggccaacatggtgaaaccccatctctactaaaaatacaaaaattagctggacaaggttgtgcatgcctgtaatcccagctactcaggaggctgaggcaggagaatagcttgaacctgggaggaggaggttgcagagagccgaggtcgccccattgtactccggcctgggacacacgagtgaaactccatctccaaaaaaaaaaaaaaaaaaaaaaaaaaaaaaacacaacaacaacgagggccctgcaggtggctgaaaacaacagaaatgtattgtctcgcaggcctggatgctagaagcccaaaatcaaggtgtcggccgggcttcacttcctctgaaacatgtaagagagaatgcttccttgcctcttctggcttctggtggccgctggcaatgcttggtgttccttgtagatgcatcgctccagtctctcctccctcatcacatggctgccttctccctgtgtctctgtctttatctgacattctcctctattattttatttttttgagatggagtttccctctgtcacccaggctgaagtgcagtggcacaatcttggctcactgcaacccccgcctcccaggttccagtgattctcccatctcagcctcctgagtagctgggattacaggctcccgccaccacgcagtgctaattttgtgttgttagtagagatggagtttcaccgtgttggccaggctggtctccaactcctgacctcaagtgatccgcccacctcaccctcccaaattgtgctgagattacaggcatgagccaccacgcccggccctcattctctccttttataaggacacctgtcgttgcatctgctttctcaccagcagaccccaatccagtatgactcatcattacttgattacatctacaaataccctatttcctaataaggtcacagtcctgggtacggaggattaagatttccaattttttccctgaatcaattttttctgagtcagggcctcaccctatcacccaggctggagtacagttatgtgattatagctcactgcagcctcaaactcctgggctcaagggatcccctgacctcagccttccaagtggctgagactacaggtgcacaccaccatccccaactaattttttttttttttgtacagattaggtctcactctgttgaccaggctggtctcctgacctcaagtgatcctcttgccttggcctcccaaagcactgagattacaggcgttatcccgtgcctggccctctttctacacctcaatcatt

SEQ ID NO: 6523 - DNA, 2300 bp, Homo sapien
ctcttgaaggtatccaggtccatctcaagcacctaagaacttttggaatcagagttccttgtcagtctccatggaacactcccctcctgcctgttcccaagcctaagaccaaggactactggccggtacaggatttgcgcttggttaatcaagctacagtgactttacatccagcagtacctaacccgtacacattgctggggttgctgccagctgaggacagctgcttcacctgcttggacctgaaagatgctttcttcagcatcagattagcccctgagagccagaagctgtttgcctttcagtgggaagatccggagtcaggtgtcactactcagtacacttggaccgggcttccccaagggttcaagaactcccccaccatcttcggggaggcattgcctcgagacctccagaagtttcccaccagagacgtagactgcgtgttgctccagtacattgatgatcttttgctgggacaccccacggcagtcaggtgcgccaagggaacagatgctctactccggcacctggaggactgtgggtataagatgtccaagaaaaaagcttagatctgacgacagcaggtacattacttaggatttactatccaaaagggggagagcagcctaggatcagaaagaaagcaggtcatttgaaatctaccggagcctaagacaagaaggcaggtgagagaattcttatgggctgttgggtttagcagactgaagatcccaaactttgcagtataagccaagcctttgtatgaggtcacaaaggggtggggggggggacagggaacgttttgaatggggatcccagcaacagcaagcctttcatgagttaaaggaaaaacttatgtcagccccagccctggagctactcgatctaacaaagccttttccatcgtatgtgtcagagagagaaaagatagcagttggagttttaacccaaactgtggggccctggctgaggccggtggccttcctctctaaacaactagacggggtttctaaaggatggcccccgtgtttgagggccttggcagcaactgccctgctagtacaagaagcagataagctgactcttgggcaaaacctgaacataaaggcctcccgtgctgtggtgactttaatgaatactaaaggacatcattggctaatgaatgctagactcactaagtcctaaagtttgctctgtgaaaatccccgtataaccactgaagtttgtagcacgctgaaccccgctaccttgctcccagtatcagagagccctgtcgagcatgactgtgtagaagtgttgggctcagtttactctagcagacctaacctccaggaccagccttaggcaccagtagactaggaactatacgtggctgggagcagcttcatcaacccacaaggagagagatgtgcaagatatgcggtggtaactctggacactgttgctgaagccagatcattgccccagggcacttcagctcagaaagctgaagtcattgctttcattcgggcctgagaactcagtgaagctaagaatgtcaacatttacactgactctcaatatgccttttcaacccttcaagtgcgtggagcattatataaagaaaagggcctattgaactctgggggaaaagacataaaatatcaacaagaaatcttgcaattgttaaaagccatatggagaccccacaaggtggcagttatgcattgcaggggacagcagcgagcttccaccttgctgggtttagggaattcccccgctgacttagaggctcgaaaagcagcgtctgcccccttccgggcatcagtcacagcccccatgctccctcaagcacctgatcttgtacctacttattctaaagaagaaaaggacttcctccaggcagagagaggacaagtgatggaggaaggatggattcggttaccggaagggagagaagatgcgccacagctgctaggagctgcagttgtactggctgtgcatgaaaccacccatcgaggtcaggagtcaattgaaaagttgttaggccggtatttctacatctcgcatttgtcagctcttgccaaaacggtgacgcagtggtgtgttacctgcccacagcataatgctaggcaatgtccagccgttccacccggcatacaagcttatggagcagccccctttgaagatctccaggtggacttcacagagatgtcaaagtgtagaggtaacaagtatttactagttcttgggcgtacctactctgggtaggtggaggcttatccaacacgaactgagaaagctcgtgaagtaactcg

SEQ ID NO: 6524 - DNA, 2300 bp, Homo sapien
tggtgcagaaactttagggaaagaaaataagagcagcccaagagggaaagtttctcatcctattgtttactaaacatggattgacctgtgctgagtggagaggaaaccaatacaattcctacccgtgggagaagaaaggtcttagaaacatatgaaacaaaacccatttattcatgtaataaatgtttcttgatgccctatcataagtgaagccctaagggtacatggagaagtttaacatggccccatccatccaacacacattcactgagcgtgcaccctaccctcacagggcattcctgctctacaggactgatttaggttcccgaccacatgatattcacatttgtctaggcctttgctcattcacatttcctggagcacttgcctcttcctgcactgccccttcacctggctggctcccactcctccttcaggtctcagcttaaatgccacttttggagaagttttccctggcccctaaatcagggtgagggtccatccctaaacacccataacagtccctctgtccccctgctccttagtcctagcatttaccacattgtgtgagacccgcttgggttacccactatgctcctcacagactgtaagccctgggagggcagggactgtcttattcaccacaggttcccactggcacatggtaggagcttactaaatgtttgtttaggccaggcgcagtggctcacgcctgtaatcccaagacttggggaggctgaggcaggtgtatcacctgaggtcaggagttcgagaccaacctggccaacatgataaaaccctgtctttactaaaaaatacaaaaattagtcaggagtggtggcatgtgcctgtaatcccagctactcgggaggctgaggcaggagaattgcttgaacccaggaggcggaggttgcagtgagccgagatcgggccactgcactccagcctggggaccagagagcgagactctgtctcaaaatatatatatatacattctttttcatatttgtttaatttgttctgggcaccagggacagagatgagtggacatagtccctgcccttgaggggctccaagttcagggggaggcagggtagagacagacctgtggagagagatcctgcagtgccctgtagtgatgggatcacagagatatgagctgtgagaacacaaaaccccaagaaattcactccacctgcttagggaaggctacttggagaagataacatgcgacctgggccacaaaggtgagctgggcttccagaagatgtggaaggacattctaggcacagggaacaaaccatgagtggaaaagcatgtgattgtatccagggaatgagaagggtgcaatgtggcagggccacctagcttatggggtccagctcccaagacccccagccccaggtctggtactgggcctcactggaacacaggcaccctgagcagcctgagaatttggaaccccttcaagtcgatactctgtattttttaatttttaaaaataatttaatagagatggggtttcaccatgttgcccaggctggtctcaaactcctgggctcaagcaatcctcctgccttggcctcccaaagtgttgggattacaggcgtgagccaccgcacccaggctcaaatcaatattcttcagttatttgtccagtatttacttgatggagggcacagagaaacaaatttcagtcattccctcctaatagacagcctgtcccaggtgatactcacattcggagtatccgctgactgggatcattggttcaggtcacaccagcagtgtctgcatcagcaaggcgtcttttttatgttcacataagatcacctgttcctgagtagattacatgtttacatgtcattgacttcaccccataatgttttagcacctcactgccattcataggttacccctgcctcgtaatctagctctgacatagaaggagaagttcggtcccattctgtcctggctccctgccaccccgcttcaggcttcctgtggtttgagtgcaaggaagtgtggattgagggcctgcgcagttacctcctggactggtggaacttcctggatatggtcgtcctgtccctgtacctggcagccttcgcactgcgcctcctcctggctgggcttgcccccatgcactgccgggacgcctcccaagcggctgcctgccactatttcaccatggctggtgagtgtcccttcaattcagccctgaatcccccagttcttctttcttggctcttggctcccagccacagcccccattccaccccgtgcagaatgaagcgagt

SEQ ID NO: 6525 - DNA, 2300 bp, Homo sapien
gtcagccaaggaggaggaagagaggaggaagcttcagcaccccgacctcagagagcgtctccttagattttgtacctttcacacaaacactgagacttagctaaggtgccaggagagattcgaactaaggaggctgtattctgagtcccagttccagctctgacttaccagtgatcttgcaggacttcttaatgctatacttaggatccctgcccaatgactagtttttttttttagatggagtctcgctctgtcaccaggctggagtgcagtggcgcaatcttggctcactgtaacctctgcctctcgggttcaagcgattctcctgcctcagcctcctgaatagctgggactacaggcgcctgccaccacgcccagctaatttttgtatttttagtagagatggggtttcaccatgttggccaggatggtctcgatctcttgacctcgtgatccgcctgcctcggcctcccaaagtgctgggattacaggtgtgagccaccgcacccggcccccaatgactagatttgaatccatctcttggggccttattttgggttccaggtcctgggatgggagaagcaatcccccaaagccagagggtggagagggacaaagcagtgattccaatacatctggtctcgggtcatcccagcaggccaagctgtcctcaggtggtatcttttcaagcaactgcaaacactcaacttcctccagagagtgggcaggcaggatatataggcaaatgctgtttttcaccatgatgggaaacggtaggatgattccttattttagaatctgggagggctttgggatggctagactcatagaagggggcaaaagaacttgtcctggagctgtttttctttctttctttcttttttctttttttttttttttgagatggagtttcgcccttttgcccaggctggagtgcagtggctccatctcagctcactgcaatctccaccttccggtttcaggcgattctcctgcctcagccacccaagtagctgggattacaggcccctgccaccacgcccggctaatctttgttggccaggctggtcccgaactcctgacctcgtgatcctcccacttcagcctcccaaagtgctgggattacaggcgggagccactgcgccctgccctggagctgtttttctaacaagcactcagaagcacctccctccccaccctcctccaagcctggacccaccgtatgtcttcccgtttggtctacagaaaggattctgggagatagcaggattctaggtggaggaaactttttatttggctgacactctgaggggatggggggacagggatggggaaaattaatgagccagaccaggatggattcctttgggtagctctaatctttcgtgcccacctcagccccagcaggcagcatttctcaaatcctagctttcggcgaccctccggccgctgggggaaggaggggtgacaaccccacctcctcctggctctggctgctaggaagctcttccctgagttaccaattcctccgctggccccttctcccatgacctctgacggggcatccaaaactcagagccaggttatttatagataagcccagaggaggtgggggaaaggccagtgtttacaaacatgggtcacctgagtctgagcggccacgagagcggtctgggggaggggcgagaccggaccctgtggatctgcgaccaagggctctgtctctggcccaaccccactgaaggcgaatggggagagggcccagagcaggcagggagtgggcgctgctcagatgctggagcacgtggcccagggtgtgggccaaatgcaaactgtatgcaaatcgcagtgctccgggggcgacctctcggccggcgggacccccgcggggcccctggcctggtgggccggggaccaggggccgaccgggtcagggcccgcctgagggagaggccgagtctcacaagtttcctccccatcactcacagccaaagagggtcccgcagaaagaccccgcaggccttgagaaagggaattgctcctcagtccctgccctggcgcgcccgctcccggccccgcgtgcggcgctgggaaaggggtgtcgggttaccagcgcgggggctacagttagcctcgagaacctttgctttcagccggactccggactcctccggggacagcgcagcgcccgccagagccctcggcgctccctcccgctggcggcttccgcagccttcaagtgggtcctccgcccccggccctcccctctcaggcggagccaaactgcggccccgccttta

SEQ ID NO: 6526 - DNA, 2300 bp, Homo sapien
gcacgaaagattagagctacccaaaggaatccatcctggtctggctcattaattttccccatccctgtccccccatcccctcagagtgtcagccaaataaaaagtttcctccacctagaatcctgctatctcccagaatcctttctgtagaccaaacgggaagacatacggtgggtccaggcttggaggagggtggggagggaggtgcttctgagtgcttgttagaaaaacagctccagggcagggcgcagtggctcccgcctgtaatcccagcactttgggaggctgaagtgggaggatcacgaggtcaggagttcgggaccagcctggccaacaaagattagccgggcgtggtggcaggggcctgtaatcccagctacttgggtggctgaggcaggagaatcgcctgaaaccggaaggtggagattgcagtgagctgagatggagccactgcactccagcctgggcaaaagggcgaaactccatctcaaaaaaaaaaaaaaagaaaaaagaaagaaagaaagaaaaacagctccaggacaagttcttttgcccccttctatgagtctagccatcccaaagccctcccagattctaaaataaggaatcatcctaccgtttcccatcatggtgaaaaacagcatttgcctatatatcctgcctgcccactctctggaggaagttgagtgtttgcagttgcttgaaaagataccacctgaggacagcttggcctgctgggatgacccgagaccagatgtattggaatcactgctttgtccctctccaccctctggctttgggggattgcttctcccatcccaggacctggaacccaaaataaggccccaagagatggattcaaatctagtcattgggggccgggtgcggtggctcacacctgtaatcccagcactttgggaggccgaggcaggcggatcacgaggtcaagagatcgagaccatcctggccaacatggtgaaaccccatctctactaaaaatacaaaaattagctgggcgtggtggcaggcgcctgtagtcccagctattcaggaggctgaggcaggagaatcgcttgaacccgagaggcagaggttacagtgagccaagattgcgccactgcactccagcctggtgacagagcgagactccatctaaaaaaaaaaactagtcattgggcagggatcctaagtatagcattaagaagtcctgcaagatcactggtaagtcagagctggaactgggactcagaatacagcctccttagttcgaatctctcctggcaccttagctaagtctcagtgtttgtgtgaaaggtacaaaatctaaggagacgctctctgaggtcggggtgctgaagcttcctcctctcttcctcctccttggctgaccagagtacaggaccacagccagtgaggaggcagttgtcccagcctggatccccagtgcttcagtccacctcctctctggcttcagggattcccttttttgtgggaaatgtagcaggaagagcctcagacaaaacccctcagatgctgagttaaagaaggaaggggtttattcagctgggagcatcggcaagactcctgtctcaagagctgagctccctgagtgagcaattcctatcccttttaagggctcacaactctaagggggtccgcgtgagagcgtcgtgatcgattgagcaagcagcgggtacgtgactgggggatgcatacaccggtaattagaagggaacagaacaggacagggatcttcacagtgcttttttatacaaataaccgattaggtcaggggtcaatctttaactgccaggcccagggtgtggcgctgggctgtctggctgtctgcttgtggatttcatttctgccttttagtgtttactttggaggcagaaatcggacataagacaatatgaggtatggtttcctcccttagaagaacactgggcaggtcagactgggcagaggctggtgttcctgagccctgaggagacatccagaaatagatgggggcgtgtcacgtttctgagcagctgtgtgggggaggttcaaggggtggggactaacaatatcaaaaagaaacttgtcctcccctctcctggtggccatggtggagatcagcagcagcttccccacccaggacaaggcctaggtaaggagtgcaccactctcctcctgggtgctgggcaggaaaagtggttttgaggtgaaatttgggagatgaacggtggaattttaggagtcatgagaaaaagtttccaggaaactttgatgaagtttgggatacctaggaaggttgg

SEQ ID NO: 6527 - DNA, 2300 bp, Homo sapien
gagtcactgaactatccaaacttaggtctccccagagccagaggagatgataaagcagcgacgcttaacctaaatgagattgggggcagaggcataaccaccttgatatttatgtaacatttgtgtgaaggcgcatatattcattttctgaagggaggtttcagcttttatcagattccaaaacataaagacccattgactatattaccatttgtgtacagaaagaaaacagaggctgggagctgtggctcacgcctgtaatcccagcactttgggaggccaaggtgggtagaatgcttgagcccaggaattcgagatcagcctgggcaacacggcaaaaccccacctctacaaaaaatataaaaataagccaggcatcgtgatgtgtgcctgtactcccagctactcgggaggctgaggcaggaggatcgattgagctcaggaggtcaaggctgcagtgagctatgattgtgccactgcactccagcctgggcaacagagcaagaccctgcctcaaacaaacaaacaaagtagataccatttttcctaccagttaaatggaaattaaaaagagatcaatcatattcagcactggcaaagatgtggaataaagggcactctcatccattgttggtggggtggcagtttctgtcaaaataaaaaatattcatattctttaaatctcattttacttctcaaaatctttcctataaaaacatgcacacacatagagaaggatttatatacctaaatattcactgtagtattatgtataatattttaaaattagggaagaaacctaagtgttcataagtatgaaatggttaattatggtttataccatgagataaaccaagctgccattatgtgagcagggagatatttatgtactgacatggaaggaagttaatattttttttctgaggaaaaaaggtaataaaatgtgtatgtgtaagcatgtttcctttcagttcttaaaaaaatgacaataaggccggcatggtggctcacacctgtaatcccaacattttgggaggctgaggcgggcggatcacctgaggtcaggagttcgagaccatcctggccagcatggtgaaaccccgtctttactaaaaatacaaaaattagctgggtgtggaggcgggcacctctagtcccagctactccggaggctgaggcaaaagaatcacttgaactcaggaggtggaggatgcagtgcgccgagatcacgccactgcactccagcctgggcaacagagtgagacttggtctcggaaaaaaaaaaaaaaagagagagaaagaaaaaaaaggaaactgcctgctccaatccagacccaatgcctggacaccctcttcctggaaccacttcgggcactccgcctgtcccccagcaaagagggtgtggaaggcttgtggttcctgctgcttctcttagggaaactggtatcctctgtcttctcctgctcttctgatcccctcttcccccagcacccggggtttatatctgtccctccctggaagcaccgaaggctcattccacaagaggactgcagggagtgggggcaactggtggaccaagccctgctctaagtctgtccctggagatcctgctaaggccccaccagctgaacactcctggatctgcccctgtcccaaaacccacaacccctgcgaggtgaagcccaggtctctcactgtggctgtcaagtcctttcatgactggcccatcttcccaacgttcctaccccgcaagctctgccagcctagatgacatgtctttctctctttacatcctcagttcccacctccaatacctttgctttttccattcctgctgcacaaaagtcctttcccacccaaacaccagtcttttctctcccagtctccacttgctgacatcttagtctcctgttcatcctacaagacctgttcacgtcactcctccaggaagtcactcatgttcctttcagcaagaagggtcctctctcttctgagcctccatgtctgtcttatgactctcagtgccaagcactaggaatggcacagactaagtgtcgattcatgtttattaaactatacagattaacactgcaattttccagatgaggaaactgagacccaaaaagagacagcaactggcccagggtcaccagcatgcagatgcctgctatgatgtctctgcttcttgtgtctgtgggcctcatggaagcacttcaggtatgggcatcccccactgttcccaccccagcagggaactgagccatcggcttcttctgaaccctggagggagaaagagagag

SEQ ID NO: 6528 - DNA, 2300 bp, Homo sapien
acataaaacaggaaccagttacctcaacattcgatagatctgtggaatctacaacattcaaataacttattttctcaacagaacccaaagttaacagaggtctggagaattaaatattggaataattaagcaaaggcctgcagagtatctgctctttttagatgtttcatctttagctcagttttgttaatttgtatttccagaaaattgttccagattttttgttattcaaataaccagtccttagacgtattaatcaattttactggagttctgtataatcttaatttctgctttaaatgttcatttcttaggctttcctaaggatttgttaaaccttgtattggttgggcacgatggctcacgcctgtaatcccagcacctcgggaggctgaggagggagaatcccttgagcccaggagtttaagaccagcctaggcaacatagggagaccttgtctcttaaaaaatgaacaaaaattagctgggtggtgtgcacctttagttccagctattcaggaggctgaggtggcaggatggctgtagggtattttggtagttgttctttaacaagttaaggacagttcccctctactagcttgaataagtgaatgttggatttcaatttgaaatgatgtgaaacgcttgtgtgttaggaaggtggttggagataagcagagtacctgggagaggggacgggtggagaaagtgcagggaatcactggcatatccacgatgcccaaagtcatggctatggatgtgattgccagggaagtatgtgctgctgttggtcaggcaactggtcagcttgaacaaaaataatcaaaactctgtgcatgataaatacctgtgacctgaggatagcctggctaccttactgggaccacagtgtaaatattgttgatgacctgctgtaccttaggcaccgtgctagacagtgccttgcactatcaggttatctcatttaaatccttgcagttttcaagatgagtactgttaatcccattaccagattgagagaacagaaacccagagagtttaaatatcttacccaagtgagagcgctcataagacagggccgaaagtgactgaatgcttgccctcttctcccacactgcccacagtgtttgggcaaggtgaaaaaacaggctcagatgggaatgactgcagggagtctgaggagaggatgtgggctccatcttctgctccactgggtcatctggagtggcctgaggctcagcactactcccaccaggagggaagggcttgcttgacccaaagtgcctagcctggagtgtctagtcccgcactgcaaggagagctgcaggtctaaggcaaacctccacctccagaattcaggcaatggtggctaagatgagaggacagttatccatccactgaccctggcccctcacactcttaagccctggtcttccacataccctgacccagcatacctgtactctccaacacccgaggatgggcctgagctgagtctgtgtgctgctttacagagtttgaataattcaagccccagaggcccgaggtatcagtttccgttgctctgttgtcataggcacggtgtaattaagctaatgaaagggcagagagggaggggctgtggtcctgtgcctcggacgactctgggctgatcaagggaggagtccctggtccctgttctgctgagagagcagcaggcccatctagagtccaggtgtggggaatggaagaaggaaggaatgagggatgaaacagaagtaggagaaagggagagagagtggaaagaggcaggcaggggatgatcagagtcagggaggcagagagaccaagaaagttacagacggaaagagaaggaagcagaaacagagtgaaagacaaagcaggtggggagcataggaaagggcagaggcagaggccagaagaggcaaggaccagcagagaagaagaaagaccaagtactaaaatccaggggcaggcacaaattggagggtcagaagactggaggggctgcagggctcgctggagggtggctggacccaccagagatctgtcttacttctgacttctaggtactgtccacaccatccttgccagctgggcctaattttgccctaggtctggccaggaggcctcacatccagagacctgcccccgctcttgcagtgccagggccatggggctccggagccaccacctcagcctgggccttctgcttctgtttctactccctgcaggtatgaagctcagtacaccagccctggcctctcctggtggtgctactattcctgttctcccaaaatc

SEQ ID NO: 6529 - DNA, 2300 bp, Homo sapien
agtatgttgcagttacttagatatacttcaacaaaatttacatatagggcattctaggcacttaaccatagtttcatagtaattcccttcccccttgtccacttattagatgatatcttacaggtttgaagtctgtttgtgtgaatagaataaataaaaccttgatccttagcattcttcgtaaacatacgacgagtcccttaggtctctaatctggttatttaacgaaatcctctcatgttatctgaaacagtgttcaaggtaagcatctcttgctattagcagtgttcctttgttgagtagtatagtaaattggaaccactctccccctccccattttttctttcctcccactcactctccttatctttttatagtttactgctttctctaccatgtgtcaagcactgcattaggtaatagaaataacgaaataaataagtgttgaacttagtgatgtgctagacacagaaaacagccataaaccattttatcaagccttcacgacctggcctattttatttatttttctttttgagatgggagtttaactctcacccaggctggagtgcagtggcacaatcttggctcactgcagcctccacctctcaggttcaagcaattttcctgcctcagcctcctaagtaactgggagtacaggcacacgccaccacacctggctaatttttgtatttttagtagagacagggtttcttcatgttgaccaggctggtctcgaactcctgacctcaggtgatccactcacctcagtctcccaaagtgctgggattatgggtgtgagccaccatgaccagccactgttcttaaaatttaagtgggagccctgggtgtcattaccagggctttttcctccttcaggattttttttttttttttgagacagagtctcattctgttgcccatgctggaatgcagtggcccagtcttggctcactacaacctccattgcctcccgagtagctgggattataggcatgtgcctgtaatcccaggcacatgccactacatcggctaatttttatatttttagtagagacagtttcaccaccatgttggccagactagtcttgaactcctgacctcaagtgatctgcccacctcggcctcccaaagtgctgagattacaagcttgagccatcaaacccagtctagaattttttttggtttgaaaatatttcaaatattggcttagtcatttgctaacattttaggatataggtaattgaatttgtactgtaccaattaatttacagtgtgtttcagctttgagtgtttacccttttaaatcatagactgttagtcatagttgtctttaaaactgcttaataaatgtaaatataactcttgacatttttaaacataaagggattcttcccagattaaaattgttcctaatattattactttgttttttggaagagtagatagtgctcgtatcttacgtggtactgcacaagtagagaccagctaaccttaggattcagtaacccaaaagttaaattccagacccaagattgtgttgactagaaatttatttctaaatgtttttaagaaaaagcaaagttactggagactttgatatttgtaccttttgttctttttttccaatgtcttctggcagtgttaggaaaaggtgaccctgtgtaaatcagaaaattgtagttgctagctagatcaagtaaagcataatctttgtctctgaagaccaccatttgtttcaccatgggtgctggtttaggtcccagacaccaggtcgtaatattagaatgggatgactacatgaatccttatttggatcaaagtactggtttatcttggggtaattgattttaaatcactctagcaaatctgctaccttacctcaccatagaatgggctgaatctaataattgttgtatcatattctgaataaagtaaatctgatttagaatctatttctgtttggtataatttaatgctgctttcctgatctttctgctgtctacagagccagagcccagaggtggagcagttagggagggttgtggaactggacagtgacatggtagatatcacccaggagccagttttggataccatgttagaagagagcatgcctgaggatcaggaacctgtgtctgcctcaacacatattgcatcttcactgggaattaatccacatgtcttacaggtgaagttctaacccaccttttttgtaacagaaagccaaactaatattttatctccattgcataggatcaggtctcttccttggttattaagatcattgagtgctcact

SEQ ID NO: 6530 - DNA, 2300 bp, Homo sapien
ggcaagcaactggacaacaaagataagatgaaaatattttaccagcctaattaaaaaaacagctaaaataaaaatgatatgtgctataaatagaaatatcaaataagtgttatggaagcttgcagagaagagaatgccaagaaaagcttcccagaagagggtgatgcctgaactgagaaaatgtcacggaaaacataccctgttcacgctttactatttagactacggttctcttctgcactactagttctgagtttatgctttgtcatctatacaagaacaaagtaacaatcttactgatgtgtacagaaccaagtgtcaactaattcaatttcatcaaatctgaagagtcaaaaagaataattttacccaagtatttcccagtacctttatcctgtccaacctctagttttggtttttaaataccctaacttcctccaccaggtaaacatactgtaacccagttaactcgagtttcttttcgaatttgtaagaccgtcacagggaatgatcactgctctctttttgctctttattccagttagcttcttcctccaaaacggagttttatttcctcaccttattctactataatacttcactttgaattctgtacctgaaaggagccatgagttccgaggtacaactactacaaacggactcctacctggctttctaagtcttatcaatatttcctgctttctattccagtactgttataaatccctaactgactccgagtcctcatcagctgacacaagtcaaaaaattcagatttagaaagggaaacaatggcttgtagttttaccgatttgtttccgatacataacaacgctgacgttctttaaccatcttctaagtttagttctcaagctctaggttagggtaccactaacgaagcttccaccttacccgtgaacagagctggtagcaactaaacggaaaacgctgtgaagactacatctacgtttagctacctaatgtccatgccgcaccgacctcctaaagggaattcttaataatgggagactgaaatatccagggagggtgaggtagtagaaaactgtttagactgtcaaaaatctggcattggctaatcctgcctgttactccgggcctcggtttccccatctacaaaactgatgtaaggtagggggattgacttaaacaatttctaaagtccttatggctatagtaatccagaaactcaatctgtctcctcatctggctttacactgaacacgtgggaaaatagaaaagaaccttttgctccaccgaaccgactcctattctcagatattatcttaaaaatctcccaaacttcggactcaccctaatcctcggggtgcccacttcccttatggagaagccaaggcaaataaagcccagtcccacatgacggtcaaggaagtgcggggcagaccgtattcagggtttcaaggcgctgaccccggaaaggccagcccaccgtggggtccttacaccactgaatgaatgagtacaaccagacagacacccactcgcgtgggcagcaactggagacctccaggcctagaccccactgatgtccattctctcccagggcctccaaagccgggcctcccgggctccgggcccccgggtcctcagcaccgcccctctctcaggccagaaggtgcgcgcagcggcgctagacttcgaagcggagaggccctgagacgccccgcgcgtccgcccgcccggaaggggggagaaacctgccggtctcggccgctgcagctcgggctcccgacttaccgcggttcggtggggaaggggaagtgtcaggagtcccctgctgccacccgccgctcacagagcagcgcgcggcccccacgaaaccgtcgccgccgccgctaccacccctgccaccgaccgccgcttcgggcgcagcgcgcagagggcccgactgcgtcacacgccgcccggcgtcagaggctcgttgcggacgctccgccctcgccgtccgcgaattggtggacgcggccgccactctgggtcgaccctgttattcattgggcaacgcgtcttttgaaaccgaactgaagggggaaggggcgagagggaagaggaggggcagaaggagttcggggaggcacagggtaggagcggtgagagggccgtggagtcccgcccctcgccgccgcggttggcgggagcgtgtcgtgacgtcacacagggcctctcgaagtgggcttgtgaatggctagattgggaagcaccggcggggtgtcgggaagggtggtgacgcaacatagagactccgcccccttccttggagc

SEQ ID NO: 6531 - DNA, 2300 bp, Homo sapien
gaaaacataccctgttcacgctttactatttagactacggttctcttctgcactactagttctgagtttatgctttgtcatctatacaagaacaaagtaacaatcttactgatgtgtacagaaccaagtgtcaactaattcaatttcatcaaatctgaagagtcaaaaagaataattttacccaagtatttcccagtacctttatcctgtccaacctctagttttggtttttaaataccctaacttcctccaccaggtaaacatactgtaacccagttaactcgagtttcttttcgaatttgtaagaccgtcacagggaatgatcactgctctctttttgctctttattccagttagcttcttcctccaaaacggagttttatttcctcaccttattctactataatacttcactttgaattctgtacctgaaaggagccatgagttccgaggtacaactactacaaacggactcctacctggctttctaagtcttatcaatatttcctgctttctattccagtactgttataaatccctaactgactccgagtcctcatcagctgacacaagtcaaaaaattcagatttagaaagggaaacaatggcttgtagttttaccgatttgtttccgatacataacaacgctgacgttctttaaccatcttctaagtttagttctcaagctctaggttagggtaccactaacgaagcttccaccttacccgtgaacagagctggtagcaactaaacggaaaacgctgtgaagactacatctacgtttagctacctaatgtccatgccgcaccgacctcctaaagggaattcttaataatgggagactgaaatatccagggagggtgaggtagtagaaaactgtttagactgtcaaaaatctggcattggctaatcctgcctgttactccgggcctcggtttccccatctacaaaactgatgtaaggtagggggattgacttaaacaatttctaaagtccttatggctatagtaatccagaaactcaatctgtctcctcatctggctttacactgaacacgtgggaaaatagaaaagaaccttttgctccaccgaaccgactcctattctcagatattatcttaaaaatctcccaaacttcggactcaccctaatcctcggggtgcccacttcccttatggagaagccaaggcaaataaagcccagtcccacatgacggtcaaggaagtgcggggcagaccgtattcagggtttcaaggcgctgaccccggaaaggccagcccaccgtggggtccttacaccactgaatgaatgagtacaaccagacagacacccactcgcgtgggcagcaactggagacctccaggcctagaccccactgatgtccattctctcccagggcctccaaagccgggcctcccgggctccgggcccccgggtcctcagcaccgcccctctctcaggccagaaggtgcgcgcagcggcgctagacttcgaagcggagaggccctgagacgccccgcgcgtccgcccgcccggaaggggggagaaacctgccggtctcggccgctgcagctcgggctcccgacttaccgcggttcggtggggaaggggaagtgtcaggagtcccctgctgccacccgccgctcacagagcagcgcgcggcccccacgaaaccgtcgccgccgccgctaccacccctgccaccgaccgccgcttcgggcgcagcgcgcagagggcccgactgcgtcacacgccgcccggcgtcagaggctcgttgcggacgctccgccctcgccgtccgcgaattggtggacgcggccgccactctgggtcgaccctgttattcattgggcaacgcgtcttttgaaaccgaactgaagggggaaggggcgagagggaagaggaggggcagaaggagttcggggaggcacagggtaggagcggtgagagggccgtggagtcccgcccctcgccgccgcggttggcgggagcgtgtcgtgacgtcacacagggcctctcgaagtgggcttgtgaatggctagattgggaagcaccggcggggtgtcgggaagggtggtgacgcaacatagagactccgcccccttccttggagcgccgcgactcgggctgagggagctcgggccaatcagagggacggccccagaatggcatggtaactattcgaccctttccttgccccggtccgccggcgctgctgggaaggcttcctagtctctctgcccgcacttcccgcccagaccacgtgcggagcctgagggccctcttggaaggtctgtctgtc

SEQ ID NO: 6532 - DNA, 2300 bp, Homo sapien
tcctgggttcaagtgatcctcctaccttgaactccccagtgctgggattacaggcgtgagccaccactcccagtctcccattttttaaacaaacaaataaatcaattatctctaatcccttgccatcaccgaaaacccagatggctttaaactcatttacattttaggtaaaagcccagttcaattttgcattcatgtctcacaaaggagtagtggtggaggttttttaaaaattttttttgagatcactctggagcgcagtggcaggatctccactcactgtaatctccgcctccctggttcaagccattctcgtgcctcagcaaaccgagaagcagctgggattataggtgcccaccaccatgcttgaccaatttttgtattcttagtagagacagggtttcatcatgttggccaggctggtctcgaactcctggcctcaaataatctgcccgcctcagcatcccaaagtgctgggattacaggcatgagccaccagcccggccagtatacgctttgctttctgcgcacagttcctgctatgagactctcagtcactaaacaggtctagtttctagaaaatgcccacctttcactcttgtaatatcagttttctgctaatgggctaggccccagaaggacttccaagaagagcccaaggcacagaaaaccgagggtaaataataggatacaaagtgacaaggctttaacagaggcctgcccaagcattagctcaactcgctgtgaaagcttggcaaatgtatcactgagaagatgggaacatttgaaatacccgtcctttaagaataagtaggggttcggctgggcgcggtggctcacgcctgtaaggccagcactgtgggaggccgaggcgggcggatcacctgagttccggagttcgagaccagcctggccaacatggtgaaaccccatctctactaaaaatacaaaatcagctgggcgcggcggcgagtgcctgtaatcccagctactcgggaggctacgacaggagactctcttgtacctgggaggcggagattgcagtgagccgagatcgtgccactgcactccagcctgggagaaagaggagacagagcaagactccatctcaaaaaaaaaaaaaaaaattagttcatgggcgaggtggctcacgtctgtaatcccagcactttgggaggccgaggcgggtggatcacttgagatcaggagttcgagaccagcctgaccaacacagtgaaatccccgtctctactataaatacaaaaattagctgggcctggtggcggacgcctgtaatcccagctacttgggaggctaaggcgggagaatcgcttgaacccgggaggcagaggttgcagtgagccgagattgcgccaatgcactccaccctaggcgacaacgcgagacttcatctcaaaagaaaaagaaaaaaaaagaattaggggttctccacgtgcagctgggaaagacgttccaacaatcctcatttgtaccaggccctttggtgggccagtcccttagggcatctctaatgctcctaatgtccatcctagaaattcagggagggaaagaaagtgctggggcgagcatgggtcaggagagaatagggtcaggatttagggccctgaagaagcctcgggcaaactctttggacagacagaccttccaagagggccctcaggctccgcacgtggtctgggcgggaagtgcgggcagagagactaggaagccttcccagcagcgccggcggaccggggcaaggaaagggtcgaatagttaccatgccattctggggccgtccctctgattggcccgagctccctcagcccgagtcgcggcgctccaaggaagggggcggagtctctatgttgcgtcaccacccttcccgacaccccgccggtgcttcccaatctagccattcacaagcccacttcgagaggccctgtgtgacgtcacgacacgctcccgccaaccgcggcggcgaggggcgggactccacggccctctcaccgctcctaccctgtgcctccccgaactccttctgcccctcctcttccctctcgccccttcccccttcagttcggtttcaaaagacgcgttgcccaatgaataacagggtcgacccagagtggcggccgcgtccaccaattcgcggacggcgagggcggagcgtccgcaacgagcctctgacgccgggcggcgtgtgacgcagtcgggccctctgcgcgctgcgcccgaagcggcggtcggtggcaggggtggtagcggcggcggcgacggtttcgtgggggccgcgcgct

SEQ ID NO: 6533 - DNA, 2300 bp, Homo sapien
cccaaagtgctgggattacagatgtgagccaccacgcccccgcgagaccttgttttaaataaataaataaaaccattttatagacgaggaaacagaggctcagggctatatggagaattgcccatatttcccaaatcaccagagaattaaagaattaatctaaattagagcacctcaaggtttgggcattgggggtagtctagaggcagggagaggggacccagcctcagggaatggtacttagggccaagagaacagacaaggtgtcaagatagggaacaatagccaggagcagacacccctggttggagctagacaaagaggatgacatgaagccccaaggcagaaaacctgaatctagttgccaaatttggagagaggtagttctttttgtaaagttttgctagtccatttgtcctgggaccttaaagaacaggataggggagaactcaaaatcaagaaaagtagtttttagaacaagacactctgagtgcgcaccttctccagacttcggagcccctcagagtgcgtctgaggtatctctgggtcctccaccattgctccacatgaggcctgtcaaagagagggcctagactgggtgaatgaacaaaagtgaacacatgaaaaagagctctggcaaattaatcaacaaatgctaagtggcattaacagcatatagtggattatgtgaattatctcaggtaccagacttgagtcctggttctggcatgtattagctgtgtaagtaggtaacttggtttccctgttttccattgtaaaatgaggatattaaatagtatctactggcggaggctcatgcctgtaatcccagcactttgggaggccaaggcaggtggatcacctgaggtcaggaattcgagaccagcctgaccaatatggcgaaaccccatctctactaaaagtacaaaaattagccgggcatggtggtgccgcctgtattcccagctacccgggaggctgagataggagaattgcttgaacccgggaggtggaggttgcagtgagccgagatcgtggcactgcactctagcctgggtgacagagtgagactctgtctccaaaaaaaaagagagaaagaaagaaaaaaaaaaggccaggcgcggtggcttacacctgtaatcccagctctttgggaagccaaggcgggggcagatcacgaggtcaggagtttgacaccagcctggccaaaatggcaaaacctcgcctctactaaaaactacaaaaattagctgggcgcagtagcgggcgcctgttaattccagctactcgggaggctgaggcaggagaatcgcttgaaccctggaagcggaggttgcagtgagccgagatcgtatctattttcacaggtttttttttttttttttaatggagtttcgctcttgtcgcccatgcttgagtgcagtggtacgatctcagctcactgcaacctctgcctcccgggttcaagcgattctcctgcctcagcctcccaagtagctgggattacgggcgcccgccaccgtgcccggctaatttttgtatttttagtagagacggggtttcgccatgttggccaggctggtgtcaaactcctgacctcaggtgatccgcccgcctcggcctcctaaagtgctgggattacaggcgtgagctaccgcgcctggccctcacagggtttttatgaggattaaataaatgagataagaagtaagagtgcctgggatatactgggtgttcagaatgtgttattgctgtgaggatttaagtggaaaagtgcgatgttaggtatggctaacttagaggtcctccacccgctgcagatgctctgactacccaccagtgtgcttgcaggaggaattcttggtcccttcaccctccttccctgttgggctgggatggtctttgcaaagggagccaggggtccccctcaagttctttcatgggtcagtcatggtcagggtagggagggaactctggcagctggttttgggggatcaatcctctcattgtggggagacccaaggctggtggctggaaatcctttctgcgctacgtaggacagggcgccctctcctgaacaaaggcgggaacagctctaggccagagtttctgggatgtgcctcaccgggtctcactgcctgcaaaggtgctcttcccattgctgaaatgtccccaaccgccctgacgagcaaagtttgggggaggggcgccagggctgggaggaaactggcttaatgtttcagaagggcgaggctggatagttcggttagaatggaggtgcgaggcaggagagacgggcg

SEQ ID NO: 6534 - DNA, 2300 bp, Homo sapien
ggagcccctcagagtgcgtctgaggtatctctgggtcctccaccattgctccacatgaggcctgtcaaagagagggcctagactgggtgaatgaacaaaagtgaacacatgaaaaagagctctggcaaattaatcaacaaatgctaagtggcattaacagcatatagtggattatgtgaattatctcaggtaccagacttgagtcctggttctggcatgtattagctgtgtaagtaggtaacttggtttccctgttttccattgtaaaatgaggatattaaatagtatctactggcggaggctcatgcctgtaatcccagcactttgggaggccaaggcaggtggatcacctgaggtcaggaattcgagaccagcctgaccaatatggcgaaaccccatctctactaaaagtacaaaaattagccgggcatggtggtgccgcctgtattcccagctacccgggaggctgagataggagaattgcttgaacccgggaggtggaggttgcagtgagccgagatcgtggcactgcactctagcctgggtgacagagtgagactctgtctccaaaaaaaaagagagaaagaaagaaaaaaaaaaggccaggcgcggtggcttacacctgtaatcccagctctttgggaagccaaggcgggggcagatcacgaggtcaggagtttgacaccagcctggccaaaatggcaaaacctcgcctctactaaaaactacaaaaattagctgggcgcagtagcgggcgcctgttaattccagctactcgggaggctgaggcaggagaatcgcttgaaccctggaagcggaggttgcagtgagccgagatcgtatctattttcacaggtttttttttttttttttaatggagtttcgctcttgtcgcccatgcttgagtgcagtggtacgatctcagctcactgcaacctctgcctcccgggttcaagcgattctcctgcctcagcctcccaagtagctgggattacgggcgcccgccaccgtgcccggctaatttttgtatttttagtagagacggggtttcgccatgttggccaggctggtgtcaaactcctgacctcaggtgatccgcccgcctcggcctcctaaagtgctgggattacaggcgtgagctaccgcgcctggccctcacagggtttttatgaggattaaataaatgagataagaagtaagagtgcctgggatatactgggtgttcagaatgtgttattgctgtgaggatttaagtggaaaagtgcgatgttaggtatggctaacttagaggtcctccacccgctgcagatgctctgactacccaccagtgtgcttgcaggaggaattcttggtcccttcaccctccttccctgttgggctgggatggtctttgcaaagggagccaggggtccccctcaagttctttcatgggtcagtcatggtcagggtagggagggaactctggcagctggttttgggggatcaatcctctcattgtggggagacccaaggctggtggctggaaatcctttctgcgctacgtaggacagggcgccctctcctgaacaaaggcgggaacagctctaggccagagtttctgggatgtgcctcaccgggtctcactgcctgcaaaggtgctcttcccattgctgaaatgtccccaaccgccctgacgagcaaagtttgggggaggggcgccagggctgggaggaaactggcttaatgtttcagaagggcgaggctggatagttcggttagaatggaggtgcgaggcaggagagacgggcggatgagaaagaaatccggcccctgttgaattaattttgtgttctttcaacaggtagatggaacgcagctgagaggtaaggcgacaaggtggcttatccaacatgctcaaactcaggtatccagagctcttccggctgccctcacgcagccgaaattagtgggggcagacccgggctgtaaagcatggtttgaggacacgccagattgaggaggagagccaggggtcggggtctccagaagcggggaggagccagcggaggatctgggcgcagtttcctctctaagttccgccccgagagcgccggccccgcccccgccgttcgcgctctgaccagcccgcagagccagcccccgaccccgggccacctgggcccccgggttccgccggcactctcgccaccaccgcgtgggtgagtatgggcatggatgtgctgggctgccgggcagccccactcgggagcttggccgcgcggtctggcctctgcagggccgggccccacgctgtgggagtc

SEQ ID NO: 6535 - DNA, 2300 bp, Homo sapien
atcctcctgcctcagccttccagagtgctaggattacaggcttgagccactgtgcctagcccaagctttttctttccttctttccttctttccttcttttctttctttctttctttctttctttctttctttctttctttctttctttctttctttctttctctttctttctttttttctttttttccttctttctttccttctttctttcttttctttcttttcttcctttccttccctttccctttcccttgccctttccctttccctttccctttcctttcctttcttttcttttctttttgaggcagggtcttgctctgttgcccaggctggagtgcagtggcacaatcttggctcactgcgacctctgcctcctgggttcaagccattcttatgcctcagcctcccgagtagctgagattacaggcatgcaccaccgtgcctggctcattttttgtatttttaggagagatggggtttcactatgctggccaggctgaagcttttacttatagtgagtatgtacttactttccggtgagtctctgccttggccctggctctgctttgccgtagaactattctctcctcgtggcttcaggtcagccctgtagagacaagaagacagtaatgaggggccttgagtctgtcttcttctttttttttttttcttgagatggaatctcgctttgtcacccaggctggagtgcaatggcacgatctcggcttactgcaacctccgcctcccaggttcaagcgattctcctgtctcagcctcccgagtagctgggattacaggcacaccgccaccatgactggctaactttttgtattttagtagtgacggggtttcactgtgttacccaggctggtctcgaactcctgacctcaggcaatccagttccttcaggcaaccttccaaggaaatggtttccaggctcttccctatcctgaatgtaccgttgaacttggcccagtttgtcactgttctctgctgggccttgatttgggtatagaactccaggtggcctgggcagtacaggcaaaagcaggactattcattcttattcctggctgttagacctctgttgaggcagcctgagctgctattagctgtttctgcacaggtacaggctgaacatcgatatctcatattcaggcttgttgagatctcttttgtatcctgcttctgtcatcataggatttagccatttctccagtgaggcccaacaagccctctcagtcctgctctaacaaaaaacggccagacccctttttgctttctctctttcccttattggaaacctgcctatgaccctggatacaactctcaggaaggtccctgcccccatcactggcaaagaagctactgccagctgacctcagccactatcacttcttccctttgcagagtgttctaggatttatgacatatgcttgttgatcctgggaaggatgtgtgcctgggcaggcgtggagaattgggtactgtgggcgggagggcaggccctgaggagcagggggtgggatcctccagtcttagaatagtcccagtctggctacaaccttcaacccaagacccggattcttcagcaccgagtgtgagtgttccttcatgaggcccccaccccattcctgggtctccttagtggagggaagtatgagtgccgaggggagattgggtcctaggccttttaatatcaagccatctctgtctgcctcagcttgatccagagggaagcccagcttgaggggtcaaggtgtttgggcagtggggttgtgagggggagttgtcggccaggagggagaagagattggaagaagctcagttccctgggtctgggtctgacctggacagagatctcctgggtctggcccaggacagcaggctcaagctcagtggagaaggtttccatgaccctcagattcccccaaaccttggattgggtgacattgcatctcctcagagagggaggagatgtaggtctgggcttccacagggacctggtattttaggatcagggtaccgctggcctgaggcttggatcattcagagcctgggggtggaatggctggcagcctgtggccccattgaaataggctctggggcactccctctgttcctagttgaacttgggtaaggaacaggaatgtggtcagacagggtcagtgggagggctttggccattctgagccaacggtcctttgttagttggcctgaaagaagccatgacttagaacctgaagctgtcaggtggcaagaggccttagtcctggtgtttgatcctggcatagttc

SEQ ID NO: 6536 - DNA, 2300 bp, Homo sapien
accagctacacatgctattgaccacttgaaatgtttccagccaaattgagacaaattgtaagtataaaatacacaccgcatttcaaagacttggtacaagaaaagaatgcaaaatatccagttaatttttataaccagtaatttttatgttgattaccatgctaaaagataatattttgaggccgggcgcagtggctcatgcctgtaatcccagcactttgggaggttgaggcgggcagatcacgaggtgaggagttcaagaccagcctggccaacatggtgaaatcctatctccattaaaaatacaaatataagccaggcatggtggcacgtgcctgtaatcccagctacttgggagactgaggcaggagaatcatttgaacccaggaggcggaggttgcagtgagcagagaccgcgccactgcagtccagcctggtgacagagcgagactccatctccaaaaaaaaaaaaaaaaaaaaaaaaaagataatactttggctatggctaagtcaaatatagttaaaattcatttcgtttctttttactttttttgaaatgtcattaatagacagttttaaattacttacgtggttcctatttatttttttaaaaatataagtaggctgggtgtggtggctgacgcctgtaatctcagcactttgggaggccaaggcaggtggatcaactgagatcagtagttcgagaccagcgtggccaacagggtgaaaccccgtccctactagaaatacgaaaattagccgggtgtggtgacatgcacctgtaaccccagctactcgagagactgaggcaggataactgcatgaacctgggaggcagagattgcagtgagccgagatcgtgccactgcaccccagcctgggtgacatcgtgagactgtcaaaaaatatgtgtgtgtttgtgtttatagagacaaggtttcaccatctctgtaattacaggcagacgccaccgcgccagactcttagggtatgatatttttaaaagatatttgtttagtgtttgagatacgcattgacaacaggtcttttacacccattctcatgttatcttcaaaactacggggtgaaatataattattctattttaccaaagacagatttgaggctcagaaaggttaagctatttattcctggaatcaatccgtttatttgaaaagcttctggaagacagggatcctgtcttaaacgctgtgtttcttcacagcacctagcacttagctctctccacgtggtaggcgctcagaaactttgtgctgaacgaaggatatggattctcaagtcaaagctccgagcgcaaagccagggagcgaagcaccagagggcgcccatgagcccgcccacccgcgggtcgccggggcccaagctggacctcaggcctgggtgcggctcttcagccccaagcagctgcgcgccccagcagaacagggggcgagggggcgagggaagccccaagtcctccgtccgccccgccccctccccagagccaggcctcgcagggctgcacggtgctgaatgacgactcgacatcctgtttttggggcccgcggctccgcctgcgcctctgctgatcttgtctttcccttgggtgctgacgccagctcctcttccccccgagtctccccaccctccccaggggtctggggccttcccactgctgaatcaccaccacctcgcactcccccggggctcagggcaggggcggggactgccccagcctcggccaccactctatccctggggttgactgaagggaccaggcccaggggcgcctttctcagcatcttcccgcggaggctggtgggggcgggatggggggaagaggacgaacgcctagcgcccagggtagggcctccaggggtagggtggccaggaggaggcggagagacttgaccttgggaggcctgacttactgaccgcaggggcagcggactgggaggggaacgtggcaagcccgggactgggccgggggcgaggctgggggcgggccggggctggagagggggagatcggccctcggacttcctggtcgggccccgccccggcccgccccgcctcgccggcccgccccccccacttcctccggcctcccgctctcacttccttctcgagcccggagccgctgccgccgcccccagctcccccgcctcggggagggcaccaggtgaggcccggccggggctggcgggtaggggtccgggggaggagagcccggccggcccaggactcggcgcgggcgccggctcatgagtttgctggcggaggccgcgggcgggagcttc

SEQ ID NO: 6537 - DNA, 2300 bp, Homo sapien
aactcatgggctcaagtaatcctcccactttggcctcccagagtgctgggattagagatatgagtcactgcacccagccccatcttctcttaatgacactccagcaatactaggcccatctttctgcctgctctccacagtccccaccactccgtattactcctacctacttttcttaattgaattacctacctgcccattttgccatttgaatttaagacccctggctcagagaataggtctaggagaacctaggtagggtttcaactgttctggtcaattttccaatattccggtattagtttttagtatctgagtgttcaagtgaattaactcatgtaatccagcttttacagagaacttactatgtgcagggtctatggctgggtcctagtgtcacagagatgaataaggcacagtctctgacctgaaaagtggcaatcactatctgttgggggaggggcagacagatgtaatggtccaattttggccacagactgattttgaaggggtgggcagagtaaaagtttctaaggagacacattgagctgtatctggaagagtaagagaccagctacatgaggaactgggagcaggcgagagtgtttcatgcagaagcaacagcagatacaaaggctgtgaggtggctgagtttgacgtggttaggaacttaacgaaggctagtgtgacaggagcttaacagagccgggagagtggtagtaggttacattagccatgtatttttatatcaacggcctaacccttaagccaggcagctgttgggcaaattcgtgttcccagtcttcaggggccttgctcagaacaggtagctggtttagcactgtcagtcagaggagggactgggcctgatcctttcccctgcgtctggtgccaaggacagggtagggcacagaggtttcagtcaagatctgctgacagcacgcttgagaagagaacaggaagtgcaggctttgttgaaggaggctcaggcgtggctctgtcttctttggcgcactcattctcaagtcgctgacacctcctccaccagagaggtagctgggagaatgagatgcagggaggaagcatttacaggccccaccgaaaaaccttaaagggctgagagcttgagggcaggtaggaaaaagggctgtgagagctaagggagggcatcccacttagcttggaggggaagggaggcggggtcgggaaagcagatggcaccctttagcccagactcaaggaatgtgtaggggaattttagctagagtggtttggacatttcattttgctttctggcatcatcatttcctcagaaaacactcgcaggccccagtggccctcgtgggcctcccccggggcgggtcttagcttcactcggcaaccctctgcaaaagagcaggccctcccaggagcgccgagtcctgtctgcagtttgctgattttcccaccaggggccgctgcgcatgggcgacgaagcgcgcgggttcccaagccgcagagaggcggaagccgattggttgtcaggcgaggcgcgagggcggagcctgggaactggccgggagttgggggctgggagctcgcccccgggccgagccgggtcaggctgttgtcgcctcaggcagctcctgggaggctaacgtcgtgtcctgggcctctgtttagacagctctagaactgaggcgagtggagcagcaccaaggcccggagatcggggcagggcagctgctgtcgccgccgccgcaggcctgagttacctgagtaactgcgggtcagggacccgcccgacggcccgcggttggcgctggagactctcggtggggaaagggaagctgggacttgatcctttgcgcgggatcctggcaaagactagcgcgggccgggggtccgggagagcccgctaggggcggggattccggggagccgtcttcaccggttattccgggatccagctgggcgctggggctggcccgggcttcgctggggaccgggcggcgcggggcgggcgcggagacgcacgcccccgcccgccccgggcccgccccgcgccgcccgcccgcctggaagccgctgtcctgggcctggccggtgtgcgtccgcctgctggacctgggcaccgccagccgcctgggcacgggactgggcgggggcgctgacctcggcctaggaggcccaggatcccggagacgcccgcgccctcaggaccctgcgggtcgcacgccctccccagcttctgctgctcgccgctcttcggcagggcgaggtcaggtgcccccttctcgcctctcttctcttctcttctc

SEQ ID NO: 6538 - DNA, 2300 bp, Homo sapien
ctgcaataaacatggaagtgaagatgtctcttcaacatgctgatttcatttcctttggatgtgtaccgaatagtgggatttctggatcatatggtagttctatttttcatgttttgaggaacctccatactgttttatatggtgactgtactaatttacactgccaccaacagtgtgtaagggtttccctttctctatatccttggcagcatttgttatttgttatttttttggtaatagccatactaactggggtgagatgatatctcattgtggttttgatttccatttccctgatgattagtgatattgagcatatttttcacatatcttttggacttttttttttcttttttctctgagacaaggtctcgctctgtcacccaggctggagtacagtggcatgatcacaactcactacaaccttgatctcccaggctcaagtgatcctctgacctcaggctctagcttcagcctatagctgggaccacaggcataaaccaccacacctggctaattttttttttttaattttttgcacaggcggagtctccctatgctgcccaggctggtctcaaaatcctgatctcaagtgatcctcccactttcgcttcccaaagtgccgtgattacaggcatgaaccactgtgctcagtcttgtttgtcttcttttgagaaatgtctagttagatctttcacccattttttaatctgattttttttctattgagttgttcgagttccttatatattctagatgttaaccgcttgtcagatgtataatttgcagatgttttctcccattctgtaggttgtctcttcacttttcattgtttccattttattttgatttaatcccatttatctatttttgtattttgttgcctatggtggtggtggtggtggtggttgttgttgttgttttttggcagtgcagtgacgtgatattagctcactgcagcctccacttcctgggttcaagtgattctcctgcttcagcctcccgagtaactgggattacaggcatgtgccaccatgcccagctaatttttgtatttttagtagagatggggtttcgccatgctggccaggctggtctccaactcccagcttcaggcgatccacctgccttggcctcccaaagtgctgggattacaggcatgagccaccgtgcccggcccccagtacagtttattgaagagattgtcctttcctcagtgtttgttcatgcatttgtccaaaatcaattggctatacatatgtggattttattcctgtgttctgtattcttttccatgtctgtttttatgccagcaccatgctgtttcagttactattgttttggagaatattttaaagtcagatggtgtgattgctctagctttgttctttttgctcaagatggctttggctattcaggtttctttttggttccatatgaattttaggatttttttttctatttctgtcaagaatgtcactgaaatttagatagggattacattgaatccgtagattgctttgggtagtatgaatattttaacaatattaattcttccaacccatgtacatagggtatctttccatttatttgtgtcttcttcaatttagttcatcagtattttacagttttcattgtagagatcttttacctccttggttaaatttattcttaggtattttattattttttgtagctattgtaaatgggattttttttaatttctttttcagatttgtttactagctctaacagttttttggtggtgtctgtaggtttttctagatttaatatcatgttattggctgggcatggtggctcacacttgtaattccagcactttgggaagcagaggtgggtggatcccttgagatcaggagtttgagaccagcctgggtaacgtggtaaaatcccgtctctaccaaaaatacaaaaaattagccaggtggggtggcgtgcacacctatagtcccagctacttgggaggcagagatggaaggatctcttgaggcccaggaggtggaggttgcagtcagctgagatcatgccactgcactgcagcctgggtgacagaataagaacctgtctcaaaaaaaaaaaaaaaaaaaaagagagaagatcatgttgtctgcatgcaggggcagtttgacttccttctttccaattttgatgcctttcttctttccttccttcccttccttcccttcctttcctttctttcctcttgcctaattgctctggctaggactttcattactgtgttgaataatagcggtgaacgaaggcatccttgtctcgtt

SEQ ID NO: 6539 - DNA, 2300 bp, Homo sapien
aatctatactgccacaacaatgtaagagaattctagttgatccatgacctcagtatttttaggcattttaattttaaacattctggtaaatatatagtagtatcttgtgattttaattttcatttccctaatattattaaacacctttttataaatttattggccatttgatttgggaatctcttctcattttaaaaattggattgtctgtctttttcttattgatttgtaagcattatttatatattttggatattagtcttttgtcaatataaatacacatatatatagaaaatattttctctcagtcttgacttttttttgctttattgtcttttgataaacagaagcccttgattttaatgaagtgtaatttaatcagttttttaaaatgattgatgcagtcaggcgccgtggctcatgactgtaatcgcagcagtttgggtggctgaggtgggcagattacttgaggtcagaagttcgagaccagcctggtcaacatggcaaaagcccgtctgtactaaaaatacaaaaattaactgggtgtggtggcacatatctgtagtcccagctccttgggaggctgaggcaggaggattgcttgagcttgggaggtggaggttgcagtgagccaagatagtgccactgcactccagcctgggtgacagagtgagactccatctcaaaaaaaaaaaaaaaaaaaaaaaaaaaaaaaattgatgctttttgctttttgtttcttgttcaagaaatccttccctatccccaagatatttccctaaattttcttctgaacctttattgtttgtcttttcacatttagggatattatttcaaattaacttttgtatgtgatatgaggtaggctgtcaaggatctttgttttttttcccccaagtaaggtgatcattcaggaatctcttttttttttttttatttttcaggtcaaaaagttttctaatttttattgtggttccttttttgggacatggttatctagtatattgcttgattttcaaacatgtgaggactttttaagttatttttcttttgctgatttctagtttaatttcactaagatcagagaacatatgctgtgtgggtgtagtcctttgaaacttgttgagacttggtttgtataaaaaaacaactaagcaattcagttaaaaggcaaagattgtcagattggattaatgccaaaactcaattatatgctgttcgtaagagacacattttaaatataagaacacaaaaaaaggttaaaggaaaaggatatgagaaaagatatatgttacaaaataaagcagcaaaattaagcaggagtagctatatattgatataatatttatattaatataaaataggatttaggtcatgaagtattgacctaaagcagttgctaagtgaaataaagcaagggtagctatatattaatataaatgtaatatttacattaatataaagtaaactttaggtcaagaagtattactggactccaaaaatagatatttcataattataagtggatgaattcaatttaatatataacagcccttaatttggatacatctaatgatgtagtctaaaatatgtaaagcaaatattgactgaactaaaatgatactagacaaattttataatcaaagttagagattttaatatgcttctctcaataagccaccaacagcatccataaggatataaaaaatttaaaaacatggttaataaatttgaattccttgacacatatagaacactttgcctaactctagaatatacattctttttagcacttatatatctcttaaaatatacttctgctccattctctcctctccttctgagaatctaatatttatgttagatcttttaactgtattccacatgtctcttatgctcagttctgttcttttttctctctgtgctttggtttggttattttctattgatctatcttttaagttctttaattctgcattctactgtaagcattctggtgtttaacccatccagtgggttcctactctcagacaatgtatttttcaattctagaatatccactttactcttttataggttctagttccctgtccagaatttctatcttttatctattgtatccatcttttcctgtatttctcttaacatagcaatcataattattttgaagtccttgtcttataattcttacatctggatcatttatgggactgcttatttttcctcttgattattagtcatattttttgccatttatgtctaataatttatttttattacatgctggacagtgtgtataa

SEQ ID NO: 6540 - DNA, 2300 bp, Homo sapien
cagccatgatacagggctcttatggagccctggagttgttgggcaaggatgctgtcattttttgaaccaaaagacaaacaggttaaaaggaaaaaaagtaatctgaatttcccaagtgcctacgctgcatattccccttgttagatcccattttcatgttactttgtagccttggccagaggctcaaaaaggacacaaccagtttggggaaggggtggctaaggaagatggtataggtgaaggcggctgtgtgaccactttcccccacccttcccaccctctagacaactctctcccttacctgtttttgctatggctgtaaaggtatttttcctctgccccactccctgccatacctttatcctgggatcctattttgggcctggggtgggtatacctggggctggtcttaggagggtgctaggctgcagactgccttgtactccctggacaccctcaaatggggttttctgtgttatttcataaaattctttgaagtccaataaagcatgtaggagattttaaccactgctggctttgactctcattgtgttctctgtgctgtggcatgatgggataaagagacaatctttcctttgcccagggaaaatgaaacttgaatgcacatgcccagaagctctgtgggcagggttaccagataaatgcaggatgaccagttaaatgtgaatttcagataaacagtttttaaagtataattttctctcatgcagtatctgggacacatttttatttgctaaattgggaaaccctatgtctgggtaaacttgaccctatctatcctataacttcacttacgacttttaaaaaacatatctatttaatttttctttctttttttttgttttttttgagacggcgtctcactctcttgcctaggctagggtgcaatggcgcgatcttggctcactgcaacctctgcctccagcgttcaagcgattcttctgcctcagcctcctgagtagctgggattacaggcgcgtgctaccatgcctggctactttttgtatttttagcagcgggggggtttcaccacgttggttaggctggtctcgaactcctgacctcgtgatctgcccgccttggcctcccatagtgctgggattacaggagtgaagcaccgcgctggcctactttttctattttttgtagaaatggggtctcactatgttgcccaggcttatctcaacacctggcctcacatgatgctcccgccttagcctcccaaaatgctgcaattacaggctcacttacgactttccatgatttttgaaattacttcacagggagcctgggcagcttctggagggcagtgagaaaccaacgaaaaggctttagggaaaagatgccacagatgaaatttcataaagatcgctttgggtagcccaaatcagaagcttctacaccagccttacatattacggttctcatctattcttattctccactctaagtcaccaagtccatcctacctccacaaggcaaataccctgtctctgccaccatccactgaagaaccctaaaagcaaatgggtactgaccctgccctgcttaaaattctctcagggctctgatttgcgtcaggataaaatccaaacgccatcggccttgcgcggttttcttccagttccagagtgtcagtcctctggccgatctaaaagccctggggctccaagctgcccacggctgtggagcctgggctggagcccacagcggacggcagtgttagtattattataataaatgtcagagcaagaaaaacgttcccgccggttaggttttgttatttcaaaaataaattaaccgcctttcctccggcggagacgcgcaggtgagagggcggcgcctgacccagcgggctctaggtgctacgccagggccccgagggtcccgaactcggcttgcccacacaaaacatggtagcaggagagcagcatttccgccgggcatgtccatatccaatggggcccatgggagaggcgtagtcttctgggtcttgcccagactcaacatggcggctacacgtcgcctgtcagtctgtgaagcctaccccgggcgtgggccgcagcgtcgagtaacgtcattcgaaccccgtcgcgcccctttgtgcgtcacgggtggcgggcgcgggaaggggatttggattgttgcgcctctgctctgaagaaagtgctgtctggctccaactccagttctttcccctgagcagcgcctggaacctaacccttcccactctgtcaccttctcgatcccgccggcgctttagagccgcagtccagtct

SEQ ID NO: 6541 - DNA, 2300 bp, Homo sapien
atagcatcaggagatatatccaatgtaaatgagttaatgggtgcagcacaccaacatggcacgtgtatacatatgtaacaaacctgcatgttgtgcacatgtaccctagaacttaaagtataatttaaaaaaaaatctaaggcctcaaactatgaaactactacaagaaaatattggggaaactctccaggacattggactgggcaaaaatttctttcaaatattccataagcacaggcaaccaaagcaaaactggacaaatgagatcacatcaagttaaaaagcttctgcacagcaaaggaaacaatgaagtagagagataacccacagaattggagtaaatatttgcaaactatccatctgacaagggattaataaccagaatatacaaagaactcaaacaactctataggaaaaaaatataataatctgattcaaaaatggacaaacgatctgaatagacattcctcagaagaagacatacaagtggcaaatggatatatgaaaatgtgttcaacaccactgatcatcagagaaatgcaaatcaaaactacgagatattatctcacctcagttaaaatgtcttttaaccaaaagaaaggcaataacaaatgctggcaaggatatgtagaaaagggaaccctcatacactgtcaatgggaatggaaattagtacaaacactatggcaaacaatttgaaggttcctcaaaaaaaaaaaaaaacctgaaaatagagctaccatgtaatctagcaatcctactggatactgctaggtatatacccagaagaaatactgttaggtatatatccaagagaaaggaaatcagtatatcaaagagatatctgcactcccatgtttatcgcagcactattcacaatagccaagatttggaagcaacgtaagtgtccatcaacagataaatggataaggaaagtgtggtacacatacacaatggagcactattcagccataaaaagaaggagaacctttcatttgctacaagatggatggaattggggattattatgttaagtaaaataaaccaaacacaggcaaacaaacaaattgttatgttctcacttatttgtgggagttaaaaattaaaacaatccaactcatgaagatagagaggatgatggttaccaaaggctgggaagggtagtggggaatgattaatgggttcaaaaatacatgagagagaatgaataagatctagtattttatagcataacaaggtgaatacagtcaatgataatttatcattttaaaataactaaaagcatataactggattgtatataacacaaatgataagtgcttgaggtgatggatagataccccacttaccctgatatgattattacggattgtatgctctacctgtatcaaaatatttcatgtaccccacaaatatatacacctactatagacacacaagattgaaaattaaaaaaattactttggtaaattttatgttctatatttttacgattaaaaataaaaataatataacctgagaatgtccctagctcagtgacaagaacacagttggttgtcaaatgtcaatttccttctcaccactcactggtgggacactcaccttggggtcatgcgaaataaatcactcacctgcaggcgttaaaaaatattagtcacatcagtcacatgaaaataattagcttctggaagtaagcagatggtggcacgcgaggaagagcaccggccactcttctctgcatcaaaacttccttaaaagcatcttccagacatggacatagcgtctaggtgtggagtgatgaccagtgtcaaagaaagcagcccggactcccccgtcttgtagatattttaccaaatcagataatgaagacatgggagggagcgcgcaaccaggaccacgggctactgagtttccactccttcccagtctcagagaagcctcctgggcatgcagagcctctgaagcctcccccagctcaactctgacttctcttctcagccgcatttctccacacaccctttcaaggctctgctcctcccactgctcctccctcactcctcccacggctcctcctcctccctcccctttcctctcagacttgcttctgagcggaaactgaaagtgaaatagggagctggctaccagcgttgagtcccctgtaaaggtgagtgaaccccactagatcaagggacccctgccctcctaggggacctctctcccctgccccagggttgcagagccccttccagtctccatccttgagccggtcccatttgccccttctcccaccagggatccct

SEQ ID NO: 6542 - DNA, 2300 bp, Homo sapien
atatctcaaaaattgagcagaaatgtttgattttgtgtccagctaaaattgccttcttgtgttcaagataatacggctaaagaaacccaagaaatattgacaaggtcttcaaacttcagaaaacagttcaattccttcatctctcccttttcaaatctccacactgtactccaacacaaaagaggcatttagaaatacataaagatctatcctcaggaacacacatgtcatctcagtctattgacttggctatttacattagttgatgcagaatcttgaggtcctgaaagtcccccgccccaaatattactaagattccccaggaggtacctgtagtagttatcacaaatgaaaccccgtgttccatttctggcattcgtgccccagtgtaagcccctcttcctgagtggtgctggacctaatggttcacttctactgaatagaattctgcaaaagcggtgagatttcactgtccaaattagttataaacacacagtgctttccatcttaccctgtcttactgtctttctcaccctttaaaaggtaacacagtattgatgattaatgtcgatggctgaacttggcaaagagtgtgcaaaaaagaaaaaagactaatcttcttataagaactgacccaaaaatactaaataaaatattagcaaatattggagtggcttagaatagggacttctcaaatgttaatatgtatactttttacatcagtgttgtaggcatcaggggtatgttaagctccagactgaagccaagaaagagaatttagatgctgaatttctagctgataaagtgacatataggtctatattcggtatctctaatgactccaacctatttggatccattttgtagtcttttttgtaatggaaatttgcacttaaaatggactaggacacacattaggcagctgaagaaagtatagcataaaaggaagagatgatatagtcgacaagtggctagattttagggtatagtggaaatctttgcctgcagacgttataacctcagaagttacgttgaggggaactagggattaagtctgaaattcattaggccaaagctttgttcctatttgccacctcagcataaaggcaaatgtccggcttgtgtgtgtatgtgtgtttgtgtgtgcatacacgcatgcgtgcaagtattgatacacaagtcccatgtcaatcacacagtcctttttgcttaagctaattttcactaggaagaaccctgccatattttccaagggaataaattcattttgggccatcaagagccagccataataccacctaatgaaaaaatctacaagattctagttatttcttcacaaaagtatctctttttttattacagagaatgcaacagaattgttcaaacagcagaatatccttagagatggatcagcttaatgagtctcttgagattgaggttcaggtcaagacacatcaattacttaaggtctttggcctcctgccaggagaatttatcacttccagctctctacgtgtgtccttctctacaatttccattgctaaaaagttaaccaataaatacaagcacattttaagtgagctttaaatgtattttccaaatttgtctgatattttcgttctaatagttttgtttctgttattttatgcctgaatcttttaaaaaccaaaattgagaaggtgaatatattttttgtctgtttatattgcttcttacagacttttatttatttttggtcctcatttttaaattatgtttaattttattctacctgtttcataatgtcttaacaaacaggaactatgataagaagcatgggagcaacaatgggagagtccattctatcatcaggaaaagtctgaccatttattcccttcacccattgtaacgtatatggatgtgttttggtcaaggaataagccaaggcagatatccaggcctgcatgattcagcaagtttgttgcacaggtgcacacttctacttgttatatagattgtttgtgtaagttcatacttggctctgagccactattgtctgtaaaaggtataattgccttgctaacactatacagggacttttggggcttggctcaactcaacatggctctagtgcaggcgctggtgcccagagaaagagagccaaagctgtccattttgcagatggacagaggggacccacaacacagctcacactggtgcccagagagagaaaaagttaagctgctgaccctgaagccaagggtgagccggctatgcagctgcaggcatgggggcggcaggagccacagagccagagcaca

SEQ ID NO: 6543 - DNA, 2300 bp, Homo sapien
cagaggctgtgactcaagtcttcttgcactttctcctctcccaagtttgtttgtttgacaagtcatctctgacaaacctgggactccttttttgtagctaacctcatcaacttccagcttctgggcttctctttactctttcatcagatgcccataatgacatctttatcggaaccattatctcagtgattctgtgatccagtgatccagcattggtctcaactctcttttttggagttgaaataggaaggtgagagtgtaagacaaatcccctgaattagcttttttcctatatgggagggatttctaaaatatgaaaagtatttactaactcattctgtttttgagactattagaaaagggagctagtataacataggggtaaagggctggatgaaatcccagcccaaccatttattacctgaatgactttgggtaggtcaccctctaagcctcagttttcttgtctataaaataaggttaataccagcctcagaggattgtaagtatcacatgcatatttagagctgaaaatatacctgacacttgatatattttaacaaaatagttgctattttgttaaaatagcagaattaaatggtgtttctgcacagtttatgcttttcagtagaaatcccttgcattactattctaggaaagtgcttcttacccttaataagcatatgaaccacctgggagatccatctaaaattgagattctcatttggtaggtctaaagtaaggccaagattctgcatttctaacaagctcctaggtgatgtggatgctgctgatccacttgaaccacatttggagtaacaaggttctggcagacagtaagataaaaataaataagataaggataaaaattggcatggaaaggaaagtccaaggtacttttgtggagaggttgtaaatggaccttttcttccagtttacagacatttagagactgtgggagttgaaatgattctcagcccagagagctacctcggatgtcatctgggcagagtctgcttcctctgtggcattccctttccccacagccttcactgtggccggttgcctgaaggactctggttctcccatagcctcccagtgctaggaagcctaggctgccggaggtggcctcatgagggttttgtctcttgcagtgggaacttcatgaggccctcgaacatctgaagaaagagcaagaagaggcctggaagcttgaagttggtgaaaggaaacgaactgccacctggaaggcaggttgcctcgtggggaaaggagtttgtgtcagtcgtcctgtgtggtcctggagctggcctagggtagcattctcatcactgtgaggcagaatgtgaggcttgaaatcacagagcctagggttctaatccctgctttctctgtcccaggccttaggtaggccacgtcacctcttaattccagtttctccatggggatgtagggataacctctggtcttgtatcctcctatatgagaaaggaaaagcacatgctcacgtgtgtcagctcacagtggcatggcttatatcatgcttgtaaagcagagtttctctttcattttcccaagttagagaatatttgctaagagtctggttattaaaatattgtaaaatcacctctgaaataaatttgaggccagtaagtatcaaactactagaacttttgatcaacagaaagtaacactgaaccaatctaaaacagcatgttgaacagatataatatcaacatgaaaatgaaccacctaacagtgtagttaagttacactgccttagagacttaaatgtaacacatcttgtcattattctgaaaatggaaaatagtctagagcatgtagtattaagataatatcctggaccctactggagtcaataagagtgacaatagagacctagaagcatgtggtggagctgggagaacaggaagctaggaaaaatagtatcctttatctttgcccctgcatagcctgtcacgtggttggtaccattgcagagtatgtgtgtatgcatatgtcagtatgctcgatactgggtgactgaaagtatcagtgctgatttccatcttggctccacagatacaggtggaaacccgaaaacagagtattgtatgggagtttgaaaaataccagcgattactagagaaaaagcagccaccacatcggcagctgggggcagaggtagcagcagctctggccagcctacagcgggaggcagcggagaccatgcagaaactggagttgaaccatagcgagctcatccagcagagccaggtcctgtggaggatgattgcaga

SEQ ID NO: 6544 - DNA, 2300 bp, Homo sapien
agaatcccagaactggggttacacctgtcccctctgtcgagctcctgtccagccaaggaacctgcggcctaattggcagctggccaatgttgtagaaaaagtccgtctgctaaggctacatccaggaatggggctgaagggtgacctgtgtgagcgccatggggaaaagctgaagatgttctgcaaagaggatgtcttgataatgtgtgaggcctgcagccagtccccagagcatgaggcccacagtgttgtgccaatggaggatgttgcctgggagtacaaggtgagagatggaagctggccactccagtctaaccccggccccaagttggctgtttctagatcaagggcttgaccaccagcaccacagactgagagctaactcctttggttcctgacacccagagatccctggaatctgatacagagagctatacctttccttgtattcatgaccttccttgatttcctgctctcccacttcctctacacctacatcctaacagggctcaattcctaacccaaggctgatttcagtaatgagaatgtgaaggaaaacagtttgggttttaactgagattctggatgccttggatgagtttaggcatgaggctcttatatagatggtcaaggctacacctgacctgcaaactcctcctagcagtgctgcaagtagtcatttggcattgaatggatcacttccctccttcattttatagacaaaagtgaggcttagaaagttgaaaacatggcaatttattttagaggtggaaagaactatgggtgagtcacaagattgagagaggtcatctgatatagtcttctcaggtcctttctgacttcaggtccagttagtgaaaggaagatcagaggctgtgactcaagtcttcttgcactttctcctctcccaagtttgtttgtttgacaagtcatctctgacaaacctgggactccttttttgtagctaacctcatcaacttccagcttctgggcttctctttactctttcatcagatgcccataatgacatctttatcggaaccattatctcagtgattctgtgatccagtgatccagcattggtctcaactctcttttttggagttgaaataggaaggtgagagtgtaagacaaatcccctgaattagcttttttcctatatgggagggatttctaaaatatgaaaagtatttactaactcattctgtttttgagactattagaaaagggagctagtataacataggggtaaagggctggatgaaatcccagcccaaccatttattacctgaatgactttgggtaggtcaccctctaagcctcagttttcttgtctataaaataaggttaataccagcctcagaggattgtaagtatcacatgcatatttagagctgaaaatatacctgacacttgatatattttaacaaaatagttgctattttgttaaaatagcagaattaaatggtgtttctgcacagtttatgcttttcagtagaaatcccttgcattactattctaggaaagtgcttcttacccttaataagcatatgaaccacctgggagatccatctaaaattgagattctcatttggtaggtctaaagtaaggccaagattctgcatttctaacaagctcctaggtgatgtggatgctgctgatccacttgaaccacatttggagtaacaaggttctggcagacagtaagataaaaataaataagataaggataaaaattggcatggaaaggaaagtccaaggtacttttgtggagaggttgtaaatggaccttttcttccagtttacagacatttagagactgtgggagttgaaatgattctcagcccagagagctacctcggatgtcatctgggcagagtctgcttcctctgtggcattccctttccccacagccttcactgtggccggttgcctgaaggactctggttctcccatagcctcccagtgctaggaagcctaggctgccggaggtggcctcatgagggttttgtctcttgcagtgggaacttcatgaggccctcgaacatctgaagaaagagcaagaagaggcctggaagcttgaagttggtgaaaggaaacgaactgccacctggaaggcaggttgcctcgtggggaaaggagtttgtgtcagtcgtcctgtgtggtcctggagctggcctagggtagcattctcatcactgtgaggcagaatgtgaggcttgaaatcacagagcctagggttctaatccctgctttctctgtcccaggccttaggtaggccacgtcacctcttaattcca

SEQ ID NO: 6545 - DNA, 2300 bp, Homo sapien
agatgtttttagcaccctaaatcaaaataatatgcgttccactgtatttctggatttatcattttgatatttctttgccttactttcttactgccacaatcttgtcaattttccatcgctattttaggtcttccatttgtagctttaaataatgggtatcaacttccatttattgttttattgactttagatggtgtctcttaatgtctctactgacttagctaaggatattaacacatcctccactttcaatctactatcggttggaactcaacatttacatttagttttcacgtattcaacaagtatttgaggcactgttcttggcactggggaaatagaaatggacaaaacagacaatgaccctatccacatgaaaaagttctagtatgggaagtaagacaatagacgaatacatggcaaatgacgtcaaaggcaggatcatgtagaagtcattttcagctgggagaatagcaggcacccaagtcaggtagattgaatggacgaggggtttgcgggagtgtgtggaagtttattcctttgcctagctgggcacaggtgctgtttcaaggagagatcttgttaaccgggagccaggatagattatttagtaagttagtgatttaccaaaatgaggttttaggatactggatcccacagtttggtagtgatagtgggaggaagaaaagcaggaggcagggagtctagtgagaaggcatgccctgccaatggcatatcagagtcctgcaagatttactgctctgcttcctgcttcctgctactggactgcgctaaaccacagtgatttttctctcctcttgaatttgtattataccttaaagctaaagaggttaagaaatttgcccaagatagatggcagagccccaagccaaacatctgtaaaatgagaacaataatggcctctgcctagggttgtgaaataaaccaacttaattcatgtaaagtgctcagaacagtgcctggcacatcatagaactgctcaaagagtgcttgcttttattattaatgtatgctctcaatttacctcacaaatgctaaaaggattttgggtttaggaactatttcctatgtctagctggttaattcattcaacaaatatttactcagcaatatctgcattgcaggtgctgtttaggtgctgaggatacaacaggaactaggatcaacatgtcccttccttgtatagattctagctggtaacacaaactagcaaagtgaatgaataaatattgccaactgagccaagagcctgccattgaccaagttccatgcccatatgtggccctggcaaaaatctcagatttcttgctggtgtagtgatttcatcaatatgggtgtgatgatcatcaaatgatctttgttttaatctccaagggatgttatttcatctctgcttctagcatatcactaaaagctcagaagactaccttgacatcttggtgaataataagtacattagtgctggagcagtgggcaggggtttaaaaggcacaggaaaagaactgctgtttcctttacagtttttgcattttagtgtgcaacacaagaaaacaaattgagcttgtaggcaatgggcttctggcatactaccttttgacactttgaattatattaatgtaaatataaacataccagagagtgaggctggaggtatttatggccttacttcagatactgaaataccacattttatgtgaacttacccaagtttaagagaaataatgctgatttgtagagcatgattggagtggtaatggtcaagtagagcaaacccagaggaaaatcagagttgaccaagtgaatgaaaaccgaggactcccaatattcactcacttaggcatccccattatccccttcatggtatgagtaatgtggcccgttcagaccatgcacccttcagttggaaaggccaatgcttattaaagaaggtcagtaaagggtcaaaaggaaggtggttttcccccagaaattaattattcctgttactgatctctctgttcctctgttacctttttctcttatttgtctttcttttcttcttctcagcctttactacttctccctggtttcattcatgttctgaggagggtgtgagaaggaaccatggatcccacagccttggtggaagccattgtggaagaagtggcctgtcccatctgtatgaccttcctgagggagcccatgagcattgactgtggccacagcttctgccacagctgtctctctggactctgggagatcccaggagaatcccagaactggggttacacctgtcccct

SEQ ID NO: 6546 - DNA, 2300 bp, Homo sapien
aacaatctggaatagaggaaacaggaggtattaactccatcataagaggtccagtaggagactttcaaggtggagcggggtatctactcatggtctaggctatactcctaccctcctccttccacccctagcaggttctcctgctgactgacacaccactaacacagacagctatttcttcccctttaaagccttcaagactaagattatattctcatcaagcctaagattatacaaaactaactgagggtgtggctcatgcttcctcagaaagagtaagagaagaaaataaattaggggtctctaagcaagcatgttgtatgacatgcaataaggtcagtctctggtctctttccagaaaaccaggcctcagatttgtactaaccccctaactcttccttagtcctacttcttcagtgccccaaacagttctcagttcttgcttctcctttgatgctactcctcccctagagcacagatggacaccatcctacagttagccactcatcttgttgtcctggtctatcctggattcagggcagagggttggggtctgcagctacagctgtggaatttgtccacgacagagcctcacctggacacacctgtctcacagcaaacaaataaagaaacaaacaaaacattctgaagacatctgtaaaggaaagcttctatgccttggaagtaaactggtctgtcttcaaaagccctctctccagccttccccacatgaacgcaagcccccacccccagctaccctgattgccagggttcttgacagtccgtcatagttacaaattgcaccttacacatgaaaatgatctccccattaactgttttaacttcacagagattccagagcagtacaaccaacttgaccttcagctccttaaaggcagagactatatgtcccatagttgtaatcccagcacccagtaaaatattgtcaagaaaattgatgttaaataaatgtttaaaatggcttatttcaattaatccattcattattctattagagcagccatttctccaaaactgggtgagacagagggtacagctcagacctaagatacttttgttttttctcatagacctatttgttgcaggaaatttctgggcctcacccttcagaattttaaccatggccggggctcagacactggcatgagcattctggagtatctgtcctaacaattaagatattatataatttggaaccgagcttcaattggaagatttcctggttattttctatgcggataggaggtgccttcacttgcttattaaaacctaagtgtcaagagaaggacaaggccctgggagtacaaagaaaaacccatatcactgtcttaagtaacagtttttgtgtgtgcgtgcatgtgtctatgtgtttgggtgaggaagggataccagttgtttaatttttttttccttttttaatgacaatttttgaccagggtttccatttctccatcaactcccggtctctgttgtctgtttttcactctaaaagtggattgtggcaatagtgatgacaagctggttgctgaagtaaaaacgaaaaaagagagggttttgttttgttttgttttgttttgtttaagaacccagtatttaaagcctggaaccatgagaggtcgcgaatcttgccaggaacagcagagtccacaccatatgtgcgcccaaccctttgctaagatgggtcacagaaccagacttggccaatctcaggcttctgagtttaacaagtcaaactggcaaatgaatagccacctgagcctctcttaatgcagtgcctgagcggcatcatttgggagcctcaatcctttgacctatcctagaactaactcctagaaccctctacagtttaagggaatctgagtcggtgaagggaccagaaaaacccaggaagtagagaaaaaacattgacatgcctagaagcgccgaaacccccgtctcatcaccaattggctaggggtaccctggtccctgcctgtgattggctgcccccacaaacacaccgccccctgggcgaagccaacctgggcccagccggccgctcattggctgccgtcccgcgagcggggcctagagccgggtgtagtattctgggagctgcgggctactgggcctgcgctgccgggctttgggttctgggcctctgccgctctctggccctaagtgctgagctgccgggaacggcagcttctgacgctgggccattggacgctgcggaaccaggcttcttcactttgagtttccgccgcgaagcgccagtccgggccgaggagggaggtggg

SEQ ID NO: 6547 - DNA, 2300 bp, Homo sapien
gtcggtgaaatgtacatctgaattctgtgtgcatattgttggtactgatgctattttcgtgcatatgtctagtgtatatgttttaaggcaaactttctttgtgtgttgggtgtgtatgtgacacgaatggggacagcatctgtatttctgagcatggattgatgtgtggtgtctgtatgtatcttggaatggaggagggagattgaagaagtctggctgtgagcagcagaaataatttccaaagttgagtgacatgactctaagatgcccagtttctcggcctggggtcagcctgggtgatagctcagtctgtcagaatgaaaggaaacacggtgcttccttgctccaccttttcacaggccagaccacaccttcttcatcctgaacacaaggatttcaagggcttttgttacctcttcctacgtttcctgcctctgctatccgaggcactggcctccctaaaccctgccctcctgcctcaatagcaagtcatggtatcctcacctctcccttccctttttggcttatctgccaaacatgtataaaagtccttggttccccatctctactaaaaatacaacaattagccgggtgtgatggcgcgtgcctgtagtcccagctagttgggaggctgaggcaggagaaacgcttgagcccgcaaggtggaggttgcagtgagccgagatcatgccactgcactccagcctggtgacagagcaagactctgtgtcaaaaaaaaaaaaaaaaaaaaagccttggttgtagggagtttctcctaatccctctgggaaagcaagggtggaggggaagccagtcaatctcccttctgttgccgcatggaaactcccttaaggcaggaagctgaaaaaactgtagcattcacctcattattcaccttgtctcatgtctcactgtccttccacatgtctcattgttactccatattggatggaagtagaagtccctttggtattttttaaagtctttgccatgtctaagttaatgaggttaatggaggcagcagagatggctccagggttctgatagcaagtgtcaggctgcgtgctctgtaggcaccagaaactgttgtcaccagtaattttgatgtggtctgagttagaatggtctgatttgccatgatctatttaacatagcttgatttagcgtgtcctgtgttctgaatttaaaactcacagttgtgaaactgatcagtaaaaaataaggggagaccaactaaaaaccatgttgttctatttatagatgtagtttttacttatttcaaaatacgaggtatttagttttacattcaaattgttctctaactctctaaaatgttctctgactatttttgcccttaagggagaaaccagatgtcattggtcttacgtggctggtgttgggggtggggagggttaaagaaaccacgttctctgtcctcagccagaagttcagtaatccaaggccagagagtggacggcagaggcactgtccctggggaccttggttataagttatccagacacagggaccagagcctgggagacaaaaaaagatgtagccctagggctttgggaaaaggaggatggacccagtgaattccacgcttagcaaggacctaaacagtgtcccccaaatgagagaagggaggacagaaagaacacttcaggatggaaatgggctgacacttaaccgtggagtgtctctgcaaacttcctttgccattctcctgtttgagtttgataaacctgagaagagacttggataaagaccgtcacgaagactacactaatgagtttcttctagcttttttctactcactttccctatctatccttcacattgggagttggcatgaggatcccagcagcccatcaggggaggactctagagatccctttccccattgcctctcctccccatacccccaggcatatcctcccagggcacggaagctgagaagcagtccagaaccacagtgggctagtgaggggtacctgctgatgtaccctttggacagcattctgccccaccctgcaggaagaagcagaaggagggagagggtgaggcagagaataaataaccctgaccagggaggtccaagggagtaggcggagacagagaggctgtatttcagtgcagcctgccagacctcttctggaggaagactggacaaagggggtcacacattccttccatacggttgaggtgagtgcaggaggccaggggcatgtccaggtgcatgggttacttgcagctaggggtctcctgttagacttgctgagtgcatgagaagccaggct

SEQ ID NO: 6548 - DNA, 2300 bp, Homo sapien
agtttggcacatcagcatgcatgcaggcttttgggtgtagatgactcaaattgaaagtagtggtgaatggatagtcatgtgaagactgtttagaaaatgagttttgaaaactgagagggtgtcagatagccgaggctttgaatactacttgtgccatttataactgagaaacttaggtaagttacttacactctaatttttggtttaaacatggtttaagacataaatcaaactaataatggattcttctactgaatttattattgtagagttgtgtaagtcaaaagttgacatggatctcactgagctaaaatcaaggaatcaccaggctgcatttctttatggaggggctagggaaaaatcaattatcttcttttctccttctggaggctttccacattccttggcttgtagcctccttctgccatcttcaaagccagcaacagtggatcaaatccttctcatgctgccatctctctggttctctacttttaaagacccgtgtgactatattggatccacccagctaatccatctaatcttgccatctcaagttatttaactttaatcacatctgcaaagtccctttgcaatgtaaggtgacatattcacaggttccaggcattaagacataggtatctttaggggccattatcctgtctaccacaaacacttggcctagtatcatggatgtagaatgcataataaaatattattgttcttgttatttattgtttttattacattatgaagaagaaaatatctcaggccatgacattttcagtagtgaaacagatttgatagtggagaggagataatatcggaagcagggagaatggttaggaaactactgaagttacccaagtgagagataattgtgacttaaataaaggtgacatttctggagatgataaacagtgatcaatttctgattgtatttttcaaagagattgacataatttaccaatggattaaatgcagggtgtaagagacagaaactgagaatgaatcaaagacccatatgcccaagtgtggtccaaattggtgggaatatctaaggatctaaagaggccataaggagaaaagatggacaacttatagcaatctatgcattctatttattaaagactaatgagagtgatagtaaactgacagaaggtgacatcattggccaagtcaatcacccacctacctgcaatttttcttggtataatacaagattttcaaaatttgactataagtagagagaaccccaaattattgtgactaattctcttcaacctggtaggttgggacttcaaaatacgaaataggtcaaattataaaaaagtaaatgaaaccgtattttatacacaagtaagttgtgaaccaagatttttacctactgtattcaccaagcatttggttcatgcctctaggataaccttatcattggttaacatgtaattattggttaacctgtctatcttctacactaaaatcctaaacagtaagaattatggtgtattcttaaaaaaaaaaactctatcactgagtataatgtttagaatatgggacattcttatgaaatatttactggatatatgtatggatgagtaaatgaattattttttatctgtaagagaaagactgctgctgcaaagaaccacaggtgggctaatgaaaccatactgctgtgaataatcatagatactgaggagttaaggggtggagttggactctcactcataatgggagatgtcatttagcaatttgctacaatatttcgttttttaaaatctccttcagagtgactgctagtgattatgaggttccttttaagggtaataaaaaatgttctaaaattgaattgtgatgatggttcttgcacagttctgtgactttactaaaaaaaattgaatcatacactataaatgggtgaattttatagtatgtgaatgatataacaataaagctgttaaataaaaaagcttttgagtgaaatgacacatgaaaaaaaggttacatcagcccataaagcacatagccaccgtaagtaattgcataatggaacagatataaaaggactgtatgaggcaaaagaagtcttctgggaatctccacaccctgaagacacagtgagttagcaccaccaccaggaattggcctttcagctctgtgcctgtctccagtcaggctggaataagtctcctcatatttgcaagctcggccctcccctggaatctaaagcctcctcagccttctgagtcagcctgaaaggaacaggccgaactgctgtatgggctctgtaagtaaaactg

SEQ ID NO: 6549 - DNA, 2300 bp, Homo sapien
tgttgtttaatcctgttgatgaagtatttcgttaatagatttgaagcgaattttctctattcattaatagtgtgactttggcatgttctttcacctctttgagtctcattttttttaacctataaaatttttatactatattttaatctataccaaaggtttaaaacacagaattgccttataataagccctcaataattgtgtatttttaacaaattctttcattatcttccattttaattcttttatttttatttttttattttttcttggagataggatctcactctgttgtcaaggctagaatgcagtggcatgatcatggatcactacagccaagacctcccaggctcaaatgatcctcccacctcagcctcctgagtagctgggacaagtgagcaccaccatgcccagtcgatttttttttttttttttttttttttttttttttttttgagacagaatctcactctgtttcccaggctggagtgcagtggcatgatctcggctcactgcaacctccgccttctgggttcaagtgattctcctgcctcagcctcccaagtagctgggattacaggggcctgtcaccatgctgggctaatttttttgtatttttagtagagacggggtttcactatgttggccgggctggtcttgaactcctgacctcaggtgatccgcccacctcagcctcccaaagtgcagggattacaggagtgagccactgcgcctggcctagttgaacagcttttaagtagcagagttaggactcatttccagagttctgtgacttccttccttccttcctttctctctctctctctctctctctctccctctctctctctctctctctctctctccctctctctctctctctttctttctttcttagatggagtttcgctcttgttgcccaggctggagtgcacgtgccacatgctcggctacttttttgtatttttagtagacatggagtttcaccacgttggtcaggctggtctcaaactcctgacctcaggtgatccatcctcctcagcctcccaaagtgctgggattacaggtgtgagccactgcacccagccgagtcgtgtgatttctaaggtaatagctgaaatattttgctgtgagatatatatgtatatgtatctatacatatacataaacatgtacatctatagacgtgtgcgtgtcaacttattatcaatgctttgttttcttcaacatatagctattaactacctctttctgtgtttttctagatctcttttacataggtcttggagattttttttgttttgttttttgtggtttttttttgttttttgttttttgtttttgagacggagtctccctctgtcgcccaggctggagtgcagtggcgcgatctcggctcactgcaagctccgcctcccgggttcacgccattctcctgcctcagcctcccgagtagctgggactacaggcgcccaccaccacacccggctaattttgtgtgtttttagtagagacggggtttcaccgtgttagccaggatggtctcgatctcctgacttgtgatctgccctcctcggcctcccaaagtgctgggattacaggcgtgagccatcgtgccaggccaggtcttggagattttcatactctgatctggatctttattacagcagacattatttatttcccttgattttattcttttttctctttttagcttctggagcaagattgaatgtctctgactggtaattattctatagataaagctgtaatgagtttcgacacacctcctgtttcttgttttcccccctattttaaaaaatgatgccccctatattctgagactgacctgtatttccttaaccaggcctgtggcccgggatgctgaggaccatcaggtgtgaactgagcttaaaaataaattccatggctgcttttgtcacccttgcatgctggtcactctgccctcagcaggtatggatgatgacgccactcacagattcaaagaaagggcaaactggcagagtgagtcattggatgttgctggcacagctataaagatccagtggcccaagttgtgtacctgaattcaagcagtgggacaaatgagggtttggcatgcagctcgtcatcttaagagttactatcttcttgccctggtgtttcgccgttccagtgccccctgctgcagaccataaaggatgggactttgttgaggtaggtgaacgactcaggaccacattattacatggtgaccattgtgggctcttatttcgtgtgtgtgtgtatgtgtgactgca

SEQ ID NO: 6550 - DNA, 2300 bp, Homo sapien
taatatattaatataatcaatgctaatttcataaattaagaatggtaaaacaatgtaaaatgtttaaagattttaactgagtgatatttaacacatatttaataaatggtacatgttactttttgaagtccacacattcagcaaaatgtagataattaataaatatggaataaataaatttatctttgtttctcaattgcttcaaacaatatttggatcatagtggatacttaataaatctttgttaattaaaatcattaaataataaacctctaatttattttttggataagttttatggaaagaaagaaagagatgcttctgtaattgctggagatagcttatacatgctctttcacttcccagaaacaatgtaagtatatcggggaaaaagaaaaaattaaacaaatagacaattgaaaggtgatgaggctggcaggttggtgagatttttccttgttggccccccactactatctttatctattttgcagtctacttaaattatttcagagagtgagttttgcaattactaaaagaaaatacaggtaatatgtaaattatttaatatttcacatattttgtgatgcaagtattttcttgaagcagagattaattcagacaataaaaagcccttgagctttggatgatgagaaggcaaagccactctacactgacacttgtcccctggtaacagagatagaaggctctggaagcctagagtgttacatgctggagttaccagtgaagggcagagacagaaaagagtatcgaaacagtcctatgcaaaataacgtgccaaagaaaatcttcacctttatataaataattgtatttgagtagatagaagatgtatagatatataaagttttatgtaaagaaaaaaattataatatttcttagagagtttcatgtaatttcaagttgttaagaagagatgatggttcaggcttagggaggtaacaatgcctatttctaggtaatgaaaattagagggtatatgttggcacttgatattaatacaagagatgtgcacatggctgagcatggtaggtgagaagaagctttgataggaagtgctgaagaaaagacccatgaattcaaaaataaggaattaattttgttagagaatgcacaggacaatgtataagatatatgattgggttttgagaagacactgaaagtttgaaaaattaggttgaaagaattttgagcctatatgagaaaaagactacaaaaaacctaacctggaaaaaaaaaaaaaacagccagtggatttcaaaactaaagaacatttcagtcaaacttgtcttctgattatgaccagaatggtctacagcactgtggatcctttcttttttttttttttttttttttttgacagtctcgctctgtcgtccaggctggagtgcagtggtgtgatcttggctcactgcaagctctgcctcccgggttcatgccattctcctgcctcagcctcccaagtagctgggactacaggcgcctgccaccacactggctaattttttgtatttttagtagagatggggtttcaccgtgttagccaggatggtctcgatctcctgacctcgtgatccacccaccttggcctcccaaagtcctgggattacaggcgtgagccactgtgcccggcctgtggatcctttctttatggctaatgtagatgaagtctagttttaaaattctttgctctgcattaaataatattttttttttacaatttcaattggtaagtcaaagaaaaagcacataatgctgagtaataaacataaaatattgttgatccaatagtcatgaaccagaaaaaagccgtctaatccatttaattttgcccattgaaaatgattaagacatggagaaacagaacctgatgtttgtctttcagtgactttggtaaaggagacagaaaattagagaagattagttagaatagaaaatacaacatgatacactcctaaaataactacagtatattttcctaaaataaattaacatatttttaatttttaattcatcaaggctcaacagagaatagaagatgaaacagcaaatctaccacttgattctgatgaacaaatcatgccgacattcaatggctcagtcttcatgccctctgcgtttatactaattgggattcctggtctggagtcagtgcagtgttggattgggattcctttctctgccatgtatcttattggtgtgattggaaattccctaattttagttataatcaaatatgaaaacagcctccatatacccatgtacatttttttggccat

SEQ ID NO: 6551 - DNA, 2300 bp, Homo sapien
aatactataaatataacctatattataatttcataaagtctgtgcattttctttgacccaggatatttgcaaaagacatattcaaacttccgcagaacactttatttcacatatacatgcctcttatatcagggatgtgaaacagggtcttgaaaactgtctaaatctaaaacaatgctaatgcaggtttaaatttaataaaataaaatccaaaatctaacagccaagtcaaatctgcatgttttaacatttaaaatattttaaagacgtcttttcccaggattcaacatgtgaaatcttttctcagggatacacgtgtgcctagatcctcattgctttagttttttacagaggaatgaatataaaaagaaaatacttaaattttatccctcttacctctataatcatacataggcataattttttaacctaggctccagatagccatagaagaaccaaacactttctgcgtgtgtgagaataatcagagtgagattttttcacaagtacctgatgagggttgagacaggtagaaaaagtgagagatctctatttatttagcaataatagagaaagcatttaagagaataaagcaatggaaataagaaatttgtaaatttccttctgataactagaaatagaggatccagtttcttttggttaacctaaattttatttcattttattgttttattttattttattttattttattttgtgtaatcgtagtttcagagtgttagagctgaaaggaagaagtaggagaaacatgcaaagtaaaagtataacactttccttactaaaccgacatgggtttccaggtaggggcaggattcaggatgactgacagggcccttagggaacactgagaccctacgctgacctcataaatgcttgctacctttgctgttttaattacatcttttaatagcaggaagcagaactctgcacttcaaaagtttttcctcacctgaggagttaatttagtacaaggggaaaaagtacagggggatgggagaaaggcgatcacgttgggaagctatagagaaagaagagtaaattttagtaaaggaggtttaaacaaacaaaatataaagagaaataggaacttgaatcaaggaaatgattttaaaacgcagtattcttagtggactagaggaaaaaaataatctgagccaagtagaagaccttttcccctcctacccctactttctaagtcacagaggctttttgttcccccagacactcttgcagattagtccaggcagaaacagttagatgtccccagttaacctcctatttgacaccactgattaccccattgatagtcacactttgggttgtaagtgactttttatttatttgtatttttgactgcattaagaggtctctagttttttatctcttgtttcccaaaacctaataagtaactaatgcacagagcacattgatttgtatttattctatttttagacataatttattagcatgcatgagcaaattaagaaaaacaacaacaaatgaatgcatatatatgtatatgtatgtgtgtatatatacacacatatatatatatattttttcttttcttaccagaaggttttaatccaaataaggagaagatatgcttagaaccgaggtagagttttcatccattctgtcctgtaagtattttgcatattctggagacgcaggaagagatccatctacatatcccaaagctgaattatggtagacaaaactcttccacttttagtgcatcaacttcttatttgtgtaataagaaaattgggaaaacgatcttcaatatgcttaccaagctgtgattccaaatattacgtaaatacacttgcaaaggaggatgtttttagtagcaatttgtactgatggtatggggccaagagatatatcttagagggagggctgagggtttgaagtccaactcctaagccagtgccagaagagccaaggacaggtacggctgtcatcacttagacctcaccctgtggagccacaccctagggttggccaatctactcccaggagcagggagggcaggagccagggctgggcataaaagtcagggcagagccatctattgcttacatttgcttctgacacaactgtgttcactagcaacctcaaacagacaccatggtgcatctgactcctgaggagaagtctgccgttactgccctgtggggcaaggtgaacgtggatgaagttggtggtgaggccctgggcaggttggtatcaaggttacaagacaggtttaaggagaccaatagaaactgggcatg

SEQ ID NO: 6552 - DNA, 2300 bp, Homo sapien
cataattcctccctcacaaacacattctaagattttaaggagatattgatgaagtacatcatctgtcatttttaacaggtagtggtagtgattcacacagcacattatgatctgttcttgtatgttctgttccattctgtattcttgacctggttgtattctttctgagctccagatccacatatctaagtacatctttttgcattttacaagagtgcatacaatacaatgtatccaagactgtatttctgattttatcgtaccactaaactcacaaatgtggccctattcttgtgttcacgactgacatcaccgtcatggtccaagtctgataatagaaatggcattgtcactttcttccctactgcaacagaagcccagctatttgtctcccattttctctacttctaaaatacatttcttcactaagtgagaataatcttttaaagacacaaatcaaaccatgccaccacctttcttgaattattcaatatctttcgttggcttccaggttacagaaaaataacttgtaacaaagtttaaaggtcattcatggctcctctctaccctattttataacatttccccttgtgatcagaatctcaggcacatcatccatctttctatatacaaataaagtcatatagtttgaactcacctctggttacttttaatcaaccaaatgctgtaaaatgcatttgtatcgctacgtgttaagcagtagttgattcttttcatttctgtgtaatattctattctttgactataccgtaatttatcaattctactgttggtaagcatttaagtggctaccggtttgaggtttttatgattattgctgtcataagcatttctatacatgtctttggatacacacatgcatgtgtttctgaatatctaaaaatgtaattgctaggtaatagacttatcaagcatccagcatttgtggatactattaaaggttttccaaaggggttatactattgtacagtgtcaccaacagagtttgagtttctattgatccatatcaccaccaaaatttgaactgtcagtcttatctcttctcttgtctcttttttcctcttttttttccttcccttcccctctcttcgtttcttttctctcctcttctcttctttcctctcttcccttccctttctctttctcttccctatcccttctcctctcctctcccctccttttttctcctctcctctccattatttatttttccttcttctcctccatcccttccatcctctctcttcccctcttccttccttcctttctccatttcttcctcctctttccttcaatccttccttttggatatgctcatgggtgtgtatttgtctgccattgtggcattatttgaattcagaaaagagtgaaaaactactgggatcttcattcctgggtctaattccacatttttttttaagaacacatctgtaaaaatgttctgtactagcatattcccaggaacttcgttaaatttaatctggctgaatatggtaaatctacttttcactttgcattctttctttagtcataccataattttaaacattcaaaatatttgtatataatatttgattttatctgtcattaaaatgttaaccttaaaattcatgtttccagaacctatttcaataactggtaaataaacactattcattttttaaatattcttttaatggatatttatttcaatataataaaaaattagagttttattataggaagaatttaccaaaagaaggaggaagcaagcaagtttaaactgcagcaatagatttgtccattccaacctctcaaaattcccttggagacaaaaatctctagaggcaaagaagaactttatattgagtcaacttgttaaaacatctgcttttagataagttttcttagtataaagtgacagaaacaaataagttaaactctaagatacattccactatattagcctaaaacacttctgcaaaaatgaaactaggaggatatttttagaaacaactgctgaaagagatgcggtggggagatatgtagaggagaacagggtttctgagtcaagacacacatgacagaacagccaatctcagggcaagttaagggaatagtggaatgaaggttcatttttcattctcacaaactaatgaaaccctgcttatcttaaaccaacctgctcactggagcagggaggacaggaccagcataaaaggcagggcagagtcgactgttgcttacactttcttctgacataacagtgttcactagcaacctcaaacagacaccatggt

SEQ ID NO: 6553 - DNA, 2300 bp, Homo sapien
tatccttgtattggaagagctaaaatatcaaataaaggacagtgcagaaatctagatgttagtaacatcagaaaacctcttccgccattaggcctagaagggcagaaggagaaaatgtttataccaccagagtccagaaccagagcccataaccagaggtccactggattcagtgagctagtgggtgctccttggagagagccagaactgtctaatgggggcatcaaagtatcagccataaaaaaccataaaaaagactgtctgctgtaggagatccgttcagagagagagagagaccagaaataatcttgcttatgctttccctcagccagtgtttaccattgcagaatgtacatgcgactgaaagggtgaggaaacctgggaaatgtcagttcctcaaatacagagaacactgagggaaggatgagaaataaatgtgaaagcagacatgaatggtaattgacagaaggaaactaggatgtgtccagtaaatgaataattacagtgtgcagtgattattgcaatgattaatgtattgataagataatatgaaaacacagaattcaaacagcagtgaactgagattagaattgtggagagcactggcatttaagaatgtcacacttagaatgtgtctctaggcattgttctgtgcatatatcatctcaatattcattatctgaaaattatgaattaggtacaaagctcaaataatttattttttcaggttagcaagaactttttttttttttttctgagatagagcattgctatggttgcccaggctggagtgcaatggcatgatccaggctcactgcaacatctgcctcccaggttcaagcgattctcctgcctcagcctcccaagtagctggcactacaggcatgtgccaccaccatgcctggctaattttctatttttagtagatagggggtttcaccatgttggtcaggctgatctcgaactcctaacatcaggtgatccaccctcctcggcctctgaaagtgctgggatcacaggcgtgagccaccacacccagccaagaatgtgaattttgtagaaggatataacccatatttctctgaccctagagtccttagtatacctcccataccatgtggctcatcctccttacatacatttcccatctttcaccctaccttttcctttttgtttcagcttttcactgtgtcaaaatctagaaccttatctcctacctgctctgaaaccaacagcaagttgacttccattctaacccacattggcattacactaattaaaatcgatactgagttctaaaatcatcggggattttggggactatgtcttacttcatacttccttgagatttcacattaaatgttggtgttcattaaaggtccttcatttaactttgtattcatcacactcttggattcacagttatatctaaactcttaaatacagcctgtataatcccaattcccaactctgatttctaacctctgacctccaacctcagtgccaaacccatatatcaaacaatgtactgggcttatttatatagatgtcctataggcacctcagactcagcatgggtatttcacttgttatactaaaactgtttctcttccagtgttttccattttagtcattagatagctacttgcccattcaccaaggtcacagattaaaatcatttccctacctctaatcaacagttcgattctgcttcaatttgtccctatctattaatcaccactcttactgcccagtcaggtcctcattgtttcctgaacaagagtagatgctattctttccacttttagaccttatcctggctggatgcggtggctcaggcttgtaaacccagcactttgggaggccaaggcaggcagatcacttgaggtcaggagttcaagaccagcctgaccaacatggtgaaaccccatctctactaaaaatacaaaatcagccgggcgtgtggtgcatgcctgcagtcccagctattcaggtggctgaggcaggagaattgcttgaacccaggaggcagaggttgcggtgagcctagattgcaccattgcactctagcttgggcaatagggatgaaactccatctcagaagagaaaagaaaaaaagaccttattctgttatacaaatcctctcaatgcaatccatatagaataaacatgtaaccagatctcccaatgtgtaaaatcatttcaggtagaacagaattaaagtgaaaagccaagtctttggaattaacagacaaagatcaaataacagtcctcatggccttaagaatttacctaacatt

SEQ ID NO: 6554 - DNA, 2300 bp, Homo sapien
cactaagtaaggcagatgaagaaagagaaaaaaataagcttcggtgttcagtggattagaaaccatgtttatctcaggtttacaaatctccacttgtcctctgtgtttcagaataaaataccaactctactactctcatctgtaagatgcaaatagtaagcctgagcccttctgtctaactttgaattctattttttcttcaacgtactttaggcttgtaatgtgtttatatacagtgaaatgtcaagttctttctttatatttctttctttcttttttttcctcagcctcagagttttccacatgcccttcctactttcaggaacttctttctccaaacgtcttctgcctggctccatcaaatcataaaggacccacttcaaatgccatcactcactaccatttcacaattcgcactttctttctttgtcctttttttttttagtaaaacaagtttataaaaaattgaaggaataaatgaatggctacttcataggcagagtagacgcaagggctactggttgccgatttttattgttatttttcaatagtatgctaaacaaggggtagattatttatgctgcccatttttagaccataaaagataacttcctgatgttgccatggcatttttttccttttaattttatttcatttcattttaatttcgaaggtacatgtgcaggatgtgcaggcttgttacatgggtaaatgtgtgtctttctggccttttagccatctgtatcaatgagcagatataagctttacacaggatcatgaaggatgaaagaatttcaccaatattataataatttcaatcaacctgatagcttaggggataaactaatttgaagatacagcttgcctccgataagccagaattccagagcttctggcattataatctagcaaggttagagatcatggatcactttcagagaaaaacaaaaacaaactaaccaaaagcaaaacagaaccaaaaaaccaccataaatacttcctaccctgttaatggtccaatatgtcagaaacagcactgtgttagaaataaagctgtctaaagtacactaatattcgagttataatagtgtgtggactattagtcaataaaaacaacccttgcctctttagagttgttttccatgtacacgcacatcttatgtcttagagtaagattccctgagaagtgaacctagcatttatacaagataattaattctaatccacagtacctgccaaagaacattctaccatcatctttactgagcatagaagagctacgccaaaaccctgggtcatcagccagcacacacacttatccagtggtaaatacacatcatctggtgtatacatacatacctgaatatggaatcaaatatttttctaagatgaaacagtcatgatttatttcaaataggtacggataagtagatattgaggtaagcattaggtcttatattatgtaacactaatctattactgcgctgaaactgtggctttatagaaattgttttcactgcactattgagaaattaagagataatggcaaaagtcacaaagagtatattcaaaaagaagtatagcactttttccttagaaaccactgctaactgaaagagactaagatttgtcccgtcaaaaatcctggacctatgcctaaaacacatttcacaatccctgaacttttcaaaaattggtacatgctttagctttaaactacaggcctcactggagctagagacaagaaggtaaaaaacggctgacaaaagaagtcctggtatcctctatgatgggagaaggaaactagctaaagggaagaataaattagagaaaaactggaatgactgaatcggaacaaggcaaaggctataaaaaaaattagcagtatcctcttgggggccccttccccacactatctcaatgcaaatatctgtctgaaacggtccctggctaaactccacccatgggttggccagccttgccttgaccaatagccttgacaaggcaaacttgaccaatagtcttagagtatccagtgaggccaggggccggcggctggctagggatgaagaataaaaggaagcacccttcagcagttccacacactcgcttctggaacgtctgaggttatcaataagctcctagtccagacgccatgggtcatttcacagaggaggacaaggctactatcacaagcctgtggggcaaggtgaatgtggaagatgctggaggagaaaccctgggaaggtaggctctggtgaccaggacaagggagggaaggaaggaccctgtgcctggca

SEQ ID NO: 6555 - DNA, 2300 bp, Homo sapien
aaacaggagggatcctagatattccttagtctgaggaggagcaattaagattcacttgtttagaggctgggagtggtggctcacgcctgtaatcccagaattttgggaggccaaggcaggcagatcacctgaggtcaagagttcaagaccaacctggccaacatggtgaaatcccatctctacaaaaatacaaaaattagacaggcatgatggcaagtgcctgtaatcccagctacttgggaggctgaggaaggagaattgcttgaacctggaaggcaggagttgcagtgagccgagatcataccactgcactccagcctgggtgacagaacaagactctgtctcaaaaaaaaaaaagagagattcaaaagattcacttgtttaggccttagcgggcttagacaccagtctctgacacattcttaaaggtcaggctctacaaatggaacccaaccagactctcagatatggccaaagatctatacacacccatctcacagatcccctatcttaaagagaccctaatttgggttcacctcagtctctataatctgtaccagcataccaataaaaatctttctcacccatccttagattgagagaagtcacttattattatgtgagtaactggaagatactgataagttgacaaatctttttctttcctttcttattcaacttttattttaacttccaaagaacaagtgcaatatgtgcagctttgttgcgcaggtcaacatgtatctttctggtcttttagccgcctaacactttgagcagatataagccttacacaggattatgaagtctgaaaggattccaccaatattattataattcctatcaacctgataggttaggggaaggtagagctctcctccaataagccagatttccagagtttctgacgtcataatctaccaaggtcatggatcgagttcagagaaaaaacaaaagcaaaaccaaacctaccaaaaaataaaaatcccaaagaaaaaataaagaaaaaaacagcatgaatacttcctgccatgttaagtggccaatatgtcagaaacagcactgagttacagataaagatgtctaaactacagtgacatcccagctgtcacagtgtgtggactattagtcaataaaacagtccctgcctcttaagagttgttttccatgcaaatacatgtcttatgtcttagaataagattccctaagaagtgaacctagcatttatacaagataattaattctaatccatagtatctggtaaagagcattctaccatcatctttaccgagcatagaagagctacaccaaaaccctgggtcatcagccagcacatacacttatccagtgataaatacacatcatcgggtgcctacatacatacctgaatataaaaaaaatacttttgctgagatgaaacaggcgtgatttatttcaaataggtacggataagtagatattgaagtaaggattcagtcttatattatattacataacattaatctattcctgcactgaaactgttgctttataggatttttcactacactaatgagaacttaagagataatggcctaaaaccacagagagtatattcaaagataagtatagcacttcttatttggaaaccaatgcttactaaatgagactaagacgtgtcccatcaaaaatcctggacctatgcctaaaacacatttcacaatccctgaacttttcaaaaattggtacatgctttaactttaaactacaggcctcactggagctacagacaagaaggtgaaaaacggctgacaaaagaagtcctggtatcttctatggtgggagaagaaaactagctaaagggaagaataaattagagaaaaattggaatgactgaatcggaacaaggcaaaggctataaaaaaaattaagcagcagtatcctcttgggggccccttccccacactatctcaatgcaaatatctgtctgaaacggtccctggctaaactccacccatgggttggccagccttgccttgaccaatagccttgacaaggcaaacttgaccaatagtcttagagtatccagtgaggccaggggccggcggctggctagggatgaagaataaaaggaagcacccttcagcagttccacacactcgcttctggaacgtctgaggttatcaataagctcctagtccagacgccatgggtcatttcacagaggaggacaaggctactatcacaagcctgtggggcaaggtgaatgtggaagatgctggaggagaaaccctgggaaggtaggctctggtgaccaggac

SEQ ID NO: 6556 - DNA, 2300 bp, Homo sapien
caagcatacactctcacacacacaaacataaactactagcaaatagtagaattgagatttggtcctaattatgtctttgctcactatccaataaatatttattgacatgtacttcttggcagtctgtatgctggatgctggggatacaaagatgtttaaatttaagctccagtctctgcttccaaaggcctcccaggccaagttatccattcagaaagcattttttactctttgcattccactgtttttcctaagtgactaaaaaattacactttattcgtctgtgtcctgctctgggatgatagtctgactttcctaacctgagcctaacatccctgacatcaggaaagactacaccatgtggagaaggggtggtggttttgattgctgctgtcttcagttagatggttaactttgtgaagttgaaaactgtggctctctggttgactgttagagttctggcacttgtcactatgcctattatttaacaaatgcatgaatgcttcagaatatgggaatattatcttctggaatagggaatcaagttatattatgtaacccaggattagaagattcttctgtgtgtaagaatttcataaacattaagctgtctagcaaaagcaagggcttggaaaatctgtgagctcctcaccatatagaaagcttttaacccatcattgaataaatccctataggggatttctaccctgagcaaaaggctggtcttgattaattcccaaactcatatagctctgagaaagtctatgctgttaacgttttcttgtctgctaccccatcatatgcacaacaataaatgcaggcctaggcatgactgaaggctctctcataattcttggttgcatgaatcagattatcaacagaaatgttgagacaaactatggggaagcagggtatgaaagagctctgaatgaaatggaaaccgcaatgcttcctgcccattcagggctccagcatgtagaaatctggggctttgtgaagactggcttaaaatcagaagccccattggataagagtagggaagaacctagagcctacgctgagcaggtttccttcatgtgacagggagcctcctgccccgaacttccagggatcctctcttaagtgtttcctgctggaatctcctcacttctatctggaaatggtttctccacagtccagcccctggctagttgaaagagttacccatgcagaggccctcctagcatccagagactagtgcttagattcctactttcagcgttggacaacctggatccacttgcccagtgttcttccttagttcctaccttcgaccttgatcctcctttatcttcctgaaccctgctgagatgatctatgtggggagaatggcttctttgagaaacatcttcttcgttagtggcctgcccctcattcccactttaatatccagaatcactataagaagaatataataagaggaataactcttattataggtaagggaaaattaagaggcatacgtgatgggatgagtaagagaggagagggaaggattaatggacgataaaatctactactatttgttgagaccttttatagtctaatcaattttgctattgttttccatcctcacgctaactccataaaaaaacactattattatctttattttgccatgacaagactgagctcagaagagtcaagcatttgcctaaggtcggacatgtcagaggcagtgccagacctatgtgagactctgcagctactgctcatgggccctgtgctgcactgatgaggaggatcagatggatggggcaatgaagcaaaggaatcattctgtggataaaggagacagccatgaagaagtctatgactgtaaatttgggagcaggagtctctaaggacttggatttcaaggaattttgactcagcaaacacaagaccctcacggtgactttgcgagctggtgtgccagatgtgtctatcagaggttccagggagggtggggtggggtcagggctggccaccagctatcagggcccagatgggttataggctggcaggctcagataggtggttaggtcaggttggtggtgctgggtggagtccatgactcccaggagccaggagagatagaccatgagtagagggcagacatgggaaaggtgggggaggcacagcatagcagcatttttcattctactactacatgggactgctcccctatacccccagctaggggcaagtgccttgactcctatgttttcaggatcatcatctataaagtaagagtaataattgtgtctatctcatagggt

SEQ ID NO: 6557 - DNA, 2300 bp, Homo sapien
taaaatatacttataaattgtattaactatttccccagtaattaccacacagttttaataaaaccctgtgcatccgcatgtcccaaacgcagctcaggttttgaaaacacgactatagtttaagaataatcaggcctcctccggcttcctccatctggtccattatctgggtgacagtagatccaaataagtggttagctcttatcctgtacaacaaattttggcattaatccattctcttataaggcaacattggaaggttaagagaacttataatgatatacacatcactcctgtggcggtagataagttctgccacattaagcactatgcaggtcataattcagtggatcaagttagttagcagtgtttttagtatccatatgaacatagtctctgctactgcagtgcctagactgacatttttgttatcaacagtgtcccctgaagtagcagccctttcaaaagtcctttcacctttcctctgtccatctctctccaccaataattgcttatattagagatgttactatgtgccaaaattctgaaacatataattattattgtttctataggtttttataaaataaaaaaggtgcaaagattgttatcacttcatttttactgaattacacttcaaaggtgtcggtagtaatatttataatattgaatgatattttaaaagactctggacacatacagaatcaattgaatttgggagaaactgagtttcccttgtagttctctttgttttcccaataaacctgctacaaaatttcttggtatcacaacaacaaaaatcttgactttgtaaaagtgtaattataaatataaataaatattaattataaatagacttcatagttccctatgaggatccttgtgaatttttctcaatacgagtcttacagattcataatgattagagggtctgtaagattgtctccatcagcaacatagttgccgtattttctctctgggagtgcttatcttttccctagaactggttgtgtgaagtttattaactcaattaccaacttccgatattactattgcccttcagatcaacatacttacgaatctatgactctaacaagtattaggcttttgtggaggccctcattgtagaagtatgtccttaaaatatttccgttatgagcttccaacatgagtctcctattttcatgtttgtccctaatgtgccaaaactcagactttttgcagcatagggaacttgctgagtcccaagtccactgagtaattacacctttctaaaatgagtttactaactttacccacttgttcaggtgttcagatttctgtggaaactcacaatagatgagttattttctttcgttttattttattttattttttatagagacagagtctgactccgttgcccaggctggagagcagtgctgcaatcatagctccctgcagcctcacagtcctgggctcaggtgatgtgtgcccctgtgcccagctaatttttatcttttcttttttttttggtggaggcagggtctagctatgttgcccaggctgggttctcttcttattcacagtccacttgagatagcaacattgatcacaatatttctcagtcatttctattgaataagcattttcctcagtggttaatcctaaatacagctgtcccattagtttcaagagaaaaaatttgaactgactcaacttggatagtaacacagtaagggcccatatgataaataataggaggaggaataaaagagtaaagagaataaaagggaacaaaggagtcctatttgggaccaagagtcaaggctatgagcacagacgtaagatgagtgttgaaaaaataaaggttgtatgcttcatagtgaattggaattattattctgaccatgatttttgttatttgttattctagggaaaggccttgtgagtacaggcttacaattaattaagtatgagacaatccagaaaaatatttaagttttgaggtaaaaaatggcctgatgatgtgctacaagaagattgtgagagaaaaaagaaaactgcatctttggaggtcatcacccctaaaaaatatcttctccacctgcaaaacctaccatgtggtataacaacagtgctggccccttcttgctgactggcttcttgggctcagaggcagttcactaccggatctctatgtccttctttgtcatctacttctccgtcctttttggaaatggcactcttcttgtcctcatttggaatgatcacagcctccatgagcccatgtactacttcctggctatgctggcagacac

SEQ ID NO: 6558 - DNA, 2300 bp, Homo sapien
gttagtacaaatccccagcagctgcagcctgaggctcactttcaggtgcagctggagcaactgcggtccatgggctttctgaatcgtgaagccaatcttcaggccctcattgctacggggggcgacgtggatgctgctgtggagaagctgagacagtcgtaggagccttattcattcaaaccatacgttttcctctgtgcctttttcccatatcctagttccctagctctcccatttttgaatacagctgcattataaaccaaatttactatgaagtcctttgctgtggaggcaatgttgttccagagtcaacgaggaagactaatggccaaaacatagtggaggtgctgtgtgtgagtcaaccacttgtaccactataccactggggggccccagtctaagctctgcttatgcctatcttgagatgcaattacacccaatttccaatgtgaactcttgcctgagtctcattcatgtgggctatgagaaaaaggatggatatgggagaagaagtagtgataagggctgtctctacatggatggaaggacttggagggaaactaaaaggtctgaagttagaagactcacaggtatgaagaacagaggaggaaatgttgctgcaaccttttgaaggtcgaggcctgcaactttcccagtgttctttcagcgtttcttcagattttgtgtcctgtagtagctgctaccaggtgctctggttttccgagctccctaccactagcctgactgaaaagtggttatagtttcttatttttatctcccctgaagactatcccccaagcagcttgcacttccaggatttgatgctgatctctaagcagatagagatagagcagcaaaggagtcagggtgacttctcagattcctgaatcttaccgactttatacagtcccttgtagccagatccagagagttaattttttgcaacttcaagctcaaaactgaagacatactttgtgtatagcattttgctagctattaggaattcaatatgagcaaaagagttttactcactgccctgcctcaatgaatttatgatcttatagcaagaattgtgcaaattgtgactatataattcacattatatataattacaaactatgagaaatggtgtaaagaaaaagatgaggagctgtgaaatagcatgaacagggtcttgatctagtctggggagaaaggaaaggcttctgtgagtgtgtactgcaaactagaatccaaaaagtggtaagaattaagtaggtaaagctttcaaggcggagggaagagctttcctgcagaagagctattatgtacaaaggcactgaggtaggaggtgcataacacatagaagatgcccttgggatctcagactagatccttgtttgcattcaaggatgccttccattaaccatgtacttctagggtaaaagtgttgcaattcataaatcaagccagtaaataatgctttccagtccatatgcacacaaatgtgtcaggtaaacccactgtagagaaacgcacaaacacacaatacacatccacttaaatatgtcttcacatgggtatattctatgtacatatgtacaagcatacatacaaaacacagtctgttaaatcagagtttcatcgcaaaatggaagtgtaaacctaagaaacattcacagtattttcctatcaaggaagtaaagaggtcttgatgggggatacctaaaagtggctgtggtgtgtgtttagatgtcagagactcagtactgggagagagggaacctctacttggagctcaggatattttgatcagcctgtgtaacttagagctgctagcacacggtttaaaggagataaaagcagcctttgggaaaacatttattctagcgatttaggtttcaatgtttaggtggagcacaaggttcctgatatgatttggctctgtggccccacccaaatctcatcttgtagctcccataattcccacctgttgtgggagggacctggtgtgagatgattgaatcatgggggtgggtctttcccatgctgttctcgtgacagtgaatgggtctcacgagatctgatggttttaaaaaccggagttgctctacacaagctctctttttgcctgctgccattccagtaggatgtgacttgcttctcctggccatggttgtgaggcctccccagctatgtggaactgtaagtccggtaaacctctttcttttataaattgcccagtctcgggtatatcttcattagcagcgtgaaaacggacaaatacagcttcagtttcccctcactccactccccattag

SEQ ID NO: 6559 - DNA, 2300 bp, Homo sapien
cgtgttaaaacacagatttctgcccgacattccaagggtgttagattcagtaggtctaccgttgggttaaaatctctaatttctaataagtttccaggtgatgctaatgctgtcagtttggagatcatacctggaaatccactatcctagttaattcactaccttattgttagtccaaactgcaccattttgtaaacttcccactattttgcagaccttggtcaaagtgaaacatttcacgggggttcaggctgtgagaaacatcctgcctaaccacctgaccacaaggcagacaaaggtccaactaaagcaacatccctatcatatcttgctgcgcaaaggtccattgaacaccacgatgacatcctacagaaacaaggaccaaactgcctcatcatgagcacatcttatcaatatcctgccaggcagcaagccatactgcccagacccctccctcccatacctataaattaccccagcctgtaagcagtggtgggctctggcattaggctggtcccacacttctctaggttttatgctagacataaaccctgcatttgctgtgtgtgtgtctttctttaagccttgccttcctttcaaaacctaacacttattctttcagatgatcaattcatatcttgttttctcttctcagatcttcaatatccatttcttattctaaatcttaaagttgtgcttatttcaacaagaaagacagtaataatcagaagggacttctacctgtgtctaccatgaaatcaaccaactagcttacaactgtcccaatacactctgcctcccattcattctgctatcatgaataaacttcatattcctaaatcaagctctccacataggcacttgctcccaatctctctaacttatctattcaagaacttaatagttttccctttctcatgcatcaattttttctactcactggattgtttctatcagaatataaacatcattacactattcttaagaaaaaaatctaaaaagcctttaaccccacatccccacatagccgtcatcccctttcttgcatttaaaatgccctaactggatctactttttcccaaaccatttgcttttaaacacactctgattaggcttcctgcctctactatccttccaaagctagtctcatcatggtctccaattctttattttttcaaatccagtggccaattctcaatcctcatcctcctgacctagcagcatcatttcacatgattggttactctctcctttttgaaactcttcttcctttggcctttctcttttctctctctttttttctaccttactcttttattttttctccgtttcctttgccaaattcttctgatcttccagatttctaaatgttatacagccacaaaactcagattttaaaatctctatcattttgcctgtatgcactaactagctaatctaaaccagtccatgatgttaagtaccctttgaatgctaataaactctggacttataatattaaactacaatactacatctccatttgtatgtaaaatagacatctcaaatgtatgtaaaactgtttaacaacctgctaatttagacaaagtgcttattcccaatctttgtcttagtaaatattcaatcctttgagttcctttggggataacaatttcttttaaagtaaaaaaaaagttatctcatgcttgactcctcccttataccccaaatcctatccatcagcgaatcaatactttgaaaatacgtaaagaattcatggttaatgttgaataagacagaaaactgggacataggataccaggaagaagaccctggaccaggaagtagctgaatgtgggtctgaatggagacagagaggactgagagatgttttataacattccaatcccagtctgagcctccacagaagtctccacaggaaggcacttgaggtggaggaagtagaagtggtaaaagatgggagagcaagagttcccagggatcccgagctccttagagaagtctcaagaatcttctctgtgtgaggctgtgacgtcagcactgaggtcacagaagggacctgatagtgcgggttctggcccagaaggcctcaggggtggctgtgtagcaagatgagggaggtttggagccctgcataaagagaaggacgggaccacagctgactggtatgtacaccccagctgggcccttccttctacctttgtccctgtattcatcaactacagacctctttcccagggccctgcatttccctcccctgattccaacatatctcaatcccgcaatcttcctaaagcatc

SEQ ID NO: 6560 - DNA, 2300 bp, Homo sapien
tggttgtgagtcgtctcaacgctagcaccctagaagtggagaaaacctggcgtaccagccagtacaagccagccctgtcaggggccttcatggcctgtggggtgctctatgccttacattcactgaacacccaccaagaggagatcttctatgcttttgacaccaccaccgggcaggagcgccgcctcagcatcctgttggacaagatgctggaaaagctgcagggcatcaactactgcccctcagaccacaagccgtatgtcttcagtgatggttacctgataaattatgacctcaccttcctgacaatgaagaccaggctaccaagaccacccaccaggaggccctctggggctcatgctccaccaaaacctgtcaaacctaacgaggcttccagaccctgagaccccagggctaggcagagcattggtagaagtgtgccctcttccttacctccaggaggaccacatcccaaagtggccattggtcctaatgattggaagactgattatatctagtgagttctttatgtaattaatatctcaatcagtacattaaggttccctttaataatggtctaggtggatttgatagggaaaaagtaaaatattagctaagaaaatggtaccctctctttctgatgctttggcatctcatattccttttttcataaatccagctcccggaactcaagagttctgtgatctagaattgtcaatctcaggttgggaacacctgattccagtgcagaagctgcagggcagctggtcattagagtaggatatgaaagttccctttcttatctccaccttcctgtgaggtccctggggagaaaaggggcaagatcttggtctggtaatcaatttttcattgtcctggatcgatctcacttttgagtgcaattgcaagagaataggcctgagtcttgctgtagtaagttagcaactggccttatagcatgatgaggatctgacatggatggtgctgggggtctagatattctcaataaagaatcattggtttgatagcagaaggtctcctggccaacggcctatcatccctttgcttgtcttcaacacactgggaacatatgggctcgagctttttgcttgttccttagctatctgtgtggtgctcctccctctccaggcaggtggatggaatatataaaatccagaccctgaaggcttcctagtaacacagaatatgcatacaatttcatatatacattcgataagacatgtacactctcactcatataaataattatttccatctgcatctaaataaaaaccaaacacaattctccaaatttacatgggaccaagaatccagctttttagttgcctgtatttgtccccttaagaattttactactaaccacctcctctcccacctcttgatttacagacgacattcccccttaatgctttgacataaaggtgggcacacaagagtgggttaggacattgaaacaaatcattctaaaacttctgttatattgacatgtagaagagaccaagtgatatgtgaataaaaggcatattataaaaaagagctaattcacatttagtttggcatgtgcctatgaagagccttcctggttagccctactcctgcttcctaggacagaggaaaattttccccaccacatgggagcacaattaaatatagaatcccaaaatctagactctatataagacccaaatttccagatcattaaaaaaattaatgcgctccttcctatgggagagactgcattcttataggaatgtggctttatctatggcttcagtagacccaacttttcatacaagtctaacatccctataaggaacatacacacagtatcacacggaaacacacatcccacatttaaaaatatggtttttatttacttttttgttttcttactagttccatccagagaactttgtccctgttttctggaaaattattttattttattgtagagccctggacccctaaatatgtcctccttccccagctggcccagggtgactgcgaggatagagttgacatcacaatatcccttttctgaggattcatgcccctggtgggtggggtaggaggaggggtagccctaggagaagtcatcaccactttgtccaccatgggtgaattatgaatcagtagctatgccaggcctcagctgggccacatctggagaactggggtgagggcacaacatcacaaaatatctggccccagtctggtcactcatcccttttagggcaacaaggaaactatcctgtggcctgagagcacaatacctgaga

SEQ ID NO: 6561 - DNA, 2300 bp, Homo sapien
attttttaatatgagtaaaactgctatggacatttgtgtacaaatctttgcacggatatgttttcatttcttttgagtagattcctacgagtggatttgatggattatgtggtaaatttatatctaacttttcgagaccccttgaattattgccaagtaccttcatttcttctcaaccgtcagaatgcccaatctccctgttcaagatgagaaattatagagaaaataaaaactgccttggttagcaaacaaaaaggaaaaattctgcacactgagaaacagtctttcattctgttttttgttttcttttttgttttgagactgattatcactgtgttgcccaggctagagagcagtagcaggatcatggctcactgcagcctcaaccttccgggctcaagtgatcctcccacctctcagcctcccaagtaattgggactacaggcacgtaccgctatgcctggcaatttacttattttttttagacagggtcttactatgttgcccaggttggcctcaaaattgtggattcaagctatccttccacctcggcctcccaaaatgctgggattacaagcgagccaacatgcccagccaacatcctttttttttaactgagcctactagccccagaaatgaagccctatgctgacaagactatggagcctgtaagttacttccatttatatcagctcttagaaaatggcctgagaagggactctgggttgggcttctccatcccttttccaatatttctaaccctctgggtgtcaatcataccattttgtattccaagggacttaaatgttggctgggccagtggcagggtggtgtccatactgggcagtttgggtggggtcaggagaatttcagagcataagcaggctttgacctgaagcgtcatccaggggcaatatggaggcagccatacctaaaaccgttgtgaagaaagctacacaaagggtgatctgaaataacctttgcgtggcttcttaagcctgcagacatgaggtagtcactgaaatagtgacacatgtctgcacttacgagattccaatgacctttcatttgcctggggactgtccagagaaatctcttgatacttaacccagctctctccctactgcccaatcctccgtccagacttttgtatggacaccccagtcccttctctctctatacctccctccccaagccaccttctaaggcaaggtgatactcacctaatcagtctccttagggaggaactttgacattctttttcttctcagagtttctgtgctattgaaaccctgtagttagagttctgaggctcaataagctttacatgtattcatcagacctaaataaaaacaaagattgtcttctagttatataggtcaaaattacagatacacacacacagctttatacatacatacgtgtaattttaaactgatgaattttaatgatcgtttggcaaaacatgccattatgcaaaggggcttttactcgtataactttatatgtttatttagacattttaattaatacgtctatatggagtacaggtgtattatcagtgtaattaaactctgatatgatattagaaagctacagtacactgcagacaatttacaagggtcatctctggcctggtgttctcaaaggcctccggatttgccgttcatcaggtaagatgaacagctttgcgttgctaccttcaaaaattctttttttttttttttgagagagagtctcgctctgtctccaggctggagtgcaacctccacctcccgggttcaagcgattctcctgcctcagcctcccgagtagctaggaccacaggcgcgcccagctaatttctgtatttttagtagagacagggtttcatcatgttggccgggatggtctcaatctcctgacctcgttatccgcccgcctcggcctcccaaagtgctgggattacaggggtgaaccaccgcgcctggcctcagaaaccatctccatctcccttaccacctgaggggtcactggtgaccacacccatggaatcggctggatctcctgcggggctggacaatttgaccctcctcctccccaggccccgccccttcccccctgagtctttcggcctgggtggaggacgcggctgcttcaagtccttggctctgatccaggccacagattccaggttagtgagcaagtttattttctggccagctaccgctgtccccacttgtctggagagtttgacccgctctgcaggtcgggttgggggtggttcacgggtgaaagaagaatgagggagacttctgcat

SEQ ID NO: 6562 - DNA, 2300 bp, Homo sapien
ctcggcctcccaaaatgctgggattacaagcgagccaacatgcccagccaacatcctttttttttaactgagcctactagccccagaaatgaagccctatgctgacaagactatggagcctgtaagttacttccatttatatcagctcttagaaaatggcctgagaagggactctgggttgggcttctccatcccttttccaatatttctaaccctctgggtgtcaatcataccattttgtattccaagggacttaaatgttggctgggccagtggcagggtggtgtccatactgggcagtttgggtggggtcaggagaatttcagagcataagcaggctttgacctgaagcgtcatccaggggcaatatggaggcagccatacctaaaaccgttgtgaagaaagctacacaaagggtgatctgaaataacctttgcgtggcttcttaagcctgcagacatgaggtagtcactgaaatagtgacacatgtctgcacttacgagattccaatgacctttcatttgcctggggactgtccagagaaatctcttgatacttaacccagctctctccctactgcccaatcctccgtccagacttttgtatggacaccccagtcccttctctctctatacctccctccccaagccaccttctaaggcaaggtgatactcacctaatcagtctccttagggaggaactttgacattctttttcttctcagagtttctgtgctattgaaaccctgtagttagagttctgaggctcaataagctttacatgtattcatcagacctaaataaaaacaaagattgtcttctagttatataggtcaaaattacagatacacacacacagctttatacatacatacgtgtaattttaaactgatgaattttaatgatcgtttggcaaaacatgccattatgcaaaggggcttttactcgtataactttatatgtttatttagacattttaattaatacgtctatatggagtacaggtgtattatcagtgtaattaaactctgatatgatattagaaagctacagtacactgcagacaatttacaagggtcatctctggcctggtgttctcaaaggcctccggatttgccgttcatcaggtaagatgaacagctttgcgttgctaccttcaaaaattctttttttttttttttgagagagagtctcgctctgtctccaggctggagtgcaacctccacctcccgggttcaagcgattctcctgcctcagcctcccgagtagctaggaccacaggcgcgcccagctaatttctgtatttttagtagagacagggtttcatcatgttggccgggatggtctcaatctcctgacctcgttatccgcccgcctcggcctcccaaagtgctgggattacaggggtgaaccaccgcgcctggcctcagaaaccatctccatctcccttaccacctgaggggtcactggtgaccacacccatggaatcggctggatctcctgcggggctggacaatttgaccctcctcctccccaggccccgccccttcccccctgagtctttcggcctgggtggaggacgcggctgcttcaagtccttggctctgatccaggccacagattccaggttagtgagcaagtttattttctggccagctaccgctgtccccacttgtctggagagtttgacccgctctgcaggtcgggttgggggtggttcacgggtgaaagaagaatgagggagacttctgcattttcaagtgaactcaagtttgggaagggagcacagaagaggcacctttgcagctgggaataggccgtgtaaagagagttaaacctctattctacaagctgaagtatgtagaggaggcagctctggaaactgctttagggaatcactgcaaaccattttgtcaggcgtggattcagagtcagcatcccttccccccttcccccgttctccccttccccccttcccccttcccccttcccccttcccccttcccctcccccatctccagcctggccgctccaggaagtgagcaccgtttatcccccaccccaggcggcccgactcctcccagaaggagttgggagatgagccttccgcaaactcctgacctgtgggtccgtccgttcaacggccaaaggctggcggaggagggatcccctgcctttctcggaacggaacggagcagagtcgtgcgtggttgagtttagataaaagccgagtgagcgcgctctgttccttaagattagtttaaggtgccttggattgctctgaagagctttgaccacctg

SEQ ID NO: 6563 - DNA, 2300 bp, Homo sapien
cagtgattggtcaagaaggggaaagaagctgccctgtgtgccagaccagctaccagccagggaacctgcggcctaatcggcatctggccaacatagtgaggcggctcagagaggtagtgttgggccctgggaagcagctgaaagcagttctttgtgcagaccatggagaaaaactgcagctcttctgtcaggaggatgggaaggtcatttgctggctttgtgagcggtctcaggagcaccgtggtcaccacacgttcctcgtggaggaggttgcccaggagtaccaggtgagaccccaggatggaatgggagacagagaaacagggtctttggcaggttttaacgttttatcatgctctgatctaatctctttgtagtctttatttacctagagaatgaacctggaaactgcctccctgattaagaatagattctttatcatttacttgctattccagattgagtagatagagctgcttggggtaaaaggggtacttggttgattgagtgtggagatatgttggcagggtaggtaaaggaatttatttactcatgtatttattttgagaaggcgtctcgctctgtcgcccaggttggagtgcagtggtgcgatcccggctcactgcaacctccgcctcccgggttcaagcagttctcgtgcctggcctcccaagtagctaggactgtaggtgtgcaccaccatgcccagctaattgtgtgtgtgtgtgcgtgtgtgtgtgtgtttagtagagatggggttttgccatgttgcccaggctgatctcaaactcctgagctcaggcaatccacccgcctcagcctcccaaagtgctgggattacaggcgtgagccacaggtgctttgtggtcaggcaccttcccaagggggatggagaatcagcctatccctgttggttttcatcccatgtatatatataaaagatttgttggccctctcaagttttcatcctaggttaggacaggcttcttttgaggttagcagaatctctgtcccattcattctatgtctgggtactgagtcaactgaaggcttgatcctgcttgacctgatttgttttcttcaaggagaagtttcaggagtctctaaagaagctgaagaacgaggagcaggaagctgagaagctaacagcttttatcagagagaagaaaacatcctggaaggcaagggagactttttctgaagatgtcctggggcaggaatcatggcaggtcataggagctgagggcaaaggagtccttgtcctgtctgtcctctgatgccatgactagaagagcttccctttgcctggtcctccactatattccttccaaacagggggaggagaggaggtaaatagcaaatatatcaaaactgaacctaggagacaatcacatagcagaggaaccatggctaggggtcgccccaattcataattctgggtcttgctctacagtttcagtctctttggcttttcccttgcattcagagtacaaatgcaagggaaaatgcaggtaaggcttgtgaagaagcccagatctgagacaggttagtcacaggccagtgatttccacctcagtactcgaaattggaagaggaggctgatgcagaggtgagggaggcttcctggaatctaaacgtcacccaggaatcacagttgatgtctagatggcctagataaagcagcccggggccaatggtctgggcagagctgaagggagaaaagaaggaaagaacaggctacaaaggctttctcctgcagcatttaccctccctctccctgggaggcttggcccaggaaagcagtcctgagcccaacttccccgcttttaatagaggagaccctcagtgtgaccgactagcagcctctttttcttccctgttcctgaagaatcagatggagcctgagagatgcaggatccagacagagtttaatcagctgcgaaatatcctagacagagtggagcaacgggagctgaaaaagctggaacaggaagagaagaaggggctacgaattatagaagaggctgagaatgatctggtccaccagacccagtcgctgcgagagctcatctcggatctggagcgtcgatgtcaggggtcaacaatggagctgctgcaggtaaggcttgtgaaggagcccagatctgagagtcaaggaaaagagaaactaactttccttcctttctgggacatcagactaccatcgttgcagggacaagagaaaacattcctttggcgctatagtgcctatcccctattaaactgtttagaggtatggagtaaagcgtaagataattcag

SEQ ID NO: 6564 - DNA, 2300 bp, Homo sapien
tttaaaaaaaatgagaaaatggaggtacagtgagatgaaagaatttgctcaaagttggacacatatgaagtggcagaattgacctacaaaacagggcagcaaaattcagaggcaacatttttattcatttctgtctgttagaaatctgaaaaggtcagtgtgtgagtcaaatcctactttgatacctatttttgtaaatgtactttattggaatatcaccatgcttatttatgtatcatctgtgactgctttcaagttacaacagcagtgttgactggttgcaacagagactgcttgacctgcaaatcctaaaatatttactgtttgaccagcctgaccaacatggtgaaaccccatctctactaaaaatacaaaaattagccgggcatggtggcccgcgcctgtaattccagctacttgggaggctgaggcaggggaatcgcttgaacccaggaggcaaaggttgcagtgagccgagatcacaccactgcactccagcctgggcaacagagtgagactccatctcaaaaacaaacaaacaaacaaacaaatagtcaaagtaatgtataatgctcaaaatgtaatcttaggcctaatgaaggaatagactcctatattactcataaatgatataagtaatattaaacttggggtctagcttacgtgaccaagataatgatgaaaactttaagttgaaagcttatgttgaaaaacaaaataaaatcatttcatatgcaaattttaacaccacagtcaggaatgtcaatggatatacagggtaaaagaagagagaaaattaacctagatgataaactgtatacattgcatattgattaatctactataaaacaatggcacaagtacatgattgttttgattcttgaaccttgattgattatagatagcatcaaatgtagtatactctgggggagaaaagattggactatgagaggaaattctattttaagctttgtacaattataagacataaggaggacacaaatctcattaagggcagatttgggagagaaacagtgacaaagctaaaaccgtgacttatttgggaaacatcagtgtagcatgataaggacaagccattttatatcactcacatgagcaggcttcatgtcattgggtaaaaattcacagtaatcctggagaaaatgaagaatgtgtgaatcaatgtattgtgtgcaaacggtgatatgagggtagcctgagtcatatgaactccctgggaaaaacgaccagctttgtgtatgtagcaagtggacttggtactcctattacctaaaaagagcctctgcaagtacttattgacaaaagttgacatctactctgcatatggaatagctgtccctgcctctcaggcattttgtaccataaaggccaacagattgccattatcaatattttgatgtcctcaaaacagtttcagtggtaaccacatgatcgtacaagaatacgcctccttcattctgttgccagagaagtacaggaatcttcagttctttgtcttatttggagaaagcattctgctttccagtcttttccagtggagagtaggcctttgttatgggggatgctctgaacatatttcagaatggttcttttactctctctctgccagaaaagaaaggatctttttcttggctttccactatgggaactcactttggtttttggaggtaaattccaagcaagtggggcgggggcggggccctaagtctaggtgctaggagtttctctctctcaagctagtccataatcagcctccggcaatttgtcagaactactatttaagtgttcctaccagtatatgactcaggcaactcctgttttaaattttttttttttttttttttttttttttttttttgagactgagcctcactctgttgcccaggctagagtagtggtgtgatctcggctcactgcaacctctgtctcctgggttcaagcgatcctcctgtctcagcctcccgagtaactgggattacaggcgcccaccaccatgcccggctaatttttgtatttttgtagacagggtttcgacatgttggccaggctggtctcaaactcctgacctcaagtgatccacccgcctcagcctcccaaagtgctgggattacaggtgtgagccactgcgcccgtcctgactcatgcaacttctgcttcaggtaagcagatttaggctgtttattctgtgtttacctgtctctacattttggggtggcagtttttttcctgtgactttatctgatgagacttaggaaagtcattgatttttagttggttta

SEQ ID NO: 6565 - DNA, 2300 bp, Homo sapien
ggttttatacatttgagggagatgtgagacatcaatcaatatatgtccgcaaaggcgggacagctgagtccggaagggggtttccaggtcataggtagataaaagacaaacaggttgcattaagcaatagggcaaaggaagtaaccagatattcatttatctcacctgagcaaaggggtgactttgagttctgtctggagctttttttttttttttttttttatcttagtagctgtctttttttggaatagaatgggagccaggtttgccctaaccagttctcaacctgacttttccctttggcttagtgatttttgggtcccgagattttcttcccttttacactatctaaatgtattagttaccaatattgaaataaggaaaagaaatctgaaagtattaggttggtacaaaagtaattgcggttcttgctattataatacttttatttattttgtttatttttatttttttattttttgagacagagtcttgctctgacacccaggctggagtgcagtggtgcgatctcggctcactgcaacctccgcctcccgggttcaagcaattctcctgcctcagcctcctgagtagctgggattacaggcgcatgccaccatgcccggctaattttttttttttttttttgtaattttagtagagacgggggtttcaccatgttagccagggtggtctcgaactcctgaccttgtgatccgcccgcctcaacctcccaaagttctgggattacaggtgtgagccaccacagttggctttataatacttttaatttcaaaagccgcaattacttttgcactaacctgatagtaattgactcccttaaaagtagtcaaagcatattcccaaggtattggatgtggatacatttttgtgggaaagttgttaaacttccaacaagtttataattgtccttgatcaccatgcatgagtcagatggagagggcaaaaatgaaaattgtaccttgtcaggtggtttccaaaggtggcaccttttattatgtaatgtgctctacaggaggtagactaggattgttttgatgcatacagcacagaaaatgaatctatcaacttatattcctcatgaaaatggagcatgctgtttgtggaggcacaatgtggggtcatcctgtgaccaaacgagtggcaactcttgttcaagtttcctcctcgttcggtttgatttcaaggttacctcagtttcaaagcagccctttctgtccagggcacaaaactcctgatttactacttacaactagtggttctcagcctcagattcgcgtaaaaattacctggaagacttttcatttttaaataatgttactgatatatatgttatatgcaataatatgcacccatttactgtgcacagtttgatgagttttgaaaaagttttaccccttttaaagatttagagcatttccaacactcccaaaagttccccaggtcctttgtagccaacttttctcagcaccatccacctctccgccacccatcctccatctcctagcgggtgacatggtactttggtaggtagcacacaagtggatcgttggagctgaaggataattcaaattggtaaactgattcgagggaccatgtgcaaccatgaaagtggtaggagaaggggagttgggtgtttagctggcctgggaggcagggaaggttaaaacagggcttttcaaacacagcactattgatgttttggaatggatcattctttgctgtgggaactgtcccatacattgtagaatgcttagcggcatctgtgacctgtacccactaagatgccagtagcattcccctagttaacaaccaaatatctcttcagacattgccaaatgtgccatctagtgcaaatcctccattctgccctcgagaatcactggattaagagcattaccttctgtccagaggctctaaaggactacacagctcatttcacctagacgctccttccccttttctcttcctgacagccccaaaaatttcactttcatttctcaggcagttcctcctcaggagggagggacttcttcacacagaggaacctcatttgttgaatgaatcctgaccacacccaccctggcttttcttcacctcttcaaccaggagccgagatttctgttgctctgaaggtgtgtggggaggtttgtggggggtagagggtatgagactccaggagaaaagttctcagtgaagttaggggaatttgatttatggccccaagtctcccctgctctgtcgggagcaaaggctagcttgcaggcttcctgctttga

SEQ ID NO: 6566 - DNA, 2300 bp, Homo sapien
aaaatgaggtctgtgcttaccaaaaagaataaaaataaaataatataccaggggatggtgatggcgatgtgttttttataggaagaaaggacttaagcctaatgataacctttttttcccccacatgtctagtctgacttccaatcttatttcctttaccttaccctacttcccaccctcatctgcttctctctgttaacttgtcctgcatcctcccatccctgcccccacctcctattcattggaaagagactgtcacttttacttcatttaggaagtgtcacatatccaggttcctctaggctcatgtgaggccaaggcctagggctttttgcatatcagccacacatttaaaaactttcgaacatgttatgatgctatgtcctccatgaacggggcattcacttccatgattccttctgcctaaaatatttgttttctttctcattctgtattcctttctcattattcagctttcattaaactcttacttatccaagcaagatatcttggatagttctctatttagcacattatttggtcttctaaaaacctatacctctctatgatggtgttttttacacctaccattttacattttatgaatgattatataattagcttctatcttcttaggtgactgtttactttattctggctaataccatctgttcattactcaactttggattttaatccatttcctgaattttaatcacggaagataatatgtcttcagtgagaatttccaaaataaacacatgaataattggcattcaattagtggatgtggatttaacacagacagaacttcatcgctcctaaatgtggtctccctttatgtattgggacatctctctcatggccaacagccatctccttgctatttctattcctcgatgatctgacattggtatgaatctgtgatctatgtgtaattcagctggttacacccctcccccaacgaatacacacctttgggttcctatcaacctctgtaacatccttcaggccaagaagaaatcctaccatctacaaacacaagacccccccagaaattcccaacttatgtggtttcctccatttctacactctcataaccctggatcccaatctacttctttcaggctttacctcggcttttctttgtttaaataagtggagtagcatggagacctctgaaagagaactctgagggtattatgttcactccaattctaccatcgaattgggtgatctttgtaaatcatttaattttatttattcatctgaagaaagggagtactcttatttctcaagaattttggaaggaggaacaaacaggccaaagtgatttttaaattgtaactggtaatgaaatctccatattgtggtcattgctgtttctgtcggtatctctggaaagtctgtgagggcatgggaggattttgtgtgggtagatgtgttaggaggcgagcacttcttcactggaaaccacatctggggttctaaagttcagctattgaagaatttccaaataatggaaggaagataatgaaacaatgataaagttttagtcatctgtggagagacagggaagttttttttatatgtttatcaaacattgtgcttctctgtgttctaaacactgaggctatagcagtaaaaagacaaaagtgcctaatctacatgtagattatgttttagaaagaagaggtggacatttaaaaatagataatgataataaaagaaagatggcaaatgtacactgaatgatgagtttgtggttgtgctgtacttaagtttgtcttagcagcccttctgatgaagggacatgtaaggagaaagttgaaaaaagtataaacgaaagtcatgcaaatagcaacaggatggtaattctaggctgagtaatgaacaagtgcaaaagccttgaggcattaacagctcgcccagaccactttcagccatttttggtttctcttcctcatcttctttgttctttgatattgcagtctcggccagtctttattgtctgtgcaattagaatgctttttatttgtaccattcttataccatcccctttcaatcttctcagccatccaggggtctttaaccagaagagagaggagagcctcaggagttaggaccagaagaagccagggaagcagtgcaatggcttcaaaaatcttgcttaacgtacaagaggaggtgacctgtcccatctgcctggagctgttgacagaacccttgagtctagactgtggccacagcctctgccgagcctgcatcactgtgagcaacaaggaggcagtgaccagcat

SEQ ID NO: 6567 - DNA, 2300 bp, Homo sapien
tccatggatatttaacatttttctcttcaagaaaaagagcaaaataagagtaaatatggttagagtctgaataatacttaggaagaaaacagagaggatattttaaaaaatcgtttaaaatttgtttaaaaatttacataattactttttttttttttttttttttttttttttttttttttttttgagacagagtctcactctattgcccaggctggagtgcagtggcatgatctcggctcacttcaacctccacctcccgggttcacgcaattctccttcctcaccctcctgagtagctgggattacaggcatctgccattacacctggctaatttttgtatttttcgtagagatgaggtttcaccatgttggtcaggctggtctcaaattcctgacctcaagtgatccacccgccttggtctcccgaagtgcgaggattacaggtgtgagccactgcaaatgtaatcattacataattattactaatgccacataattattactaaataacaattagtaatattaattataattgtaactattaataattgtaattattaataatactaattattataattattactataattattactgccacataattattactaatgccagaagaatatttgaattaaactaggtgacacagcagttatctttacagcaagaatagaacagaaatgtgacatcaagatattcaattaaaattagattaatagctatatatcttcatatctatttaaatattactccttatatacaccatattctagtaaatctgagacaataaagaacaaaatgcaaaagccccctacctgatttcatgaaacagaaagctgcgggggtacagtgtggagggggtatgaggttactgatgatggaattaagtgataacaggctgcccactgcagtgctccccattgccttctcctgaggcattttcattttcaaactaaatactcctctctaccaatgatcctagttccagtgtggacttcctgagatgttccagtaagggaaagcttagaagggaggctatggtacatggaccacagttcagccttttggaccagttttgcatagtaaccagaagagaagagagaggaaggcctggccctgctcagggatgcaatagatactttggaaaagacaacagcgggaagttggagagttctttgaaagtgaatagttgaaagaaataatgtggtatttctttatcgctctccagataaacttctttttttttttttttttttttttttttttgagacggagtctcactctgtcgcccaggctggagtgcagtggcgcgatctctgctcactgcaagctccgcctcccgggttcacgccattttgctgcctcagcctccggaatagctgggaccacaggcacccgccaccatgcccggctaattttttattttattttattttattttattttattagagatgggttttcaccgtgttagccaggatggtctcgatctcctgacgttgtgatccgcccgcctcagcctcccaaagtgctggcattacaggcgtgagccaccgcgcccggccctctccagataaatttctagcatcctgtcctctctgggtttcggagtcttaataatatgacatctctcctacctgcagctccttttctgttcataggtcctataagatttttaagtccagaccagaaatctactgcaattctctaaaaatcattaactttgttcttccttctctttgggccatatctgtcacccagaagcagaactcagctgtgagatcaggagcaagaggagcacattggaagaatttcgaaaaagggcaccttttctaatttttaatacttggctgggttaatctgaaactatgtcagaagaagtggcatgataacaagatcctgagactcaagagaaaagggagattgagtgggaatgcctctagttcccacggctcctcctgtgaacagcacagctacacggcccggctgattcattcagagggcgggactcaccaggccctacgtggagaaatgccattggcccatagtttatctttcactttcctgccctgagtgtgagcaagaatttcctgcggttcctctaggaaaattcctttgtgcagatcaggcccgtggattggtgagtgaatcctaaccacgtcttccctggcctgtcttcactcttctccccagaatcaccacttctgcactggtgtctgaaggtgtattgagtgattttgtggagggcagaagtaggaagtctttgggacaaaactgtatttaccttggtga

SEQ ID NO: 6568 - DNA, 2300 bp, Homo sapien
cgttttctggtatcttgtcaggacctaatattactactgttttctctcagctgcaattaatacttcatgagataaatcagaccaggatgaaagttcacttcagatgttcaaagccagacgagaataaaaggatggctatgagatctatggaagtgctgagaagggaagaaataatggacagagaacaggtctctggataaatgagttcattcactttgtccattgtggttgacactcggactccactctgtgcactccagaaaaaacacattcactcactgagcgctcactcccctacaaatgtcaacaagatattctattcaaacatggaatatacctaaaattacatctcttgcttatttatcttcaagaagaaataagaaaatttcacgcctgtcttagtcaaggttcatcatagcaatagaaccactaaactatgaatttatttggaaagaaacttgagaaatgtctcaggtgattctggagactggcaaatccaaagtctgcaaggtaggccaagaggctctggatccaagaaggagtcaacgttatagctcacgcctgaggtttgcctgctggtaatattccctcttctcggggagaagtcagttttttcttctattctggctttcagctgattgaataaggtcctcatagatataagtgagtaggaaagaatttatagccaggattagcttattattctgtgagcaacaaataataccaaaatatctattattgaaataataaacattgatttctcagtcatcctacatgtgtatcattgattaaagtatgaagatggccatgctccatagtgtcagtcagggatccatgttatggaagctccatgagttgcctttttttttctttttttttgggtgtgtgtgtgtatgtgttgtgtggtgtttgtttgtttgttttttgtagagacagggtcttactatgtcacccaggctgcagtgctatggtgcaatgacgcaatcttggctcaatgcaacctccacctcctgggctcaagccatcctcccatctcagtttcctgagtagctgggactacaggtgcacatcaccacacccagctatttttttttttttaatttttcttagagatgggatttcaccatgttgcccaggctggtgttgaagtcctggactcaagtgatccacccacctgggcctcccagagtgctgggattacaggcatgagacaccacaggcctccatcagtttttgatggcattatctggcacatgcagttaaacaagaatacaatagacaacagggtacagaagtatgtgcatgacgtataacatgtttcagtgctgctttttaattgattgtgtaaaaatgaccaaacttttcttagagaagcagggaaaagtggaaaaattatgaaggcatgagagtaactcaatgaatgattataattaaacagcatcatctgttaacttccatgttctcacctgcctcagtggctgggtaacatgacactgacacagttttacctctattactctctggaatccatcctcatctggtctgtctggattaggagcaggaagtgataattaattgatggactcttaagatttaatgacattttgagaacatttttttcaatgggctcacactaaagatccttttatttataaaaataatttttttaccattcacaatgtcagctgctaatactcatcttgtcagcccaaatttgtagagctttataactgagtatcttcctcgtcagactgcatttcaagaagctaggtcccaagtctctggatctttattttcctggcttaggtcttaaatataagataaattcgactaataattataggactgcattggaattctaagtattcaggcaagctgtataactgtaattcacattctttttattcaaatattcttgcttgagtaaaccacagtaagaataaggaagtagtgactgagtgccttgccagtacagcagatgctagaacataatgtagcattactttccccagggtttattgttatgtaagttcttgttcagcttcctttgttttctttcacttctgagaatttaactttcgtttctcactcagctcctgtggggaaactcatttgtggagaccagccctctggcttggtgagtgaatctggtttacaccggctcctgccctgccttcactcttctcccctgattcaagactcctctgctttggactgaaggtgagtggagcaatctgtgggagcatagaatgggaggctttgagaagaatagattgattgtgtctgggtgagtttaattt

SEQ ID NO: 6569 - DNA, 2300 bp, Homo sapien
ctctgttttagtagcatatagaggattagagggcctttccaaaaaaggttgaagtcagaattagaaaatattaaggctcacatggtgcactagaagttaccttgtctgtaatcaaaaaacaacactgccagattatcttcagggttaatatattaactgttttatatagcagaatcgtattctatgtcatgctagaatataattgtaaaaaaaattaaaaacaattctttttctgtgagctcaaacatactacttctcttaattgtatcacacatatacaaatcagaaaaaaattttaatagagaaaacatcaaagataaaatgttatgtgatattaggatgtaaagtaataaatgagtattaagtaaaaatgccaggccttgtacatcaaatgggttacatacttccacgcatccaggataaaactattgtgttgaaccccttcagaattctcctctaaaagctcaaagtcaaactagctttacctccattattgcttgtgctctttagtcattgaaattttctgtagatacatttagataattttactctttatcaaattacattcaccattaaagaaggatgatttactccatcatttgggagtatatgtttattcaaacatacaggcagtaagaaacctctgaaaggaaatacatttagtttttaataagaattgatacaacaaaagaattttattttcttccagatttttttggtatttaacaataattatatcaaaaatcaacccataactaatatattaaaaataacattttaacctttgaacatagctttccagtttttgtttcttgctcataaacctgcaatagcttccaccatggcaaaaatattggaaataaaatgccttgaaaaattactaattttagcatagagtaagtattatatgtatctgcagtgtaaaatacaaagaagttcaaagcaagagattatattcacttcggtttgagtcatatctgagagtgttttatgcaaaataaaggattgtaatagtaaataaataataaatggtaaataaataaaggattgtaataataaagtattgtatttgaaagaaaatgtgaaaccatgaattattttaagcaaaggaataccagtgtctgaaagatcagattgctagcagaaagaaagaattatggaaaatcagaaacatttgctccaggcaggttgcagaaagcatactgaaaaaaaagagtgcatatgaatgaagtaaagaaaagaaatcaacaatatgataagcaattatttgcagtaagggaaggttagttttctagattcaagcttgtctggtcgagccaccatgcagaataaaaagtaaatggataacaacaaagttgtagaaaagataatgagtctaattttaaccatgatttttgagcattgaatggcaattccttcaacattatggacaaataattcttgtttgttaaataagttaaaattactgttcaatggttagaaggttttagttgtacaagatgaataagttctagagaccagctgtacaacattgtgcctgtattcactaaaaaatgaatagagttgatctaatattgtgttgttatcacaggaatctttaaaagcttcttattagttttacctaaatcctgtatttatgtctttataggttctctaagattcaactataaaaaaacttactaaggtatgtcttcattatatgacttctcatatggagaaattcagccataatcactaacttccttttaagctactcttttgcaacctcctcagaagtgcatacaaaatagaacatgaaagaaaactatccccaaatcctcaatataatttatttctggaaacctttacaagtccatgatatcaaaattttgaaaggctatgtaagacgttaatggacatctatatcaacttgaaatgatgtagctataaatttcatctcccataattcttcatttaaaaaatctagttattattagttaataaacctctgcatcaagtcaagtaacactgagataaatatgaagaaaacaagcacatccatttaatctatataatttctaaagagatgaagaaaggcttagaaaaatactacaattttatttctgtggtggttccaacctgtgataactgagaacaatacaaatagagatttgaaattcatgttgaatcatgaatcatatgtctgcatctctcaaaatctccaatagctccaaattccaggtctctgagttcatcctgctgggattcccgggcattcacagctggcaacactggctatctctgcccctggcactactgta

SEQ ID NO: 6570 - DNA, 2300 bp, Homo sapien
gcacatttactgaataagatatccttacccagttgattgtttttgttgactttaccaaagatcagttcgttgtaggtgtgtggctttacttctaggttctctattctgttccactgatttttgtgtcatgtttccagcaatgccatgctgttttggctactgcagccttggagtataatttgaagttgggtagtgtgatgcctttggctttgttctttttgcttaggattgctctgtctatttgggctcttttttggttccatattaattttagaatagttttttctaatttgaaaaaatggctttgggaatttcataggaatttcatagaatctgtagattgctttgggtcattttactgatagtgattcttccagattatgagtgtgaaatgtctttccgttagtttgcgttatctgtgatttctttcattggtgttttttagttctccttgtagagatctttcacctccttggttaaatgtatttctacatattttattattgtgtggctattttaaatgggtttgagttcttgatttggttctcagcttgaagaatactggtatatagaaatgctactcatctttgtatgttgattttgtgatactaactttcctataatcagatcccataaggagaaaaagatgattaatacaactcaggaaatgatcatatcataaagtatcttccctccctttagcagaatcgtgacatatcttgggaagcaattccacaccatgaaattggacagaatctgagaagatacaaacccaaatacacataccactatacttccaaagcagttctttgggcctgcattatagccaagtcatagggatagtttttctttaggattagtagcaccatattagaaatcattgcactcaaatgagcatcaaagtaatttgacccatggcactgatatggatatggcactgcccgaatctgactaacccaataactgaatgtattccatccatggcccagagcctaccacagaatacaccctgtagcagcaaagtttctaatcaagtcctagtctcatttgcacacacccaagcaccctacaggcctattatgttgcagattgcatccattgcacagagccagttacaaaccagactcaaccacaaggcacaccagaaagactcaattgtgacggtaaactagcctgctgtgaacttaaacatatcactgtccatcaatataccagggaaactattacagcattaatacaaactagactgtccccaatctgaggcaagtatctgacctcagtatcttttaaaaagatagagacaattacactgccactatctaggtggcattatgaagcgattgcccatttatataatgcgaaatggagaagacagaaaagatcataaatcacaaaaggcactgcaaagtatctgagagcatccagtgttttctattcaggaaagaaaacataatatagtgaagggcctttgaagttgtaagagggagcattgtttttctggaattatgcaatagttaccctatgtatctaaatttaaaaattttatttattatctcaaatccaaacaccaactaaccaatcctccacctttactgagtctcctctcacagagaatattcttaatttctcagatctaatttgcaagaatgtatcattcctcttatcattttcctcctcaatctcagtccagtgacattttacacacacacacacacacacacacacacttcaccttggctactctttacatcctgattaacaagtataattagcaataaatatatgctaatttaatgccatatggaagttttttcttagagactgaagggaggaaagacatgggaagtgcaggattgctatattttggaaactttctgcatggtttcctgtgtaagtgaggcaaatatttaaaagtgagagtgtctttttaactatatttcatattccctctctaggtctcttatgctatattatggagttaaagaatggattttctgtttccccaagaaatagacaccatgctgtgaaagaagttatggtttctcactggaagcaagaaaactcatgcaagaaatgtgtctgtagggaatggccaccaatatgcttcataccaacaatacacagtttcacccttccaccttcctcgtagtgggggtcccagggctggaagatgtgcatgtatggattggcttccccttctttgcagtgtatctaacagcccttctagggaacatcattatcctgtttgtgatacagactgaacagagcctccaccaacccatgttttacttcctagccat

SEQ ID NO: 6571 - DNA, 2300 bp, Homo sapien
acttttggtttgttttgttttaggtcagttaggaaagcaaattcagtccctttcatcatatcttggctagaagctgaataatatgagaatttttagagtaatttaattcacctcatcagtatttgttgtagctgatctcaaaagatgcccgcccccaatgtagcatgctagtgaggaatcaatactttgtatgatccccttattttcaatctgagatgagtcttggattcacttttggttaaaagaatgtgttggaagtgaaactgattgaattctgagacaagctcctaagaggccttgtagcttctaccagcatctcttagttaagttgtttagggggatatctgactgcactgagacagttttgctgtgatgaagccccagttagctatatggaaaagactcacaaagagaggcctctgctcagtcatgctctgatgtttgaaccatctcagacatgtgagtaaaaaagttatattggacatcccagctgcagtacatgtcacacgagttagaaccaagaaattcagctgacaggtacacggtacagcgtagctgtcacggtcacatccagtaattcaatccatcccagctcatgacccagtcactgttgtgcagacaagatttccccactgttccctttctgaattcacaatgcacaaattcattagtataataaatgcttatttttagatgacaccaatagataaccagaatagaaatcaacagtcagatcctgttaggccttggaaagcagggccctggccctggtctctgacaccttatggggtccaagatttgaaggatttagcttatcacagaagcaagaaattattaagattgaaacggaaacatggcatgaaaataattatgaaagacttgcacaaacaagttacatattttctattgaataggctttgacaatgttggagtatacctaaattaagctaacttgttgtcttggatttgatggaatcattctgaaatcgaacagcccctattcctactgtatgatatgggcatctgacccagagaagaccaggtctcctaggctgtgaagggaagagcaggtgcgtaaggctgtgagccagaggacccagagaatcccaagaacacctgagcagagaaaagaacaggatatagacttctcactgtgaccacttcaagttagatgctgaaagggcctaatgctacttagtggtgctcagtgaagtataaatctgtcttgttctccaaatgagcccttgggactaggccaagactgcctcccaagagaggcaggaccacgttcctacattctagtcatgtgagctatctcagggatacctggggccacgtggaaatcaggtctagaatggtgggatcaggagcccaggtgatctcagcctgaccttccagcctcatcatcctcatttcattcccctcccaggcaatctggtctaaggcactcagaaatgtacttctcaagctcgttcccacaacctgcctgcatggttaagacatggtctgaccccgtccctgtttggttttgctcagtctataccttggacacattccttaaccacaatgcgttgataaaatttaatcagagagaccatacttcataggtgtgtcctgcgtctagaatggaatatgctatcaatcaatgcggccagtaattattcatcaccaggagaaagaaattcctggcctttactctgttggaccccagccccatgtctcaagacatcacctgcgcgccgtggcaggtctccctgctgtaggcacctgaatcacaggaactaaaggtagggagaaaaagaaggacagatgggcaaaaatctgtgccattgaagaggaaacctaagaccgccgaagaggagaactgcgttgttagactcctggcagactcgagagcccgagactaaccaaaccggtcaccagggccccgcggcgtaggctgcgggctgttctccttagcttccggtagtctccccgcagctgaggtccgggccgggtcagggcgctagctggttaccatggacacggcgagcggacgcacaccaatcagaagactgcgttccttgcccctttaaatacacacagcccaaagcaatttactccgttctgctggaacacaaacgcgcttctcagtttctctggaggaacttggttggcgaagagcttggcgcttcttgtaaaccttgtcccgctggacaaagacttgtgaaggaacacggagtgccaccaggactccgtggccctccccgcctctctctcctttttcccttcatggcggtgaagctgtggacgcttctctt

SEQ ID NO: 6572 - DNA, 2300 bp, Homo sapien
aggatcagtggggcaaatacgtataatagagttatttattgggtttggccgggcacggtggctcacacctgtaatcccagcactttgggaggctgaggtgggtggatctcgaggtcaggagatcgagaccatcctggccaacatggtgaaaccccatctctactacaaccacaaaaacaaacaaaattaactgggtgtggtggcgtgtgcctgtaatcccagctactctggaggctgaggcgggagaatcgcttgaacctgggaggcggaggttgcagtgagcagagatcacgccattgcactccagtctggcaacagagctagaccccatataaaaaaaaaaaaaaaaaaaaaaaattatttcttgggtctgaaggaaccctagaaattaatccaacccaacctctatattaggtaagattaggattagaataataacatatgggcagttaagaacctggattttgaaatatcacttcccttgtttgtaagtggtgataatgaaacatatttcacagaatgttgaataactaaatgggatgaagtgctaaaacagagcacagttcccagcaagtagaaagaattacaaaaataaccatataattttgttatattagtgagccaaagtgtgagaaacagggcatttcttaaacatttgatgaaaaggaatttcacacacttgatcttagccaaaaggctgagaagcgatagaaaggaatttttaaacctacaaaataacatctgaacagaaacctctgtcccagtagacagaaatatgcacaataaaactgcatgatttggagggccccctgaagacctgacctacacccttgccaagctacagtgttctttctatgggctgtctttcacaatgcaggggaggggaatcttagaatcctttacctttaatgtaaatgtgggtaccacatcaccctatttataatgatatttttccagcctatcccctatgtcacactcaactctcctctgcagtctcctaataatttgtgcatatctctgacattgctcatatcattcattctcgttacacccatcatctcccagagtagttataggtttgttttagtgaaaataaggacagtttcttattaaattttgtgatgctggtacctaacagaatgccagggaagagggttaaatgataagggaataatggcaacactgaactactgtcaggagagagggaaatgtgtggctatatcattacagtcaagatggaaaaggaaactggaaggagacggaaggactttaaaggtgaacttcgtcaccctcacacaattacaataagaagaaccaatttttcatcatgtctaatgacaagcatttctccctgttagctatgtggaagtgcccactctccttttaaagctgtttctcccaaaagttaggaagcctaaaaatatgaacatctaaaaaatagagagatattaaggcaattatttggtggaacctatgcctactaaataaaaatgaacttttagacaaaatacaagttaactaaatttattttagatgtatgatttaaaaaatctctaagcaaaataagtgcagcagaaaggttagaataaggatgtcatggggacatggggactagggacatttatctgagtcccttccttgtgccaggctctgctatttatttgagcttattgcaatagtcaacttgtagatatggtaggctatgtgtacattaaaaagaaaattgtgaagaagaaacctatgggtagaaatttagagtctcacctgtcacactaaagttgtttcctaagtgttttctcctttttagtttctctaaaaaaaacaattctattgaaaatggacattgaataaagtaaacatgtatagaggaatcatgtcacctcagacagctgtactgtttaaagtgataggaataccccagtgacatgacactgaggaaaaacagatgaattcgcttggctctacataacctgctagaaaccacaagttgtacctatgacaaacaaattgtgctatctttgtgtatcaagaatccacagctagtttgtaatcataattttccagatcactgaaagaaagcagtaaaatatatgggaaaatatgacaacacaccgaaatgacaccctctccactgaagcttcagacttcctcttgaattgttttgtcagatcccccagctggcagcactggctgtccctgcccctcagcctccttttcctcttggccgtaggggccaacaccaccctcctgatgaccatctggctggaggcctctctgcaccagcccctgtactacctgct

SEQ ID NO: 6573 - DNA, 2300 bp, Homo sapien
aacagaggtgcagctatactacaccaggtgacctctttttgtcaaccataatcaaaatgtgctaaaggaaggaatttggtttcacttgtcttaataagaaacttggggtttctgattcggcccatcgtggctcctctcttatcctgcccatttccttttcactaaaccacttggtactttccatctggcagacactcctcccaccacacactaaagtgagccaaaggaacgtgttggttaaaggttcagtcaagcagacttttacctgaatcctagatcctctataaactcactctatatgctttggagtaattattcaacctctctgaacctgtttctttgcttgtaaaatgagataatagtagtaactacttcaagaggataccaaatggattaatataatgaattcaaagtattttgcacagctcctagcacaaaagagctcaatattaatatttggcataattcctctcctggaaatgtttgatattaattcctctctggaaaataggaccacacccactgtaaaacctttgctcaaagacccagcacccatattcatagctttatctaaggagacctgccctcccgaggccagttacatctcctttaggaaaattttactaacactctttcccaccactgcaggacctttgcctatgcccccactcataccacctcagccagctccgatgacagccaactttgtgggactgctctacagagctatgccgggctgggctaggggaggatacctcctacacacaagaggtattcctgggcacaaaggagactctccagagggactcagagaaaggactccttgaacagataaggtacggagtagaaaagttaactacaggaaaggctctctagaatggttcttctttagcaaaacacagttgagatctctggacaaagacgcaaaggagataacacatagctaatattccagctcttatctagctactaggcacaaatcagactaggacagggagtggagcatgaagaaattttttctcaaatttacctgggtaattctggcttcctgaaaattctctcgttactaaggcaacattatcccaattatattcttaccctccacattgtcacactgctcagcacagcaacctcctacacacacctggttttcattgcaattgtaacccacccattaataatggttttcaacgtaagttatgcattaaaattgcctgaagagcttttagaaattgtgatgcccaggcacaccccagatcaattaaatcagaatctctggcaccagtaattgatccaggcaacagtaatttttaagctcccaggcaattccaaagtgcagccaaggctgggaccactgcttggttctcagtataagccctgatctatatagtcatgcattgcttaacaacagggtatgttctgagaaatgcatccttaggcaattttatcattgcgcaaacatcatagagtgtacttacacaaacctagatggtatagcctactacacagctaggctctatggtatagcctattgctcttgggctacaaatctgtacagcatgttactgtagtgaatactatatgaaattgtaacacaatggtatttgtgtatcaaaacatacctaaacatagaaaaagtaaagtaaaaacatggcattatactcttatggcgtcagaccactgtcagtcacatatcattttccaaaacactgttaggtggctcataactgtacttctcccgtgtcctttaggaccccaatccaacctcacagagaagcatctgcagctaagatagtaaattgcttcagagatgctgctgaagggaggagaggcctgatcctgtttccttaaagaactcagaccaagaactacacacacacatacacatatacaaacacaccctaacagaccctgcattttcttcccctaatgcaggaggatggataggtgactcaagagtaagaattacagactgcagtgaagctaggaaagtcactgtcctccccctatccaaggtacaattatctagcaggacctctatgatgtcatgcagtggtttagggcccaagacctcaggtctcacctccctgggctgcctggggttcctgcagcagccactgccctgcccaatccctcccataccccaccatgttggtgggtacccccaacctgctgacactggatgaagctgatgccacctggaccctcatcaaggataaggtaggtaaagtaaggaggctaaagaggaagcaacgaagtgtgacctgcatgggtctcagcagcttgtgagtaggaagggg

SEQ ID NO: 6574 - DNA, 2300 bp, Homo sapien
tcacctgttctatagaaattttgcttaaacatagtggctaccttcctttagttgtgagctggaaattgtgtgagagagtatctgggtgaagggagatattgttaatataaccttagggcaaaatgtggggctggtgccaggtctctggattccttcggcctttgttgagtataaagaggaaggacaactgaaccacccctttcctttcaaggttttatgcttgtgagagacagtactgatgagggtgtggtggctgtaaaggagaaggaactatggttccttctccaatagctacttggtacttttttcctttttcttgtgaggatgtcttaccattttcttgggagcgagtttgggttgtgtctggcaggagtggagatgggaatgtgtctgtcttccttactggaaaggaaacagctcttctttattggttggctctgaattcttcctcttaagagtattcagtcagttaagggtcttatttgctcatctcccataggtcactgggtaggtttctagggaagcacctgtgatagacagaaatttcttcttcagtagtcccagagggctagagtcagatcaaggctggatttcttgattgattgttcattcattcattcattcactcacttatttgcttcagcattaatacgttcaacgaatatttattgagtccctaggccctggggatacaacagacacaataagacaaaccctgccctcaaagaagctacctaatgtggggaagatagacaaataaataaatagtttcaggtagtgaaaactgccaagaagaaaggattaggaagctagagagtgaaggtgagaagatgtgctatttagatagaattgttaggcagggcctatctggggagatgatttgaaacaaacaaacaaacaaaacgagcaatgacagcaatgtgaaaagcaggagaaggacattctagtctaggcagagggaacaaaaagtattcaagaaggcctgtgtcactaaagtgtgagtgagaaggagaatggtaggaagttatacagattagattatgtaggctcctgtaggccaagataaggaatttgaactattacagtgtgttaggaaattattggagagtattcagcagaggacaggtcatataatttaggttttaaaaatatcactctggttgttttgataactcttaggaggatagtaaaggaatcatggagaccagattggaagctactgcaatagtgagacatattttgaaggtagagatgatagagtttgctgatgaactggatattggaagtaaggaaaagaaaaaacaaggataatgtacacattttcagcttgagcatttaggttaattttggtatcattttcttttgagatggagaaagttgaaggagtaacaggtttggtggtagaaatctgagttctgttttagacatgtcagttgctgattgtgtgtatgtgtgtatgtatatataggtgtgtggagttttcagtggagtggtggttctgagttctggaaagtgagcttctatttatcccttccattatctcttctctgaattagatttagaaatctggactggccagtgacctctgggcttgccattccagcctggtataacctctggctccatgggcagctactggctcctacagaccggatgaagcagactggagacacaagtggagaaaacctccagctggcaaatcctcagagtgtaggcctctggctgccagtcctgcccagcctgcctcatggagaggatgaattggctgagcagactggcctcccggggccctgggcaccgtatacctcaaggggccaatctccaaaccccagtcatggctgatcccgagacctgcctcatggtcttcaagaatcactggtcccaggtaggagactgtatggcaaagggccttgtctgctgatcacctgagttctcccagccttctatattctcctcatcccatttagtaaccttatcaatttagattccttccatcttctgtcctttttccctaggtggtgcgaatcctggagcggcaaggccctcgggcagctcctgggggtgcagacgatctcagtgctgtgcgcaaccacacttaccagatgttgacactgctggcagaggaccgtgcagttccctcggcccccacaggccctgggcccctgctggagtttgctctgcacgaggatctgctgacccgtgtgttgacatggcagctgcaatgggatgagcttggggatggggtcgaggaacggcgggctgagcaactgaaactatttgaaatgctagtgagcgaagct

SEQ ID NO: 6575 - DNA, 2300 bp, Homo sapien
agaaataatttttaaaattaaaaattgggttgacactttttatttgggtaaattagatctttttttttttaacccaccatctactgttaccattactgcatcaacgaaagagcactgcaacaccaaaagaataggaatgataatctctgagaataaatttatcttcatgaataaccatactgtctttctctccctccatcttggatagatgataattttatcatgtacagggtccttggtccagtgtttaggaaccactactctaaactctgaactgtaagttctgactgactgggcaagttgccaagtgttctaccaatatggaggcctgtctggactccagaaagaagcaatgagaatataccacaggatataggagttggctctgaagctaagactctggaaaagaatggggactgaggctgtctaattctcaggaaatggtctctccctgtccactgtagagttaaggaaagacttaactctttctgagtctggaaagaataggatgtcccaaccccatggctgactagcagtagagaggaaaatttagtagtgtgaaagtggccattatcactgaatgccaaaccaactttccagaatttcacgtgcatttgggttggtggggagaagaggacctaaaagaatgctagtaagatgaacccaactacagggtgtggagaggaagagataaattttcaggtggctaaaatgttcagtatcttgagactgatgatgatttcacagatgtgtacacatgtcaaaactcatcaaacacacattttaaatataatataaactagctttttaaaaaattcaactgtaagaaaggagagtaaggccatcctgtttgggatcctaaatatagtactgtatagggcaaaccatatgacctccataaaagtagaattagcaactgaatatggtcaatccaatcaaagacccacagttaagcacaggtaaggagcaacagtggaataaggttgtccagaagcaagtagagagaaaacacaagctgtcacagcgcaaaacccttcatgagagggcccatcttcaactatgcagtccagagaaggaactcgaaggaactgaagtttctgtgattactctgttgaagtctgagcctcaaatatgactttcattaccatagtactattgcctatgacaccttcattttctcgtcctccagaatatggaaagtccatgggagcagaggagtcaggtgcacaacacttccatctaagctgccctactttgtctaaaactattgctctcactggacagggcagtccatcgaaggaggcctcagaaccaacctctcacctttatccaagtctcacaagccctaattccctcctcccatgcctcgccttcaactccctcaccaatttgccgccaccccgcaggctcccacctgcgccttttactctctctctcctcgcgcaggccttacccctcactctagtcccagggtatccttcacaccagccctcagtagccccagccctagtaaaccgcgttcaggagtcccttcaacttggcacctccgaaagcacccagcctctcacagcccctcatttgtccactcacctgtaagctctcaccctccttccctatcttagacactcacacccggaccctcaccacctgccaacccctcacaaccagtacagtaaccaaacccgtcaccgtcttttcccagtctctcatccccacaaacgactctccaggccctctggcccatgcgtaccgttcactcacggaacgccgaacctggccgggcccggttgctgctgcggtgttaggtgagttcaggccgccgccatcgcttctcaagcgcaccagccgcgccccgccccgcgccacacgcagcccgcgcccccgcgcaccacacgcaaccgcccggcgtcgcacgactgggcaatggcgtgccagctcattggctgagccggaccaaacccgagcaaggacgcttgtttcctggcaacggctaaacgcaagggcggggtcgccgacggctatccgagggaggagcaccgcctctcctcttggttccgtcccttcgtacgtaaaccccgcccctcagaaggactccggcgtgtcataggcgaaggcctctgggaaggtggaggccggcagggcggaggcggagcccgggaaggaaaggtggaaccagagggcagaaggcgggacctaaggagaggcgatttttacaggcagggaaagatcagaagggcggggcttgggagagatggagccggaagaaagacgagcgagaaaggggtggggccatggattcc

SEQ ID NO: 6576 - DNA, 2300 bp, Homo sapien
aaacaaacacagagaaaggtgtacaatccttaagtatatagcttaatacattttcacaaagtgaacacacccatataaccaagcactcagatcaagaaacagaacatcaccagtgcctcaggagccccactctgcccctttcagtcaatgtttttccaagaataatcactatcctgaattctaatatcacagtttagttttacctgtttttgaatttatataaactaagcattagtttttaattcttcctcttattttcctcttatatccacccaatcatcaaaccatggtgatctaccttctaaaaatccacatgtccacttctctgcatttttgctactctagtttgggccttatcagcttgtttggtcttttgcaaagttactgtataactatcaatctatgtataaaattctttatagctatcatcccaaaaataaaatctaaattccttaacatggtttataaagttctccagtccatgtcttcagcctcatctcacaatgtttcctcacatgttccctaggctcccgacacactgtactgattgcagttcttacagcacctcccacatgctgtccattcttcctttccctggtatatgctgatcctttggtctgaaacttctatttctttttaaatactttttatttgaactaattttaggcttacagaaaagttgcaaaaataatacagagttctcataaattccttatccatcttcccctaacgttatgatcttacataactatagcacaatgataaaaaccaggtatttaacattggcaaaatacttttctttttttcttttctttttttttttttgagacggagtctcgccctgtcgcccaggctggaatgcagtggtgcgatctcggctaactgcaacctccgcctcccgggttcaagcgattctcctgccccagcctcccaagcagctgggattacaggcgcgcgccactacgcccagttaatttttgtatttgtagtagggacggggtttcactatgttggtcaggctggtctcgaactcttgacctcgtgatccgcccgcctcggcctctcaaagtgctgggattacaggcgtgagccaccgcgcccagccggtaaagtacttttaaaactacatgccttatctgaaacttctatttttctattttagtttatcttactcttgcttgtttcccaagactcggcttagacaccgtcacctcccggaagtcttccctaagctccttcaccgtaccttcctctcatcctctatacatgcaaatcatgctaagtgctgctcctaggtggcccccgtagtaatgtacttattacactacgctgcaattctctgaggtcctggagagcagaggccggttctaattgatccggaatccagctgggcatgcaggcacttattccgtgttccttgactaagtgctcaaggggtgacggagcagcacagcacagcggtgttgggggagccaggggcagtcaccgctggggtactaaagtagagaccaagctatgcacgacgatggagcaaaatgaactagagtgcccgcagtcagccctctctagggctccacttttccgcaggcccggcccacctactgattcctcctctcttttcgtgatagcctcgcccctccacacccactcttccactccaagcgtctcctggaatccatggccccacccctttctcgctcgtctttcttccggctccatctctcccaagccccgcccttctgatctttccctgcctgtaaaaatcgcctctccttaggtcccgccttctgccctctggttccacctttccttcccgggctccgcctccgccctgccggcctccaccttcccagaggccttcgcctatgacacgccggagtccttctgaggggcggggtttacgtacgaagggacggaaccaagaggagaggcggtgctcctccctcggatagccgtcggcgaccccgcccttgcgtttagccgttgccaggaaacaagcgtccttgctcgggtttggtccggctcagccaatgagctggcacgccattgcccagtcgtgcgacgccgggcggttgcgtgtggtgcgcgggggcgcgggctgcgtgtggcgcggggcggggcgcggctggtgcgcttgagaagcgatggcggcggcctgaactcacctaacaccgcagcagcaaccgggcccggccaggttcggcgttccgtgagtgaacggtacgcatgggccagagggcctggagagtcgtttgtggggatgagagactgggaaaagacggtgacgggtttggttactg

SEQ ID NO: 6577 - DNA, 2300 bp, Homo sapien
gggataatgaaaaagctgaactcattgggcaaactgtcaaacagaacttctcacaatgtgatgggtaggttccaagagggaacattctgagagggagctaccagacaacacgcattccaagagaaccagagggaagctgcatggccttttatgatctagccttagaagtcacacaacatcactcctgctatacaaactatcacaagggagtggtgtcgaagaatttgtgaccattttttttaactgccacaacattatacagtaaatagtaataaatgcttgtcataggtttttttgctgaaagggcatagataggaattctagaagaaaaagtggaggaagataatgagcttagttatagacccaatgggttgaaggtgaccgcgggatacccaagtaggaacatccagtgagcagttagtcatatagataactgaaactcagggagagttctcgggagccactatatgagaaaggaagtcctgtgggtgactgacgtcaatcagacagagttaggaggatggcaaaagtagaaagcctagaacagaatccaagaaaaaaaaaaaacaccatcatagaaggaatagacagaggagcttatgaaagacactaaaaagaaacagcaaaccaagacattatggcattacaaaggattttattcattttgttgcattactttgaatgttgtctttttattttaacaagcgtaatactttgcaaaaagaaattaagaagccatgggaaaagagagtttttcaaaatttaattagggaccacaggtttttcttctaaaacacactccaaaaacacaaacctgattttatcactgaactgtgaaaaactcttcacaggttctctattgccgttgggtaaaatccaagctttataacatggctgacagaactcctcctgagctggcctctgtctatcattcaacctcatctctcaccactacccgctaggccctctaaaataagccaattgatatttgcccagtcacccacgctttttgatatctctatgcctttgcccactctgtgcattctgcctctagtgctcttcaccctcccatctctgtacccaactcctattcatcctgcagaacccaggctctgtagggccacttcatgtgtactataatagccttccgtgtatccagctaacagagtactcatcagcagcctggcaatgactgctgctgtttagttacctcatgtgtaattacctgctggcctgactatttcacctagcagactgtgagcttctggagaagggggagcgtgtcttattcatctccaattcctagtatttagcacaatattggcctggcacacagaacacctgcctatgggtgttctgattttgatttgttgactgagaaagatgatagcagtgaaaggaacatcaggttgagggagaaattgtagggtttttgtttgttttgatataggagatattgaagcaggttcacaaaaagagaaaagttgaaagattggggaccataaaacacatggaatggttggtaggatcaggcactagaagtcacaagaaggatatgaggacaaaagcaccataggatggcccctatcacactacctatgagaatggtgtgatgggggaaggcgtatgtggaggtagataagggtaggaagtaggttacaaaaatagagctcacttctcatgtgagaggcatctctttgtccctggagaatagtttagcacctgacatagataagccattcagtaatagttgttaaataaataaatagtgaggcccaaatagaatttgcaaagataaaacagagtgtttgatcctacactaaaactgaggtcttctgacccagaggacacctatgtagctcagttgctgtggaaagaggggaggaggaaaacagagacaagactcaggcttccctctgaggcatgcacccccaccttctccagggatctcattagaggtgtttagctgggcaggtgtaagcccaggccctgggagacagggcagagtgctagagctagactgtctccaccccttcagtagcgctagctctggttgtgttgctaagagccccaaagacaaagaagtcacagcagaagcccaacagcagcctccttcaggcagtcaggcactagtgcccaactccagaagtcccctacaggcagagagggtgtggacatctcacaccccagcaccagaccacagaaccatgagccaggacaccaaagtgaagacaacagagtccagtcccccagccccatccaaggccaggtgagaagtcctggtcccttgtgtgggatct

SEQ ID NO: 6578 - DNA, 2300 bp, Homo sapien
ttcagtcccagcaaagacctcagtcaaccatatgaagggttctaggggtgtgagcatctttcagagttgtccaccactgggttgaggggattaaacttttatacctctgtgctgatcggtcattggatatagaatgcccaagaaagggagcataaccttggatgagctggctttcttctgcttaggcaactcctgaagggttatgacagctgagggccatcttttaggagcactctccacagctggaaaataaatcctccatttttgaagagggttctgggctttgcatcacagcatccagcgcaggggtgaaggagcataggggagtaaggcatcaataataattcctaaatttctgatttgtacatcctggtgggtgcacttaacgaccatatattacaatcattggcttgcttgggaaaatcccactagagtaggtgctactgaggggcaaactatattggacaactagtgcatacccctagaactggcatagtttgctaaataagtgaatgtccatctatttctattttcactcccctctcccttacatcctttgctcccttccctcctcatcgtactgtcatccaatgtgggaaaacttgagcaggttatctgaggccccacctgtgctggagcggaacaaatagcaaatcaagctcctctggtccaggctctctgatgggcaagacaggcagtaccaggaggaaggaaagggggagcagttgatgacatctcaggcataaactgtctttcaactctctttcaatgcttcagcccctataaactcagggctggctgaaccaggtcctctccaaaagattaattggataagggcctgctgaatcccccataaagccagactccattctctaatttgctcttccactgatgcccgcccccaacctcttacagctactgctgggggtcagaagaatttcacatcgtattggagttcatccggaatctgaagaatggataggaatctggagataggaatctggagataggaatctggggaagaaaaggaatggataggagaatgcatagggagcagggctgaaatagtagaagaggcaaatcctgccccgagaagctgaacccagttcagtcctgcacccttcagccctgttcccgctgcaccgcagtgacccagtccccttctagccccctctcgtgggaacctgacaccctacacaggcagctctgcctgcactgagagcaaacagggagcgttagcgtgtcgggtgggcgtgggcgctgcctggagacggtggagaaagccaaccttctccttctcttttgcctgcgctgggccggcgttagaattatatcccatcctcaccttactctggtttatccttgtcagtgcttgccaccacccccaactgccctcaacactcaagtcagaagcttcctcccgggagcccttttccctggcaaggcttccctggagccaaatctcggccccggccccacccccactcccgcccagctgtggagggctccttgggacccttaagtgcaagcctgagtgttaagcctcagacaggagatggagggtgcggagacagatgcaggagctaccccaggcccgcagcgaggagctgcagggaactacggtagcaatagtgtcacggtcactgcggccactgcaacacagtacggtaaatgcggctctaggctcagactaaagcatccgcgcctcagcaggtgacgcacgcagacctggtctccaacgccacctccacgttccctgatacaccagagaaagatgctggatccgtggcagccgtctctacccaacccctcctaccctcccttccccgaaacctccccctacgctgccaatactcttgtcttcaatctctctctctctctctctctctctctctctctctctctctctctctcattcctgggaatcgggggtgggggcgggtgataaagagaggtgggcaggagagaaatctctaagaggagacgggacacatctagggagggggcgagcctggaggacagtcgcacagggaggggcagaactcccgagccagggagggggtgcacagtcacctggcgggacagaggctggcggagggacgggaacccaggcggggcgagccgcgggagagtggagggcaggcgcctgggctgggggcggggaccaggcggggcagggggcagggagaggagggcggcgggagcctgagccggaatcgcagcgtgagcaggtggagccgcgttgggagcccgccgggtcgagctgagtaaggcggcgggctcggcgggggccatggagc

SEQ ID NO: 6579 - DNA, 2300 bp, Homo sapien
ccatcaatgcatgtcatttttgtagccatagaatttggatttggaaaagccatgtaacccagtggaaggcaagtgtaaaaattctgggaggcttctgggaaataaatgtcctaaattttaagatggtccccttttttttttaagatcttgtgcagagttgtgaggcctggaatgaagctgacacctgtgcgtatgtgggcacatacacatgggtagggggtgtgtgggggacatgggggagtgtgagaggtgcgggatggggctcatagttgagcagtggagagaactgtagaaaaccagatttggagctgtgaatgactcacacttaatcaccactctaccaatcctctttttcaattatgtttgaattgagtttcctgttactaagtactgtttgaattgagtttttgttccctcagtctgaaagcattttaactggtacatccctgatggatctctctgggtaaatgtagtttcactggaagagatggtgattcccaccagattcccaagagagcttattttctcttgtattaagcagcaggggtcaggcttatggccttgtatttgtagaaatcagccatcagcttagcatcaccagatttctggcattagctgcccacgtctgtggcacttcaggcccatgtaactatttccagagtgacacaagtttcttccacagttgtcaacaagtggccctcacaggttcagtgagaagaggaagagggagagagatcatcaggattaatggattacttgcatttgtgagacggtttgccaagtattgctacaaacaaggcacgggattttcttttttcttttcttttttttttgagatggagtcttgctctgtcctccaggctgtagtgcagtggagcaatcttggtttactgcattctctgcctcccaggttcaaacgattcttctgcctcagccctcccgagtagctgggattacaggcgtgtgtcacaacgccctgctaatttttgtatttttagtagagacggggttttgccatgttgcccaggctggtctggaactccctgcctcacgtgatcctcccccctcggcctcccaaagtggtgggattacaagcatgagccaccgcgcccggctaaggcatgggatgtttcgaactgctgacattagaaattcacaatccacatcattaactggatcctccatgcccactctctccctctctgcagcagcaatttcaaatctttactctccgcagttccacagaacacaagaaacaaacaaacaagcaaaaaaagtcaggcaggagcccaagtaacctctatcaaagcaaagaccagtgcctagtctaacgcttttaaggattttaaaagaggtgaaggtgtcctgcttatcctccaagcttgggtgctggggccggggcggctgagatttaccagtgaaacccaaagaaagagagggcagaaaactagagaaaagaaaccagataatgctacccaagaggacgaaataaagaagcaggaaacgaagcctgaggctaaaccctggagatgactattaggaaaacaccagaggatgccccgcccgccagcccacaatgagcagcctgtccaagtcacaaagcggggcctcgggccttgacagttcgcgatctgtaagcagaatgttccagggcctccctgtcgcctgcatccagcctgggggcaatcttcactggtgtgggaggccgaaagtggacggcgacggaggcccctctggttatctctttgccgtgccaacacagtctctgcgcccactaagatgcatgaaataaaaatttccgtgactcgccctttgcagtggagaactgaaacaggcacaccagggaattggagcggaggagggtaactcaaactcagagtgagagggtttgcagggggccgatttggggccaacaggcttcccagcaggcccccggcgcgggacagcggaaggcgaaacgctttcaagagaccccgctgccaacatccccacgccctcgcgccctcccgccgccccagaaggccaactccgcctgcctgagtcacagctggagctggggaggagccagggaaaggaggcccctgaccgtagtgcggccagcagttgcaggcagacggagcagagcggtcagggatcatgagggagagtgcgttggagcgggggcctgtgcccgaggcgccggcggggggtcccgtgcacgccgtgacggtggtgaccctgctggagaagctggcctccatgctggagactctgcgggagcggcagggaggcctggctcgaaggcagggaggcctggcagg

SEQ ID NO: 6580 - DNA, 2300 bp, Homo sapien
gacatgcaccaccacgcccagctaatttttgtatttttagtagagagagggcgtctccatgttggtcaggctggtctcgaacccccaacttcaggtgacccacccgactcggcctcccaaagtgctgggattacaggcatgagccaccacgcctggctgaattctttcttctaaggaggcaagaattgaggttgctgcagatgcatacagattcgctgccagtaactcagatacctgccactgctaacatatttggtgctgactgactcagatatgttccctagtggtgagagatctctatgcctcaccttcttcagctggaggcgtctgatccctgtgtgtggtttttcttctcctctctaaaaaaaaaaaaaaaaaaaagaaaaaaaaaattcgaagttctctacccacctttatagctcaatgagctcataaatagtcatcaggacctgctggttgttgcagatatttacaccaaaacttcaaaacaatgcacacttgcaggatcactgtcttactaggtatctttcgggactgcattccaaaagctctccatttccattactgtgttccatggccaagacccacccacatggccaccacctttgcttcctctgtacccctgtactctagttgtaaatgccagttgcttcccacccctcacttccctgccacaccaccatatatatgacagctagccattttataccagcgctactcaaaattgtggcctacaggccagtatccacctacaaattatttgttcccatgagaagataagttcagaaatggagagtaagcatttagaaatgtctatagcaatttgacagaatcattatttatcatttaatttaataacaaaaagtacacctaacgccatatggtatcctgaattagattctgaaacagaaaaaggacattagtggaaaaactgctgaaatctgaagagagtctgtagtttagtgaatagtaccatgccacagctaatttattagtttcgataaatgtaccacagttatccaagatattaacattaggggaaattgaatgaagggtacacagcaactgtctactctcttcgcaacttttctgcaaatctaaaattattccaaaataaaaagtttatttttacaaactgggttcatattttgtgtctttttaaattttttcttttttttcttttttctttttgagacgaagtcttactcttgtcccctaggctggagtgcaatggcacgatctcggctcactgcaacctccgcctcccgggttgaagcaattctcctgcctcagcctcctaagtagctgggattaccggtgcctgccaccacgcccagctaatgtttgtattgttagtagacacagggtttcaccatgttggccagactggtctcaaactcctgacctcaggttatctgcccacctcggcctcccgaagtgctgggattacaggcatgagccaccacgcccggccaaatttttgtttttctagcaatttaattgcattttacaaaagtgtcagtctgcagtggatttgaaatgcaaatgtttaaaataaaattggtcttgtcaccatggatagtttgagaaacactgctttgtacactctgtatcccccatggagcttgtcaccataattgctatgcactctgatcactaatacttgttgatgatggccaaacccacaggtgtgagttttggaaccagttgctgcacattgtagataaagtcacagcccagggccctgtcaatcctccaatacagggacatttcaggactctgttgtatactgaatactgccatatcccagggccctgtcacatcgtagctgttgcacaccagatactatcacagctcagggccaagcaggggctgtgacaagcccctgggaaatgccagtatataaagattgacaggacaggccctgggttgttctgcacatggaggttcctgggacgtgccattatttgagggatgccagagccccactctgtgtctatatctggggtatgacaaggccctggactgtgacatggttctggaatgtggccacgccccgtgagtgaggtattgagttctgggctgtgacaagttctgactgtgccagggtacagactcttaattccttctggaatactgagagtgccgggaaatgacagcttaatgttcagggtacgtcttagtttgtcttggatcttgtgacagggacagctgcattagtcttggagtgaaagtgtatctgagtatgttgggccacatttgcagtagtttgttctgaactccagagctattgaccaagc

SEQ ID NO: 6581 - DNA, 2300 bp, Homo sapien
tctttggagaaagccacagaccacagactgtttctgcgattccgtgtttatttcttccagccatgtccttaaccttggcaaaataaacctctaaattgattgagacctgtctcagacatgttttgcttgacacatccaaattccagttccagcacttactagctagctgtgggatcttgagccacttacttaatcctactttccttctccgtaaaatggggataattataataccgacttccaaatttgttgtgaggattaacgtaaggcagagtcctcagaaaagtacctacagagggttattcgggccaagggccaaggttgaggactgcgacccaggacacacttgcaagttgtcttgggggagcactctggacaacaaaagagaggctcatattttcaaagaaaaaaagatgaattaggagaggaaatgaatacaaaagttgttcatcaggaattctcattgtttacagaaataacactggttatacattgtttagcgcttggctatacattgttgaactataaggtgtatggcatttaatggctacttggcatagcaagtggtttcaagagataattacttagctcaaagaagagtgagagtgactgttgctacattttaaatgcctgtctgggcctgataatttaaaggggctcatcttccttagataaaaaggttttgttttgttttgtttttcatagtacataatcttaaaaatgcatgctaattattactgtgagtactctatctgagatgatgtccccagaactggggggaaaaaacacttgtaaaaaattatcaaaggaaagaactgacaggacttgatagctctgaggattcctcagaagcactcgtcaaacagcttagggtttaattgctattctgccacttaacttctttgtgcctcatcctatctgtaaaggagggtaataatagtatttgcagggaccaagggaaactttcccttcgccctctgaaattctgctgaaaaatcaacccacaaaaaacagattaattgaagaaaaggcatagaaattgtattaatgtgtccacggggaaccacagagtgactacccacttcccagacgagttcagaagcttaggtgtcattcaggcaaagggggttgtgggagtgaggggaagaggaattctgctgagggagaaggaatggatcagggaacagattaactagcacattatcatgtgaaggggtctgttcaggtgtgattatattcttggttttgtagggaggggaagaaaaaaaccgttgttccttttgatgggtctggacgctaggtaacggctttgggagagagggcgcgggagtaggaaggccagacacaccttaaggcttaacttagtaagtcaaaccaccatattttgggtatggatttctgagccccaatataataggtacttcttagggttgttgtgagaattgaagattattaattataaagtgcctgggttggtgcttggcacatcataaacaactccataaatgctcgcttttactgtcgtggatacacggaggtgggagacccaattgggttcccgcccatgttattggcccccacggctatatggtctttacggcttcctagtctcttcaccatctctaaggtttgtttcctcatctgaatcacaggtgagtgattctcagggtgactcaagagggctggtgccagtggcagagcatggggaatcgagggaaggcgccttcctgtcagaggcaacacacccagtgggaggatcctgcccgccctgctctctcctacctccccttcccgggctaaacgctggggtcggtctggcagctattccgggaatctgagcgcggattctgacaaaggagacgtcttccaccgaccacatcacatggagctccaaagcacgagcacggcctcccgcggctgtgacctcaaggcggagcccctggtgacctcagggagagtccccacccccgcagcccgtgcgcccggggcagggcgggggcagggagagggggcggaatcggggcggtcccgggagcgccccgccccctccgcctccgcagcgttgacagccgcccgccaccgagagatcagctgtcagagatcagaggaagaggaaggggcggagctgctttgcggccggccgcggagcagtcagccgactacagagaagggtaatcgggtgtccccggcgccgcccggggccctgagggctggctagggtccaggccgggggggacgggacagacgaaccagccccgtgtaggaagcgcgacaatgccccgctacggagcgtcactccg

SEQ ID NO: 6582 - DNA, 2300 bp, Homo sapien
cccttacgcctttgctttcctccttctcgtcctcaacttctaaacccttgttggctcttccatttgttacccccattcccatatgtgcttctttccatctaccacttgactctggtcctccctatgccagatcaactgcctgtgacccttgactgctccgcttggacaagtggtctctaaacttacttcctgctttatcttatgctcgtttttaaacattagcccatccagaagctgcaatattcattcattaattattcatttatttaacaagtggtaatgaatgcctgatacatgtcaggcactattctagcttcttggcatgcattaatcaacaaaactgacaaagatccctgcttttatttagctgacattctagcaaggagagacagacaataaaatgagtaaaccatggagtatgttagaaggcaacaactgatacaaaaaaaaaagaagagaaaagcacagcaggattagggggattgcatgtggggctggaggtcaaggtcacagtgtaggttttagtcctgagttatcaaatctgacagcctttttccataccttggtccactgctttcactgcttccctgccaaacttcccaagactctgaggccaggctccatctcccacagccccatctattcagcagtttgactatgatgtccctttcacacacctgaactttgagatttccaattgccctggcctaaatgtcataaacatcacacccctctgcctggcttttgaagcactctgcaatctgacctggcccatccacttctgtgacacttggttttaccagttcgggtgcatttgcccttgttgccttgagagtgacttgctcatgcatctggaatttcttcagcagataagccctgtgttagaattggggacagagggatgaattaaattccatttctgttcttgagatggccacggcccagtgtggaaaaaagttttccagcagttacaagacgttatggtaagagttgtctcagagttgtcctctccctgccctgcagcaggcatggcttcctagacagcacctagttggagccctgaaggatgacagtctgaagtttctcagtccagcagggaaagggcactcaagacagaggcttttccctcagttgcagtctgtgtctctcaagggcattctcttctcttgctttgtattccccatctgctttacaggccatttgccaagattagttgttaataataatgctacacaaatcatctgaagctcagggagcagtaaaatatgaagcttgacagctctggtgaggccagtttttggaagacttgtatgcttttgggagcagtttggccttgatccagctagaagtcagatgagcaaggccaagatgggagaagacatgcaaggaagacatttgtcctctgcccaaaagagtccacgtggtctgctcctagtgggagctgagagccactaaaaggggcagagggcctgggagtggaccacagaggcatgtgccttttgcactggcattgtgcagagacagtagatcacacagccagcgtatgagtgtggggactagaactgatgcctttgccacaacatgtgctcctgccttggtgctctgctgagtgcaagcaaaagtgggatccatgaggggaaatgtttaacagcagtttgaggtggaggaggccatgtgttataagggaaagttgattgatctgaaagtcaggaaccttgggttccttggctcttgagcacattatagacattcttgagtagaactaagatcttgaaagcccttctagttctgaaaactagtaatatagagaagaggtaggagaaaggcatggctaagaacccaggctctggaatcagactgcctgagctcaggtccccattcctcgatgtgacctaaggcatattacctatctcttccgtttccttatttgtaaaatggaaataaagtaatctattgtgatgttgttgtgtgggcacaaatgaggtaatacactgtaatgacttagcacaatgtgatacagagtaatcactcctcagatagatatcttaaaaaataattgggtcttgggagaggactggcctgtagggtctgatttgggagttattgtggtgtgaagcaatgtgatgtctgagtgtgatgagcgctgagagagcatgatttggggaaatcagaactttgagaggtcagtcagttcagaagtgtggaggaataggcagagccggtgaaaataacgagcctaggatccaagattttaaaaagtaggaaaatgtccagttactgaagccaggggaggagagccc

SEQ ID NO: 6583 - DNA, 2300 bp, Homo sapien
actatggggcaaagatgttcttacctcctggccttcacagcctggtgaggagacaaagaaagaaacaagtggttatgatcagtgcgatgagctctctggggctggggaagtacaggaggggcccctgaccctgcctgtgagagtggtgggggagagggcaatgggtcagttttaagaagggacctgtatactgatgtctgaaggagaggtaggtgatagccaggtgaaaatcgagagtaagggaggtgggctgggagaggacaagggggcatgtcccaagcaaagagagagaaggggagtggctggaggtaaggctgagaggcagacaggggttcatgacagcacataaaacctggggaggaatttggactttatcctgagggcagtgacaaaacaattaagaggattccgttggaaaattacttgattagtttagcatctcagaagaatcatttgggctgtactgtgcagctgagattggaggagaccagataggaagagaaagaccagttatgatgtttttgcaatgatgcaggttaaaaaaaaaaaagctagtagcctgggctatgttagttatgtggggtggagagaaggggaaagctttaagtcaatcactgattcctgagcaagtgagtacacctggcttcaccactaaggcatttgtggatgaacgaatgaaggaaggaaggaatgatacgtgaacatttaatgtattttatatgtaagtgtcgcatgaatcgatgcaggagtgaaggtgtgcgttctggaataaatgcatgtgtgtgaaagcaaaggccggggtgggctgcgcttggagggagatgtgccaagctccagaagggcctcccagatggccaaggggggagaaactgcccttccaggacagatcggaaggatgaagctctttgaagcaggaaggtacaggctgacagggatggcagatggattggtgtgtgtgactcagtcaggagatggtgaactggtccccagattccagaagtgtccagccagccctcatgaagcaggctgtggctgtggagggcatggaggccctagggtgctgttcctggaaggttttagcaggagagtcctgaggcaatggagggtctctagggaacagcaggtattccctgagcctcagctaagtttcaggtgcctattgaaaaccttattccatagagtgtgagttagggggaagtgggggtgaggagaggcggtgatggctgcctagaaggtggatgggcaagagcccctcctctttgggtgtctgtgggcccacgtcatttggaagctgaggatggtgaagcaccctgcctgaataactctcgtcaggtgtgcagccaccttggcgtaaccacgcccactcccagccctgctgtgtctggttgcccagcagcagggtcttgggactgcctgtcccttagtactgcctcttggaccagtcaggattcctggtttccctggtaacgggaagcacgtcagcagtctgggcgctcccagccggtcctggtgctgcggttgccgaggagacgctgcagcctagctgggccctggcaggtgaggggtggggggtggtgctgggaagccccaagcccagcctcaagcttgctggggctcaggacctcaaagcccacccttgggttcaaactgctgtgcaggtcctggacaggggcgggatccctgaaggccttgaaaccacaccctatttatgctgacagctataggctctgcagggccccaggcagctggggtattccttaggggctgagtctcctggtatccctaagactgggcttggcttaggcactgaggtaaccactggagggtgggatggagattcaggattgggggaggggagccagggcgaggaagaagaggtgtgagcagaaggggctggggtctcatgaacctccctttctcctcccttccccaccccccaaggagattccctagcatggtggtcctggcccctccctagcaagctccaagcgggggaggatcttgcctggcagacgctctgccctggtgagaagggggcgggatgagcttttctctgcagcccagcaccaggctgtgagcccagctggctgggctggaggggctgtgaggagggagggtggaggcaggaggggccgggaatgagcgccatgttctcccaggactttttcctggccattatcctgcaggacagcagcgcaggtgaggggcagcatgaggttgggcctcatgtggggtggggctgacagggagagaagagttagaggacgcatgagcgggttacagggttggagtggtgtggc

SEQ ID NO: 6584 - DNA, 2300 bp, Homo sapien
attttttaaaaagcactgtgcaggccacacacaatctatctgaggcttgcatcagtctgcaggttgtaggttggaagtttgcaagactagggggtgtgagtcagtgaccaaatagaggcctagttgctcacttgcccctgggatggtcactgtgggggctgcaactctgaactacctatgaagcttctaggagtagggggatagtactgctgaagagctggggcgggtttgctgggcagtgacctcagcaaggatgttggagtggcaagaggattctcaaggatcatgcactggtggagacattgtgaattgaggatagaggtgggggccagcccaggaaaggggccaagtcactcttttacaactgtgttgctatgaccatgagggctgcagagaaggtttgtgctcctgcagaaatgaggctagaattgagcaaaaattatattctccttcctattgtaggatattcatagagctatggattgaatgcataaatgcatgaattcatgaattaaatgaatgatgaatgaataaactttactacctgtattgaattcatactctgctccaggccttatcgtaaatgctggaaatgtatactatggggcaaagatgttcttacctcctggccttcacagcctggtgaggagacaaagaaagaaacaagtggttatgatcagtgcgatgagctctctggggctggggaagtacaggaggggcccctgaccctgcctgtgagagtggtgggggagagggcaatgggtcagttttaagaagggacctgtatactgatgtctgaaggagaggtaggtgatagccaggtgaaaatcgagagtaagggaggtgggctgggagaggacaagggggcatgtcccaagcaaagagagagaaggggagtggctggaggtaaggctgagaggcagacaggggttcatgacagcacataaaacctggggaggaatttggactttatcctgagggcagtgacaaaacaattaagaggattccgttggaaaattacttgattagtttagcatctcagaagaatcatttgggctgtactgtgcagctgagattggaggagaccagataggaagagaaagaccagttatgatgtttttgcaatgatgcaggttaaaaaaaaaaaagctagtagcctgggctatgttagttatgtggggtggagagaaggggaaagctttaagtcaatcactgattcctgagcaagtgagtacacctggcttcaccactaaggcatttgtggatgaacgaatgaaggaaggaaggaatgatacgtgaacatttaatgtattttatatgtaagtgtcgcatgaatcgatgcaggagtgaaggtgtgcgttctggaataaatgcatgtgtgtgaaagcaaaggccggggtgggctgcgcttggagggagatgtgccaagctccagaagggcctcccagatggccaaggggggagaaactgcccttccaggacagatcggaaggatgaagctctttgaagcaggaaggtacaggctgacagggatggcagatggattggtgtgtgtgactcagtcaggagatggtgaactggtccccagattccagaagtgtccagccagccctcatgaagcaggctgtggctgtggagggcatggaggccctagggtgctgttcctggaaggttttagcaggagagtcctgaggcaatggagggtctctagggaacagcaggtattccctgagcctcagctaagtttcaggtgcctattgaaaaccttattccatagagtgtgagttagggggaagtgggggtgaggagaggcggtgatggctgcctagaaggtggatgggcaagagcccctcctctttgggtgtctgtgggcccacgtcatttggaagctgaggatggtgaagcaccctgcctgaataactctcgtcaggtgtgcagccaccttggcgtaaccacgcccactcccagccctgctgtgtctggttgcccagcagcagggtcttgggactgcctgtcccttagtactgcctcttggaccagtcaggattcctggtttccctggtaacgggaagcacgtcagcagtctgggcgctcccagccggtcctggtgctgcggttgccgaggagacgctgcagcctagctgggccctggcaggtgaggggtggggggtggtgctgggaagccccaagcccagcctcaagcttgctggggctcaggacctcaaagcccacccttgggttcaaactgctgtgcaggtcctggacaggggcgggatccctgaaggccttgaaaccacacc

SEQ ID NO: 6585 - DNA, 2300 bp, Homo sapien
tatttctcctgctacttggaatacttttctcttctcctggctgacctctagctccttcatccctttccctcactgaattgtcacttcctatgaaagcctcctaaacttcccaggccaaattaagcccactcacatagctcccggtacatctccttcaagacactcatcacattcctaattacatatttaatgtctctttcccctgttaaatttcaagctgtatgagagacggaactgtatcttgtttcttgacctgttgctagcaccaaggacagtacctcatacatagtaattatttgatgaaagaaaatgaatgaatgaatgaatgaggacacttttgttcttctgggtaattcttcttcatctttcaagaacccaggtcagatgtcatttcctccaggtgagatgcagtcaaatctgattcgtctttagatccctagggcctggcttgggacctgatacatggttcatatatcataggcatttgtcaaatcattataaactattggttgtgaattcataattgttgaaactgaatgataggtatatgagggttcattatattgttctgtctgctttagtatatattggaaatttgccataataaaaagttaaaacatttatatttaccacaagtaaaataaaagtatattcaaagatgactttgaagcttctggcttgggaagccagtagttggtgtcattcattggaatggatggaatggagttgtgtccagtgtgggatgtgtgttgtgttgtgtgtgttgaagagggttctttttcaccccagtgaaactccttaaaagactaataaagggggatgaaacaataaattgaggctggacactgtgtctgacgcctgtaatctcagcactttgggaggccgaggtgggaggatcgcttgaacacaggagttccagaccagcctggggaacacagtgagaccccctctctactaaaatacaaaaagccaggcgcggtggcacatgtctgtggcccaggtactccgggggctgaggcgggaggaatctgagccctggaggctgaggcttcagagagccatgatcttgcccctgggtgacagagtgagaccctgccttgaaagaaagaacgaactcagatttggatatctttagttttaggcacctgagagggattagcatgtagaggctttctggatggtaatataacctctcattatccttgatggcctctgggtcactgatctgaccattgggatgtatcccactatccagggagggtctgtagtaagtattgcaccccaccatcttccttacatctttacacttttcattcacaatatccccttccttgtgaatttctaccggggagcaatgtattcttgacattttccaggccttgatgtcagctttatgctcagcagcagaggtatttcagtgtcaagaaacatcggagttccagtctaaattcatcactaactgtgactgcgggcaagtcgctttacctctcttaatcttagcctcagcctctgaaaaatgaggataataattctggtgattttacagagctgatgtgaagattaatgcgcgttaacggtttaatagagagcccggcacggtgtaagtggtcaataaatacgagctattattatgagcaacgctgtgtcctcagagcctccccaccaggacgtcagggagcggtgcagcaggagcggcgcagagtgcctcccgggaatccttccccgcgcggccgcggcgccgcacagccgccgccattcgggctccagccccgtccgcgcgtctcccggcgtgggtgcgggaccagggcgctgcggggcgcgcagggtgagtctgtggaatagtagtggaggacggcgccgcgctaggcgggggtcccagggagtcggctgcaggggtgtctgctgggagggctggaccgcggggctcaccgaggtccgagggccgcccgcagggtgaggcccccaagaagctgcggcaagtgccgcgcccgccgagctcgctcccgcgcccgccccaagatggcgcccctccccctccccttgcgcgcgcctccgccgctcggggcgcggccccgcggcccgcgcgctcctgggcgggggatgttgtgatggagaagccgcggcggagcccgaaccccgcagcctgagccacctccgtcatctgggcccggggcctcaccgcgcaggtaggaggtgtccctgccccggcccagccccggtggctgcgtcccgatcaccagcggccggcggaccctgtagcccctaccctgcggcagcccgggtcccccggccggccccat

SEQ ID NO: 6586 - DNA, 2300 bp, Homo sapien
agctaatttttttgtgtttttaatagagatgggatttcaccatgtggaccaggctgttctcgaactcctggtctcaagttgatctgcccaccttggcctcccaaagtgctgggattacaggcctgagccaccacgcctggccatgccacacacttttaaataaccggatctcacaagaactcactcatcatggggaagacagcaccaagccatgagagatccacccctacgacctgaacacctcccaccagaccccacctccagcattggggattacaattcaacatgagatttgatcagggacaaatatccaaactatatcaacacccatactgaccttcctgtatttctcctgctacttggaatacttttctcttctcctggctgacctctagctccttcatccctttccctcactgaattgtcacttcctatgaaagcctcctaaacttcccaggccaaattaagcccactcacatagctcccggtacatctccttcaagacactcatcacattcctaattacatatttaatgtctctttcccctgttaaatttcaagctgtatgagagacggaactgtatcttgtttcttgacctgttgctagcaccaaggacagtacctcatacatagtaattatttgatgaaagaaaatgaatgaatgaatgaatgaggacacttttgttcttctgggtaattcttcttcatctttcaagaacccaggtcagatgtcatttcctccaggtgagatgcagtcaaatctgattcgtctttagatccctagggcctggcttgggacctgatacatggttcatatatcataggcatttgtcaaatcattataaactattggttgtgaattcataattgttgaaactgaatgataggtatatgagggttcattatattgttctgtctgctttagtatatattggaaatttgccataataaaaagttaaaacatttatatttaccacaagtaaaataaaagtatattcaaagatgactttgaagcttctggcttgggaagccagtagttggtgtcattcattggaatggatggaatggagttgtgtccagtgtgggatgtgtgttgtgttgtgtgtgttgaagagggttctttttcaccccagtgaaactccttaaaagactaataaagggggatgaaacaataaattgaggctggacactgtgtctgacgcctgtaatctcagcactttgggaggccgaggtgggaggatcgcttgaacacaggagttccagaccagcctggggaacacagtgagaccccctctctactaaaatacaaaaagccaggcgcggtggcacatgtctgtggcccaggtactccgggggctgaggcgggaggaatctgagccctggaggctgaggcttcagagagccatgatcttgcccctgggtgacagagtgagaccctgccttgaaagaaagaacgaactcagatttggatatctttagttttaggcacctgagagggattagcatgtagaggctttctggatggtaatataacctctcattatccttgatggcctctgggtcactgatctgaccattgggatgtatcccactatccagggagggtctgtagtaagtattgcaccccaccatcttccttacatctttacacttttcattcacaatatccccttccttgtgaatttctaccggggagcaatgtattcttgacattttccaggccttgatgtcagctttatgctcagcagcagaggtatttcagtgtcaagaaacatcggagttccagtctaaattcatcactaactgtgactgcgggcaagtcgctttacctctcttaatcttagcctcagcctctgaaaaatgaggataataattctggtgattttacagagctgatgtgaagattaatgcgcgttaacggtttaatagagagcccggcacggtgtaagtggtcaataaatacgagctattattatgagcaacgctgtgtcctcagagcctccccaccaggacgtcagggagcggtgcagcaggagcggcgcagagtgcctcccgggaatccttccccgcgcggccgcggcgccgcacagccgccgccattcgggctccagccccgtccgcgcgtctcccggcgtgggtgcgggaccagggcgctgcggggcgcgcagggtgagtctgtggaatagtagtggaggacggcgccgcgctaggcgggggtcccagggagtcggctgcaggggtgtctgctgggagggctggaccgcggggctcaccgaggtccgagggccgcccgcagggtg

SEQ ID NO: 6587 - DNA, 2300 bp, Homo sapien
atcatccagtatatgtgctgtatgccctcagacagccctgttaggccagaaggagactgcacccttggactggcaagtcagtgcaaggccctgctaataggactattgaagactctcactatgggttttctgtggggtgtttgtttcttggggtgaaagcttccctctccccaggcaggcccagcaaaatctgtaggattcagacagggttctgacagctgaagacaagttgttgaggaaattcctgatggaggatcatggggtgctcaggagggagaatataaggtttcagaggctgagagggaaagaaaaggtgagggggagtcttagaatagtggctcccattgcccaacacccagaaagaagacatgccctgcaatggggagaaggtgagtatgagacattggctgtagcagcgatggcattgcccaggctgccaaggactcagagagtccagccttgcccactgacctatgaggagggaatgatgttcacagcacattttcattcgtaagtcaggagaggacattgagcctgatggcagaggcctggtgacatgttgttccagaggttccggaatgtgtgttttcctgttggaaggaaacttcgcagagtagaaaagggatctgagacttttggtaagattatatatgggactgtcaggggtctggagccatctgtgagggatcagggccctttcagccttggctagggagcaggggtcctggaacttcatcctggcccatagctgagtctgcccataattcttttctgactcactaggcaaatctcacacagaaatggggcagctttgggagtgggcccaggaagtactgaggatagcaggtgagatcccaggaagagatggatgtggggccgagacactggagagagaaacaggactgtcagataaagggcgtctgtgactcctagatctcattatgcctactaccataacctacccccaattcctaatattctcctaccctagagggggggaaattgtcagaaatttggctgcaacactagcaacactactcagtacttgaaatgcatttttgcatttttttcattcaacaaatatttctggaacaactcttatatgccaggcactattttaggagtcagggatatataatggtaaacaagacaggcaaaacaaagcaaagcaacaacaaccatcaccagataagtagacagatgaaagaatttcaagttttagtaagtaaaataaaacaagcaagggtctgaaatggctagataaggtggtcaagaaaggcttcattgagaaggtagcatttaagcaggagtcagctagaaatattgtgaaattccagttacagttctatttgttctgggttggttaaataaagctttttcccccaaggtggaaactaccaagaaagactaattactagtagtggtggtgctctctggaagagagacacctcctgtttctgcctcattactgtcaacccttcacttccaggcactttttgcaaagccctttgccagtcagggaaggcgagaggctgggcatggggcttggacatttgacaacagtgagacattattgtccccagactcactagcccaagggtaaagctgaagaggcttgggcatgccccagaaaggcccctgatgaagcttggaaaaagctgttctctgagtatttctaagtaagtttatctgtgtgtgtggttactaaaagtagtaagtattgctgtctctagctgccttagagcagggcttgacacagtacacagcaatattagttccctccttttctcacctcccccattgtggagataaactcaatcacaaaaggtgatcctcagtctactcacttccctgacttatggatgcctggacccattgccagtgtgagagtcacagctggacgtcagcagtgtagcccagttactgcttgaaaattgctgaagggggttggggggcagctgccgggaaaaaggagtcttggattcagatttctgtccagaccctgaccttatttgcagtgatgtaatcagccaatattggcttagtcctgggagacagcacattcccagtagagttggaggtgggggtggtgctgctgccaactctatatagggagttcaactggtcacccagagctgtcctgtggcctctgcagctcagcatggctagggtactgggagcacccgttgcactggggttgtggagcctatgctggtctctggccattgccacccctcttcctccgtgagtaaagctgggactagaagcgaaggattgagttctgggctagggtaaggtag

SEQ ID NO: 6588 - DNA, 2300 bp, Homo sapien
agagggaacacctggtatagctccactctcttccaaacacctgctacttctatagcagtcctcctcttgcttctacttccacctgccctctatgtcgccactgctaggagcctggctcagatttctaagttgaatttctgcttctcttactctggagtccttagggctggcatgggctgggctccctgatgaggtctgatccccctcctcctctcagtacatggggattggggtcctcacgacatgaccgttttctcttttggacacttctatggtggaggatgaggcagacctcactgagtggaaccagcatcagttgacagaagacaaaaaacattttgtgattctgaattaataatttgatttgtatatattatgtccttgtgtaattgtctaagcttccagttttatcagctcttctgtgaaaactccctcattcccttaggcagaatgttaaatcacattcttctcagttccctcagccttttgctatagtacttttcatactttactggaatcactggtttgtttttgtttttgtctggttttgttttgttttattttggtttaagtctttctcccccactagactgtgagatccctgaagtcagggatctactttcagataccatggtataggagagagatgttaaggaccaaactaggacaccagcagattctagagatattaaggaagcaagaatggcagattttgctaaatcgtcaaatgtcaagaatggcaggactttgtggactgggtagatggtgttgccattcaggagcaggcccaggtttaagttgatgaattcacttttgcagatgtttgagatagctatgcggcattcaagtggagatgtccagttcaggtctgagattgagctggggagttcattcatttgttgaatgcctactatgtgccaaatgccatatcagtgctgcaagtgcagcagcaaacaaaacagatgcagtccttatgccatgcgaggcttacatccttagaaggggacaccgatatttaacagttatttagctgcaaagtgataattgttatgaagagagctgtaaagcatatatcctggtgacctaagtttatatgtgcatattgatttggtagggcggagggtggtacttggtcattagtcttctctgaaaaagtgacctggaaattctaagaatggaaagatgagtaagagttggccaggtgtcaggggtgggataggctgggactggaagaacaagacatcccaaagcctcatcagtattgagccagaacctgagctgctcaaactggaggggcattacctcaccgctaaactgtaccttttagtgccccctcacttctactatttagctcgtggagctcatggtatctcccttctcatactgatgagtgctgtcctgccacaggggaccactgcagaacccaagagctgtgctggtcagccagagaagagcttagtagaaggtccacattagaagaaagtgatgcctgttggtgggaccagtttaaacagccctgcaggactaagagatggagttggggtggggccggggcggggagaccagtccattaaggaaggcacagatttgaatccaagagcaaggccaatgcccagaacttgagttctccaaggctgctcctggctctcgttcatcttgtgtccccagagcctataacaaagcagagtgtatgagacttatgtagtgagtaatgttttgactatgaaggaaaagccagaaagcttagctaaagtgggaaggaggattaaaggaggtgcttttgggatggggagacctgagcatattgggcagctaaattagaggaggttggagaagggagaggttgaaaggttcactctgtgtaggaggaaggtttccttgtcagccccatagcctgaatggactaattcttgtatactttctcctctctcacctaccccattccagtctgctactaagtctcatgagcctacctcctacatatgtcttgagtccatctgcgtccctccagccaatttccttggtccaagccatcatcatttctcaactggaatactgcaacagcctctgactgggcagctagcttgtagtcttgacttctccctacagccagaatgttctttcttaaaagcaaaattgatcttgtcactgctatgcctagaaatgttaagaaactcctcattacacccaggataaaacataattccttcttttgttcacctgggtgctccctgcagtccagccacactggacaagtcctcaagtggtgcccatactggactttgtgccttttacaatct

SEQ ID NO: 6589 - DNA, 2300 bp, Homo sapien
atacagaagtacagagggcgctgtgggagcacaaaggaggggcatctggcatggactggggtggaaatggggatgtcagtttgaaagctgagacctggccaggtgcggtggctcactcctgtaatcccagcactttgggaggccgaggcgggcggatcaccaggtcaggagatcaagaccatcctggctaacacggtgaaaacccatctctactaaaaatgcaagaaaattagcccggcacggtggctggcgcctgtagtcctgtagtcccagctactcgggaggctgaggcaggagaatggtgtgaacccgggaggcggagcttgcagtggagccaagattgcgccactgcactccagcctgggcaacagagcgggactccatctcaaaaaaaaaaaaaaaaaagctgagacctgaagggtgagtagatgacaaacaggcagggtaaagggaagagcatcccaggcagagaggctagcatataatgaaggctctgagtaggaactgggaggaattgcttggaatgaaaaatgaagagggagtggctagatgaagactgcaggctggttaaggacttttgccctctggagaaggagctgagaagtgttttaagcagaaatttgactgcatgggagaagtatagagttgagaaaagtagtcctctgaggcttaagatagtgtcatctagactccagttccctcatcttgggtagcatagtagccccagcccaaaactgcaagcatgatccccgtctgggtttccttcacaagcactggagcatcttgtgctatgtgctgaactcaggtggataagaggttgaggcggttcccaaagctcctgctgcacccaggtgttgagcctaaatctgaaccttgtggagaggtcacaagaaagatccctaacagcactttggtttagtcagggctaggtgtcatcacctgtatgccctttggccaaggaaaccagaatttttcaggattttccccacctctggaaggctggaggaaggggaagacccactcagcagattcccatagtgcagggatcctcacaggcatgactttgccctttgtcatggatactgcagctcccagacagtcttctgggctttgatcagcctgcaatcatctgactagagcttgatttttggggcagggaaggtggtccttatatgagctgccacttaatgggccactggggatttttcaacatgaaaggtaccgagtctccaaatgctggttgtagggcctaaaaacagggctcaactccaggttctgccactttctagctgagtgatgagggctaacgtctggggagcaagatccctattttttcccattgtaaaattgggctaataaaagatgctacctactgactattaaataatatatgtaaagtggctagttctgtgtcggcacataataaccactcagtccctgtaaactgttacaattattttccacttggggctgctttttgcacaaggcgatgattctgagaattgtccagtgtctttggtgtgaggaagggagtcgctggatggtctgaaccagaatttcctcaggagggggctcctgaagcgcccaaagcctaatcaaatcccccacctttctaccccttaactccttctcccagagttctgggtactgcccttctgccgcccagagatcgtgctgaggtacagacggtttctacgtcttcctggtcagccgatagactagcatattccataggagcactccaaggaagccggaaagggcgcctccaggaggcaggcggcccagacaggctcccagagtccgaaatccctgctgccccagctgccttttcttgacggagtctcatctcaatccctgagaccgactacaccgcccttcccggagccggaggcagctggcggagatccgggatccgagatccgggatccggctcgccggcccgccggctccctagcagcaccaaggaggcagcgtccgcaggaggtggaggcgttggcgggggggcgtgcgggtgcggtaggggtgggcaggcggggtgggcggggcctccgcggcggcgggcggggcgtgggtgggtcttccctactggagtcaccccctcccccggccggtccgcagccccgccccggcccctccctccggcctgtgcggctagtccggcggcggcgccggcgcggggacaggcggaggcgcgggcagggccgggcggacgggcgctggcagcagtagcagcgccgcgggcccttcagagtggccgcagtccgagctttgccctcgcatcctgttccaacgcggtgagt

SEQ ID NO: 6590 - DNA, 2300 bp, Homo sapien
gaaggagatgctagagacaactggatgctcctgcttactaggaggaactcggactttgcgcggtgagaaccaaatcctgatatacatatggcctccttgggggttagaggaggggtttgcagggagttgttggtgtacaggggcagaggaaacagaagaaaatacactgagtttgggggcagcaggagtcaaggatggtgggtcatgataacaagaaacctggttgcattcccatgtggaatcttagtgtgagattcagggctgtttgttcctctaaactttagaatctaaaaattctgagaagcttcacaaagttccaactcagcctcaagctgtagagggggggcattcctgtgaagcaggtcttaacttgactcaggtggtggcagggaaaggacaaatgagccatttcaggggctaagtggcaaaagggaaatggatggacaacgctgggagttgcttttgggctgaggagagtccatgaggttcctacaagcagaagttcccaagatctccagacataattcaagctttcctagacatatcctatgcttccccaaaccattcctgtcccctcctccacccaagattcctgtttctgaacattcatacctgtggggatgagtccatcaccagagcccccatagccaccagacacaatgctggtttcattgaggttgggtcctgacaccatcacctgctggaggtcctataggccagagaagaggggttgcttcaggaacataggggctgcagaagcattttggaggtgggaacaagtttggattcaagcatcataaagatagtacacaagggaagtctgcacagaatcaaaatgatacgtaaaaagaatgaagggagtcagataagtcaggggaaggctactggaatggagggtgagaacctaggatttataaattggattcctaaattgaaacaattagaagaatcaaacagaagcacctgctccagcccatcatcttcaggaagctgcctggcttcgccgttcccgtggatagggatctccattgtggctgccttccctaggatcccgtccgtcatggctaggaaaggtattggagtaaaactctccaccccagcaccctgcaaagcccaacacagaagttctggacactggccagcactctagaagaaggaggcctcctctgtcatttctttaaaggctgtcccagggtttgagtgtcccagcgtttggccatcattcctttcttcagatatatgtatttctcccctccaaaacgcacatttgaaacaggcacaccaaagcacggtgtcttctcacaagcccccaacctcaccaggactctggtgattatttctacactcattcagcagacatttagtgagtgcctactatgtgtcaggcactatttgtgacaatgaaaatacaacagtgaagagggaaagtctgctctcttagaacttatctccatgcaggcgtgtttatgctgaggagatgaaccctttccagggctcaggtcttcacccccctattcaggtttgttctccattgcttggcctttcacattcctttagcgtttcttcccccttccttcagggggtctcccctcctccgtctcatacacctcgtcttcctcgggccctccccaccaggccttagttagatcagtgggtgtatgttcccagtctctggtaaaagcctctctctcccaggatatcggtgacccttccacagtcagttatgtctcccaggtgtgtgagtccccgcccccacccccatacacctggacatcaggtgtgtcctcatccttccccggggctcggggcatcttgccctctggacaggtttgtgcgttcaacttcccgtcgcccaagcatgttcctctcacctcgggccgggccgctcttcccctcagggcgccaggcccgggccgcgcggggacctcgggctccagttcccgtcgcgatcctagcagcaggtcagggactcggcggaaatgacgtcctctccgggcagaagaagccggccacgtcgcagattataagggcggagctgacgtcgcagccagggcagggcgatactcgagctagctctcgagatcagcgagaggttacttccggggcggcaccgagaagctgaaacggaagtggcgtacggcatgcgccggtggcgtgatggagcggcagcagcagcagcaacagcaactgcgaaacgtaagtgagaactaagtcgtttcgaggccagacgttcagctcgcattcctgcacacatcgcgggaaccccacagggccagggatttgagggctggaaacttcgg

SEQ ID NO: 6591 - DNA, 2300 bp, Homo sapien
gtggaatgatacaaaaagatggccaatggtggcaagaaaatggggtgatggaatgatatgctatccaggctgctgaatacagaagtaaattacacaaagttggggggcgggggaggcaataatgagaaaagaatggagaggctggaattagaaatcacagaatgtactcaatgggaccaatgtggggcagatgatagaaagctggatttaggagtttctagacgagcagtgaaacattaacgtagcattaaagaagtcccgaagatttagttttatccctttttatcataaccattgccatctacttctcccttcagtttctcttcctcggatttggctgcattgcagaatatggtccccagctctctcccttcctgattgcccgtgaagacaaccacacagacctttgttcaaaggttttactgctcatcctgagaagactgtacatactaagaaagtaacaacctggggaaatggctgaagttccaaaagactccagacttcttacaggtttcatctctcttctgtggccactaacttcccaaggaggcagtgcccaaaagccctgtggttttttgatccgttgtacttcgatagctcctcctttccctagatccagcagaactctagacatgtaagacatagttcacaaaacaacagttatgaaccaacaaatacttggctcacggttatgagccactgaagtcagtcagacttaaggacaactagacagagctcccattttctgtcatctgggcaggaaccaatctcctgttgtataaaatgaccttctggtactttctggaatcttgcttcctcatctgttaagtgaggctaataccgcttactcatagttttgttgtgaagatgaactaagagcatgacatattacccgttttaaaattgtacacacagaccctgctttaaccagatgcctgcaaatgctcaggttttccttctacatatagaaaacaatttctcagctgccagggctgaagccagcagatatgcactaaacgacagaacaacggattgtgccaataaagtaggcaaagcttccttgcccagaatataaatcaaactgagtaaaaactgggtatattggctccaggaaaaggagcaaggacacccagctttcaggcaacctcgaattctctctgtttaggattcaccaaccccaaggtccaccgggtccttcaatctgagggtccatccaaggccttccttcctggggttgggtatggctagctgcctgatggagagaccccaggctgttcagcagcaacgcctggcacagccgaggcagcctcgtagtctgcgatgcggcgctgtaccagggcaggcatgagctgcacgtaagcggccatgaggcggtggttggaatggatcagcttcccagcacagctgtgcagacaggcctcctagaaggaagatagggtttaagtggaggataaaggtgccctgtcgggtccgcctcctttcttccccatgcccagcctaggggtgagggtcgtgggaaggccagggccagaggtacgggaagtggggtgaggagggaagcagtctaccgctaaactcttcttgcagcgtaacctccctacacagttccccacctcctcagcgtccagagctcggtggtgcaagctgggcacacagcgctggaagcagagttctgtcatccgattgtagaccaacaggaagtcacgcagctgagagaaaagggggaccacaaactcagcgataagggccccacacttctagtcaaggtcgcgccgcccaaagtttcccaggcccgcgcgccatagcccgaagtttccagccctcaaatccctggccctgtggggttcccgcgatgtgtgcaggaatgcgagctgaacgtctggcctcgaaacgacttagttctcacttacgtttcgcagttgctgttgctgctgctgctgccgctccatcacgccaccggcgcatgccgtacgccacttccgtttcagcttctcggtgccgccccggaagtaacctctcgctgatctcgagagctagctcgagtatcgccctgccctggctgcgacgtcagctccgcccttataatctgcgacgtggccggcttcttctgcccggagaggacgtcatttccgccgagtccctgacctgctgctaggatcgcgacgggaactggagcccgaggtccccgcgcggcccgggcctggcgccctgaggggaagagcggcccggcccgaggtgagaggaacatgcttgggcgacgggaagttgaacgcacaaacctgtccagagggcaagatgcc

SEQ ID NO: 6592 - DNA, 2300 bp, Homo sapien
aaacttgcgcgttagtgggggttctccagagaaacagaactgataggctgagaagtcccacaatctgctgtctacaaactagagaaccaggaaatctggtggtggaattcaatccaagtttgaaggcctgagaaccaggagcactgatgtccatggacagaagatgaatgtctcagctaaaacagcaagtccaccagctgcctgtttaaattctgtttaggcaacagattgtacaatgcccatccacattggtgaggatgatctttacttagtctacctattcaaatactaatctcttccaggaataccctcaaagacacacccagaaataatgctttaccagctatctgagcatcccttagctccgtcaaattgacaaataaaattaaccatcacagccgggcataatagctcgcgcctgtaatcccagcactttaggggtgaggtgggaggattgctagaggccagaggctcgagaccagcctgggcaacatagtgagaccctgtctctacaaaaaaataaataaataacagtcataacttgtgtatctcctaactgatacacaagcagacagcacagcttgtatgtagtctgtgaggtgggggtatggctggtgtgattcaggcacagcagtagtagagtgtgaatgtgaagagagaagcctacagaggtagcaggcagttatcagcaatttgtaggccatgataggactttggccttcagctgaaggaattagatgagggggcattagtgagctatgagcagaggagttataggatctgcctatatttgaaaaggatcactggctgctctaaaaagaatggattgtaggggcaatggtgagaagcatgagaaggatctgaggcaaggagaacagttcaaaggctgtggaaaaacccaggtgagaaatgatagcagcttagaccaaggttgtagtacttaagatggtgggaaatagttggattctggatatattctgaaggcacaaccagcagaatttcctgaaggattacttatggagggagggggagagagagaaagagaaagggaaaaagaagagggaaagagaaagaaggggtttggaagaggtctcaaagctgactccaaggttttggtgtgagaaaccagaaagaatggatttgccattgactgaggtgggaaagacagtgaaaggagcagcatttctttggtggggaaagggtggttaggagcctgcttttggacattttaagtttgagatacctataagctctccaggtggagacattaagtaggcagttggatatactaatctgatttcagaggagaggtgggctgaatttctttttttattttaatcatcaacttttttttttttttttttttttttgagatagagtctccctctgtcgcccaggctggagtgcagtggcgcgatctctgctcactgcaagctccgcctcctgggttcacgccattctcctgcctcagcctccccagtagctgggactacaggcgcccaccgccacgctcggctaatttttttgtatttttagtagagacagggtttcaccgtgttagccaggatggtctcgatctcctgacctcgtgatccacccgcctcggcctctcaaaatgctgggattacaggcatgagccaccgcgcccggcctcattcaacttaatttttaaaaattagcccctccataagcccttccccaaaaaatccccctccccccgtgccaaatagatgttgagctccttgagatcaaggattttgttttattcgggcttcttttggggaggtgggatagggtagatggatacgttgggggtggggatgggggagtaccaaagacataccaaagacctggcactagtttagatactcagcgaatggatataaacacctgcttacgacaccctctggattgctagtctcccgagtcaaccgtactgcacgtgcagttcagaccccgcctggtcctctacaggtccctgtcccaggcaagccttagcccacaggttgaacctagttctgcccctccaggcttgggctctgccctctcggccccgcccatatcggaccctggcccctcctctttctggctcccccggatgctcctggcaaagactcggtccttctggaatcttgtaacggttctaacagctgggtgcgggtggagctgcgggtgagtcctcggctccggatccatttctctttgttccctaggaccccctcccacagagtccgcctcctcttccccgctctcccagccccctcctttgcctgttaacgtcttcccctacctgcatcctg

SEQ ID NO: 6593 - DNA, 2300 bp, Homo sapien
ttcagcatttggtgctgcttttccccaaacagagggacctctcaattcctctcaatataaaggtagttaaatgtcaattttactatgcattcctgagatactgaaaagaggagccaagctttcaacagactcagggaactaaatgagcaaaagttgcagttcaggtcccataccaaaaaggaggtatatttctggttccactttactcctgtgttgtagccatttggggtctcgacccaaaggctgggggattacatttttgggttctctgatgtgttatacagatattatatttcatatattatccagtttcatatattatccagatagttggcctagtttttctagttgttatcaagtgggaatgttggtccaaatttctagtgcaccatcaatagaactctttcacttgctgtttcattatatttatttatttgccatgtaacagatttttttaatgtgtttgaatttatcaaaattttaattgcattttctccagtgtttgatttacatttaggagagaatttattccttcacctcctttattctttgagtctttgctcagctgtcactcccccacccttaccaccccatttaaaattgcacttccttctcccctggcaccgccaatctccctttgcctgttctttttcccccttcctgttgttaattacgtttatcatcttctctagtagaatgagagctccatcagggaggggtttgggtttgttgtgtttaatgatgtatcctcagggcttagaacagtctggcatagagtagatactcagtaatattcgttgaatgaatgagtgaactaattgcccagattagggacagatttggtgggggtagatattgagtttagtacagaacttgctgagtttcaggtgcaagcaagatggagtttgagatgttttggaaacagctgaatctttggttctgggactcaggaagatactgatttcccccatctactctctagtatcatgtcatactccagttgattctgagccctttgaggacaaggactatgtagaagtcatctttatgtccccatctctgaccacaatacttgaacagagggacaacttgataaacggtttaactaagttccataaagtcagggactggatttttcttgaacactgctgtatcctcagtggcttacacactgcttgccttaataagcatttgtagaatgagtgaatatcctccaaaggatattcagcaaaatgcacctatatcccacattaaatgcaatacatatggattgatataataggtgtatctagttacagtaggccagttagcataatgctatgtttagatacatttaataaagcatttatttttatttttcagttttctttatataactcagagctagcaatatttttaagcattacatatatatttggagtatattttatactccaaaggagtagtggccattgggaatgagaagagtactgtataactcctggccctacacagaaacagcagcctccattaagtaggtcataggaaaaggaaatatctcttgggaagagccagggctcagttaacataggcagctacactgtgggaagctaaatggcccactgattaaaggagggggcatgagtcaggtaactttggttttaaatcctgtattcttcccttaactgtcttgggcaaagctttaacttctctttgtttcagttttcctatctgtaatttggggatatgagtactatacttaagaaactttagtaactttgtcaaaaacaaaacaaggtttttgtatgacttgacttagtgtgtccattctggtatctatctaaaagttcttaagtcacttgcttaacaatgttttctagaaagttgagagagatgagagatagaggagagctattttatctcttagacattataggacttaggatacagcttttaaattgctaaaaatatatgtaatgcttaaaaatattgctagctctgagttatataaagaaaactgaaaaataaaaattaataaatgctttattaaatgtatctaaacatagcattatgctaactggcctactgtaactagatacacctattatatcaatctatatatattgcatttaatgtgggatataggtgcattttgctgaagtaagagaacccaagaccaactaagattttaagatggctctgaaggtacttgtctagtacattaggttgcaattttcctctttatttgcctgtttcgaattttctagtcttcctctgcttttctccaatctcagtttttccatcaaataacattctgattg

SEQ ID NO: 6594 - DNA, 2300 bp, Homo sapien
ctgcctcccagtaaatgcttgatgactgtttgggggttttcttattcttaggtccatctgttgcttcattgtttccctctgcatcattcatcacaaatggtgatgccatgtgtgttttgaggttgcagatggtttgaccccacctacttgtattttaggatctgtgaggatcccttgccctcatttgttaaaaaatgctatccttgtgtttttggttttattatctaattgttctgtcatttttacgtgggcatttgggggagatttcaaaatgatgctgccattgccatcatcttctcagaatcccttctggcattttttttaaaggatgattctttttcttatatggagcagagactgtaaagtataggaggcaagggccaatgcaggtagaaaagttagaaggcttttgcaataatgcagtaagagatgatggtgacttgggctgggggaggagggcaggtggtggtcaatgtggtgagaattggtggattctggatatatttttaaagtaacgacaacaggatttttaaatgggatgtgttgtatgtgaaaaagagtcaaaggtgactataaagattttgactggagaaactggaagaacagagtttccatttactgaagttggaagactgcagttttggcggggaggaattagagttcattttggctctgttaaatttgaggtgcatgttagacatccagatagagaagtgaattaggcagttctttaaatgggattggagttaagtgagagatctgggctacagataaatctgggagcaaatatatggtacttacagccataaagctggatgagatttcctagagagtgagtacagttggagaagagaagagatcagctaggagtactacagggtttgggtgtggatagtatggctcttattctgaacattttaattctttcctttattttgtgcgaagttttaacacaaatactaaacttgtcaattaaccagttcctaaagagttaatgagtggctaggttcaagaatattctctaagacagataactgaggactggcatgttcaatattcattcccagcaactcctctgttctgcagatgccagagactacaaactacacttcccagactcgcctgcagctaggtgtcatatacaatttaggatccaccagttagatctacaaaagactttgattcagaattgaattaagagggggaaagagtcagggcgtatgccatccgttctgtggatcatagcagaggcagtgtgttctgtagttgatggtgtgacagtgatatcccattttgccaggcagaacacagccctagatgctcaaccttgagtggttttgtattttagctctcctattattctgcaacccatttaatattctgtaataagtccctccctgcttagactagctagagtaaattatgttatttgcacatgaaccctaactaataaatcccctccatgggtctagtattttacgtttgtgatatagatgtatgtgttaactcactcatgagcagcgaatgggtgtgtgtgtgtgtgtgtgtgtgtgtgtgtgtacacacactgagggcaaggagaaaggaagattgtttgtgggctctggagggtactcacggacaattatggcctgtgctccactagaagaagatgaagaggaggactcaaaagacgaatttctgatgcccaagttccagggccagcccagcgatgctgtgagcatcttctgtggcccgaatgtgggattggtgtggccctggaagtctcacccaattgctggtatcttggaggtccgtggatgtcggctgcggggccaatacttcccccacaattataagcagctggaggaagacctggacaacaaccctaagatccagcaggcactgaatatacaacaggtgctgctggaggtgagaacagtggtttaagggatagggcgctgcccaccaattcccattatagccgcatgcctctgccctaaacaccttgtctgcccttagggcgtgctgtgcaaggtgcaggaattctgcagggaacatcattggataacaggcatttatgaattcctgcaatcctgggggcctcagaagctggaagacatgagaggtggtcccatcaagaactacgtgacgctggtgagccgcctgaatgtttggcaggcccgtgtctccagtatgcctatcgagttgctcacaaaaggcgggttgctgctacttagctgccatgatgtacaggcagagatgggtgagtactgcttctcttccctctcctccttcccttttctgtatgtctattcaca

SEQ ID NO: 6595 - DNA, 2300 bp, Homo sapien
ggtcagtttactttgcacataacataaaaaatatttttaaatactttttataaacatatatttttatgtttacatttatatttataacataaacatgtttatatttaaaatataatgaagtggagccatgctgcctgagtctgaatccttgctctgccactgtgtgatgttgatcaagtgacataacctctctgagcttcagtttgcttatctgtaaaataatagtatttacttcaaagggaatttgtgaggataaaatataattaaagtacttgaaatagtgtctggtatgtagaaagcactctatactctatttggtgtaccatatttctatattgtatttttcctattctgtgcatattttaacatctctgaactttaaaggtgtctcatgattgaagatgtgttagagtttagatggcatcagttttttttctttgttagtggtatataaaataatggtgcttcttacaacgggatcttagattttatgaggtatcatatgggtgttatccctgccctctgagataataaagttgttcatactgccaagggcagcttccaggattactttctagccccttatccacctgagactttctttactttaatccttaaaaacaaaaggcagatcatactaccttcttggtccccttcttctagagcaagggcagtaagactccaaaaccagaatacttttatgtctgctaggatactctgctattcacaaacatgtcatttccatactgttgcacacactgtttcatctttttggagaattaatactcaacacatccaactccagtgttcccttctctgaaggggccttgcccagccttctcaggataccccccggcacccccacctcttagctatactggctgaaggctccaggcactcacagtggatttatcacactgatttgtgattgctcatttgtatgtctgtctctgcctcatattgtgagcttttcagggtggggaaactttctgtctcattcatttgctctcgtctaccagtatagagcacagtccccagtgcatagcagctgactggacattgagcagggattcaacaagcattaaatgagataattcatggtctgacctgccattcagcctactcccactctggaccacagcactgtccccagcaccccttcttttttatgcgtcccctcacaccttactctcctgtctccagaatccaagctgaacagcataaggaaggacattcttgcacacgtgcaaaatgagtgctggaacctcagtcaacaactcatgacagagctcacagatttcatgcatatcttccgaaccatcaactcagatattcatgccattgcacagtgcacccagaaggtgggctctccccatccatccttcccagtttattcagggcccatcctgctcaaaagctcagcacactctcttcaggtctctgctgagcccccagcagagcttgatgctcttaaactgtgctcgcctaagagatctacccttgctaattcttaccctgtccatgtggccctcaggttcctcatgtcacagggaggccctggtgtgatgagagagttgtgctctctgtgacagtcagatagaaaattgttgccttgtcatcaaggtaatggggtggtgggtgagaagtggacccttcaccagagagatctgggtcagagagagatttgatccctctggagagatccctcaggagagattgcccctgattccagttgattacaaggctgcaactgggtctggagacttcactccaaaaggtgggagttccccttggggatgggaccaaagaggtacatggggttgtggggctgccggtctcatgctgtaattcctgcagttgaatgaagccaatgaacagtacgtcgagctggaggagcgaatggaatacgtacgggcactccacgaactcatccgcaaccactttagcctctttagtgctgagaatgaagcactggacatctcggtgagaaggcaattcggggagtcacccatccctccctgccctcctcccccacaaccacatctactccactgccctctgcttgccccacagcttctggatatgtgggaggcatttcagtttgagaaaagccaggcttcagagttcctgctcagcaagcgacatgccattatgcccaagctgcagcagctgatggcagcagcattggcagagctggaaggcctgcttgcgaaggccctctccggtccctttatggaccccacacaagatcagaggagtactgagcaccagctcgtctccctagagcgtcagttccagaa

SEQ ID NO: 6596 - DNA, 2300 bp, Homo sapien
ctactaaaaatacaaaaattagcctgacatggtggtgtgcgcctgtattcccagctacttgggaggctgaggcaggagaatcacttgaacccgggaggcagaggttgcagtgagccgagatcacgccactgcacaccagcccaggtaacagtgcaagactctgtctcaaaaaaaaaagaagatgctgtttgtttgaacaaggacttgaagctggtgagggcatgagccatgtgattctctgaaggaagagtgttccagaaagaatagactgctagtcaaaggcccttagcaggagggtgcatatctggtgcatctcagccatagtaaagcgtccagtgtcactagaatggagtgaatgagatggagactaattaaagaggaactcttccctttcactgccatcacattttcccagatggtctttccctggagtaactgttccttggattaaccccacctccattgttgagccaaacaatttggaactccacctcccccacccccaaccatcactttctggaccctaccttctgtcattatgggctcttgactgatcattccaccacccccctcccaacactgcaagtagcccaggtctcaagtcagccctcccccacagaggatgagactcctgtgcccttgccaatctgtgggacacgtcctattgtgcagcagcagcgcatatggcacctgtaccgagtcatctccgaaaacatcagcgagtggaagtgcatggcttttgccaaggtgctgacacccttccttggagctcttgactgggagtggaggactacagtggtgggggaggggaagagtctcaagctgacagtgagcccttctccctgcagttcagcccagctatggcccaggagaagacagagggctggctgacagaggcagcacggatgagcacaaccctggagctgcacagccccgtgctgcagcactgcatgcgcatcctgggggagtttcgcagctacctgcccctgctcactaagctgggcagcctccacccacagagcctcaactgccagtgtctcctgcgtggtatgtttggttaatgtcagaggagggggaaagggaaatatgtgaggttagagcgatgcagcaactcagtttcctgctgctcctgctggaaacacctttcatccccaagtttctccctacctttcccacatatttcaatttcttttccttaactgggacaaaaatttttaacttcccttactacctcctctctgctgatggtggctgggcttgggctggggccttagctctgggctctgagttgtgctctagaccttgagttctaagctgttggctctgtgttgtgctctgagatctgctatctggggtctgagctgggctgggctgggctgggctctgggatatgggatatgggttggactctgccacatactgggtgttgctctgacttgttttctctacctccagcccttgggctgggcagtctccaaactatagaactcctaacgctgggccagctgcttacttatccactgctggagtttgcagatcgaatcaaccaggtggggccctcagtacaggggcgagggaggtggtccaaagccaggacctgtaataaagccagtcaagggtggtgggtgtttggcatgtgatttaatgtggggttgagcctgctaacctgcctgaagggcaggaacagtttctttaagtctccagatggggatctcttgtgtgattccagactcccagtgactgagagtatgtccctgatgggggaaggaagtgggtggcagccccgaagttgtgggcacacagaatggcaggtgccccccaacacctgtcttgtccccagagggtgcgagctgactgaggtatttgctcagttggagccttgcaaaagtgggtgggggttccaaagcagtggccctggggcaaggtagttagatgctgccgatggcctatctttgaagcctgatggtcccactctcgcttcatctctgagacctccactttcctgagccctggcccttgagttctgcctcagatccaatccccaagtctcggctccaagcctgtccccgaagcagttacccagtcctggttcctgagacccagctgttccaggtctggcagaatgaaaatgaacgaattcatgcccaagagactatacggcggttgcagcggtactgggaagcgcgccagctgcgcctgctcaacttcatcctgcatgtaccctacgagcccccagcctcagagcgctccaagaggcaggtgctccgcagcccccaatgggaggtagtggacaaagatag

SEQ ID NO: 6597 - DNA, 2300 bp, Homo sapien
acaatgattcagtttttagaaaaccagccaggctgcagtgggggaataaaaggagggaagtaagagtggaaactgagagaccagttaggaggccagtgtagaaggtcgggagtgagagggcctgagcatgagtgactgacattgggaagggcagtggacacgagaggcatttaggaggtagaattgaaaggtctcaaagatgggctggatttggggggattcaggagatggagccaagggtaacaactcagtttgttccttgggaatcttgccaccattctctgagaaaaagaatacacaggagaggagtcagattgcaggagagctgaggacgcataaccaatacattcatttggggacatgtggagtctgaggggcctgtgagacccccaagggaagatttccactaggcaaatgaatacacggtatggggcagggagggaacctagctagagagagagatttggcagttggaacgtaagtaggaatcaaagccatgagattagggagggcatttagaagtgtagagtgagaagagaaaggaggctctgaaaaaattgatgaggaatagttaagggctgacagaggaagagaatgagaaagagcagccagagaagttagagaaagcccaaggagaacacagtatcatgaaggccaagagaggaggatgcctcaagagggagggaactgtcttctgtgacaactgctgctaatgggtcaactaaaatatagagtagtgtaacataactgttacacgcatagtcttcgggtgaagcggctgcagaaaaagcaaccacacacttggggctgcgttactagatatataactcacagactaataagtgacagacccagagctcagcctctctctgtggcctacttggagttcaacgtggtcagtctttcaagtgaggagtgtgctacagttccaggatcatagggtcttctggggtttcccgcgtggcccaagatctggagctgcagggcctggatctgtctctgcagagtctcagcatgtttcagcagcagctagagcaaagcaagctcctatacaagcagcagctggaagagtgtcggcatcaagagaacctcattgagaacctggccaggcaacgggatgccctgcaagctcagcgagaggctttcctggagcaggtgggctcttcctgccgcctgccctgcactgctcctctctcaaaagagggcaacccctctaaggataccaagaggagaggatggagtgactcatcatggaatctcctggggggaggggacaaaggtaataggatggcttggggagtggcctctcatggggactccaaggagatgattcccctaaaaacaccttgaaggaagaacagaacatctcaggagctcacttcagagggtatctctcctcatttagatgagcaaggcatttctggagcctctgagccagctgcaggtggctgactttgaggagatacggagctatcgagcaccaccagaatctgtggtccgggtaactgatgcaatgtgtgacttgttccaccatgaaacaggctgggccagtgccaaacagctgttatgcactgaggatttttatcaggtaggaagggtggagcacaatgaaggaggataggggaggcataaagggacacttggcaaggctaaactgttgggtcaaggtccagagcatccgtggcttccccatcccgttaacatacatccttccaggagctggtgttcttccccaaggagaagataacagactcagagctgataaagttacatctaattctgaaggctccaggtatggacgatgcagccctgcgggcagtgagccgacctgcagccagcctggcagcctggctctgggctgttctgcactatgggctggcgcattgccggggactgcccacggacctgctgctgcagcaagtggaggcaacactcactcgggagcaggcccgcctgggctactaccagtttcaggcccaggagaccctggagcataatttggccctggctaagatggtggaggatgcccaagcttcccacaactgcgtggcaaagaccctcagtcaagcacagtgtgggcagtatcacaaatggcccatgaaggctgcactgctcacgcctatgcgtgcctggactacacagctccaggtaaccatccccctcccagatgtctcccccaaagttccttttatgccgttcgcctgctcctccctgtgccctcactgcctccctctgtccctctctgcactccttgccgtactttcctccacaccccaccttgccctccctctgccatatct

SEQ ID NO: 6598 - DNA, 2300 bp, Homo sapien
tcaagagggagggaactgtcttctgtgacaactgctgctaatgggtcaactaaaatatagagtagtgtaacataactgttacacgcatagtcttcgggtgaagcggctgcagaaaaagcaaccacacacttggggctgcgttactagatatataactcacagactaataagtgacagacccagagctcagcctctctctgtggcctacttggagttcaacgtggtcagtctttcaagtgaggagtgtgctacagttccaggatcatagggtcttctggggtttcccgcgtggcccaagatctggagctgcagggcctggatctgtctctgcagagtctcagcatgtttcagcagcagctagagcaaagcaagctcctatacaagcagcagctggaagagtgtcggcatcaagagaacctcattgagaacctggccaggcaacgggatgccctgcaagctcagcgagaggctttcctggagcaggtgggctcttcctgccgcctgccctgcactgctcctctctcaaaagagggcaacccctctaaggataccaagaggagaggatggagtgactcatcatggaatctcctggggggaggggacaaaggtaataggatggcttggggagtggcctctcatggggactccaaggagatgattcccctaaaaacaccttgaaggaagaacagaacatctcaggagctcacttcagagggtatctctcctcatttagatgagcaaggcatttctggagcctctgagccagctgcaggtggctgactttgaggagatacggagctatcgagcaccaccagaatctgtggtccgggtaactgatgcaatgtgtgacttgttccaccatgaaacaggctgggccagtgccaaacagctgttatgcactgaggatttttatcaggtaggaagggtggagcacaatgaaggaggataggggaggcataaagggacacttggcaaggctaaactgttgggtcaaggtccagagcatccgtggcttccccatcccgttaacatacatccttccaggagctggtgttcttccccaaggagaagataacagactcagagctgataaagttacatctaattctgaaggctccaggtatggacgatgcagccctgcgggcagtgagccgacctgcagccagcctggcagcctggctctgggctgttctgcactatgggctggcgcattgccggggactgcccacggacctgctgctgcagcaagtggaggcaacactcactcgggagcaggcccgcctgggctactaccagtttcaggcccaggagaccctggagcataatttggccctggctaagatggtggaggatgcccaagcttcccacaactgcgtggcaaagaccctcagtcaagcacagtgtgggcagtatcacaaatggcccatgaaggctgcactgctcacgcctatgcgtgcctggactacacagctccaggtaaccatccccctcccagatgtctcccccaaagttccttttatgccgttcgcctgctcctccctgtgccctcactgcctccctctgtccctctctgcactccttgccgtactttcctccacaccccaccttgccctccctctgccatatctctgcctgcaccctcctcactggcctacacagcctctggtcttcccttccactccagaagctgaagggacgctgcatgactgtgtttggagataccctcctatgttcagctgccatcatctacctgggtcccttcccaccattgcggcgccaagagctactggacgagtggttagctctgtgtaggggctttcaggaggctctgggcccagatgatgtggcacaggcactgaagcggaagcaaaaatctgtcagcataccaccaaagaaccccctgctggctacacactctcccttcagtattctgtccttgctgagctctgaatcggagcagtaccagtgggatggaaacctgaagccacaggcaaagtcggcccacctggcaggcttgcttctgcgaagccccacacactacagtagttgccgttggcctctgctgcttgaccccagcaacgaggccctcatctggttggacccgctgcctctggaagagaatcgatcttttgcgccagccctcactgagggtagaggtaagcaggcataataaatgcaatgcttccggagtatctgaactgcccaacactcagcctcatgtggtctttcccttcataatgaggacactgtatttttgtgatcaggatgtcccagatttcaccagcctatactataggaac

SEQ ID NO: 6599 - DNA, 2300 bp, Homo sapien
caagcttcccacaactgcgtggcaaagaccctcagtcaagcacagtgtgggcagtatcacaaatggcccatgaaggctgcactgctcacgcctatgcgtgcctggactacacagctccaggtaaccatccccctcccagatgtctcccccaaagttccttttatgccgttcgcctgctcctccctgtgccctcactgcctccctctgtccctctctgcactccttgccgtactttcctccacaccccaccttgccctccctctgccatatctctgcctgcaccctcctcactggcctacacagcctctggtcttcccttccactccagaagctgaagggacgctgcatgactgtgtttggagataccctcctatgttcagctgccatcatctacctgggtcccttcccaccattgcggcgccaagagctactggacgagtggttagctctgtgtaggggctttcaggaggctctgggcccagatgatgtggcacaggcactgaagcggaagcaaaaatctgtcagcataccaccaaagaaccccctgctggctacacactctcccttcagtattctgtccttgctgagctctgaatcggagcagtaccagtgggatggaaacctgaagccacaggcaaagtcggcccacctggcaggcttgcttctgcgaagccccacacactacagtagttgccgttggcctctgctgcttgaccccagcaacgaggccctcatctggttggacccgctgcctctggaagagaatcgatcttttgcgccagccctcactgagggtagaggtaagcaggcataataaatgcaatgcttccggagtatctgaactgcccaacactcagcctcatgtggtctttcccttcataatgaggacactgtatttttgtgatcaggatgtcccagatttcaccagcctatactataggaacaaatttggtcacatttattttttctctttattacaatgattctgaatctacatgactgattggtccatgatcttccacttccctggtctactcagcactacccaaatttatccaatgttcagaaatcctggggaatatttctgttggctctgtttggatcggggacccatctgggtggagtattggaaggaacattttctaggaaaaggaatagagtgtttattccccagaagaagaggctggggattgagtttgtgagaaaaatgtgaccttatttggaaaggggtcctttcagatgtaattaagttaaggactttgaatgagatcaccctgattcttatccggatgggccctaaatcctgcaagtgcccttacaagaggcagaagaaaaggcatagaaaatacagaagagaggctatgtgaagacagaggatgaataggatccctccctggaattttagagtaataattgtgatagccaacatttattgagtgctcactacgtgcacatctaagtgttttctatgtatcatttcatttaatcttcacagtaaccctatgaggtcgccactaatatcaaccccattttgcagataagaaaattgagtcatagagagcttaagcaactttcctaagatgtcttcctgcagaccttccctcatgaaatggagcccttcagtgaattcctcccctaaggagtctgattcctcccctaagaagagctcctctgaatctttctgccccagggaaaggcctcatgagaaatcaaaagagagagagtaaaacggacatgaaagaggaagatgatgagagtgaagagagtaatgaggctgaggaccagacaaaagagcagaaggcagaggaaagaaaaaatgagcaggagaaagagcaagaggaaaatgaagagaaagaggaggagaagacagagagccaggggtcaaagccagcctatgagactcagcttccatcccttccctaccttagtgttctttcaggtgctgacccagagctgggttctcagctccaggaggcagctgcttgtggtgagagctggtccccacccaccctggcccctttttgacttgccccattctgtgaccccacaggcctcccacacctcagtctaacttcagttcccatccttcatcccaggcactaactatattgaagcgtcttgtgggaaccctcctatcagccacagggaagctggtcagagccagacctcgtgcctggggaatggggatcatgggtgctggcattgtgggtagggtgcctttgcctccctctcacaggcctgcctgtgttactgaccaatgtggagctgggtctagggtgcgaagaactgcaatggctgct

SEQ ID NO: 6600 - DNA, 2300 bp, Homo sapien
aggcaagatctcttacattcggagtcacggcaagtcatcccagccatacctctgtctttgagatcgtgactgtggcctgcagagaagtacttcttattgcctgagtacaccattagccccaatcctaatggcagtggataatcactcttgtatgtagaaccagctgaccccccgacacacacacaccaacacacacacatatacacatccaatggtacctgtttggtcaacattgtccaggtgctgggctgaatttataggggcatgtttctggcatttcctctttcttttctcatcttcagcagagtcactgccaacaagagcctgtttgtggcatttcttcttcctttctacttcttcctcagagtcactgcaaggtgggccctgtttttgacatttcttcttccctttcttccctacttcagcagaggcactggcaaatgatgcctttttggggcatttcttcttcctttcctcctcctcctcctcagagtcacttatacataggctggggggatgctgggaaagagatgctgcctctagggcccgtaatgtggccaagagctggcggcgcttggagccctggaggaaaacaggggatgacagtgggcctaaagagaatggatgaggcctggagaacaagaagggagagatgtggacctgattcagactggcagaagcatctgaattcttcccagtcaagcctgccagaacccagaagaacttttatgtcaccaccccaacttctgggaagctggagagcagagaaaccacctatcccactttcttcaatgtgtaaatgagctaatggaggtttccccaaaggaaaatgcaaaggccacaagcaacaagaccaaggccagagaccaggaattccaacccttcaccttgagcttttgcctagagctgatacatttctgtaagaggtaaggaggcttctgaacacaggagacacatgatcacacacgtatattaaatatttaacatgtctctagctgcagtgtagaaaacaaactgaaggggagaaattgcagacagagaggccagcggcttggacaatggtaatggggctaggggatgaaaaaggaggaaacaaagcaggccgattccatgttggaggcagactgaagggtaagaaaagcctgaggaagcagggccctcacatctgcagaggctcaaaggagaagatgtattgtcgggaaggctgattctgtgttgcagtcctaccaggtaatcctaggccaggcacttaccctgattctaagtttcccacaccctcctttgaacaatgatactgacaactcttactgtctccaatccatcctccacactgtaaccgacgaccctttcaaaatacaaatctgaagaaataattccattgcttaaaacctttcattggcttctattctcaatatacgcaaaacttctacctcttgaacttgaacagcatatatgcccctttcatttactatgtatttcaaccacaaggaccacttgtgtttgtgactctgacagaacatgctctcttgtcccagggcccttgtacgtactttttcctgtctgaagaaccctcttcgcttcaccaacttctactcaacaactctctctgacccaacgtcagtttcttttggaagttctcggatcttcagatcaggactcgcccttaacggtgccacaggtgtccctccccgcaatacacacagcgctgggatccaccaatgtccgcttcgcggcctgaaacagctcccattgctcccgcgagtcactcaccttgttttgcgaggaggccgcaggcggaggtcgtgagattacgggcccaaggcccgcggctactggggccgcctcggcccactcaggctcttcgaacatgagggtcgggagggcagggtcgccgagtccccgctcttctccacgtgcacagcgctcctctggaagtcggagcgctcagacctgccagaaccgacccggaaaccaaagcgtgacagccaggggttgctagagcggccggcgcggcgcagcgaaccatcgagtttagccaggcgcggctagaagggcagggaggcggtgggaggggagggacggaggcccgcgctgcccaagagcgccacgggcggggcggggccggcggcgggctgcgggcgcggccggacgggagttccccggagaaggatcctgcagcccgagtcccggtgagtgcgagaggacccgcgccccctgtcacccctcacttctcctgagtcccaagtaaggaacggagccaaccctggggaggacccccggtcccctctcccagagtatac

SEQ ID NO: 6601 - DNA, 2300 bp, Homo sapien
atcctaactgcacactgaggggagcaacagacactggggcctaccagagtggggcgggtaggaagagggagggatcaggaaaaataactaatgggtgccacggcttaatacctgggtgatgaaatgatctgcacaacaaacctccatgacctgagtttacccatccaacaaacctgcacatgtaccccttaacttaaaaaaaaaaaacccaactgtaaattcaatggctactttaaaatattaatgttctttgatctctcagtagcctgtactgccgttgactacctccccttcattaaaacattctcttctgtaagctttactcacacattttcctatttctttttcaacttgcggttgctccttttctgtcgtgcaggcttcctgtcccctgacctcttgccttccactctcctgagacgttctccttcacaaccacgtcttcaagtatcatctatatatatgatatatatatgctatctatatgctgatagctctcaaatctgtgtctccaagtcagattcctcccctgaattgcaaatctgcataaccaacaacacactcaacatttccaccttgctgtattgtcaccttaactttaacatgtccaaaataaaatgcctcatcctccagttttctccatctcagtaaaaacaaccaagttcccaagccagaaccctggtcctcatctttgcccttactcactccccacaccaagttccacaattcttcgtcctaaagacttctggaatttgatcacttctctttttcactcaccctaattctagtccaagacatcattacttctacgatgaactaggcaattgcctcctttccacctgctcttcacaaagcatccaagacgatactgaaaaatggacaatctcattatgtcactatacagctttaaaaccttgcttttaaaataaagaccttcttatagcctaaatatgcttgcatgatctggctgatccttggagacctctacagtcttatgtcctgttcttttcctcttgtacccaatgctccgacccacagagatcatctatcctccagccatatggaactccagacaatttcctgttctctctgctctgtgccttgccccctagcctttggccatgcagtctactgaggctggaaagctctctgtagcctctgcctgtgaaactcttattctgcagtcaagattcagctcaaactgcgtcctctgtgaaaaccctctgccccccacaggctatgcttagcactcattacactggctagcaaaggcagccgccaccaccagacatgagcactccactccacgtagccaggagatctctagccttcctctcatccaccaaccgtttcagctcacccctggttgaggtcgttctccgtgttgtccagccacaggcgaacggcgactgcgttgccctcccggcactgagtgaaaatgtcgtccatagcagcgtcccggcgccgagtcccctggattggggaagcctgaggactgtggagtgatccagggaaggaggatgaaccccaagctttatcctctacaggagagaagtgtttgtgttgggggtagggggcctgagctgcgtccccggctagtgggggtctgtgaaggagttcggggctgcgggatgatccctggctgtgtcctctagacgcgaggtaaaggcgggtcagggtgggcagggggtgacgaagaggtagtgtctgctgaacggatgtccgagagcaggcaactagaccctatccgcgaacagagttgggggaagtggggaggttcaggctccgtatactctgggagaggggaccgggggtcctccccagggttggctccgttccttacttgggactcaggagaagtgaggggtgacagggggcgcgggtcctctcgcactcaccgggactcgggctgcaggatccttctccggggaactcccgtccggccgcgcccgcagcccgccgccggccccgccccgcccgtggcgctcttgggcagcgcgggcctccgtccctcccctcccaccgcctccctgcccttctagccgcgcctggctaaactcgatggttcgctgcgccgcgccggccgctctagcaacccctggctgtcacgctttggtttccgggtcggttctggcaggtctgagcgctccgacttccagaggagcgctgtgcacgtggagaagagcggggactcggcgaccctgccctcccgaccctcatgttcgaagagcctgagtgggccgaggcggccccagtagccgcgggccttgggcccgtaatctcacgacctccgcctgcgg

SEQ ID NO: 6602 - DNA, 2300 bp, Homo sapien
gccttagattcctcaataagatgctgtaactagcattttttgaatgcctctccctccgcatctcatctttctcttttcaatcaggcttttccaaagggttgtatacagactctgtgcactatttcacttgatattcattccccaattcactgcaaggagacctctactgtcaccgtttactctttcctaccctgacatccagaaacaatggcctccagtgcatacttctcaatctttgctttatggcctttccatcatagttgcccactccctctccttacttagcttccaggtcttaacttctctgactactcttgtcttcctctctcatcaatttctgcttcttcatggaatgctgaccttcattgctccatttgtagatttttgctcttctcagtttactcattgtcccctggaacaaatcactgacatctacaaccattaccatctcactaaataagactttctatccaataatgattgatacctcaaatgtaagatgcgtgatactcaacatttcatcgtccaccttcccaaccccaaacaattccatctcgtttcttcttggtaaatgatgctatgctttttccaaccaagccagaaacctgtgtcatcttttcaccccaccttcaatcaacaagtcctcaatcaacaagtcctactgactgcacatcttaaatatatctttatcagtccacaagtccttccaattatatttcccaagtatatctagaacttatccacttatatccccactgctactaccttagtttagggctatattctcttgaaaaaaagtgtccttacttcctgccaatccccaagtcatcttccagagtaaaatgcaaatcccatcaggccacttggatgaaaacccttcaaggattactggatagaattcaggctttcccctccagcccccaatcatagctcacaaaccttccttgctatttgttcttaagtaaaaaatcatttttcctcctccctccccaaaccccaaggaactctcactcttgctcaagctgttccgtccccttaccacccctgatacaactgccaggttaatttccagaattcttgcaagactcagttcagaagtcaccttctttcgtgaatgttttgattccctgaggctactttattttggtatggctgaaaaatcctagattttctaaacaaaacctgtttgaatcttggttctgatatggactaggagagagactgggtcaagtaagcttatctccctgaggctgtttcctcgtctgttaagtgtgaatatcaatacctgcctttcataatcaccagggaataaagtggaataatgttgataacagtgcttggcacctggaagtaggtggcagatgttaacgcccttcctcccttgcactgcgccccctgtgcctacctctagcattgtaacgaccacgtagtattgaaatggccagtttacttgtctgccttcctttccaagaccgttggtgcctagaggactagaatcgtgtcctatttaactttgtgttcccaggtcctagctcaggagttggcaaataagaattaaatgtctgctacaccgaaaacctcacgcctctcattcgttgtgatttttgcatatgttgttgactcaggctgaaactcctcctcctcctacagcagcactgtgtgccgccccactgctgcccccacctctcggggcagctggcggagaagagagggggctttccaaatccactatgaatccttaaaaggctgaataagggaacttgaaacgatgcagacaggcaggcaacccgtagtcgagggacatagggccataaacgtcgaagccaggtcttgagcgtcagacagaatgaggtgtcccagagcggcggaggagagccagacgcacgctggttccggtctggacggaatcgccgcggagcacggcagaggctagggcggaatggctacggcagcgcagttcgccaaggctcggtctccgccctgcagcctatttcctctaacccgcagatccactatgggaggaggcggggagcgggctggagagcactaacagagacaggcggggcgagtcgtgggcgcgtgacgtcaccccggggtgtgcgcggcgcgagcggaagcggaagcggctctgttcgccgcctctcccaccggcccgatgagctgcagcggctccggcgcggaccccgaggcggcgccggcctccgccgcctcggccccgggccccgcgcccccggtctcggctcccgccgcgctgccctccagcaccgccgcggagaacaaggccagccccgcggggacag

SEQ ID NO: 6603 - DNA, 2300 bp, Homo sapien
ctcagtgagggatccctgccctgcaccagcaccctgagatggagctgagactttatttattgggggtagggggatggaggaggtccctccaacatgtttggacccagctcctttgggttccactgacacccctgcccctgcccctgcccagaaccaagtgccatttctcactctggagccttaataaactgcaatttgtatccagtctccagctttgttctatagggatgactggaagacacctggcagagtattgtggatacctcaggaggcacagaggggtggtggggtggggatggcactgggagctcaggagcctagcctgaggctgatgatcacatctctctgcagctattcttttccctctaatatgggcaaagaggccagcagggccttgagagggatcagttgggtgggagaggggatcttggggatgagcagctctgggcccgaagttcttaaaataagttggggtgggtacaagagcagtcaagtggtttatttgttcttcttgggggccactaaaaatccacattgtaaaaagagctcaatttgttgagcctttgtcatgtcaggctctctgcaggtggctgccttgcttaatctcagtgtaaattttcacagtcatacaaagggatttgggaaccactggtgttgcctgttctttggggagccaggctgtgagggaaaggcaattggccagtgtttgagaagttcatgagattgaggaaattagaaaaaaaaaaaaaagttgtggtcaaagggaaatgtttctgagcatgatgctagtaaatacagctctaggatccacgcttagtgggaaactggagggatcaatggacagagagaagtcagattaataggagtgaggaaaaacaatggcttgaaaaaacagaaggttatagtctaagaaagcattctataattataatttcaaaggtagagcagttttgagagatagcaagcccaatgcagccatgggactggtttgcttaagtgaagtgaaggtaatgctcactgggtttaatgagatgaagaaatggaaggttagggtgttgaatgggtcttttacctagatattttgatcatctaggtcaaatgatcgcaggagttgggatggacagaaaggtgaagtgccataatcttcagtgtgggaatataatctataggttaatggaagccagtggcctgtaggacaacagcaggagtagagggatctatctaaaaagtattgaggtcagaacaagggatttcacatgagtattggattaatggttttggaagttaaaatgacactgctgacaccatcttccatatggatttttggggggaaaaaaaggaagactggaagggaattgaatcctcagggttttaactctcattgaaaatcctcttgtaatgaccccagttggaagtagtaaactcagacctccttgtgggctttgagttaccattagaagaagcaaaggtccgtttccattttatccacctgagcccactaaacaagatgcaagattcctccatggcccttagaacaaagttgatttccttgaaaaccttgggaacccataataaacaggaccccagctgattgtagatctcctgggaagctacttaaaactggaaactgatttgaataaaaggatcctggtcttgcaaaagctttactctgttcataaatgtagtcgtaaaatgaagacaaaattgataatatggggacataaaggataaaagaggaaaaaaattttttcactgcaatctttcgaggcagatcacttttatataagtctccatattgtaaatgcagaaacctaggctctgagaggttattttgctgatgtcatacagctaggaagaaccccagtctgtgggtctctacagcccactcacttgtggtgattcccaggggaccaggctcaggacgcaggtggggagccctgggcttactcagtgcttgactggccagaggggagaatccgggtggcggccccacccttgcctagcatttgggaccacccatgcaagggaggagccagtaccgtcactagttactaggcagaggggtagtggtggtggaatatagagctcatgtgatccgtcacatgacagcagatccgcggaagggcagaatgggactccaagcctggtgagaaattgagagggctcgggagaaagggatcacgttggagggagcacacattgggagggtgggaacacaaggacaacgtagctcccactgaaacccacctgctgcccctacagcctcctagggctctttgccctcatcctctctggcaaat

SEQ ID NO: 6604 - DNA, 2300 bp, Homo sapien
cagagtgaaacatccctcaggtccatataaccactcaggtcaagaaatagaacattttcggcagcccagaaacctcttccaagtactactgtattgctttttaaagcaatctttaaaaagcatattttgagacatccaacacatgcgattatgaggtcatactaccaggaatagttaccaaagctgtgttaaatttctttgactacaatacatccaaaatagcattgttgaggacatttcaggtcaatgggtcttagccaaacagtaaaaatagttagcatttattggacacttaccatatagtgccaggtatatagtgctttatatatattacataatttaatccttaggcccactttatagatgagaaaactgaggcagagacaagttaagtaactttcccagtgccacacagcttgtaaataggagagtctggaccccgagccagggagtctggctccagagtccacaagcttagtcaccataccatactgccctatccagtggtttgttgttcaaaataaagtaaatgagagcaaaccctgtaatatgagagaccttgtaaggactcaaatataaggttactccctctttcctgagggatgattttggaaaaacaaaaaagcaaaaacttcaccctatattcaagcttatacggcatttgcagatgactcccaaatatttatgtccatcccagaccgctcctctaagttgcagacctacctacccaaccagcacttcaaagtcagcagccccaagtcacagtcatcatctcctcatacgaaccccctgcagcctcctgctgctccttttgtggagcacagccagcctcaccaccatccatccacccagctgcccaagcgccgtggatatgatcaaggaccccagtctctccctcactcctcttccaaaatcacactcccttcttcttcagctgaaactgtgttccttctccacagaagttcctgatttctttgtgccatttgtacacatctcaagtccagaaaacctgtttttctcacagtctactcgcagtcctaaggaagaaggacaggagtcagaactcttcccagttcctttaagattgcttgctctttgtctctgtctgatttcccctctccccatattctctcccaagttggttttttgagccccttcccacttccctgcccggtttcctcctcacttaatttttctagggagtatatcgtgagtgggaccaccatccccaaagctcttctttccaatatctcccgatctctaccctcaaatttgggataaagagaaagtgggggaaagggagcctgggggtgaaggagagaaaagagacagaaatcatgggataatgaaaagtgactaacaggggagaaggccgaggttacgatggaagaaggggaagagacagcgggtagtgaaaagggcaggggtgagaaaagggaatgaggagaaggcgtgaggaaaaggggatgatgaggtgaggcgaaagacacagggagaaggggatggggagaaaggtggggagaagagacggggagaaagggataggaagaaaaggataaaaggagaggtggggaaggagaatctgatgtaaagaggctggagagagatcaagcagaaggggtaaggagaagagaaaggggagaagagctggggagaaaatgatggagatggggcgagaagaagaggatgggagaaaggcagaggggaatggagatgacggttgggaaaaagaaggggcgagagggagaccagggcactgagggagaagaggggaataggggatggaaagaagatggaagaggaggaggtgagcagcagggagcggcgagaaggggaagagacgagagggcgtagagaaccgaatgggaggagaggacgggagaagtgacggggagaagggaagggaaccgggacgggggcgcggcgcggcgctggggccggatccggagccggggcctggggccgggaagtggaggggcggagggaggccgggcgggcgccggggggaagggggggcggcggcgcggagcgcgggtgggggcgggggcgggggctccgcgggcggaggggcgggggctcgggttaccgcgcggagggcggggggaggggaggggagggggcgcggggccgcggcagcggagctcgcatcctcggcggggcggctgtgcaggaggcggcgcccgggcgtcagcggacggaccgatcgacggccaagggcgcgcggaccgacggcggctgcccggaggggatcgcgggcctcggagacagcgactgcggacgatgcgcggcctcaggccccg

SEQ ID NO: 6605 - DNA, 2300 bp, Homo sapien
ccagcccggccaacatggtgaaaccccgtctctactaaaaatacaaaaaaaattagccaggcatggtggtgggcgcctgtaatcccagttacttgtgaggctgaggcatgagaatcgcttgaacccaggaggtggaggttgcagtgagccgagaccgcaccattgcactccagcctgggcaacaagaaagaaactccgtctcaaaaaaatatatatatatcctggtgaaaacatcttagtgaaatttttcaactgcaaagacaattgaaaactacaagaattgctcccaaagaaacaaaacatgaatggtaattgtaatttctgtaatttattgtaaatttctttaattgtgaagtgtgatttgtataaatctgtcaatgtatttatatgttcatgacttttcctatttgcatatttgttccttcatattaaagaaacttttcaaaattaaaattagcaaagaagtgttctttggtcacctataagctgacaaagtgacaaatctatacgtctactgaatatgtacatgtaaagaggagtgaattcatttcctaagactgctgtaacaaactatcacaaactgtggaacttaaaacaacagaaatttattgttttgtggctctggaggctagaagtaagaaagcgatgtgttagcagcagggtcatgctctctgacagatctgaaaaagaatgcgttttatacctttcccttggcttcaggtgtgctccagcaatccttggtgttcattcattgatttgcaactgcttgactccataatctctgctttcaaggtcacatggctttctgcctgtatgtctctgtctttacctggtcagcatcaccctgtgtccatctctctctcttcatgcgcattttttttttttttttttttgagatagagcctcactctgtcgcccagtctagagtgcagtgcccgatctcagctcactgcaacctccacctcccgggttcaagctattctcctgcctcagcctcccgagtagctagaattacaggcatgagccaccacgcccggctaatttttgtgtttttagtagagacggggtttcgccatgttggccaggctggtctcgaattcctgacctcaggtgatccgcccgcctcggcctcccaaagtgctggaattacaggagtgagccaccgtgcccggcctgcatatatgtatgtacgtatatatgtgtctatctatctagctagctagacactaggcattttggattaggcgcccacctatgcctgcatgacttcatcttaacaaatgacatctgcaatgaccctatttccacataaggtcacattctgagttactgcaggttaggacttaacatagctttttggggacgggaagaatcatggggaagacacaattcaacccataacaaggaataattttgacagtcattgccaatttgcagatgttaaggctcaaaaacaaactataatattattgttcattaacacataaatgtgtaggtatgttttttccccttaaaaagacacactggtgtaattaaaaacaatctactacttttccctttagtgctgtaatttttttaactggagtgattacttcaataaaagaaaaatttcactatctgcgtttcttttccgggcatcgttattatccatctcaccattactactgaaaatcactgtgttaaaaacaatgcgtacaggtgtcaaccaggccagctggccactgctggacccggtagggccgtcagcccgcaggaccccgaaccctccgggtgcctttctcttcagacgctctctttcccaggagtctccgcggcggagcgccccatcgccctaaatgccactggctgacgcagccccaaaaaaaacccgatggcccgcttatcccacactagggggcgcctggttcttcggccgccacagagcgctctggatgcctgaagcccgcccagctcgccgcctctggaaaagctcaacaccgtttctccgcccttcccgagattgccaacgaggcaggctctgatgcgcatgcgcaaacacgttcaccacgctccgagctaaggcgcatgcgttccctgaaattgccgccaccggctctaccttccagtttccagttccggcctccaaggggcgggcagaagttggaaacatgcggctgtcggtcgctgcagcgatctcccatggccgcgtatttcgccgtatgggcctcggtcccgagtcccgcatccatctgttgcggaacttgctcacagggctggtgcggcacgaacgcatcgaggcaccatgggcgcgtgtggacgaa

SEQ ID NO: 6606 - DNA, 2300 bp, Homo sapien
tttaaaaaacgaataagttcattggcttttcttttgctgtctgaaagaagttgctctttaaggattattagcttattttcaaaattgaactcatttttcaaaatttaacttatgtttccattgaacttatattttattctctgggtcttcattaaaatgtgtttcaagttcttgcttgatggcttcatattcttctgtaactggagcctcaaatatgcttgtttcgagtgtctgaatttttcttttctgaatctggttggtcagctggttccgttagccaaacacatgattcttcagctcccaggtccagtggggttacacatggtttccagtttgctcatggccatgacttcttggatgttcctgaaatgaaaaataaagttctcatgcaccagagctctccacacctttcacatgtgtgctagacatcattgtgggtgttctcaatattgatgggctttttagttgtcaaggtgagttgcaatttgatagcctaattttggcacttcctcttacatagaatcagttggagaaatttctatccaactagaaatatgtcaaattaagaacaggaacaatgaatatcattcttattactgctatgcaaactgtgaatatttataacttctctggtctttgtcaatataaatttctcctcagaaggagacttttaaggttcttggacttcaaaaactgctaccttgcccaatggaaataacataacttcaaaaataatcctgcaattctgaatgcttgccttattaagaatttattgcatctatcttaaatttataattgatatatctgtgttcttaaatggtgtggatacttaaaaatatcaaatcagaagtgtgtttttgacctttcttcttaaaatgcaaagaacaaataaatgactgttactctcttagtgcttgtgtttaataaagaacttgagttttagaaatttaaatcactggagggatgtagaaaaagagcctcagatgttgcaaaaaaaattgctcacacacagaagtcacatgttaccttagtgggcttcatttttctcactgtcagggcaggaacagatgggaattttgataaaagaatcactgaaattgagtgtttcctcttttttctgtaaagctctgagtttatcgtgcgtctgggcctaatcactattcaccccatttaattaagaaactatgaaatgttaattcagtataaagggctattatcctcagaggtgaaaggcaaataagggagctgttttgcaggcatctctgtccatcagagataagaaaaatgagagctttcgtttagatgggcagttgcagaggcaaccatggtttcttctctgttagaccacatagtgtcatgggaagaaagctagacttagagttctctgtctgcttcttactacctgtgtgatcttgggtttgtcatctatctcctgtgattatttttctttttcctatcttgaaaatggccattaccaaaaccatttctcattaagatgatcaactgacatattttagttttctattgctgcataacaaattaccacaaacttagaggtttgaaatggcacacatttattattttgtagtttctgtaaccagaagtccaggtaaagtacagctatgttctctactttaggatgtcaccagattgtaatctagtgttgactgagatcatggtctcatcgaggatttgactggagctctggtttgagtgtttgtctgttctcaattaatgttgaaatttggttcctattgtgggggtgttagaagatggagcttttgggaggtgagagggccatgagagttcttgcctcatagatagtattaatgctgttataaaagggtgatttcagccctcttttgcctgtttgctcttctgccatgtaaggacatggtggtcccaatgtaaacatggtccagttcccatatgaacatggtgttcgcaagaaagcataaacaggcttcctttcaatcagcagatttagaaacaaaaaacaaatacgaaagtaaaaccttacagcaggaagttttgcactgctctgaggataaactcagtttcctgtctcacataaggggccaaagcctggggtgaagctgtacgtcggcagccccagccccagaaaaggaacctactctccatgcacgtctctctggagcaacctgaagacaggatcttggcctcaggacaggtaggtaaagaacagaggaaatagagcagacagagagatacagcaacagacccagaaactaaagtagaaagagaaattgatgtaaataaacatagggagcagtcagaca

SEQ ID NO: 6607 - DNA, 2300 bp, Homo sapien
cctgtgacttatcaagagaggccagggcctcatttttgtcacttgtaaaagtttctcatgatatatcatcatcttgaaaatttagacttttaatagcttatttcattttttcattgtgttctcttcctagcagctttttaattttcatattccttttgattttctatgtagaaaacatccttaatttgttccttgctgatactaggagtgtttttcaagagattcagaaaatctccacctggtgttctcttcaactactattcattataaagaggccaccattttgttctacttcagcagtttccagcagaacaattgccttttgttcccaataatcctcactgcttgagccatcggatctttctttggttcctgtaacctgaataacatttcatcagccactttctcttgggaatcttcctctgtgatctcgtatcaacctttatagttcatttttggttctggtctgttccctagcctgtctttgacaggtcatttccttttgagatgaccttgccccttttcctcttcctttgatcccatttttttgtttgtttgtttttgccaccatgcatatattcagctagttgtttgtctagccctttcgtatgctctagagattccctcttaagtttcttagcaagcaaacaatcataggtctcggattgtctgcttctgtcaatagtgccctccattcccaagataccaagttcagtggccactgcatcttaattctgttcctgcagtacagcaccccatatgttgttaaccttctttcctccagaaacaggtggtttctgactgctctggccaaactgaaaagactctggtttgggaggagagtttacatatttccatcacttccacttccaaagacagctatcatcatctgaatcagaaaaactctcttcacttgaatccacactttcaacaactcggtaatgtgatactggtgcacatgcagtcgccctgctctggaaggcccttataagcactgtccccacctagcactttccacacttgctgcagcctgttgctgggtgtgaccattatgtcggaatctgagtcaggttggaaagctgcccatcttccatgtcgctggcctccaacaccatcttcccgtggtgcctatgcctatattttagccaacattattttcatctctgttgcctagaaagcctttaaagatgatgttatgtgtccctgtgcccctttaaggtactatgtatttttgtattttgactttcattgtgatgtgttataattgattatttaaatattttatctattaaattctaagcttcagtgaataatcattgtatcatcagtgctgccatagaaattgaataaatacagactttccttttatatcatttaagattctatctcgtttcataactttttatccatgaatgttttcctttgaaacttcactctaatgtttcttatattttttatagtttttttttgtgggagtctgttttattttttccaattttcctgttcttgaaagggaagtagtcagaatctccttggacacagtcactttccacagaattgtagtacaatactcctctccgatcttaattttgagagtcagtggattatgcaggtactaagaatcagttgccaattatagatatgctggaccaaagaggaaactgctaacattgtttcccacagtctgatttggcaagaaagaataagtattacgtgatttgaagtggtctacaattcttacggtgagtgagggggaaagtgcattaaaacaaccacaccctataaacattctcactcatccattcccctctattatttctactttgaataacttcaaaataaaatacgatacaagatcagatttgttttagtaaataggctaacaagatataaaatggaacgtaaaagagaggagaaaggtgacctattgctcatttcactgcttaggttctgaccacgttttattgtgtctttattcttagccaacacaagacccttcctcttccagctgaggtgctgaccttgcctctatccctgacattaagagaaaatctgaaaaacagattgagaatctgacttccaatcaagaatctctctccaggaccacagctggggatttatgcccatacttatggctataggaaactggacagaaataagtgaatttatcctcatgagcttctcttccctacctactgaaatacagtcattgctcttcctgacatttctaactatctatttggttactctgaagggaaacagcctcatcattctggttaccctagctgaccccatgctac

SEQ ID NO: 6608 - DNA, 2300 bp, Homo sapien
tgcaagtgtcacttgtcggccaaatccctgacttggactcagccacccaggattccaacacttgctgaaaaaactactcaacttatctgtgtctcagattccttgactgtaaaatgggtataatactatctgtatcttcaggtgttgtgagaatcaaataagataatacatgcaaaacacttagaacggtgtgtggtgcttatttgctgcttcataaatgctcattcttactatgaaagtagatgaggtatcaaggatgttttcataaaagaagtgattccttggttgaattgttttaaatgaatatgaatcagcaaaaaaattaaaatagcattttctcatttttttctctttaccgccctctttccttcaccaacctaaattcacttcttgcacctgctcagaactttactcaaatatcatattctcagtggagctttccctgacactttccacctctaaatgtttgtctccttctctactactttattcttctccattgctcttatataccatactttctactaacataattaattaattaattaatttttgagtggaattttgctcttgttgcccatgctggagtgcaatggtgtgatctcggctcaccgcaacttccgcctcccgtgttccagcgattctcctgcctcagcctcctgagtagctgggattacaggcatgcaccaccacgccgagctaattttgtatttttagtagagacagggtttctctatgttggtcaggctggtcttgaactcccgatctcaggtgatcagccagcctccacctcccaaagagctgtgattacaggcgtgagcctccgtgcctggcttaacagaatttgtttataacctgtcttccctatgatgagttttatgagggcagagatttttgcttgttttatttactaatgtattatcttcagtatctaaaacagagcatagcatacagaattatcttctgataatcaatatttactgaattaattattttattttagagattgaatagtaggggctatagtgagttttggcaatgagctggataagaagatttagaagataggtctagcattatatcaataattataatggttaacattcatggaacatgtacagtatagcagacaacatgctaagtgcttcagattttattcctccatatgtttatagtcatcacaaagaatttcagggtcccaattttgaagcttcgttattaatgcaatgatgaaatcttttgtttccttttcatgggatttcatattagtcacacttgcatatttaagttgtattttattaacatgtaaaatgtgagcttcaagtttcttgagagtcaagacacaagtcaaccaagagagctgatgaaaaagttcatgcttaacccatctagattctgtccatggttctgatgctatcttgacacatacaaccacttggaaaatactcatccctgggatcaagataagccaccctgactatgttgtgtgtcttcttgtttacactgcaattttcagagtgtagaaattgagattctcacaatatagtgaaaccttcctgagtatgggcttcttgagattgagacacattcggatctcctcctcaggaatcatttagtaattgctgaatcagtttctttgattttctccttcctacatttttgttttgcaaaaaatatacctgcctgacctcaccacttttcattatgtgtcacgacctctctcttcataaatgcttggcctgcctttcttagcaccattattgaagagagataaggtaggagcatgaacataaagctgtgattttgcccattctctacagagaacagaaaaatcaggacatgtatagatatatatagtatgttaattaagtctggaaaagtagaattctttccccaaaaattgtgaatctaatggtcaaatttgttttattatattttggagagtatagatgtttgatcctcaacaactctaacaaggaaagtaaagaatgaggccacaggaggtcccctttataagaatataataaaggtataaataacatatgagatttcttctaccttcctagattttgaatgcccagtgaagtcctgggcagaagaatgatgtgggaaaactggacaattgtcagtgaatttgttctcgtgagcttctcagccctgtccactgagcttcaggctctactgtttctccttttcttgaccatttacttggttactttaatgggcaatgtcctcatcatcctggtcactatagctgactctgcactacaaagtcctatgtacttcttcctcagaaactt

SEQ ID NO: 6609 - DNA, 2300 bp, Homo sapien
cgtatcagtcagggcttttagtttcaagcaacagaaactaagcatgatttaagctaaacgtaaaaatattgaaatagtattcgagtcatgtagccagaaccacagaccaaaattgtaccacagaattggctctatgaggacaagacttccattcagcactagaagcatgatttacctgccaacaccatcagcacaggacactgctgccggagctgctgattctggaaactgaatattgctgcatccattgccactgttggaaagaaaaaaaatgtcttctgacaaacacaacctgagtcaggcgatcaaattgaacaccaacaatgataagtcatgttgatagtatgtacctgtgatatgatataataaaaatggcactctatctctgtgaccttcatctccagtctaatcataggaaaaatatcagaaaactcccaatagagggagatcatacaaaatacttgaccagtactcctcaacactgccaaggttaggaaacacaaggaaagtatgagaaatcgtcacagtccagaagagcctaaagagacatgacaactaaatgtaatgtgatattccagttgggatcctgcatcagaggaaagaaaaaagataaaaacaaaacaaataaaccagctaaagaagtctggtccttaccagcctggacaacatggcaaaaatccatctctacaaaaaataaatttaaaaaaaaattagccaggcatggtggcaagcacctgtagttccagctacttgggaggctgagatgggagaatcacttgagctcagggaggtccaggctgcagtgagctgtcacaccactgtactccagcctggcagcctgggtgacagagtgagacccagtcaaaaaaagaagaaagaaagaaaagaagcaagcaagcaagagagaaaaagaaagaaagaaagaaagaaagaagaaagaaaggaaagaaagaaagagaaagaaagaaaagaaaagaaaaaagcaaagaaaataagaaatctgaataaagtattgtggacttaatgtatcaatgttattttattttttatttttatattttatttttattttcttagttgtaacaaatataccataataatttaagagggtaataacagggaaaactagttgtggagtagaaggtaactctgtatattaccttctcaatttttccaaaactgtaaatccaaaactgctctaaaaaataaggtctatttaaaaagaaataaaagaaactatatggtgtgtccttgtttttttgtgtcactagctgttcaaagttgccatcttgttttaccttagtccactcctggcctagatataaagctctctctggtttaagttctttcactctgctcctacagcactgtccacatgcctctaggcaagcactaatcatattatcatgtacttaatgccaccaagcattctctcctttgtgacacacacatcccttccctctgtgtctccacacccaccagatttcctcctacctctcaggctgatcctcctctctcttttttgcaggtccgccttcctgactcaaccaatggtgttggtgttccctgggccaattccagcccatttccttctattttctctcttcctctctgtccctttctctgcagtcctattccaatggatagcatcaatcaccatctacccagattgacccaaattttacaggtctagccccagacatctctaaattcccaaatgcctacatccaaatgcctaattgacaatgcttctcagatgccacaaagtacctcagtcttaacaagccaaaactgaacaacgaactgcaagccctctcacttccatacaaaactgaatgaatgaatctgtgaaccaataaaccaataaagaccatgtaagagacaatgtcttgtcgaaattgtcattgttttttgattccagacaaatggggtgtggggaacagaaaggcgatttggactagtttccccggacgggatgaggcagcgccggaagtatgacgctcatttctttaagccactagaagctcaccgtgagtccattcacagggccagagttccaagtgtgcggcgtgggcggggcctgcagaaagggacggggcctgcagaaagggacggggctggcaaaggcctggtctacctcaccgatccgggtcgcgggggctcctagggggttccttccacagctggtgcgcgtgcgcaagagtgcgtcgaggttgttccgcggcaatttatgaaactcggagccggcagtgagttgagggttcggcgaggtcagggattcctagttgcagcgtgattac

SEQ ID NO: 6610 - DNA, 2300 bp, Homo sapien
tgtttcagtttcttttttttttttttaattttttgagcatttctttactttctggcagtacaagatgccccatgcttatgttgcatgagcctcagtcctagaatcaaccatttctccaagaaatcctggttcctattggagaatggtattagaaaccaagatctgggagctaattattcttttgctgctgggctgttcttgcttctagacctacttagccaacacagcaaggaaatgtgtgtttatactaatttatgtatatatacatatctgtaaatatttatgtaaccatcttcatctaattcagccaaatacaagttcacacttaggtctccaactctaatccattatcacatggatcattctagtctccttcccttggttttctgtaaatttctagtcaaacattgagaaacctggctcttaccactcatctgccattaaactgtcttttcatagttctgtgtatccttcccctactctgtgcgctgatacttatttgaatgttgaatgatctgtgcaggcaggcattgccatggacaaggtcacacaaacttttggccaatatgtaagatctaacattgtaacatacatgtgtgcatatgatctactgagagcttactgtgtgtcaagaaatgagatgatagctcttttaatccctataatttgatcagatatttttatatccattttacagttgagaatgcaaacttgggttaatataatttgctcagctttatacatatagtaactagtacatctgggatagaaactcatgtatctatgactccaaagtatgtagtctcatttatatattgcctatagcagagtttttaaaccttggaattattgacgatttggactgggtaattctttgctataggggactatcctgtgtaggatatttaacaacatccctggctttgacttcctagaggccaggtacaatctctagctgtaacagtcaaaactgtttctaaacattgccagatttcccctgttggtaaaatatcctgactgagaaccactgaccttagataatcataataaaagtgacacctgaatagtaaattgcatctggacttggagaactgtaaatcaaatagaaagttgtatctggacatccctgaatgtagtgactcctataatttggcaggctctttgagacaacccataaagttgtgctcagttgttatgagagatactggctcctgggggaattcttttgagtcagagtgtttcctacaccacgtttatgggtctcatctccctgtacttgagctaaattctgcaaagactcacactgaagaaaagtgcatattattcttctgctagcaagttgttttttgccttctgagtaaattggtgccaaatatgacctatggtagtcttgcaagtctaaatgttcagttgcgcctaagacatccctggtgggcattgcgtaattctccatagtaactcctaacaaatataaacttttcattgtagtctgggaatccactttttgatttattcctaataatagtttatggatattattctagtatattttaaacaattgtctcttaccttaatttctaatgctattgtcagttttactcatagaattttattggcattttaaagagaactttgggtaaggtttttcagtcatatctattctgaaaccttaatatcctacctgaagatttgtgttgcttaattttaaggtaaaaatgatttgctacctgatatagaataaatctaattgtaattcaattacgaagtttttttaaatcaaaggactcttcatcatttgttttgggatgtctattcgtgtgtgtttctttgtcctttgggaaactggttaggagaaagggaaagcatattttctagttctaagaaaggaaaataaaaataggagaatccataatatgcatttttcttaggcaattttaataatatttgtgttttaacactatgctaatagatgtttgttccctgtgggttaatttctatcttttttcagttgctcaggtacctgaatattggctttgtgtctaaagtttctggaactttcctccttaccgtgaaataacttggcttaaatcacactgcatatagtacacaggtgcttagctcaagcctgagaattactgcaatctagtaaggcggatttgaactactgtgggagttctatttaggaagatgcagcctctgagcaagttgatggctatctcaaaacctcgaaacctgtctctacgtgaacaaagagaggttctgagagcagatatgtcttggcagcaggaaaccaaccccgt

SEQ ID NO: 6611 - DNA, 2300 bp, Homo sapien
cttcaattatttgctatgaagaatctgcaacatcttggactaggaacttgggctatccctctcttcccatgcaaggcagtttcttcactcctaccctgggtacatctctaggcatctggtgactgctcccaggacccccatcaaagctggtgctttgggtctctgcacattcaagccagggagggtccatgaccaataattttcaaaatgtagcttccagagtcataaaaaatgcagatgctcactgtgtggtggacggaggcagataggctctaggccgggcacccctgctaaaccccaaactgtaactgggtagaattcattcctaaaagtcttgcgtatgctatacttggtgctctttgttattcatattggcctctgccctttagcaggtatattccttcagatacacattttgtttctctgaaaactggatcctcttagctttttttttttcttttaattttggttagttcaatgaggttcaggtaatattctcaggttggaagcagtgtggcagaacagcccacttccagtgttcgttcttaccggtcaatgtctctgcattcagtaattcaactatcaattgcggctatttaaatacattgctttttaatgtatttaaatagccgcaattgatagttgaattactgaatgcagagacagatttaatgggtgcagcacaccaacatggcacatgtatacataggtaacaaacctgacctggacgttgtgcacatgtaccctaaaacttacagtataataaaaaataaataaataaatacattgcaatttacaggtgaaaatacttaagggtgagcggttaaacaacttgcttaccaccacctagtggataacaatgattgacagctcttaatgtcagttccgtcagacaacaaagcccacatttttaaaatgctatgctatgctctctgaatgttcaaaccagggaaggcccacgcccagtaattttcaaaatgtggtctccagagtcataaaaaatgcaagagcttattgtgtggtgaactcaagcagataggcgctgggccacccacccctgctaaacaccaaactgtaaatatatagttcacaagactacttcctatgtgcaaggggctggtttaagcattttaactacactaactcatttcaatctaacaagtctgttacatagttactattattattggctatcaatattacgcctattaagctgatgcttaaaggttaggtaatccagccaagatctcgtaagtggtgttgtcagatttgaatccaaggagtcccttgcttgtaatgactatcctaccaaaagttccttgcctaataaaatgtttgaatattactgatccagcccaagtttgaaggacagggcccaaagatgcgaaagtattttcctaatataacacactcagctaaataatagaacaggctcttgcaactctctgtggtcccaggacactgaggaggggctccttctcatggcttcatttcagctccactgtgcgtttcccttctctgcctggagtctccagaggagcctgggatttggcaagaaggcgggagggaggaaagcctcactggaccaggaacgaagagggtgtctggcaacaataggacggaatttgaaaacctctaaccttgagtttagagcgatgctagctagtgccagggctagtgaggtgcccattccgccaaggcgcgggacagcgaggacaaccacgccttgccaaccaaaggcgacctgacagcgtttcctcggggtcgtcgcggtggtgagggtcacagaattctccgaagccagtagctccgtttccagccacgccccctttcccagggccctaaaagcttcgggagttctcctattccattaatgctggtgcgtcctcgccttatcccccgagcgcccgcagctcccgcccgcgcaggaatgccagcggccaaaggtcgggaggcgcgggatacttctggccaatcaggagtcacgttttcccgcgctctctcttcccgccccgcccctcccgtatccatggaaacactgcgagtgtctactccaagacctgggacttccgtttcggtccagccgggctgcggccattgtttgtgtggactgagtgttttggccatcccggtccactctcacaggctccgttaagtgacatgaactctcaggaggactgagccagaagcggacagggcaagacgagctgtgcttgaaggaagaggggcagaaaatcgagggtcagggactgagaagctactccggtttagaaaccccagagacacccgtgtagatgggt

SEQ ID NO: 6612 - DNA, 2300 bp, Homo sapien
atgaaaaaagtgtgggattatgacagcaaagagacaagtgtaaatatcaagatgtaaggcattgttaaaatagtattattaacatatggcaccttgttaaagttaggtgcatgcgttagcttttttaatccttgcagaggtaggtactcttgctattcctgcttacagatgggaaaattgaatcccaaaatgccccttgagttttgtaacaaggaggttattggtatgagttatttcagtggaattgtggtggcaaaagttctattgcagtggattgaggaggtataatataataggtgatagagtatagaagattgaagaagtttgactatgaagatgaaggggatttggagtaaagggaatatttgtaaaagactaagtgagatttgggcacatttaagtgctaatgagtaggacttaggggacagggagaagttgaagatcaagaagatagatttctaatggattaaatcccttcaggaacaattgcttatgagatttagatcacaggtagagaaataagctatagaaaagggaagagagcgcccctcatttgttacaggaaagacaaagataaagatggacccacatgtagggatacctgcagatttctagaaaggaagcggaagatgtattctgtgccttgctttccctcacctaccatattctctatgtcctggagaaatttcagagttcttttttgaagtttcctcaaatcttttcctttatgctttttaaaaaattactataggacttgtttttgtcagatttatctgtaatctagaatatttttaccatgtagttaaacaaacaaccttaaaacagctgatagctcaccaattactgtaggataaaatccagatttactatatgtttcgagacaattcaccttctgtttaaaagaaaaactctcccttctatatacttttatttcccccatccgtcttttttttccaatcatattagcaagaattgggggagacattatgaaagactggaaagggcaggaattttagtgaaagatctaagttgagttccagctgcatcacttactagctctatctcttcaggcaattcaccaaaacagattaagaaaacttgatggtgcttgggagagtatggattaagtgattaattggagcacccatgctgaataagaaattgaataaggcccttaagatggctgatgaggggtaaacgcagggctcaaaaggatttgatgatgtttgaagaactgtcaccgagtaagggcatgaaaccactcagttaactggaagatattagtaaaaaatgggttatgggagtttgcagcttaaaagtttgagtagtcattgacaaagcctggggtgagagcattagagtaaactgccagagagcagtaaggtcatgggagttgatgtcaaagacgtgagatgaggatgtttttgatgcactttaacactgaactcacccagactaactgtggtgttggggaaagtgcatgaaaggagcttgtgtactacaaaagaccctcagtaattatatatgtatttatgaccagaaatgacatgacaagaagaggtagatggtggcatattctaattgcatgtgtttgttgagtaataatgtgttggcaggggtgcaataacaatgttttataggttgagatgtatattagatgttgttgggggatagaagggatgaggatggacagttagcaatacttaggaggagccagttctgtgccaggtgatatatgaaccctatcttatttgatccatactaaaattagaggttggctctgctatccccacttagcagaagagtaagttgaggttcaaagagaggaattacctttatttatatagctcataagtggtaggactgggaacagatcataagaagatggaataaatatacagtacagtggtctatatcagaggaatgctttgtgaaagaagatatattacagaggacactaggtcagtaccgagcctaatacagtgggcttctgcaaatgtttgttaaattaatctatataagtatttcattttcaaatctgtctttttcatgtgtcccatttattccatgtgcttttggttattttttttccccccacagaggcctgaatatttggacaagatggcagattcatcatcatcttctttctttcctgattttgggctgctattgtatttggaggagctaaacaaagaggaattaaatacattcaagttattcctaaaggagaccatggaacctgagcatggcctgacaccctggaatgaagtgaagaaggccaggcgggaggacctggccaa

SEQ ID NO: 6613 - DNA, 2300 bp, Homo sapien
taaatataatgtcttaacatatgtccctgagttgtctttcagaaacccagatcccaccaaacagttccacagacaggtagacctcagataagagggaactggggactaaactctgacaaccattctttgttctaaatatcttcctgaggggcctggatggagtcacactcaggagccaaagctcattcttttctgctgactgcaaattctcttccttcaccaactgcaaatcagaaaatctttgaatctacctatgacctgtaagccccccacttcaagagatatctctcctttgggccaataccaatgtgtaacctccatgtattgacttatgattttgtctgtaacttctgctttcctgaaatttacattttcctttaaaaacctttacctgtaagccatcatggaggtcagaatttaagagtagctgcctggtcttccttgcttggagccctgcaaataaatgccctcctttttcctgctgcaaacctcagtgtggctatctggtcttattgtgccaggagagcatatctcagttaggtttgattagtaagtggcacaagtgaaccctctggagtgatggaaatgttatagattttaatgtgggtcatggttacatggatatacacacgtaaaattaagcagtaaacttgattttataagtaaatttataaacttagcatttttaagttagcattcaataaaaacattaagggcagtcattcgaaaaagtagaaatagaaggcataacttcttccatagtggaggaaaaagaaacaaagacaaatcacttactacaagaaaaggcaagaaagatggaaaaaaggaagaaggaaaggtttggctgatagcaaagatttaggaagaaattgcaaaagtaccgaaagttataagcatcacacaaaatggactaaggtaaaaaggtttttacgaataaggaggatcattacataaaaaaggtattcaccagaaatacgtagcaattctcaatttttatatatctcacaatataaccttaaattacatgaagcaaaaaccagacataaagacaaagagaaatttacaaatccacaattatggtaaattttaagacagttctagtgtttggcaattctatcaaataaaaaacaagttagaaaagggaagatttaaatatcagaaaataagaaagaactttgtccaacatttagagaatacactttctgctcagtatatatggaacattaattacaccatattaggtcacaaagcaagtctcaacgaaaaacaatggatatcgtacagagcatattaaaaaataaccaacaggcacatatgtttgaaaatttacaaacatacttctttaatacatggtccaaaaaggaaataacaaagatgagaaaatcttaggaactgaacaacaatgaaaacaacatatattacagctcaaggcatgatattaaccagtgcatagagaataagttttaaccttaaatataacaattagaagaaacattttttaaactcttaatgtgctaagtgtcttatttaaaaaattagaacaaaataatataaacaataaatccaataaatgtagaaagaataaagacaatagcaccaaataaaatcaaaacagaggatagacgaggctaaaagctgattagtttaaaaagatcagtaaggtaaaatttaaacttgttaactgttattactctatttttcaataattgaaaaatgatttttaacttaataattttagtaatttaaaaaattcatactatttttttctgtttgaaaatggtttgggtagcttaggtttgggatcattacaattgttctcattaaaactaatagaaaaaaatttttttccacctaacggcttttccctgagctttcaggaggccattgaagccgttaagaccgggtcaggtgaacaggaagttaaagactgaaaaggagacacaaaactgccgactttcccgacggcgaattggccctctggaaacagccgaccaatcacaggcagcaggggcgcgccctgcagcggggctccggctgcggttccgtggactcggcgactaggcgccgcctgaccagtaggagccgccctcgacgagcgagctcgaaggctgcgactggcgccgcctcaccgcctcccaccgccactgaccgaccgttcgaccggcaaacatggttgaagcggatcgcccggggaagctgttcattgggggcctcaacctcgaaaccgacgagaaagccctcgaagccgagtttggcaagtatggccgcatcgtcgaggtgctcctgatgaaagaccgaga

SEQ ID NO: 6614 - DNA, 2300 bp, Homo sapien
cttggatacaaattcgaggtaagatattttaaacttggcgtaaaattatagacctgtttctaagcccttctgtcttcttctccattttaaactcagttgctttataattttacataaaagggtaatgcattttcatttcagccagcaggaaaaggttaggctcctcaggtgcttttgaatcttcatgtttgcagacaaaatcattgaaaggttttgatatatttctcctaagggtttttcttgaaattacaccaggtcactcaatcatcagacaagcatttttaaaaacaaaacaaaacaaaactgctctttgtcaaatactgggcaagttgttgtctacaaacttgcttggctgaattactgagcaactactttatgcccagagaaaagaaaagagcagcatggttcttacatgtttgctaagctcttgacccatgctctcatgagtaccctatcccatctggatctgagtgttgcccttcactatccaccttctttcatttaacagttattcactggacacctcctatgtgtcaggcactgtcttagatgctggattcttggtgatgaacatggcagacaaggtccctagcctcagggagtgaacatactagttgtcagagggaatgggggatgggagtaagcaaaaacaaaaacaaaaacaaataaacaaaaaaaaccaataagcaaacagatactcagaaccctgaactgtttctgacatatagcaggtgttcaataaatatttgtgatttaatggaatgagcaagatagtttctgatagtgataagggatatgaaggatattgatgtgaaatagagcatttagacagggtcaacatggaaggctctgtgaaaaggtgatgtataggccaatatgcaaaggaaaggaaggagcctgcagaaaaggtgtccctaaagttgaggaagaagcaagtgaaacatcagggagttagtaacaaactgattgcatttgaggacagagagagaacaatgtgactgagacaaactgagcaagagggagagtagcacaaactgatgtcagaaaggtagagggagctcagctatgctggcactatggatcaaacaaaggagtttgggcttaatttccagtgttattggaagcatttggggttgaagcagtaagtcaatgtgattaaactcatgaattgaaagatcgccatggctgctctgaggggaaagaattggtaggaggcaatattggaagaaggaagtgcgtcagttaggatgttttagcacatcaacaggttataggtgtgaaagatattgttcccctctgcccttggtgtaaccaggagagaatgagtttggccaaagctgtggggcggttctggccataggaggattcatcctttaaccagagaatgctgaaaaattagcaccatcttccgtgtctgtcacaatgtaaaaaatattggaaagccctgcttcaatacatatttttcatgctttctggccatcgggcttctttaatacactctttctatgtttggagaaatttcccacttgaaaaccagcctccaagataactgctagtgatccccacgtcctagcatttgctcccttgagtggttccctcccacacagcaccagggttagtgtgtgtaaccaatagaacacagcagaagtgatggcatatcacttctaagattaggttataaaagacagtggcttatgtcttgagcttcctctcttgcttttttctttttttctctctctcatcactcactctggaatagtcagctatttcttaagaataccccagtatccttgtggagagggctgcatgatgagaaactgagacttccagccagtagccaagcagtaggcattattgaaagcagccccagtcaagacttcagatgatgcagctctggccagcaagttgactagaatctcatggcagaccctgaaccagaaccacccacctaaactgcttctggatttctgacacttagatattgtgaaatgataaatgtgtgctgttttaagttgttcattgtgggggtaatttgttacataataatagatgatgagtgcatcccctttgtgaaccctgctaccacactcagcctctcttgcagtcctgagctttgtcaacatgatcctcctgcctgagacttcaatttgggaaagaatgatatgaagaagccagtaatgcagagaacaaatgctggcgaaggtggtggagggagatttagctttcaaaggaggcagaggtaaagttgctagtggggaatcttgtgcccatctctgtccctgtggatggctgtgcctgca

SEQ ID NO: 6615 - DNA, 2300 bp, Homo sapien
actttatccaaaggacactttttagttttttctctttaaactatatttgaaagtttacagttgatgttgctcgctcctctaccaaacactcctcctcccgtgatccctatgactcccctctgtacaatctttcctcctgttctcattgctaccttccaatctcctctttcatttcttcaactcttctttcttgaaggaaccatcccatgtggcaactcagtttctacctttccaatgatgattgccagtcttcactctctcctaaactctaggcttgcatttctaagtgttattagggtgtgagcacatatgacccaggtaacgttttgaaacgtttgtgcctttcacttctttcttattccattggttgcaatcttgtcacttaatacttgaaatgtttttcaaatttggatgtttctagcaatcagctaatgcctttggcctggtttaggccttcatcatctcttgcctggtttatcaaagtcattttttaactgaacttgttgctttcagttcctctctgacatgatggcattagggtaatatttccatgtgcttcaacacacataccttctcaccattactatatgtcccccccgccacccccccccagcatcacactatctctggtgtcaccttctctgttcatggcctttttcttcttctctaggggttcccccctttgaagaaacagcatctgctcaacctcccctacaggctcccttaaagctggtttctcctccctctgtttgtctctttgcaactctctggaggcatctttacctttacaactttgcattttctctgctattcccatgtaagttccctgaaaccctagtaccattcacagcaggatttcaaaggttgcctgttgcgtgagcattctataggatcccaaattatctttctgtgcaaatatgaattgttgtgatatgtccgtagagacggcacaacctcatggctaagaatgatagttaccagttctagagatcctactctaattgctctagagtgggggcctgaacaccagtattacaaaaaagacaaaagaaaaagaaggaaaaaagaaaaaagaaagagagaaaatcaaagctaccttcatcatgtatgaatttgagcaagtaacacctttgtgagtccccaggccccagtttctcattggtaaaatgaggataacaattacacagaccttgttgggctatgtacagaattaaatgagattatgtacctaaaaggcttgtggcacagtgacacacacacacacacacacacacacacacacacccagagtacttcgtggttatttctaggctttactgcttgaaaggctgaaaagatgggtggatgagaggtgccctgaggttccttccaactctccaagattctgtgatactcctccttgggtgctgaagacactttggcaatgtttggatttccaaacggttgcttagaaaactaagggacccacgaagcccaggtaagcctcagggtctttcccaggaatcgtttatttatttgatcttagttctgacctagagcctccaccttctccatccaaatcaccacagtggtcgaaaagggcctgtgcttgggaaatccttcctttgttggcgaatcttggacccaaaccctgcatttgggcatctgacacccataggcccatggttcaaacccaggcggctctttccaagttcgaagcagggactcggttctgcgcatctggcgggtgtgcccagattgtaaccttcgcactaggcatccaagaacgtgctttggacacactcggcggtgggagcgggtgcttggtttgcatcagggatgaggggtggagtagcgaaagcgcccggagcgcgcactcactcacactccccaagccagggcgcggccgctctgggcgcgaggtcccaagccaagtctcgcgctcggccaggagccggggagtaccccaggtccccggtctggggccgccgctatcctaccctgcggcgcgcactcctgacctggccccgccccccggcggccgcgagtagcgggcggagcgcaagcagagaggcgctctgggctgtgcggcaccgcctctcctcggtgtctggggagggacggagggaccgggcgggagagagagaaagcctgaccgaccggctggcgaagagctgcatgcaaccggtgggaggccgggccggctgggtctggggctcgggctcaggctcgcaccgtttctcggcaggtccctggcggtgagcgcggacggcccggaggcggcggctctgagctggcaggcggagggctgtctcctgcgc

SEQ ID NO: 6616 - DNA, 2300 bp, Homo sapien
ggggagggcccttgaccttcactcttgtaggtatttccatccccaagtggtgtgaaagtgatgtatgtgtctgaagtgagaaggaaacctctatgtgtggttgcccaaggctatgactctgggctgttgcatatggaaataccccagaaggcattcaggccagagaagcccaaaagctgtgcctttctataggggatggctgtgttctctctccatgatctcatctcacccattgctgtaccagtttctgaggctgttcccttagtggacgaatgtgcctaggaaaggatattccacaatgctcatgccactgagatgtatgcccttctaactaattacttttcattctaataacactcccagttgaaaggaaggggctgctagctactgagtgagtagtgttgggggtctctgattcctcaaaatctggttttagcagaaaacagggccatgttgatactggtactctctaccacgtgcatgggaggaggcagtgaatttgctgtgaactagccctccttgcattagattttttccagggaacagcctgcttgtcttggtattctcttggggctattccttgcaaatctggagcacttcttggggcacagttattttctggagacagtcattagctcaaaggtagtcatgtgtgaattgagatctgctgcctatttagcacctggatatatttttaaatattctgtccttccagggcattctagaaaataatattatgttggaataacgatttccagggcagatgctatgtcctcatcaccaagggcttcatatgaaacattgagtcctggtactcttggtactgtcactatatctatcatttgtttttgttcatagtccgatcttggttcttggcatgagagacatgcttccctgcagcacatcaccttgggccacctgcagaaggtggctggaccattcaggttcaccaaacccaatctggaaagaaggccagttagtgctgtggttacagctgagcatttggtcactgaaatcgtctggatgttgctggatggaaaaagttacttaagatctttgtgagatggttgtcctattttgtccttggcacaagcagtcctcttacccatggtcatcgtttctgcaggaagaaaaaacaaaaaaataatttggctttcattcatacattttttttcttttttttttttttttgagacagagtcttgctctgtcacccaggctggagtgcagtggcgcgatcttggctcactgcaacctccgcctcctgggttcaagcaattctcctgcctcagcctcccaagtagctgggattacaggtgcccgccgccacacctggctaatttttgtatttttagtagagacagggtgtcaccatgttggccaggctgggctcgaactcctgaccttgtgatctgcctgcctcggcctcccaaagtggtgggattacaggcgtgagtcactgtgcctggcccattcatacatttttaatgtgcaccaaacaagtgccaggcatggtaatagatgctggggatactaagcccataagtaggacactccccctgctttcaaagggctcacagatggagatattatgatgtgagaagctgcatagaatactgcaggggcaatgggaagggagaaagtaacttcaaagggattgaggaggtctatagagagcattctgattgatgagtcttgagctaagccatttaggctgaagaggaatccctctggaaagaagaagggtcacttggggtagaggaaagagactgtgcaaaggcagaatgcaataaagggcatggtgcattgaaggaatcatcacaatttggtgtgactggactgtagtgtgaggaatgaagtggtcggaggtaaggctggtgatatgatttagttgtgcccccacccaaatctcaacttgagttgtacctcccagacttcccacgtgttgtgggaagggacccggcaggggaggtaattgaatcatgggggccggtcttccccgtgctgttcttgtgatagtgaataagtctcacgagatctgatgggtttatcaggggtttctgcttttgcttcttcctcattttctcttgctgctgccatgtaagaagtgccttttgcctcctgccatgattctgaggcctccccagccatgtggaactgtaagtccagttaaacctctttttcttcccactctcggatatgtctttgtcagcagcgtgaaaatggactaatacagctgggatggaaagatgaggtctgagtggtgcaacatcattccttgtttccgagatgtgaaggag

SEQ ID NO: 6617 - DNA, 2300 bp, Homo sapien
tcccctctcaggataccggggtagaaaagcggaaggatcagacacttgcagaggagaaaagagaagtcactgtgcttgtccactgtcctggctagtaatagcaacggtcaaggccagaggttacgtgtaatgaagacagtggagctaactgatttcgtccagctgcaggtctaggtgcggcaggccatctttttcacccttatccacccggcacccactgaggagggactgttctaataaagatggcttcagtaggccactgcgagtcaaggctgggtctgtctccaaagtgagtttggtttttctttatgaaacctctggtcacgagaatatgagagtttccactctggttctgaactatgggtcatcaatcctaatgggttatgggttccagctgtgagatttgctgtccctgtttgggattacaaaaagtaaatgaagctctccagttaagaccaggtgtgggcagtcagagctgagaggccaggagtgtccctctgaagaaggtggtgaccgcagagaaagtggtgctgggcctgaatcactggtgggcagagatggtgcctgccagtcctgagccaacctctttggagcccactccacagagataagagcaacagcagccctgaaagcacctcaaggacttctgctgcaaccgaggcttcccactgcatttcccccttacagactctccagtaattctttagactctgtaagtatggcatgtgtatttcattgaaaaagtaatgtaagcatgctctagaaaacccaggaaagaactacccacaccaccaccaccgaaaagttaattagatacaatcagagttttcctccactggaccttatccatcttagttcacagtctcagagttaggacttgaggcatttgtggaagtaaatcaactagagcacccttaagactttattcaaaaatgctaggcatgagtaatttcagagagaatattctcacttggagaagcagcgtgagccagacagaatttttaataaggatttaggaggcagggtcagctgaagttcaactggtttagggaatagtgcaaagatggttctaagaaatatgaggaattgtttctaaggatgatgaactactgtttgggatttttaccgagagggtgaggaggaatagttaggagctgtggccatatggaagaagggtggggagaaatattaccgggcataaggaagtttaaggaccaccagtggaaaattctcagtctatgtgtctcttttaaaaaaattttgtggatacatagtaggtgtttatggggtacgtgaaatgttttgataaaggtatctattagcgtctcttgtgaggaccaaatggaaacacaggccttctgactcctggagagcattcttttcacattccatagatgccccagcctttctcagtttggcaggtgattgagaaagaaccccaaggcgtcctggcctttcccatggaaaggcaggttgagataagaagagggctggactgcacagacaaattcaaagattttaccaccttgtcctagggttataatttatcttcaattggaccagggcctgcaggagtttagtcctacatatttctggcctgcagctacatgaagggaattctgcctccagtgattgagaaaactcaaggatttccttacaaaggcgtttcactttttgatggcttgaccctggaagcatcactgtatcaatgattgttgttgttcctcttaatcaaattattctcagctccatcctgagatgtttcagctgacagcctggatggccaggcctgtagcccattgtacctttctgcccaaggggcgatgtagccctgtgcactggctgttcagagatagtggtagatccatgtttatttttcctggctgtgcctttaagagctgcaggaatgtgaagggagtctggatgaggggtggggtctcccaataggacttctggaaaaggatcctgggaatttttgccagaaactaaactgagagtccaactttaaaaagttgggggtggtttgtgttggggaaggcctgcgattggactgcagaatccactagggaggaggaaagcaaaagtaaaaaggaaatagctgggggaagggaacggggggaagccatcttcaccccccaccccaatgcacacacaattaagccaggaagcagcttgcaaccactagcctggggagggtccgcatgtgtcaagggtgagggcaacagatgctggacccagggagctctctgccacaggtcagtctacaaggcctcagggaccaacttgccaacagctggact

SEQ ID NO: 6618 - DNA, 2300 bp, Homo sapien
tggatatagatcaattgcaattcatggtatgactcaacgaatgaaagaataaataaatagtctctgttaagagacttgctatccagttctaagaggcagcattttactcacttcaggatattaacagctatttgctgtttcagagaccgtgttcactctctagagcacttgggattgacacagtgagaatgacttaggtgtgaagacactaattcaattccatttaccaagattttattgtactgtgtacttaggttacaatgtttccagaatggtgctaagtattgaggataaaaaatataatatcaaccctaaacctcgagattatcttctagtgaaggattctgacccttaacacgactgcaacgttataagagctctatttatttattcatgaatgtatgaatgcatttagttagcagacactggatacctacaaggagcaagataatgagcgaagtattatgagctggggttatgagcataaattgggcatggttctttcttattaggtacaggactaactagaatatagggagtaaagtggaattttaagaagaatagggaaaggaaatgtcctttgatgcagggaagaatctgtatttgatttggtccttgaaggataaatggagttgaatattcagaggagtggagaagcattccagacagcaaacaaaaccactttcaggaaagtactctaagattaggtaaagaagtgtagagtttagaccaatacaagctaatgtttgatattgcttcaaactagatatataaagcaaagtacagttgacctttgaacatgagctttaactgtgccggtcttattaaaatgtggattctcttctgcctctgccacccctgagatagcaaggccaaccccttcttttcctccttctcagcctactcattgtgaagaggatgatgcggatgaagacctttatgatgatccacttccacttaatgaaccgtatatctattttcttttccttatgattttcttaatgacattttcttttcctagcttactttattttaagaacaaagccacagggctctttcttccagctgtaatgcattacttcagaggcagctttctctttgtctggatttgtaaataagaaaggaccagataacattcacaatatgtgttaattgatgtttaagttatcagtcagtcttctggtcaacagcagactatcagtaattaagttttggaggagttaaaagttacacataggctgggcgtggtggctcacacctgtaatcccagcactttgggtggccaaggcaggtgtatcacaaggtcaggagatcgagaccatcctagccaacatggtgaaaccctgtctctgctaaaaatacaaaaattagctgggtgtggtagcacatgccggtagtcccagctacccggcaagctgaggcaggagaatcacttgaacccaggaggcggacattgcagtgagccaagatcatgccactgcactccagcctggcaacagaacgagactccatctcaaaaaaaaaaaaaaagttacacataaattttcaacgcacaagggtcagcaaccttagcaactgtattatccaagggtcaattgtagtagattgaagccatctctatgcctggaaccttaagggccaggctaagaaatttggattttattccacagagagatactgaagtttgcgagcaggagtgaagtaaaggctgtcaagactgttctacaaggtcaagctagaagtcctgtgtatgatggacacttagagtgagaccaaaatcagggaaatcaattagtagaatatttctttaatccaaatgggatgataaaggatctaaactggaagaaaggagaaaaatgaagtaaaacgaaggagttacagttttctagctccttagtgccacttcaggctactattcttcccacctacagcaaaaactcttcctttttagtattcatgctttgtgtctcgtgctgtcaactcctcccagtctaaatcattggcaattctccaggacactaccctatatgcatggagcatgcccacctcttcaattccatggaaacttacttttaaaccatattagtatcctcctccaggggttatactctgaatctcccattccccacaactattccgtatctgaaatcgaaaactccaatatcccactcaccacagttattcttccattgctcactcctttgctcatgccttccagtcccttggcctctactttctcccaggtcatcagccctctcttcatcttgctttctttcctatgcagcctaaaccactgtaat

SEQ ID NO: 6619 - DNA, 2300 bp, Homo sapien
accataggcagtgaagagaaaatgtttttttccatagcatttgagtagatatttggcagaagggaattactcaacccatggatacagtgtaattacccacagttctaacagaatggtacagagaggccaaatcctttgtggaatgagacaggtatgaataaataaatgtgatattacctgccctattacctacctatttcacagatagaaggaatgtgggctgcctcacagaggatagtggggtagatttatcaataggagtgagtcctgcaaccatagttcctttggaggcacagaggggaggttgcctgaaatgtgctgtctagattccacctgggatatgatttgattgacagctctgcagggcacatctgccccaaacaactcaccttggtacctaccttaaatccctgcagctcgaatcactcttttaggtcaagacattttctccaggaagcccctgttaagggaccactttgcttcttgtgagccagcgcaggtcagtatgcaggcctgggaatggggtttctttcaggtgaacgttttagctctggggtcttgttggatttaagtgaagactgacatcgacatggcctacatcagtggttcttaaactttgttgcacataagaatcacctgcggagttttaacagtcctcatgccgtggccatatccccaagaccattaaatcagaacctctggggatggatcgagatatcagtatttttaaagttccttcccgcaagttggttccaaagtgcaaagaagctccagagccggtgacttagaacatttaaaaaggtaactgtatcaatttaagaacaggctagcagtttctgggggcggaggtaaggggagtggctccgctagggcaataaagggtgggattcggaaacagccatgaccttgtgtgaactgtggcagcctgcgtctacaaaagtcgctctgctgctattttaaggaagtgaaagagaactgaagggtgtcctgttgtaacacaactcttgcgggccccagccttcccctgctggctgtgctttggtctgctgctggccaggttcccgcagtgaccacacgtctcatatttgccagggtgggttaggttctgttcacatgtaaaattctcctgggcctactggtcatttcagaccgcgagggtaaatttggtttgaaaaagttgtgtcctgtggagtttgtcgacactccagcctgtagagaactaaaggctagggctgtggtgactcctgccagagctggggactatgccgagtccctggtgtcgctgccatctgaggcctacagggattttaaacagcttaacagcagccagtccttggaggcctgggcagggccacaacatagcagtacaaccaaaacgggttcaggccacacgctggaggtaggggctggaccagatctccagcttcagtcctccccagttcgagaacccattcctgtggtcagacattgccaacgcttttcttggacctaaggtcccagaccttggcgctgggcacagggaaatgcttcctgacctcggctcttcataagacagaacttttgtttggtgccaaccactagagggacctccaccccaggttgcgagtgcagcgcggcgggacctgggatgattcgggggctttccgacctgcttagggagggcggctcagagacaacctcaattttgcctggattgcacgcgggccgaggaagtcgggatgctccgaagggtttctgctctgggagtgcctctaatgtgggttttctatgctttctctcttcgcaattctcgacaccgtttccttcttcctcgctttcattccctgtgaccggagaacggcgctgaaggactggagaagcccaggagactgggagccggagcgccgggtacccacccgggcctccccgcaaccggagctgtgcggaggaggaggcgcggcgaacggggcggggctcccggaagggggcgcggtccgccgagagaggcggggctggggcccggacgcgcggcccagggggtggggacgaggcaggttcgaaggggcggggctgaccaggccggtcccccgggaacaggaaccctggtggacgggtcccagcaggcttcttcggtgcccgagagggagcgggtgcccaagggggtggtccctgtggcaggtcccggggtgggggcgcggcgctccgggaagagccttccgcaggtccccgccccgtcacgtgggcgccggccccggccgctgcggtcggtccgctggttggtcgggcgcttggtccggcagttggtcggtgggccagtggcc

SEQ ID NO: 6620 - DNA, 2300 bp, Homo sapien
ttctgtcttcagagaggggtccagtgagtctgagacaccacctcacaggagcagtataatgggagcagcaagcccaggcccccgagctcccaataacaaggggagcctagacctttgggagtaactacctcggccaattaaaagctgggcttctagccttttgggagtcatggactgttctgataatctgacaactctttttcagataaagatttatgaatacaaatagtagtactttctatatatttgacgaacatatttaggggctcatctgatccctggaatcccatctgtaaatcaagtgaggtgccctggacaggatggacttctagggcagtggtgcagccatgggtttgccttgccaggccagtgtgatgagggagccacgacagggacccagctgcccctgggggtggggtgagtgagcgaggaggtgccttagcttctgaatccatcccatttcactcagcccttcccctttccctcctgccaacctgctcctaggtcttttggggtgttaatttgtgatttttgagttgaattacaacgtaagtaaaatgtacttggtgtttaaggaaaaacaaggctgagataagacttgctacttgagaatgccataaaaatgtcaagaatttagctgcagtttatctggattcttccctcccttcctcccttttctgtccctttctctcccctaccctgcaccccccacctttgttcatcacacattgagttgagctaacagaggaaatgggccccgtcttttcctttttgtgtcgaacatctttaccctggagaaacggaccttcaagtctctttccttcacatagaattttagtcttactttaccagtcttatcatttgagccttattctttcatccaaaaaatgtttaaattcgtactgtgtgctaagaattgtaggcatggaagtaggagaagtgagttggaaatcagacacacttctgacagtctggtgcaataggagtggtccagtgtgacaaggtcagtgatgaagtagagaggggaatttaggtgctcaggaagggatagaagagggacacctgagccacagctctatgtaagctgggagtgagcaaggctgatgagagcagccacattggccacctttctcttttctcttttctcctctcttgtaccagaacctaaggaagagcactgcactcctcccaggagaggggagaattttccaccatcctgtagaggctggaaccttgcgccacctctccctgtccagctcccaaatcagcttgtctacctcctcttccttggagtcccagatatacctttattgcataccatatgataattcttaacccagggcatgaagtttttcatttgccttggatgcggggaaaatgtgtattgactggatgaatttcttcatttgacttgttcaggcttttagacagagaaaaaccaacctactgacccctgtacctttagagatgttcttccttggcaacatcctgccatagcacgggcagggaacctgggctgggtgggtcacactgtgctgtggagcagggccagaggtgaggagcaaggggctagagctcagcgcatgggcagcaaagcctgcttttcctttctggcctctgtctgggtgtgtctccaggaatttactcctccccttatgccagctgctggctagagctctcctccttgccgcctctgtgatctctgtgggctggcccagcctgccggggactgtgctgccaggcattgtttctccccttttgggccctgcttctggccctggtggacattgaagccatgctgaggggcatgcggcatgaggggcatgaaggactgctcttcagactgggagttccaggaaaccccggaggtgacccccaagggaactgggaaggcccaggcagtcacaagctgtgcatctgcaagtcctttgccacagcagagctcggggccttgcgtgtaaccacagttcccaccgtgtaaccacagttcccaccgcacccacatcaaaggtcactttgataatcagccatagccaaaggccacacattaagggctggggaagggagaaaagctgtttttagtggggagctctcaaaggagatgggaataggaggaggtggggggtggcatctagggagtgctggaggggccacctggagagcctgcatgtgacctgccctgaaaggaggaaaacagctgcagctccaggtctccgccagcctttccaaggcccctgtctacccagcactgctccctgagtctcatggaaatgcacgtgaagcagcctcaacctttccac

SEQ ID NO: 6621 - DNA, 2300 bp, Homo sapien
tgccaggccagtgtgatgagggagccacgacagggacccagctgcccctgggggtggggtgagtgagcgaggaggtgccttagcttctgaatccatcccatttcactcagcccttcccctttccctcctgccaacctgctcctaggtcttttggggtgttaatttgtgatttttgagttgaattacaacgtaagtaaaatgtacttggtgtttaaggaaaaacaaggctgagataagacttgctacttgagaatgccataaaaatgtcaagaatttagctgcagtttatctggattcttccctcccttcctcccttttctgtccctttctctcccctaccctgcaccccccacctttgttcatcacacattgagttgagctaacagaggaaatgggccccgtcttttcctttttgtgtcgaacatctttaccctggagaaacggaccttcaagtctctttccttcacatagaattttagtcttactttaccagtcttatcatttgagccttattctttcatccaaaaaatgtttaaattcgtactgtgtgctaagaattgtaggcatggaagtaggagaagtgagttggaaatcagacacacttctgacagtctggtgcaataggagtggtccagtgtgacaaggtcagtgatgaagtagagaggggaatttaggtgctcaggaagggatagaagagggacacctgagccacagctctatgtaagctgggagtgagcaaggctgatgagagcagccacattggccacctttctcttttctcttttctcctctcttgtaccagaacctaaggaagagcactgcactcctcccaggagaggggagaattttccaccatcctgtagaggctggaaccttgcgccacctctccctgtccagctcccaaatcagcttgtctacctcctcttccttggagtcccagatatacctttattgcataccatatgataattcttaacccagggcatgaagtttttcatttgccttggatgcggggaaaatgtgtattgactggatgaatttcttcatttgacttgttcaggcttttagacagagaaaaaccaacctactgacccctgtacctttagagatgttcttccttggcaacatcctgccatagcacgggcagggaacctgggctgggtgggtcacactgtgctgtggagcagggccagaggtgaggagcaaggggctagagctcagcgcatgggcagcaaagcctgcttttcctttctggcctctgtctgggtgtgtctccaggaatttactcctccccttatgccagctgctggctagagctctcctccttgccgcctctgtgatctctgtgggctggcccagcctgccggggactgtgctgccaggcattgtttctccccttttgggccctgcttctggccctggtggacattgaagccatgctgaggggcatgcggcatgaggggcatgaaggactgctcttcagactgggagttccaggaaaccccggaggtgacccccaagggaactgggaaggcccaggcagtcacaagctgtgcatctgcaagtcctttgccacagcagagctcggggccttgcgtgtaaccacagttcccaccgtgtaaccacagttcccaccgcacccacatcaaaggtcactttgataatcagccatagccaaaggccacacattaagggctggggaagggagaaaagctgtttttagtggggagctctcaaaggagatgggaataggaggaggtggggggtggcatctagggagtgctggaggggccacctggagagcctgcatgtgacctgccctgaaaggaggaaaacagctgcagctccaggtctccgccagcctttccaaggcccctgtctacccagcactgctccctgagtctcatggaaatgcacgtgaagcagcctcaacctttccacctccttggtttgtaaagcaggtagcccagagtgggggacagccagagaggcaggaccctccagccctggcccctgttcagaatgtggcccccagggtgccctggctggtggccaacagtccagggccagactcccctgagtttgcggcagttggtctctaatggatggtaccaccagtgccaaggacagcaaacgctctgtgctgggcccgtcgcacagcaggaccaagaacccagactggagctgcttttttttggaaacaacaggctttcctcagggcacagcccgtcactcgcctggaaaatgggtgggcgtgggcttcagggcgggggtcaggctgtgtgtgggaaccagtgagc

SEQ ID NO: 6622 - DNA, 2300 bp, Homo sapien
tccgagatataaactttctttcatctcttagaagaagtatttgtccttctgaaaaggttagtggcagttttgtccattgattttttttctaaacctttattacccagtttcatggtccatcacagtaagtaaaacaaaccaccctcccccagaccacctccctccttatttgcacagggaaccttcaaacaattgggagcagaagcagaatgatgcctgtgaagcctttgccccttatcctcagctcgctgcctcccctcaactccctccccatatactgcggtagctgcatgactccagcaggattccaccatgaaggtcaggaagccttcagcagggggcaagcattgcctggcgaggatgtgggtgctccagacagcctggatcagagttgactccagtcttgggtgagaatgagattaagggctccaagaatgttttccttacaggattgacagaataaaggcagccagcaaagaaaatggagaagaaaaaagaaaggtcaggaaaaccgagagcaaggaagattggggtggctaggagtaccttacattgagtggataaagggcgagacagttaagatctgagaaatgcaagctgcatctcaaagtttgtacattggttccaggactatttctgtgccctagttggtgaaggcagaagccaggttcaggcaggcagaaatcttgttgaggagtgacacacacatacacacacatgcacccacacacacccacctactcacccacccatacacgcacacacacccccccatacctactcacccacccatacacacagacacaccctccacacacctactcacccagccatacacacacacaccccacacacacacctactcacccacccatccacacacacacacccccacacccatgcatttgtccagcaagaggacatgggagttgacggtgttagctttgagggcaaggtcaagacggaagtttctttagaatgtcagaaatttgatcatgtttatagcctgaggattgggagctgatggtgagggagagattaaatgcctgccagagtagatgattgatggccctaacctagagtagcacagagcttggtgggaacttactcaaaggcagtacagaagtgagggagagtccaggaccatgtgagcaggagccattctgagttaccagctggagggagaaacaggaccagaactcagagaacagagccaaaggctgctggttgaccaggaagttaccgtaaggtttatcaagttgtatgggaatgtatgaagagtcaggagactgagaaatagccagaaatgggaaggtcagtcaggggcaattcaggagcaaattctggaagcattgtatcctttgatgggtactttttatgtgcacctggaagtattctgaactagggaacagttttcaaaggtgaaagaaccctgcagaaaagatggcaatgtacaattgtcgcagtttatccttggaaaggaactatgggcttgctgtttctaagacagggatttaagatatatgaatgagagatgatgctaggaaactttgaaatagaacttacattcagtgaacagatgcattttatcttttcagcaaatacgaggagagattatttgaggagaagagggagacatggtaggggtttagggcttgagcagaacagaaaagacttggaacagttcctgaaaggagtcagccagagacaaacacaagttttgccaggcagtattggaagatcagctgtaattagatagcacaaatttgtacagaaaccaactggcatcattaattgcctttcactagcaatttttaagctgtggagagtggaatcacgacaaaagactaacaaatgcacatgaggcctgttacagggatgagatcccatgaggattttctgctgtggtatgaatacaattggaatgactcacctcaaggtacagagttgataaggagaacaatgttgcttcaaggaagttgataaaccaggaaaatagagttactaagtaactagtggccgcagaagaaattagaggttgagtgagcaagtgggacagatgaaaggtcagaagattgtggccagaggagagaatttcagagctgaagattttagaagcaaagcaaacacattctggatacacgtgagatccaagtggtgactgtgctactgagaagctgaacgaaatggaaagcaaagcctgttggagctgaggtcaaagaatgtgaagccagagtggatactgaatgggaaagttaataacaaggatgtggaagctattgaggagacggagtgcgcct

SEQ ID NO: 6623 - DNA, 2300 bp, Homo sapien
tagcgttagaaaacttgaatgcgttatagttttacaactcacatataaaagacatttgatagaggcctttctaaatttaaatgattctaaaaatgtacgtgacaataccagttataaattgtgaagataaaacttcttaactattgtcatagaagataaatattgatcagtcatgctagaagaaagactaaatcaaccgtctgttgtcatagaatatattataaagttgtggacatacaaagaagcagtcaaagagtatccacccaaaatacaagagtaaagaagtactatagctggatacagtagctcagacctgtagtcccagctacttgggaggctgaggcaggaggattgcttgagcccaggagctcaaggctgtaataagctgtaattacatcactacactccagcctgggcagcaaagccagaccccatctctaaaaataattaattactaacaccctgtctctaaaataaataccccatctctgaaataacaaataccctgtctcaaaaaagaatcaaactatagaggtacatcaagattttatataatgaaatatttctagattttgtgatttttttttcagttttgcaaaacttgcaattttttgtggcttgttttctaattctaaatattccctttgtttctaattgtatattcaaattttatactattttgaagagaaagtttgtaagttccaggcctcgtaaaatattttcaggacccatgaaagcccaggttccagattatgattgatcagtccctgccccagggtatacattatctctaacatttgatctaaaatggggcattcttatcatgcttatcctttgaggaattccctcactttaacaacagctcaaccaggcatttaaaaaaatatgttttaatctaatatgttaggggtactttgaaggaatctttctggtctttgaaggaatatctacgatattctataaatcctcatttatgaacataaagttgctctgtcgaatcccccctaaaaaaatgactctattgggatttttagtgtgctattcacactttaaatgaaaaatggatgtctttaagaattgatggctttataaaacccagtcatcctgtctaggaacataatctagcttttcatttattcatgtccttttttatctagctcagttgactgctgcagtcaatacctctccccacccccgcaatccccacacataatcacacaaggccaaacatctcttgttaaggcaattcctagacgttttataatgttggttgctatgagtgggatttttaaattgttttaacagtagcattagtatctgtgcattgatggtattagaaaattattgatctttgtatgtaacatacgttacatatgtttatatgtgtatttcgtaagtggccacctcactgagctttcttgggttttctaaatgggcagtcctgacatctgtaaagaatggctttatttctgcctaatagctatacttcttgttcttatttatctctaatactggctatgactctcagaccagtgttgttagtactgatgaaaaatatattgtccttttattgactttaatgtgaatgttcctcctgttttgttaataagtaatgtgctagctgttgttgattggcaagtttttgcttttagttttgggtgttttgttttttttctttttaatgttaagagaactgaccctcttaaatgctaagaaaagtagttttctaagcattttcctaaaaagatgattccgcctaatgaggccacagctctggacttgtggcatgtatatgtgtgtatgcggacctaggacatgtgaacatgatctcaggagggccatacaggctgccccattctctaagtagcctgagatttgaaattcagatcttgtgttattaagaaaactctagggtctacctcctatgagtgtgttgtagtggaattttgttcagcagaatcccatgatggaggttgtttgttaaaaaacaggttttttgttttgttttttcttttcttttcttttgtttgtgagacatgattagattcagaacctcaggctctcccactaacaggaatatgctgttttcctgcttcccagtgacgccaatgccccctttgcccagtggagcacagagcgtgtgtgtgcatggctggaggactttggcctggctcagtatgtgatctttgccaggcagtgggtatcttctggccacaccttattgacagccacccctcaggacatggaaaaggtaagggctcagcttggggagaggaggctcccatttctccccaaagcat

SEQ ID NO: 6624 - DNA, 2300 bp, Homo sapien
gttcctctgtagctgcaggttggcatcccagggcacggtgtggagatacactgccatactcagagcatctccacccagacacagctttctctgagggccaaattgcctgccaaaatttcacatgtggtcttcatcttttaatttcaggagctaggaattaagcacccactccacaggaagaagcttgttttagcagtgaaagccatcaacaccaaacaggaggagaagtctgcactgctagaccacatttgggtgacaagtaaggataggcatatatgtattaagaatgtctctggcagcaactaagagtagaaagaattttcctgttaaatgggtacctcaaggacagctgtctccttgtaaaaagcagaggaattactaaacttttgggggaataaaacgaacctcaaaatataatttgctcccctttttttggtgtctacattctctcattctcatgaatcctgacacatctggggtttttgtatttgtagggtggcttgatgatattggcttaccccagtacaaagaccagtttcatgaatctagagttgacagacgaatgctgcaatacctaactgtggtgaggactttttctttaaatatttcagttgtccctgtgagcactcagctcacgtgtacccatggtggttattttaaacttgattccatatattcttaaggccttgaaatagtatcatttgtcacaaaagaggtcccaagtagcagagtacaaaccactgtgataagctattggtgtctccacgtgcaccttcctgagatgtggttgacttgtctatgcttggtctggtgagggacatcaggggtcttttgtcactttggaaactctggtttataaaccaaactttcctctttcagaacgatttactcttcttaaaagtcaccagccaactacatcatctcagcatcaaatgtgccattcacgtgctgcatgtcaacaagttcaacccccactgcctgcaccggcggccagctgatgaggtgagaccacaaatagtatctctccaggtagccctgagccaggacccctgaaacatcgagcatgagcaaacaagaatgacatcataaaagcactgttttttgcaccatggtgcctgggattcttttgtttgcttgtgcttcctgttgccccaaacatccgttacctgcactttgtgtctcacagtagccatagacctctaagctcccaccctccactggggagacacatgctataaagtcatcatagtgattaaaggagatgaggagatggtgcaaaggagagggggagggaaagacaaaatggaaagatgggtgtcacagtagaagagaagagaagagacagaggagggggaagaggagcccgtagaagctagacatttcagaataggtatccctacttgtagatccaaaattaactgacttccaggcccaggtacaggggatccatgagtagtcttgctagagaagaaatagtatacgtaaataacagcaccccaagtcttgaagaaataactgattatgttccatgaacttcggagttcttggtggacccccaaactgaagattgtcagtcacatcctatctcctctgttcctgggaactaggtctaaccttgctgtaaaattaactcagcttcctgggctgctacctttgctgtctatctcctattttctccttattcaaccaacatgttttgaatgtcttgtatatgtcaggcacagcgctgtgcatttttaagaccacagtgctacgtgagagcacttaggaataagtaccttaaggtgtgctcccctaaaatcattggccacaccagggagatctttcatctataaaccacttggattgtaaaattgacagtcatctttaaagttctgttgaatcactgaaagaataactataatgtcctcatttatttgtctcaaagttagctggaaaatgatggagtaacagaattctggattcagatatctcagtgtggaagatcttcaaagattcagtgggagctctatttcctagaaactggggaggctggtgctctggcagatggggtgggtcactaagcttgagggccttctattgttgtgatgcgtctggggcagggttacttaccggggctgactccacagaggaccatggtgggacctattaagcctaacttcctcactctccttctccctctgacagagtaacctttctccttcagaagttgtacagtggtccaaccacagggtgatggagtggttacgatctgtggacctggcagagtatgcacccaatcttcgagggagtggagtcca

SEQ ID NO: 6625 - DNA, 2300 bp, Homo sapien
ttactgaaaaacacacattagccacatggaaaaatgaaattgtatccctgcctcacatcctacacagaaatcaattccaagtggttgaaaaacttaaatgtgaaaggaaaatctttaaatcttgttggggaaaatatagaatatctttaagggcttgggtagaaatagacaagtcacaaaaatcactaaccataacggcaaaaaaattgaagattggtatatttggttatactgcaattcaaatttctattcatcagactacaccacaaaaaggtgggacagaaaagaaagaaagaaaaaagaaagaataagttacaaattacgagaaaacattactaattcatgtaactggcaaagaagggatatctaaaacatataaaacccctaaaaatcagtaagaaaaagacaacagaaaaatgagcaaaatttatgagcaggcatttttttttttctgaaaaggaaactccatgggaaataaatatatgaaaggtgctcaaacttattagcagttattaggtaatgcaaattggattcctgatacatcattttacacttatcgcattgtcaaaaattaaaatatctgcctataataaccaagcacctgcaggtaaatcaaaagtaaaggcatttgattaagtcaaagagagaaaattaagtttgtttattcattcacacagcaagaatttttgagcctgtggtggtgtgtgtcttggggagaagggttggtaaagtgttatgggttattgttttcaccctgattcttatgttgaagccctaagccccagtacctaaggatatgaccttatttgaaggtagagcctttacataggtaatcaagttaaaacaaggtcattaggatggaccctaattgaatatgactggtgtcttcataaaaggggaaatttggacacagggacacacacagagggatgaaaatgtggagacataggaagaagatgccccttctcctagcccctctcctacaaacctaggagaggcatggaacagatccttccctcacagccctcagaaggaacccactctgcccacaccttgattttggacttccagcccccagacctgcgagacaataaatttttgttgtttaagccgctcagtctgcggcactttgttacagcagccctagcagagtcaaacaggtggggatctgcttctgggcttctctgtttcacacaggtcctgaggcaagaatttgcctttgcctgtaatcaagggcgagccgggcagccaaggttccgaaacgcaccgtgaagaccctctaactgtgcctactattctgctcccctccgatcggcgcggggctcttgtccttcctctctccacccagcgaatgaatgaacgcaggagcgctcggagtacacgtcttcaactcggcgacgcccctgcttcggccccaccccgcaaacacccgccccggaccaggcccagggtaggcgcccatgaggtatgtcgaatgaatatattcgcgcgctctttgcagctgcctgaattcttccttccccagcatccccctccgcccggtcacccagacggccttctccagccttgccgagcttaagtaagctgaggggcgctcagtgtggcagctctgcgtgtgcagggaaggggccaggatgcagaggggcagcgcaggagcgaggacgccacggctcagcgccccgccagcctcatgatggagcgctgccctgggggcagggctgacccagagccagcggctcgtgagtgagagccccccgaccacggcccttctcggggagcgggccagccgccggggtcccagcctgcggggtccgcccgcgcttttgtcctcccgggcgtgcgtgtccgggtctcggccggttccccgtcggccaggcggagctgcggggcgacgccacgagtctgcgggcccgcggcggggagcggcccccggccaaccccagttcgacgacgtgttgggcgtctcactccgggtgggttccgcggcggggtgtatttatggagtattgaagaaatatctccgtcgggacggccggaaggaaagaggccagaggcgcggaggccggctagagccgggaacgaacgtccgaccgggaggttgggggccggagcgggaggcgtggggagaggtcgtgggcgggaccgcgaagggcggggagtggggcgggccggctcggattccggaaggctgagactccagtgacccggcgggaggagaggcaactttccctgtcgggcttgagttgggagaggagcagggcggccttgtagggtagggacagatgcggggaggctcccga

SEQ ID NO: 6626 - DNA, 2300 bp, Homo sapien
gatactaatttctcaacttggggatttacagacagggaaaacaatgtatttgaattccaaatccatgtttggtgcagactttggtccaagattctcaagagagattttttcccctttaaaaggtttaatagtttcatgaatgaaaaattgattttatactaccatgccaagcaacactttaatatattcctgtctgcaagtaactacaatgtacagttattataattcctatccagaccctgggagggttgaatagctggacttacaaaaatatagtgtcttagaacctgctacatcccccatgaagagcaaatattttaacagcaagggggccacattttagccccttaagagatgaaagtaacaaactcttaatgaccagcttcatgtggtgaagagtgtgttgatgtgtactgatagttgtgctgatgcaagagcttgaagcaaataccctctcctgaaattaagcactaagcaagagctcatcatatttctgtgtgacaatcaataaaaacgctccactcccacattttacaaaggaaaactcatcattctttcagtatagagtcaaattttattgtcctatgctatgtgcctactttaggcttgtcaagtttagtgcatcctaggcccacactaggtctttctgcacttttgacattaacagtatacacattttagacagaatgtagtgaatttggggtcagaaaggccatattcctagtcaagttgctctcaaaagtgattgataaaacacaatagcaatttaaagggagcttgctgtcaaagaaagattgagactttgattagggcttagacattgattgattacctcttggggctatcactccataccaatagccaaaaatgtttggcatcaggattacagtagttatagataaagcctcaatagaggtttgagtttccttctttccataaggctacattcttgattagtgtacctaaatatgtagtgcttacaaatgttaagtttttacaccttctctgttttgcatttatattatttgtatgtgttgtattttcatacttttttgtacaaagacaaaagttgccaaaaggaaattaagagcttttgggctgacatttgttatttttagtgggtaacttataaaagttgacagaaaaatgttatatttctatctggtcatagatggcattgaccatcctataaatatttctcacacactgaccatgtgcccaaaactcgttgaggaaagaggaaaatgtacaggtaatcatagccactttactctcccaagcatctaccaggcatagaagtaaaggagatttagtgtttcccttctataaatacaaaaatgataggagaatgcagagtcacaaatgccccaatgtacagtatcctagatgactttctaacagcagggcttcctgagtgtgacacccaaatatctttccacttctctcattcaccaacatatgtttataataaccatgtagttacatttgcaaaataagataaataaaaatattttagaatattggctgggcgtggtggctcacacttgtaatcccagacctttgggagggcaaggcaggcagatcccttgagcccaggagtttgagatcagcctgggcaacatgatgaaactccatctctgcccaaaaaaattatatacatttggatgggtcgtttgcaaaaaagtagggaagtgtacccttgcaaacaaggacaacattgatagtcaatcttcttatagaaagtggtaaaagtggtaagctctacaaaggagcaagtaatgtttgcagatgcaaatcttacatgctaaccactttgctagccagatacactctggaggaatcaactaattggtgtaggtgtaataggatatgtaatattgcttgatcaagactctgcttctgtggttgtttctccacatcttccaaaagatctttgcgaaacactacattcagaaacatcagatggacatgcttgattcaccacgtcttggttaatgaataaacttgttttaaattggcttattgctggtctctcaaggcttcctatttttgtttgctttagtctctctaaaatttcagggaaaaactatgagtctcaaaatgcttataagcaggaacaagctgattttactactaggaatagtcttttttgaacgaggtaaatctgcaactctttcgctccccaaaggtaagtttcaaatgaactctataattacctttgtctgaacctttgctggcaatggacgtcacaactccgagactccatgttcctttgggaaaataggagaagcaaatatatt

SEQ ID NO: 6627 - DNA, 2300 bp, Homo sapien
aatcttgcagtcagctagcaagtaactttagtgaattaaattaagtttctgccatcaatttagtgtgagttaacaggcatgattcaatttaccaagattcttcatttatccacccataagaacagaaactcacgtggtctttcactgccgtctaaacttggcactcagctgtaatgctaatataaattaattaagtgtgagtctcactttgtcacccaggctgggagtgcagtgctgtgatcttggctcactgcgacctctgcctcccaggttcaagtgattctcctgcctcaggctcccgagtagccgggattataggcatgcaccactatgccagctaattttcgtatttttagtacagatggggtttcacggtgttggccaggctggcctcgaactcttgacctcaagtgatccacccatctcagcctcccaaagtgctaggattacagatgtgagccaccatgcctggcccaagacactttttttttggagacagggtctcactctatcactgaggctagagtgtagtggtgtaatcatggctcactgcagccttgacctcccaggctcaggtgatcctcccacctcagcctcctaagtaactgagactacaggtgcacaccaccgtgcctggctcatttttagagatgaagttttgccatgttgcacaggttggtctcaaatttctggactccagtgatctgtccacctcggcctcccaaagtattgggattacaaatgtgagccaccatggctggcccagctagacatttcggagaaagataaggctataaggccagaaaacttggagatgagggtcaagctggccatcaacagagtggcccttggtaaactttttatatttctaggctgaaactttgttcttctgtatattatgtccaaaataatattatttgattctataatacttcaatttgttaacattgttacactaggaaaagatttggtttgactaaatatcttaattatgttctgaatattaatcatacaacattttgcataatggttaaattggtatttcaacttacttgatataataatattttaattggaaataataaaagtcattaatcaatttatactaggtgacttcattcataagcataacttgaaattcccatttcttccctgtcctatgaagaaaattgtatgtctcttttaaaaaactagtgttgtttaactgataaacattgtaaactatgtaactagctaggcgtctcttttatacatcagttgtacatttcagagaactgaaatgttaatctgttatctactgattttcaagtgtaccagatttcatggtaaaaattctccaactatgctataaatgtaatggttttacaattttatacaaattatacaattttatacaaattacattaataacatagttattatggaaattgactggattcaaactatgtgggattctgatccagattctaccacttgctgtgtaaccttaggtaaattacttaacatttgcaaacttagtttccctatctataaaatggtaataataaaagtgcttcatattattttatggaaattaaaatacgtatctctgtatatataatgtatataatacaataatatgttatatattatatgcatatagataaaattcttaaccctgagccagtaatttgataggcattcagtaaatgttagctaatatttgtgttcattaatcttacattaatatattttaatcatttttgttatatgtaccataccttttattattcttataagtcttatgttttaaaatctttctctttaaagcaactttaaatatatttcattaaaaatacaaattgaaaaggatatacattatttgaagcaattttttggtgttctaaaacagattttaaaatatagaaagactgattacacataaatacataaacaatgaaaccctaaggtaaaaaaaaaaaagtctgaactttccttgaatgatacatctgttcatattaaccttcatgtatatattaatgaagatgaagccatcaaatttataacattttaatgtgctgttctcattagggttcatttagtcagcagctacttcgtctcatgaattccctgaaggacgggaatcacaccgctctgacggggttcatcctattgggcttaacagatgatccaatccttcgagtcatcctcttcatgatcatcctatctggtaatctcagcataattattcttatcagaatttcttctcagctccatcatcctatgtatttctttctgagccacttggcttttgctgacat

SEQ ID NO: 6628 - DNA, 2300 bp, Homo sapien
tctctctccttcctacctacaaatacccatagttgagttttatgtcatcagactatactaaccaatcttacctttctctccttatgcatttgcagtcatcaactggctagcatcatgtctccgcatctttggaagatttttggctctggctcactcattttcttacattatttctgtcactattcctggtggctttaatacctccacatagaggttgctttcaacattttggcttcttagtttcttgacatatcttcaaaaaaaatttgttttcctccctaaaacctgtctctcccgttgttagagtttagacattagcatttgccaataactgtagcttttccgtaatctcatttttaagcaccccaaactgtaactaccatcatttcttgtttttcctgcttgttttcactggtagaataattatagcaaattttcaatccttgcagaaaggctagaaccattttgttgattttacccatctcaggtactcacttcatctttgcctagcttaaatgtagtggttattttactctctaccttgcatataccctaacattccatatctgtccctttcgttgctcagaaaaaagaaaatcttagtgaaatttgacccctcatctatcaggcactcacaactgttcagctgaaaacaaaagcatatcaattccctaggtgctgggcactgaaggagactatcacctgcctcaaagaattgtcgttatctctcagccgcatctttatgtgaattactgcactgcaaaattcccctttcaagagtaaatgtattatttatatgttagcataattttaaaacctttttaaatatgtaatgaaccaaatatactttctgatagtctatagtcttctttagaaatcatagaaaagatgtataatatgtgaaataaagatagtaaatgaattagaagtccaagaatatggttcttcattttagctcagtttccagaaagccatttgatctaaagttatgttggacaatggtgtgtattatctatcttttttagatctccgtttataattttataaagtgagagaatcgagtggattatttctaggaccttttgaagctgtgagaaagctctcctgcttttcttgcattttcttgatttttctcaagcgagttggtatggaggagggccttccagaaggtgacctacagatgcaatttttttcagacagcaactattcagatagggctggatatttgtgttctgtagaaggctggaatcttctgttagcaacctagccccagcttatgcagagtcttgggtataagttgtatctttggagccttccaggagtaacctgatcatgtcttctctagattggctcactatcatgaatcagatagcttgatcctgagataattaggagatatctcatctcctctttcaaacctcagtcttcctctgtttacttgtttatagtgtgagtgcattacttcaccttctgcctcggtccagacttcctggatatttggtgtacttttcctcaattgtgaaatctctgggtggggaccacagctcagtgttgagttactgacctcttcttggtcctgtggattagcatgcagctaatctgtttgacctctgtttggaattcggaattcttaatgactacacatctttgatacaatagatgatacctcaaacatccttttgaacagctgttcttttccatgagtcttggtctattctgacatttatgtctcccttcaatcacgtctttggccttagaagattgagttactggattctttatatattctagtggtcatctctgaaatgtgctcagagagcacctaaattaaccatccaatacgagttgagtgtgttaagttaaaaaaaaaaaaagatttttctgagtattcctgaccttacatcagtgaacatttatgttttaaagtcttacataagatactgtgtgtgaaagcattttcttcccaaatttacatgagtgcctaaattgttatactttttggttaaatagatattggaaaaataagtgtgcaattatagcatttaatcccattataatattcatttgtttttctttcagttggcaccattcccaatatagatggggactggaaatgacaccactgtggtagagtttactcttttggggttatctgaggatactacagtttgtgctattttatttcttgtgtttctaggaatttatgttgtcaccttaatgggtaatatcagcataattgtattgatcagaagaagtcatcatcttcatacacccatgtacattttcctctgccatttggc

SEQ ID NO: 6629 - DNA, 2300 bp, Homo sapien
tttatctttttctttttttttcttttgagatggagtctcgctgtgtcaccaggctggagtgcagtggcaccttctcagctcactgcaacctctgtctcctgggttcaagagattctcaggcttgagcctcccgagtagctgggattacagtgggattacaggcacgtgtcaccgcacccagctaatttttttttttttagtagagatggggtttcaccatgttggccaggatggtctcgatctcctgacctcatgatccgcccacctcagcctctcaaagtactgggattacaggtttgagccaccatgcctgacctagtggtttatctttaatccacacacatgcttagacatatgagcgcaagctttatttgagatagaaaaaaaaaaacaaaattgtaaacatttaaatatccattaagagagaacttattaataaattatgatacagttatgaaaatgtcatggatttctatgaactactttggaaatacgtctttaacttttattttaagttcaggggtaactgtgcaggatgtgcaggtttgttacataggtaatgtgtgtcatagggggttgttgtacagattatttcatcacccaggtattaagcctagtattcattagttacttttcctgatcttctccctcctcccaccctccaccctccaataagccccaatgtgtgttgttcccctctatgtatccatgtgttcttatcatggaaatatttcttaagtgtaagaagagaaaaggtacaaaactgtatgatttcatttatgtagaaaagtatgtgtgtgtgtgttttgtgtgtattgatacttgtttatacctaagcattcttagaagaatactaaaggaactgttaacattggataccattaattatattggaggtagaggagagaaactgttttttcatttatatccctttctcctattgataatttcaccaagtggatatattacatttataattttaaatatccagcctaaaatttaggacaattcagtgttgcctaagactgctgatcctccacccccacacacggttgagttaggagattcctctctttcagagcattacccacagtgaattgtaactagttacttacatgtatgtttctcctaccagcctgtgcattcattgaaggcagacatacgttttattcatgtttgggtcaccttcacttagcatagcatctggcacattgaagaggggcaatatgtgtttgataagtgaatgagaatgaatgaatgaagcttttccatttccaccatccacattcaatctctccctcctgtgaactcctacagcactctgcagctccaaaaatacttggctcacttccccttaggaatgttttacgaaccctccactagactccataagaacaaagacaatgtcattgtcatacccatctccagcccagcaccaagcatgctatctggccccacacaaagcccagaagtatctgttgagttgaactgaaaacaccaacactgttaacataaaaataggttctgtcctaggaaaatcgttctcctggttccaaaaagaaatgagttcagtcttgccaagtctgttttagcagaataaagtcccatagctaatgacagcctttaactattggaaatgtaaagccacattttttttttcgtatggtaatgcaacaaagaggtaagaagcgtttgtttttaagtatctaatcatttcttattttttgcagcaggcgagagaacatgacaaaaggcaatcgtaccacagtgaccgaatttgtcctcatgggattcacagaccgtcctgagctgcagctccccctctttgtggtgttccttgtcatttatctcatcaccctggtgggaaaccttggcatgatcctgctgatcagagcagactcgcggctccacacccccatgtactacttcctcagtcacctggcattcattgatctgtgttactcatcttctattgggcccaagatgctgcaaaatgtattggtgaagaaaaaaaccatctccttttcaggctgttttgctcagctgtacttctccggtgcttttgccactacagaatgattcctcttggccacaatgccctacgaccgctacgtggccatctgcaaccccctgatttacacagctattatgacgcagcgggtctgcagggagttagtgataggggtctatacctatggcttccgaaactctgtgatacagacagctctgacgtttcagctgtctttctgcaactccgacgtcatccaccacttctactgtgctgacccccctctcctggc

SEQ ID NO: 6630 - DNA, 2300 bp, Homo sapien
agccgcagtatgagaaatctgacacttcactgcctcttgtaatcatgcaagaaattgcacatagggttcctgcaacccttgtatgatacataaaaaggattgtactgggactccttcaggaatagtggcccaggtgcatttagtggcctgtgcacactgctgataagcaacatctgggagtcccatttgaggttccaggtctgaataagggccattacctaatagcatatcctctgtaatgtctccatttccagcagcacagttctgtctagcctggtctgcacacatttcttgccaatttaaattccatgtcagatatgcagtagccgacaagcaaattcacgccaagtgtttcacatcaaatggtaaaagacgcatagcaccaaacacagattctagcaatcctaaggtgaatgggttctgtacgccattgtttaccacactcgcttttaattcctttaacaagttaaaatctagtggagtgtgttcatgaataacctgctgtgcattgttaggattaggccttatggaaataggaaaagcgtgaggtcctaagggctctccagctattgcagcagagcataaaattctttgtattggagtctctatttctgccaccaaaggaggcggtacaaatgtttctgcaactggaggaggcagtataggccaacttttatcctccctctcctgttttttattttcagttggagctgtgggtgggacaacagattcttttagatttttagattcagcctgctgtcccgcagaataatgagataatagcagaagtacagtacaaactaaactccaagtggagaaaacagaagaatcaacttcaagacctttttgatgagcctgttttaatccttctcctgctctatcccagttttccacatcaagagtgcctgcctgtggaaaccatgagttatgcataataactttgtgtggcttctgcaggaggttagtgtctgagaattaacctgagctccagactgtctcaacagaactttaagcaactgcacataatgtttttcttcaacagacaagttattccccctgctaccctgattcagaaagcttcccattcccagcacttctataaagcactgctcccagtacctctttagagcactgaccttatatatgctgccggcagactcatcctggggtccccgtttgccttgtcaatttcagcttctctgctccagcagatcttttttgttcacatcgtcgaagtcccgtgttcagacgccacttgttggcatccttggcgtccctgttctgagtcaccacttgttgagaacccaattgtgtcactgtttggggcaccactatgtaacctgcatggacctagggggactgaacaaagggggcaaacacgggaataaaagacaagaggcaaaagagtatatttggaagaaggggtcggagggcaccttgtctctagtggacaagggccctgagctttacactgccctccatatttattaggcaatagagatagtgagaaggtggggagtggttgttggccagcagcttgattcgcagcaggcttgcaagactgcattcttaggtgctagacttctcaatagataacttcaaggagcccagcgccagggagtgaggccctcaacaaaccttttggtggcagggcagtgtgagtttgcccacatcctgcattcatgataaacagtttgctgtttgatcctatagcctccagcgaaatgctgagttggtcacttcccaggggccttcagctccctgcacctcacattctgtatttgtcctgattagccagcaacttagaactttttaaaagaggcaaaggcagaggagaacaaaggaggaagtaacttgtggaatgctgagaaaggtaaaaacacctccaaataaggaagaggaacagactatgacttaatacttgcttggaccagtgtaagcatgccagggcaaatatttaggctaaattgtgggagctaagaacacaaagtacattgatttctttattatagctagcagatatctaagaatgttagcacaggtctttgaataaattttgtttctgagagaagttactatttattcctaattagacggggaggaaagtctctttgaagaggaacctctattttatttttacactcagaagcccgggcagctctgccgggagtgcagggaggcagctctcctgggggtgcaggtaggcagctctgctgggggtgcggggaggcagccaggcttttgttgcacttccatctactggcagcacacacagaaaggaaatactcccagtggctaga

SEQ ID NO: 6631 - DNA, 2300 bp, Homo sapien
gcaaaaatggcacctcagtcaagtatgtagttgctgttgcttgttgaatcattgttagtcttcagaatatcatgagtttagtctttgtggaagaagtaaaacaagagatatatgtaatgcatataggaattataatcaaaaaaagaatttgtatatcagaacaacaacaacaaaacctattctactggggagtcaactaaaaatatcatgaaggaaattaaatccaatttcttctttggaggattgttagagctgggacattattcagaattcagtccaaattgtagacaaatagtaaaaactaaaaaacaactaaaaaacaatggtcagggctagaatcttataagaaggatggtatagtttccttctaaaacaatttttttctctccccagttccccattcctaccaaatataaatgttagtaggacaaatttattggctaaataagttttagtattatacttggcctgattatttgcaaaatgtgcaacaagaagaatgattggccatataggctcttttccattgactttgcagaatttttaataagaaatctcagattacacttttaaaacctctaaagactagtaagccaagccagggattcactgtgggactgcttgtaacatatgtaaaaattgagtgaattcctatcttctcaatgacccaaaatatcttgtggttcctgggtgcatcagaaaatgacagtctttacttaccgcaagctgaggaaccttgtaagagaaccgtgtgggcaaggcatgaggccagtctttcccatgtctattggctttataaagtcagcctcaattcctcaaagcagtttggtcacattcaaaaatgtaacattccagccaaagccttggtaaaataaccggtgtatccaatgtgttctgttacaaaagaaaacagattcttattgatcttatgcaaataactatattgccacaaaatacaaatactcatgaatagtttccaaattttagagaaatcaggtagggagaaatgcagatgttttaattttgctcacaaaaggttacccagttgctgtaagctataattagctaaaaagagacattttcttgactctggaaaacaaaacataaaataatcagcaatgtttcaaagagaaaagttaaagaaagcatttccaccctctgtcaggctagccccatgtatttaattattattcagctggatgttaggttagtaatattcatgaatgcattcattttttaaattagagttctgaaagttttcactcagtccaatgatatgatgggtggaatctagccactgggagtatttcctttctgtgtgtgctgccagtagatggaagtgcaacaaaagcctggctgcctccccgcacccccagcagagctgcctacctgcacccccaggagagctgcctccctgcactcccggcagagctgcccgggcttctgagtgtaaaaataaaatagaggttcctcttcaaagagactttcctccccgtctaattaggaataaatagtaacttctctcagaaacaaaatttattcaaagacctgtgctaacattcttagatatctgctagctataataaagaaatcaatgtactttgtgttcttagctcccacaatttagcctaaatatttgccctggcatgcttacactggtccaagcaagtattaagtcatagtctgttcctcttccttatttggaggtgtttttacctttctcagcattccacaagttacttcctcctttgttctcctctgcctttgcctcttttaaaaagttctaagttgctggctaatcaggacaaatacagaatgtgaggtgcagggagctgaaggcccctgggaagtgaccaactcagcatttcgctggaggctataggatcaaacagcaaactgtttatcatgaatgcaggatgtgggcaaactcacactgccctgccaccaaaaggtttgttgagggcctcactccctggcgctgggctccttgaagttatctattgagaagtctagcacctaagaatgcagtcttgcaagcctgctgcgaatcaagctgctggccaacaaccactccccaccttctcactatctctattgcctaataaatatggagggcagtgtaaagctcagggcccttgtccactagagacaaggtgccctccgaccccttcttccaaatatactcttttgcctcttgtcttttattcccgtgtttgccccctttgttcagtccccctaggtccatgcaggttacatagtggtgccccaaacagtgacacaattgggttctcaacaagtgg

SEQ ID NO: 6632 - DNA, 2300 bp, Homo sapien
ggagatacttatcaagtgataactcaatgctcaggtaagaaagtcaattgctgtgcccttcatattcacataaaagttcgacagtaattagatctatagacggtttgcttgcacaaaccatcaattcttagaggtatgtagttgagggagcggggtgaaagcggtcagaaataagtccaattggttagaaagatgaaaccctgatgagggagttatttgcccaagattatacagaaagttaatgccagagccagtagaacatatcagtgaattagctaaatcagcattatgttgttttatgttaaagggaaaagatggagcatttaagttcagcttaaaaaaattactcatgaaggcagtaatttagatttgttttgtaactttgctttatcagctccttaaaagttgcccatttttagtaggatactctaaattttctcattttacaaacgtatttggttttataggcctggagctgaaaatgtagttttgtctattaaaatgatacttaggcatttttttttcctgccaagtctattttaggagattttttacatccaaaaaattttgttatagttaaaacatatatttggtttttaatatcactatggtcagactcaataaatcaattgccttttcctctctgctaatgtcctaatgatatgaaatcaagatgtcttcagcttgctgtgtcctctcctcctggcttcctcttgtcccacagtaaaattctgctggtttttgaagcatcacacaaagtccagtttggaggtccatgctagtactaaggtgtcattgaataccttctatctgagcaaggcagccttcctccttatgctttttctcctctgcttaatggaccttccacccttgtcatcttgtgattatggtttcccaccctcactgtccattcagaagtaatgtttccctcatttacattcctaaagcaattgttatcactctagttccccttaaatgccagcctgagaagtgggcattgtattttactgataaggggagactctgaagtttctcggagggagggtgatattattttgtcagaaatttgaggtacagattggaggaacgggtataaaacatggaatagccagttaggtttccgtttaaaggtagaggaggtgaagggagaggaaaagaggcagtgaggtggagcgtgtcagcggggatggactcgtgaggccaggaggactccagattttaaagacttgtgggccctgacagtgaagggaatactgggagacaaggattgttgctctggttgagagcagagagaatgaagtcgctttgccctgagagtggctctggaggggcagttggattgggaagaaaatggtcatctccgcatgggactggcaggcccaaagtgactcaggcagcatgtgtgctgcctatgtgcccacccaccactactccatgttcccttcagcccagctcccatctgattggagttgaggccttgcagcctgcagttttctatcaacaaattagagaaacacctatgtcagagccagaagggatcattctgctgcttctaacccatacagatggggaacccaagtgcagcagaggcagagacccatcttggagacagtggcagagttaggactgcagccaagttccagactagctcgcaatccaggcgtaaccaaaactcaggttcagttgctctttgcttgaagaatccaactaagggaagaggtataggctcctgcctttaaggacactgcttcactttttggaaagaaagcagaggcttttaaaggggaacttggcattaagagaggagagagagagcaacctacaaaacaaagatgttgccagataacatttactgttattttgtactttaaaaacaagatttctgaaccaaaatacttcacttctttatttgtattttaaagattcactattacaagtcattggccattcttcaaaagtgccaacctgaagttctgtcaaaatgagcttgtcattacatctgctgtcaagaattccagacttgaactcacagctatgggattacgacttcatactcgatataccaggtccataaaaacaatataagtttcaactactgaaatgaaaagacaaaatcaaagctgtgtggttgaattcatcctcctgggcttttctaactttcctgagctccaggtgcagctctttggggttttcctagttatttatgtggtgaccctgatgggaaatgccatcattacagtcatcatctccttaaaccagagcctccacgttcccatgtacctgttcctcctgaacctatc

SEQ ID NO: 6633 - DNA, 2300 bp, Homo sapien
ctgccccagcctaggctggggttaagtggtagaggaggagtgtgggttccagggagggatgtgggaagtctcctgggctctttttctcttggtgacagaatagttcatgccttccacccctcccttgtttctcaacttcaacatttgaaaaaatgaggtcaagtttcccactggtgagcaattgcccatcccattgacagtcatcccactgacattcagtgggtggttctgcttcacagaggcttggggcagatggggaggggcccttctgttccaggcctatatactaggaactgttaggtatcaagctgtagctggtaggtaccagcaccaccaaacagaagtgaactagtgagtatgggctaagagagcccaaacttggacctgtagagctgtcggaccaggaaaggggatctgtttcgtctcagtccccaggctttgcttactgggctcctggatcagggagctgagttctcgctgcctcacctccagctccccaagtctgaactgtggtaagcagcctagactggacatcttcttggcaggttctagtgttgtcttttctttcctgaattattaaatagctctgccaacatcagaaatttgcagggaagccctgagtcttcccatgcagcctgaagctttgttgtaaattgatcctgctttcacaggcctgcttttccaaactggcctatgactcacaaccaaagtcccctgtatcctaacatgttccaaacattttctttctctgtcagtatgtagtcaaaatgttggtatttgaatggcaacaactctctgtgttcccaaattctcttttgaacactctcaatgatgaatgtgacattgtactactgagatgggttccctatgggccttaggtcacaggtgtatttctggattctgaaggctttctattaattgttgcttttcttttccaaagactgccacctggcctacattttggttctacattagaaacacaattcaaaactctgctctcctttcccgttactttagtatttatacatgtctccagcttctggcaacatttagcctaactttctggttcctgactctgtcttctatttctttatcttttgagttttttctgtctctctcttccacccagggcatagaccagtttaaatcctgcctctttgcccggtggcctagctctggaaaactctgaaaaaccatttttctctgactgccaaatttctcatgtggaacagttcctgagacgatttctgagatgatcaaaaaggatatgtaaatcacctggcacaaagtcagcactcacaggtggcggttcctcttcctatcattatctggatttgtttccttatttgaattaggagacttctagctttgcaatccctgtgtgactgaggccaggaggctgacatgtgaggccaatgggttgagtgtagattttttttaccttcttgccataccacagcagttccagcaaatgtgctccagctttctataggttcacacagccagggacagtctcacttttaaaacttaaaacttggccgggcacagtagctcatgcctgtaatcccagcactttgggaagccaaggcgggcagatcacctgaggtcaggagatcgagtctagccgggcccgtatggtgaaaccccatctctactaaaaatacaaaagtgagctgggcatggtggtgggcacctgcaattccagctacttgggaggctgaggcaggagaattgcttgaacgtgggatgtggaggttgaggtgagccgagatcatgccactgctccccagcctgggcaacagaggtagactctgtctccaaaaaaaataaaataaaaaacttagacttttttttcttaatccatccgtctaaggaggcatacagagcctaataaagaacgtgttgagagggaaagaggaagggagtggggggagagagagagacagagatagagtttgggggagagagagagagattgagagattaacacacctacataccttcctacccatttgccaacacagtcacgtgtcacctgactaagaggcagaggggaatgactaggaaaattcccctgcgtttcatctgcttgtctttcttggagctttgcacatgtatctcgtctctccctggcctccgctctataacttggccaagcccccagaaagcagggtgggcctctcagcagtggacctctccttttgcctctttctccaggtcactggtcttctggtctggacttgatccttcccccagatcaccatggccatggccaaggccagaaagccccgggaggcatt

SEQ ID NO: 6634 - DNA, 2300 bp, Homo sapien
gcagatcccaaggcaaagttgaacacatgtcttcatcctcttgcttccaggccttctttttgacacaggcaggagctccaaccccagtctgtcccctcttatacaagggccctttgagacagtcccctcaggctccccaaaggtcaccatcttctcctttataccttggtcagttttgatggagttagcacatggatttggtaagcttaaaggtcttcttgagacaggagatcctgtggccattttggaggtatctgtctctgctgctagaagctgtcttttctcaagagtattgtcacaaggcttttgtaaaccaaaaagtatctgagacaggtctcaatcaatttagaaagtttattttgccaaggttaagatgtgcctatgacacagcctcaggaggtcctgaagtaatgtgcctaaggtggtcgggacacagcttggttttatacattttagggagacatgagacatcaatcaatatatgtaagacgtacattggttcagtccagaaaagtgggacaagtcaaagcagggagagggcttccaggtcataggtagataagacataaacagttgcattatttttagtttctgatcagcctttcactgaatacacaatttacaggaacagtcacttatgccttagtctagcttagtgaaataatggagcaaggaagcaatcagatatgcatttgtatcatgttaacagagggatgactttgagttctgctttttatccacaaggaattttcccgtgggcaaattgtgacggaggtatgtagcttttttttttttttttttaatctttgtagctatcttatttaggaatagagtgggaggcaagtatgcccacagtacccagtctgacttttccctttggcttagtgatttgggggaactgaggtttattttccttttgcatttccccacttttctttttaaaaagctttcaaagaaagcattttagaggaaaatgagtctttgggctgaggttttgtctgatctctcatggctaggatggtttattcctagacgggtaggtcccacattattaggaaagctcatttttagcagattgtaaagtcacacattctacaaagagaaaatagggggagggaagaagaaaaacaacaacaaacaaacaaacaatgaagaacaatcctggaaaattcatacaggtcatgttactctgaagtccatacatcagtaggcaggtatgaaagtggtttaggtacgtaaataggctgccattattttcttctaaagtttaagttgttcacaaagctttaagaaagcacggcttaatcttcagtgatttcaaatcaggaaaaatgggagaaaaggaaaaaaaagaagaagaaatattgaaaacattgttttggagacttgtagccaggaaaatttttagaattcagtctaaactgtagaaaggaataaaaactgaaaaacattaggcaagactagactctaacaagtgtactatagtttattttgaaacataatttttctctctccagtcctattttcactaaagacaagtcataagacaaattcatttgcaaaataagttttaatcttattatacttggctggggtattttcataaagtcagcaagaataactatttgtcatataggctcctcttttttttttaattggcattgctggaactttattccataaggaatctcagattcaactttaatgccttaagcctaacctctgcccacaaatatctgtattaattgggtgaattcctaaacttgaattcccaagaaaacttggggctcctgggactatcagaaagtgacattctttacttaccacagcataattgcctgaggggttcttcctgcccactgcataaagaaagaccacgacactgtagtagaaaaagagtttaacagacacaaggccagccacaccacatgggagatgaaatttctactcaaatcatctcattcaaagctggtaaggttagaggtttttcaaaggcagttttggggaaggggtgggggtggccaggtagcaggtacttgctgctgattggttggggtggagatgaaatcacaaggggttgaagctgtcctcctgcaggccaaatcgcttctgggtgcagccacaggagtggggttgttggtccaggtggagccatgggtatgagacatgcaaaaaagtctggaaacatatctcaaaaggccaatctacaataatggtgttatttgcagcagtaattggggaagtagcatatcttataacctccagaataatggctgacaattgtttatgtctacacctta

SEQ ID NO: 6635 - DNA, 2300 bp, Homo sapien
aaatgtcatttgcaggaggtcctgcaacttccctctctccccaattcatctctgcttcttcatccatccccttctcttttctcccagagagaaatgtctttaagacatcaatataaaggcaaagttattgaaggcaaagtgtccacaccaacccagattaacacatagataggaggtctcaaaggtgtgcatggtcagttgggggcagcaacacttcttcaactgggttctgtcctctggcctttttcccatgagatgatctcaatggactgaccttgactcaggcagacccctactaagcacccaaaagggaggccagggccctgggcagtctctccagcatgcctctcagcctgtgcaagaccatctaggcttctcagtgtgggtccaccttttgcccgtttcattagatattttttcacacttgtatatttaatatttctctctcgtctatattcttatcctcagtttaaaatatacttgaaacactgccatcctaaattggctgcctctcaatcctgctgtttccctggctatttccttaaatgtctcctttccttcccagaaaacttcctgaaagaaaagctggcacttgctgctttcagttcagactggccattctctcacaccagatttctagtttctgtgcccaccccaccctcagtcccactgacgttgctctactagggttgctaaagactccaggtcatcaaatccaagagttacttttcaatcttcttctgtttggctgttcacctttgttttggtgaaagaaagaatgcatgtctacacagagcatttacaggggagcagcgtcatgtgaattctaataatggaagatttctccaaggagaaatcaactcttgggcacagaatcagggataagaagttcaacctcacctatccacttgccagctggacactaggacttgacctaattaagggagttgacagtttttttggtgttttgttttgtctttacaagcagatgttatcaccccattataccaagaaggaaattgaggctcagaaaaaacttgtagattgccccaagttacacagtgggttatggtcagagctccctccatcacatagtgataatagctatgacttaataactactgtatatcaggcatgtgctaagagctttacaaggcaatacctcatataatcctctcctaaagtacagactagtttatacaccttattacaactccacttgaatgtgtaatggacatctcaaaggtgacacattcagaaatgaaatcaggatcttttccccaaaacctgctctacctacagcttttgctatctcaattgatggtgacttcatcctactaatcgctcagtacaaaaaaaaaaaaaaaaaattgcagtcctccttgactcctctctttcacacctcatatacaatttctcaggaaaccctattgaaactaccttcaaaatatatccataatcttcccacttctcagaacttctactgctaccagcctggtcccagccaccatcatctctcacttagattacctagtggcctcccagcaggtctccctgcttttccctctctcgcctccctctcctcacctcccctcaccctccagtctcttctcaaagcagcaggagaaatccagctaagttctccttctcgcccattgcagcctcgagcttctgggctcaaacgatccttccgcctcggtctcccgaagtgctgagattacaggcgtgagccaccgcgcctggccttaaaatcctttttaaaggcactttgacatccattatctcatttaagtctaaaacacgaatttcgacctccgcgctgctttctggttccacctggcggcagctgcacaaagtgtttctcttcgaacgccgtcccaagttttacccggaactacttagcccagggtttcctgagtgctcctcgggccaaaagcagagcgcacaaattccagaagaaattaccaacggcgggactatttcagtgctccgagaagtatcaccagtaaccaatcagcaaaaagctctagctcacgtggtgtatattcagcctatcaagctcctgatattcatgaatgctgtcatttccgcttccgcctccttctttctcgacaagatggccacaccggcggtaccagtaagtgctcctccggccacgccaaccccagtcccggcggcggccccagcctcagttccagcgccaacgccagcaccggctgcggctccggttcccgctgcggctccagcctcatcctcagaccctgcggcagcagcggctgcaactgcggctcctggccaga

SEQ ID NO: 6636 - DNA, 2300 bp, Homo sapien
ctgaataggaattaaaaatcactctggaatgagtgagttgagagataggaaataaagttgacaggacatggtgtgatcagaagtgagggattagaagaaaatatcagggatgacttctacatctttggttaagtgtgaaagaagaaagggaaggtaggggttgactaaaggtctggagtgcaaaagagatgtgggcaagtatgtcaggttaggaattatgtcattggaatatagaaggtaattgaacccataaaattggatgagatcacctaaagcaggggttggcaaactttctataaaggtccagacggtaaatattttaggctttgtgtgcagtctctatcacaactacttaattctgcctttgtagcaagaaagcagccataaaaaaattggcgtgtaaactttattcacaaaaaacatttctagatcagggcctggcctagaaaaggaacattgaataaaaagacaagagaacagagacaaaaccctaaaaacctaaaaagtcaggaagaagtagccaacaagattagaaaggtaggaagaaaactagaaggaaagttttaagatgggaagtaagtggtcaagtctgttcaacgctgatgagaggtcaaataagataaaggatatatgtgcatttggtttagggacatagtttcagtgaagggagcagaaaccatagtgagttggaattagataaacactggtagatatagacaacactgtggtttctggtggagagggaaacttttaaatcctggggtaggaggttccaatagattagaagagaatggaaaactcaacgtagtggtcttaggtcaagaaacaaatgtagtgggaataaataaataaataaataaataaataaataaataaaagaaatacagcctgggcaccatggctcacacttgtaatcccagcactttgggaggctgaggcaggcagatcacttgaggtcagtagttcaagaccagcctggccaacatggtgaaaccccgtctctagtaaaaatacaaaaattagctgggcgtggtgatgcgcacctgtagtctcagctactcgggaagctgaggcaggagaatcacttgaaccctggaggcagaggttgcagtgagccgagattgcaccactgcactctagcctgggcgacagcaagatttcgtctcagaaaaaaaaaaaagaaaaaaagaaatatggaagtaaaggtatcagaactagaacaaaagtttgtggtaaaagactgacttctaaggttcgcagatagatttctggatgatgataaggttaagactgaccatgggaccagatggctaaagggaggtacagatgaagctcctgacgtctcagtgtctgaaacttggccactatattagcagtctatgtaaccattaaaatattccaggtagctctgcagattaaattacagggagaaagtgtagaggctgaaaaaaaaggccgtagagtgaaggtctggaataggctagtagtggagagtaacaggcaaaaggagaccttgtaaaggaagaataaaccctatttggtgatgattagagggagaagttggcgatcacaccacagtttcagttccctggagaattctggtcccatcgatgcaccggactaaacttggagctaatgagttcagttaggtgttcattgacattgaagagatcatcaaaagcatttcaaaagtagtcagaggttgttgggagccctaggattatataacacatggacgattctctctttcacaggaactgtcgacaaacactcagtggaggtcaccaattgcttttcagtgccgcacaatgagtcagaagatgaagtgagtgggaatccaagctgtccctctgcagtttttagctgttcatttgctcggctcccctcacggtccctcccacactcataactagagctcctgtagccaaggagcttcttcccatttgtacgtacttcctgggcctcttctgtttattgggggtggcctcttgtcctttttaaccaatttttctttggacttctggcttcttagcttgctttcctgccttccctcttaggtggctgttgacatggaatttgctaagaatatgtatgaactgcataaaaaagtttctccaaatgagctcatcctgggctggtaagttggggaggtgggggctggggttaatggaaggtctcttcgtgattgccggtgtcttttgctactggactggatcttatactcttccttttggaggcaagagtattgcaagtgtattactgactgtgagcagtggctcaatgcctgtaatcccagctgg

SEQ ID NO: 6637 - DNA, 2300 bp, Homo sapien
aacactcccatttctaggccaccttgttctgtttatgtcccttgtgctttctcttcattactactaaaaatcctttggaaaaagtccaagtgtcttggctcagccagggaagagcttgtctgacagtgacccagggaaggctatggcgagaaagcccgcctgggtggggcggggtggggaggggtggggcagggagagccagctcgcgccttcttgtctgccccgggcccccagtcccttcccatcccccatcttaggctgatggctttagggatttacaggtataatcttcttgcagaggtcacaagagcctaagaaggacctttcgggcagttgctgtggggtggctggctaacttcacgccagggtcagggtggggtggaggtgccaggaggctggagcgcgaggagggggaggtagggtttgcgctacgctaatccaaggatcctgacaactcctgtgaactagagctaaccctatgggttacagaggttgcaactggcagtgcacctgttgcatccagcccacaatcacagggaaaaaatgcttttcactgaataaatggacaacacttaaaaattgggagatttaatagatctagctttttatcctctcttgaaaactaagaatgtctgccagtgctgggcctgtcttcagcatggcaggcatagagcgcagtagtggctgtcctctgcaccgggagcagggaatatgttgttctataagcctctggccctagctggccagcttttctcttacatgacttgcttggtccttatagcttttaagtttaccatttctgtgcaatacagccatctctataaccactgaagtacccaacttgctcatagagctacccaaacgcatcattaaccaatatttaccaagggccaggtactgagcaaaatgctttatgtaccaggtagacactgttactgtctctcgtggagtttacagactggtgtgcaaggactgactcccccaaaaagccagtattcctgaaccacatcttgatagtgaggctcttggcatacccatgacctcagcagtagtggattggaactccagaatcaacttgttgcaactgtttgaacacagttatttcattgtttaggggtaggggtcagaggtgagcttccccctctggagaatgtgtgggagtttgtggggtcccccacagaaactgcaggaccagaggctactgctcctgatccatatgtcataagacaagtcctaaggatgtcccttctccaaaggactggctaccccatcccaatccatgctggctcagaaccagcagtcacagaggcctcctgaggctgacatttaggcactggctgccagccccctgcagcctgccttggtgaggccactgtagctacaaaagccagtaaacctgctattggctcttatagcccccgcttccgaatcctgataccctctagaagtacaaacaagaagcccaaggccaggtgtcctgaaccaaggctgaaagctgtagagaagctacaccccagacatccttaggagaactctgggctaagcagatggagaagcccaacgaagctgtagaggtaggaccttttgagccttatcaatgccaggagcggtgcgtcagcaatctgtaggaggaggacgtttggcaatatgaaagcatggccacaaaatctttccattcctctcgttgagaaacaagttctatgttacctcccctttaatctggatgctatgtaacttctgaggttaagtaatgaaaggcccttcaacatcccctgttcactggacccctgggctgacatgttagaagtctgactactgtgatgctgccatgctgtgagaaagcccaagctacaaggaaaggtcatatgtgggtgcttcaattgacagtcccagctgagcccagccttcaagtccccacagccaggcaccagacataggactgaagaagccttcagatgattacagcccctagccctttaagtcatccccaactgcttgagccttccagctgagccctatacatcacaaaggagagacaagtcatccttgctccgccctgacctgacccagagaatctgtgaacactgtgaaacggttgttgttttacaccgtagataaccaggcaggcagaattcatctccgaggaactggttctttttccttgaaagctgattcatggccctttggttatggcaggaagggtcccagttcatctgcagagatgagctgctctgcacagaggagcgataggaattcaggagttgtcttcttgtagctaaatgatgagttgtaggggtaag

SEQ ID NO: 6638 - DNA, 2300 bp, Homo sapien
ggaggacagaactaggactgaagggaggtgtgtttgagctttaggtgaagcagcaatggccaactacaaagatggagggaccgctctgggaagagcaaacaccctgatgctcagagtgtgcatgaggaggtttcataatcaccatccagcagcttagcctcaaaagggctgcctgccccagggagctatgacccttgagagatgcagtttatccagccctgaggttctgtttgaccatctttccccggttgtcctccagggggtcatggcacaagtctcagtagcacgggccccatggtccagccttaaggtaagaatggacctccctggaggaagctggcttcatctacagttgataagttcaccttttttcctggtccactttccttggtttaaccctgtgaccaaacctgagagctttggcaggaaggaaaccagggaggatgttgtgcttgagaaagtgctggcctgagcattggctttgagatgtccttttactctgactggagggtctcattccacctgtagcaagactaaagacacctgaaagagagtttctgggagatggaggatgaggtctccagttgcaggtgcatgcacacgtccacttccccacctggcaggtgccggcatgcaggatgtctgtgcgtgtgccccttgcactgactcccttgaggctggctgtgcagctttggggcatgtgtccaagcagagagaatggaagactccatattgggagccttggctttgacctttcctttctctgagcctgattttcccaacagtgttatgggaggggaaggatgagatgcgcttctcagctgatgtccgtgattcttctgttttctggaggccatgagtgttaacagaatgtgttcacttttgcacccttcttccatgaccacttacagtctgtctgcttagcagatgaggggtctgggtctccagcgtccatttggggtggggtcagcaatgtccagctttgcatctgggtatcacttttccttctgatacttgaaattggattctgaagattcctaattattgttccaagttctcattgaaaatctgggtgtaatttttacaagagcatggctgaggatggacatggaggggaagtagtggggctggagggagggaagggacagacagaaggtgatgttgtcattaggagttaaagccagggcctggtagtagataaggctggacagttggcaggatcatcgggcggactaaagtagcttagattctgtccagaggaagtgggggtcttctgaagggtttaagtaggctgggaggacatgatcttaggaagctcactctggtgtcagttgcaggatggatttgagaggagcaagttaggtgtagatgcccatgatgatgccaagatctgggcaacagacaggaaggccctagctcagaagtggctctagggaaggtgaggtgcatagaattgagagatgctcagtagatggcatgagcagtgcttgatgattgtctgggttggtggaggaaggtggacagggaaaagcagaaagctacgatggtgcctcaaggggctgagtgatgtcactcacagagacagaatgtatagagtgaatgttcagactcacaggaagtccaaaactacataccccaacgtgaggtgctgtgggacatccggggtgcagggtccagagagcaggtaggtagagtttagaagagggctgggtccacaatgcagccttggatgttctcaatgtaagagttgtgggagatgaagccttgtgagtggatgggaacacccaggtgcatttcaggtgaagcaaggggacaagaggctgaggacacagacaagcaaatcctagatcttccatcagtccctagaaggcacgatgtgtgcccctcccagcacacagcctgagccctagcacagagctggccgcagagagggcagcagtgaatgtgtcctcggtggttcctccagatggggcctttgtccgcagtgcacttgtctctgcctgggttgctatagtaacccacagatgcagagagacttggcctccgtgttgccatggaaaccagcaattgggtgtccctgtgtggcatggccactgagaccttgaggattcagtctggtcctgaagggtttggggggagactgcgaccagaagatgtttccatgtcctaattaatgggtgatggtggttgttagtctgactgttgccacggtgatgaagggagacatccaagtgctggtttcagtactgaggcgaatacagggaatttcaacaggctccaggtcttactatgcagcctga

SEQ ID NO: 6639 - DNA, 2300 bp, Homo sapien
gtgatgcctggcctgccgcaccagcactttgggaggccgaggcaggaggattgcttgaggccaggagttcgagaccagcctgggcaacatggtgagacccccatctctacaaaaaaatacaaaaattagccaggcatggtggtacatgcctgtagtcccagctactcaggaggctgaggtgggaggatcacttgagcctaggaggtcaaggccacagtgagccgagatcacaccactgcactccagcctgggctacagagcaagatcctctctctcaaaaattaaaaaaaaaaaaaaaaagaagcggtataaatttaacattaaacaagttatgtttacaaaggtaatatactgaaaactcaccacttcgtattcattttactgcctttccctgcgcttgtctgttgtgtctgcggggtggaactgccacgtgaccgtgcactgctgagcatctcctcgcacttcgatgctcagtcacatcacagattggccatggcgagggtggctagaccaggggagtcaacaggtgctgcacattaagacctggtttattgttttgttgattgtctagacctgagaaagtgatgggaaaaaatactactaatgcagattacattttaaagggtgtcatgtttatagttgctccatggtgaatagcagaaaacaaagatttttccagtattcagaaactattaacctattcagcaaagaagtcactccgaccaccagtgaaggagtgaagttctgacatgtctttgttgtttcactttcaacttacttgttaacataaatgaaaatatcaagcagcattaagctggaactacagtaatttgtcattgcaaccgtaggttggctacagataaagagttaggcgaaactcattgaatgggttgatttctgggacagtcatctggctatatggaatttacaataaagaatattggatatttcattagtatttgtaaattatgtgctatacatcctttgtgtcagtaaaatttataataaacttattgagtctacgcatgcagacattttctggagagcttgttgttaaatgtcactgttaacaccccgtaggccctccattacacatagtcccaacatgtctccttactgtgcagacggtgaggtagggtggggtggagggacagatgtaacttgcagagaccctgggagcagtgtcttaggtttccagacaagctgtggcttgtcactagatcagcctgacctcctcctggccgggggcactggggctcaggtgggggtcccgttcattggtcccttctctgtagcaggctcagggatttacaggtcagaggaagaagacgtggtcactgcctgtatggagctcacagcccagcagaggagacatccagtcgcagttagttacaccctggagagtacaggggcaaaaaaagaagaaattgcccagctgaggcaggagcgaggctgggacaagaggagctgctcagcggaacagtgcctctcgacatttagtgtgcagcatccacagatttgtgttaaaaatgcggagattctcttttggcaggtctgggcagggtggtgcccgggagtatgctaggggatggtgaagcaggtacccaagggcacactgggaaaagccttgatctgaggagacgagagggtgtgtgctgaggcaggagatgagaaagaagttctgcggggagatctgccgggagtttaggagtggctggagctaagccagcctggaggggagacagcagagcaaggcaggagaggggtcagggggcaggtcctgcagcctcgtaagcctcatggaagagcttggtttgtatcctttggaacgaggagcagtggaaagagccttgtcagcagacaagtgacatgctcgggttggcttttaaaagtgtaatgttcctggagcaggcagaactgcagtcaaggagaccagaaggaggctggggacatgtgaggcctcgatccgggcagaggcactggggacaggggaggggaccgataggagggcttcatgggtggagccacaggcgagatgaggagggttagggtggggcctgggtttctggggtgatgactgagcgaatggcaggactatgcacattgccagaaaacaggaggaagagcaggtctggagtaaggtgagttgctttgaacctggagacttagaggtatccctggaggggcccagaggcatttggggctcaggggagccatcaggaagtagatttgggagccccatggataggtgggaaagccaagagagtgaagaggtcacctgcggagaacacagtcacaag

SEQ ID NO: 6640 - DNA, 2300 bp, Homo sapien
ggggtggcctggagggcgcggcctccaggggtcaaagcttctgatctctaggcaaggttctgccctgaaggacagaggcctctggggcaatgctttgctgctctgctgcggtctccagggtagggaccaatctctgctgcccttcctggaaggccagcagagtccaggccaagcatcccagcaggcaacaaaacagccctgctttctgccttctgcaccccactcccaggtgttttattttgtctgctctctgtccccagtgacagtgacagctcttggaggttgataaataatcagaggtcatagtgttcagagagcatcaatgttgtgcccgacagagatggatctgacctgtcctgagctccagaagcctggagagagaggccatgtgtgtgtgcatgcatgtgtgtaggtgtgtgtaggtgtgcgtgtgtgtgtgcatgtgtgtaggggtgtgtgtgtgtgcactacatgaactgtgattggccaaaaggaggctgagggtaagtgctgtagacccagaccttttgtgtgtgaatgctagcttcatcattgaccagctgtgtgactttgggcaagatccttgccttctctgtgactcagttcctctgctgtgaaatgggtatgctaatggtgcctaccttctagggtggctatgaggattaaacgaattataatatgtacgtagcacctaacacagctcctgacgcccagcaaataatccaaatattgtgggttattgtgttttataattaatgggcaagagaaggcaaggctgaagggctgggagagccctggggtgggggtctggctgtagccccagggcagcaggatgagccccctccctcagcccccttggctgttctcacactctctgcggggcagtcctgaccgcctatttatcatcagaagatccccgcacaacactcttctggcgcggttggcgcggcagaatccaggatgcacacgaggacgcccacggggcgtgtggggaccgtgcccctccgcagacctctcccggatcacctgctccacacgcaggccttggtgacccctcagcctgctgctccttgcttccgcccgccctgctgtgggtcccgcaccttctcagtgtgccatgccttgcattcaagctggtcctagtcacagccaggacctcctcagcgcgcagagactttcagatgatctttgtaggggtttttgcctccggtcaactgcgccccttaggaagggctttggaggacacagatcacagaacagtttcagctccaccacttcctagctttacggccttgggcatctcagcattcctattctctgggttatagggatatgatgtttgtctctcaaggctactgtggagattacatactagaaatttgcaagggctgggaatgcaatagaccgtaaatgttccccttcccttgacgctatagcttagatgggagggagccactgctgaggaaacacctccttaacccaaagacagagggttccccaggcgggggtgtgggaactcggaggtgggggtgagggaaggccaacctccacgcttcggcccggaggttcccccgcctcttcctgcacgactggattccttctccatccgcgcctccggcccggtccctgccccgccaaatccgcgcatcggtttcccatcccatagcgcagataggtagggcaggtacacagggaggtgttcgaatgatccccgtttcacagaagacgaaactgaggctgggaggcctggggactggcccggctgcagcgccgccgttagccgaaggtgggagccggcgcggtcacgcgcatggagcgtggatcgcgacgatttcgggggagggggcaagggcgctccgcaggccctgagccggccggggggtggggtctctgcggggcggggcggggcggggcgagggagaaggggcaggccgccgctgccacgcagtactcccgccttggcgccagaggggcgcgggacggtgcggtcggcctccccgcctccacgcgcgcgcacgacccgcgcactcccggagcttcgcccatctcgcctcgccgcgccgcgcaggcagccgctcgcagagccagcagccggggccctggcgtgcagcgcgggcctcggcggggcccagcgccccggcccgggaggatgcggcccggggcggcccgggagctgagcagggcccccgcgccggcccctccgggccccggcctccagagccgcagccaccgccccgcccccgagagacatgacttccaagccgcattccgactggattccctacaggtacgcgggcgcc

SEQ ID NO: 6641 - DNA, 2300 bp, Homo sapien
acacaatagaagttgatttctcactcttacagacaggtccagatgactctaagttagtgaggtggcagcagtggagggctctgcactacataattatttaggaatcaggttgatggaggctttgctgtttctacccgtggcttccaaggtccccgtgggtgttagcatccatgctgcagaaaagaaatgatcacggagttgaataacaagggagattttatagaccaggccttgagctagcacagtcctagtcacattccttggttggaactcagtttatatggccacatttaactgtatgggagtctgaaaaatgtggtccagctaaggacccagagggaagagaaaatgggtttggtgaacagctagagatgatcacatcatatttaggatatgtgtgatacctctgtatccttttaattaagttgccatttttttcttctacttgtttgtgttggcctcttttataccttaatgatttggtgttttcatgatagccatctttaaaatagtagaagagataaaaagtgattattattttctcaggaaaattgggccgatttccacctatgatgcatcatcaccaggcaccctcagatggccagactcctggggctcgtttccagaggtctcaccttgccgaggcatttgcaaaggccaaaggatcaggtggaggtgctggaggaggaggtagtggaagaggtctgatggggcagattattccaatctacggttttgggatttttttatatatactgtacattctatttaaggtaagtagaatcatcctaatcatattacatcaatgaaaatctaatatggcaataaaaatcattgtctacattaaaacttcttatagttcataaaattatttcaaatccatcatctctttaaatcctgcctcctcttcatgaggtacttaggatagccattatttcagtttcacataagaaatgtttactcaatgtttaagtgttttgccccaaaattcacaactaacaaggcagaactaggacttgaacatggatcttttggttcttaatccagtgagtgatacaattcaatgcactcccctgccaaaaaaaaaaaaaaaaaaaaaaaaattaacatctttacaggccgaaaaggaataaagattttctaagaagagcttttattattgggattggcacagtgatttccaaatagccattgtaaggccaaataatgacaccactttatcctgcttgtttctccacaggaatttgagatgctgtttttaatattatctccaataattctcctgagacagaactgtccctcctgaaattaagcctgatatttcctagctctggggagacatgggtgtaggttctttaaagcagacccccagttgagttccacctccaggcaggcctttgcaggcccctggcccctgtactgtgaattagaggcagaagactcactttgccctcctgtctagagtaagcttaaataagatgagttctttctcgcccaggaattctgcaggcagtctgagttgagtctgtaagaatgcccatagggtgccacacatcccttttagatgagcatgagcaaggaagatgacctgtagggagattttttttcccttgtgttagaaatgcttgttctctggtgccataaagaagcagcacttggacgtacatttaatttcctcagcaaggccatttttactttctgcagaaagggtacactcaccagcggttttgccgtgagagtacaccgaacaaaggagacagggtcatttataacctgacgcatccaccttactgctgtgtccggtttccattggctggaacgggacctcacattctgtatttgtgctgattggctagcgacttagaactttttaaaagaggcaaaggcagaggagaacaaaggaaggaggaactaacttgtggaatgctgagaaaggtaaaaacaccttcatataaggaagaggaacaggctatgacctcatgcttgctttgacaagtataagcatgccagggcaaatatttaggctaaactgtgggagctaagaacagttgatttctttattatggctagcagatatctaagcatgttagcacaggttcttgaataaattttgcttctaagagaagttactattcctaattatatggggagtaaagtctctttgaagaggaatctctactttactttttacacttgtgctttgataattttttacttggaaacctcatcttttggcgtttttttttttgagctatttctctagtgttgctatttgatttaatttctgaccttcatttttg

SEQ ID NO: 6642 - DNA, 2300 bp, Homo sapien
aagttttttcctaggttatactacttcagtagcttctccttgtcaaaaacagaatttacagtattggtagcttaataatcttaaagtatttattgactgcccattatatgccaggtactgaagaaacagtggtaaacaagacaaagtccctacccttgcaaacttacattctagaaggtgaagacaaaaaaacaaacaagtaaacacttaagaatattccatatcatatagtgatgcctatcatgaagaatataaaacatgataaaatagagaatgatgggagaaaagagttattttagttagtgtcatcaggggaagtctctctgaggaggtttcatttgagcagaaatttgaatgatgagaagggcactgagggaaaagcacagcacttcaggaataaagagaactgaaggtacaaagatcctaacatgagaacactgaataccaacacttgagttctcaagggaacaacccatgtctaatctccactctacattttctacaacgttcagaagagtgtctcccactcacagtcaatagtacttgttcaagataattcaccataatggaaagtaaaaaaaaaaaaaaaaaagttttcgaagaatcttcactgttcaggatcatcatgaattgactcttcttcaaagtagacaatatcattagacaaagcaggtaaaaatctttgggattattgcaataagacagaaaggaaaaaaaaagaacaaatacgcaaagatgttttagaagtccgtcccaagtggatagtcttacaagcataaagattatcaggcaaattctgtaaacagaattatgtgttcaacctgccctccacccctaaagcttggtgctttgcatttatagtgtgtatgatgctcaagagaatggaactacagtcaatgtgcataaagcagacggaagtggattacagttcaaaaggagctgtccagcaatcaacagtttaaacattactggaagtgttcagacaccgtaaaatcatgtctcaaagatattacaaggataatttacaggagaaagttaccagtagaacttcatgacctatagaaaactgttctggttccttctcccagccttcagcaccgtgcctttacactcattctgtaaaaggccccagtgcagctaagaggatgaatttttaaacaccacatacatcatgccaacaacgaagaattaacagataaatactgtttcaataaggggaacgtaataatttgttcataaccacctcagtaactgaaactggggttattaaaatcttcaagatatatttttaaaggcacaagaagagcctgaagcagtgagcgcccagcaccaagttgaaaaaacataacgacttaaggtttgctgtaccaattccatttgccttgatttcgtaccaagcggcgcgtcagaaagtacacggaaaacctaaagagggaaacccaactgggaacccttgactcaaagcacgtgaacaaatggtgacgagatgagttaagccagcggggtaagagagaagggactgcgcctaaacgggagtacgcaaggccacctagaggatgcacagacctgcatgcatacgttcctgacccttccagcagcagaaccatctgggccgccacccgctgataacaacggaaccgtgggcattggcccttcaacgccgtctcgcccgccctctccagtcagtttggtggatatttcggtgaaggctgcagactctcagagtcacccctccctcaagcagcgttctccgtactcttcggcgccgggaagctcagagggagctggcctgctcttaccttcaggtgtcggcggcggctcctgccgcttcccgcgggacaggaaggccttgggcagcagcagcgacagagccaggacaagcccagaagccagagcgactctctgcactgtggagtacgccatgactgctcacggtggtcgcaggtgcagacgccagccggaaccggaaccggaaccggagcacgggctgccgctcccgaccgaaccgcgggcggcgcggacggcgtcgcgcgagggacaaggtgcgcgaggcgcacgcatcttcacctccactgtcgggagttgacctgctcctcccgcgtggttacccgtcgctgtaaatggtaccctcgccttcccgttcatactaactaaaaactcctccctcactccccatgttcatcttttactgagtcctgtgcattctaccgcctacacatccggcggtcgtgcccggatctctatccccacttaccaccactgccccccacccacccgtagatcacaacatccagtttctc

SEQ ID NO: 6643 - DNA, 2300 bp, Homo sapien
agattcagaagatatccattgctttaaaaaaatcaaacaatttttttttagagacagggtctcactctgtcaccctggctggagtgggtgcccctactggcttcattcaggcattattatcatcttatatatcataattaattgtggtttcacacaatcatagctcactgcagcctcaaactcttgggctcaagtgatcttcccacctcagcttcctgagtagttgggactacaggtgcacaccaccatgcctggttaattttttacatttttttggtagagattagggctctccctatgttgcccaggctggccttgaactcttggcctcaagccatcctccagccttggcctcccaaagccctgggattataggtgtgagccactgtgcccagtctcaactgctttttaatcagatttccagccaatccttcattcagacccactctgcacccttggctttaaaggaacccagtacctccaattcttaagagcatgggttctgaggggcaaattagttcactccttacaggctttcagtccacaggcatttaactttttatgctctacacctgcactgtctactgtgggcgccaacgagccacactatcgtgctgataaaatttgaaatatttttgctatcttggtttaaaatattattaaaataaattttacttatttttactttttaaatgtggctactggaaaaatttaaattacatatgtggctggtattatgtgtctattggacagtgttgtgtgcgtcttacaaaattgacatttctcatctgctgtcatgttttctatcattgcatttagtcttgtagtttatatactttatttctttattttcctttttgggcactgtcccaggaaagcaaagataaatgcatatgttacatctgtcatgtttaactggaagttctacctaagcttttcacaatgtagctcctgcttatatttgtgcacttcgtgtcctgtcactactctatggccctgccaaaatgaattaccaatagctttctgaacacaccaggaagcttccagatttgcctttatttttttggcctcctttttccggaatacctttctaacccctcccacctgtctgcctataagttactcatttttcaacagctaactcaatttcaccttctcaaaggggcttttcttgacttttcctcgtaccagttgagaagactgctcggggatccagaatatttcctgcattttttttgtttggataattatctgtcctacaaagggaatccattttattcatcagaccctgtagtgccaagttgagggtctaatacatagtaaaaactaaaataatgttaaatgaacgaatgaagagagtaacaaagaacggtgggattgtagagaaaggagaggctgactgaaaacgtttcgagagagcagtgtttttaagctgttcttcagagaagtttttgacaactggagatggtgtcaggaattttccaggcagtgggaacaggacaagcaaagcttccctgaagacaagcaatatgctaaagaaatagcaaatcatccagtttggaaggagcattggtaagaccagatcatgcagggcgttgaggttatagaaaggagtttaactattgttctgaagataatggagagttaaaaggtttaagctggagagaaagagaattagtcttgtgttttagcattatcacctgtggctgcagacggataatgaatgcgaggggcatgagtggaagctggaagacagcgagatcatggagatgaggagaaactggatgttgtgatctacgggtgggtggggggcagtggtggtaagtggggatagagatccgggcacgaccgccggatgtgtaggcggtagaatgcacaggactcagtaaaagatgaacatggggagtgagggaggagtttttagttagtatgaacgggaaggcgagggtaccatttacagcgacgggtaaccacgcgggaggagcaggtcaactcccgacagtggaggtgaagatgcgtgcgcctcgcgcaccttgtccctcgcgcgacgccgtccgcgccgcccgcggttcggtcgggagcggcagcccgtgctccggttccggttccggttccggctggcgtctgcacctgcgaccaccgtgagcagtcatggcgtactccacagtgcagagagtcgctctggcttctgggcttgtcctggctctgtcgctgctgctgcccaaggccttcctgtcccgcgggaagcggcaggagccgccgccgacacctgaaggtaagagcaggccagctccctctga

SEQ ID NO: 6644 - DNA, 2300 bp, Homo sapien
actcgtggacaagagagtggaagagtggccacagctagcccagtcctggtttgtgggtcagggccagcccctgaaagtgaggagaatctgcccctggaggtcagtagtaaggctgcatgcagccccgatggagtgaacgcctccagtagcacagaggtttctacggcaagaagttgccccttgccagcctgtcaggccctgtgcttgctacactgtctagcccccagctctggtgggtgtgaggggctggcaccaaatatgccggtggcagcggtgccaaagcctccctcagaccctgagggcatgggtctggcggcagtggcaggggagagatcaagctcgcagtcctgaggctggtgagtctgagcaaaatgatatatttaacatcaaatatactcaaggactattaggattaagtattcaagatgaaggggaaagtgaaaccctctgagctgcagatgaggcatctcattagaagcagcgcttttctgttttctcaaagcctgacttccctgcctagcagagaggaatatggctgcagcccgctgctccccatccctgtcaagcactggggcctcccagggcttaaagggtaagacctagcctccaggtctccttcaaaccagataatctccccccatccccctgcattgtctggagtgccacagtttacaaagcacattaacatgcattagctcatctgacccccacagcaaccatagatacaggaagagtaggtctcccacctcacagccaaggaaactgaggcccagatagagaaagagacttgctaaggtccactgttggtaattggcagagatgagatagaatcccaactggtggcccttcagcccgtttctctttccctgggtctagtcctcagaagtgattgccaggaccaagcctccaacacatctgtctggagccctccttgggctgaagaaaaatcattatttctatcccaccttggaactctgtactgtctaggcaaagaaaaaagacttgggatttaaaagtaggtggccttccggccaggcgcagcagctcacgcctgtaatcccatcactgtgggaggctgaggtgggtggatcacgaggtcaggagttcgagaccagcctggccaatatggtaaaaccccgtctctactaaaaaatacaaaaattagctgggcgtggtggtgtgtgcctgtaatcccagctactcggaaggctgaggcagaagattcgctggaacctgggagccggagcttgcagtgagccgagatcacaccactgcactccagcctgggcaacagagcaagactccatcttaaaaaagaaaaaacagaaagaaagaaaaaggaatgaaaagaaaaaaagtaggtgggtaggtggccttcctagggtaggcagccagaacatcagccccaggattctggggagaagcagggtccaggagaagagatgggcactgtctcttttcctgccttatgagttacagagcaagaatcgtcaactccataatagcagcaggaatctttgttttgttcagtgctgtatccctagtgccttagaactgtgcttggcacataatacatgctcagtaaatatttgtagaatgagaaaagctttcaaggccatgcctgtgcttgcttcgagagaagttgagataagctctcccgctccatggagtcaggatgcttttgggggtgctgctggggtcaggagtagtgctgtaagactcggtaggatcgtttgtgccctgaagagggttaactttgccaaacaatccgggaagcaacacgaaaccccgggcagaactggtaggaaggaaaaggatgtgatcagagaaatattgctctgaagaagagacaaaaatcaaggctgagggtctgggagtgacagatgggatgcgtcctccagacaatcattgaagaccacgaccctgggatcggagcaaagacgctcaccgagctaggacctagaagcctccaggtggcgctgcggagccggacagccgtgcgtctccactccccattaacccgggagggtggaggcctcaggaaatgtgtgcatttatgcagtagcaggagtgcaaacctcatacattgagggagaaaggcagcgggagacggccacgagattcccccatctctttgaatataattttagattgagattcagattaaatccgaggggaaaacactttatgaggctgaaagctgtgtcgttgccagagacagggttatgagctatcaaatgcaattacattaagacagattatactgggcaaattgagccatttagaaggtgagaatcaaa

SEQ ID NO: 6645 - DNA, 2300 bp, Homo sapien
tgtggactgagttcagtgtctttcaccaggagttggggacccatataaatgcagagatagggcggggcatctgcttcattatccctgatcactccatgatgtttacactctctgaaatttctctttctctctatgaaaaccaggaggctggtcttttaagtgctcacacaggcccttgctgcaagtgatggtgggaacagggagtctgggtgcttatgcctcaggctggcttctctgagtgtgaactctggccaagcagagatgcccaattgcagggccccgctagtctgtatggtgcttttgtgcgaagtagcaaaaggtgccctctctgggtgggtgcagtccgtgccagctacatggcttggagggtggaaggatgcagaatttcaggccctacttgctctttgacaagacgccttagcacatggaatagccaacacccatctaggcagtcactcctggggaattgagagcagctgatttgggagatcattctgaagaatctctctgcacagtcctcctttcttcaccaaattgaatataattcatgcagtcatttcacaaactttcccagatactatgtgggtctgtttgggaggatagaagagagtgggaggaatcaggatgagctccctcccttctctctacccctcaatcagaatgtgttttgataagtgggggcttggggacagtataaaggtgactaactgcacctcccttaccaattaaattttttaaaaagctgctatggagggagcgaatattagtttcctgatttataaagccaaatggattaagctcattcattgcccgaggaaacaaaaaggaaatcttcaatacctctgtgcacattgagaatagggacaatgccggtctttagaaagcagaaacctaatttgggggaatcaattaccctctgtgtcctgcctctgtgggctctctcactggttctctcaatagatttcctgggaggtaaaatgtggagaagttgatcaaccacaggcacaccctcggtacagccttgagacaggaggtgaagaactaggtctagggtgggtggagttgggggttcccgggcacaagggtggggtggggagggttttgggataaaagttgagagtaggggcggtattgagaggggcagtgagagggcaaagtgggtggtggtggtgggaacctggggtttataactgggggagagcaaagcccagttgatgcctgaacaggtgaccggatggagagcactgtggcccagcctgggtccagagtcaccaccgcctcctgatcctctcggatttctcctctgtgatctgcactttcccccgtggggctgagcatgccgcggggaatggctgggcaataatgaaaaaagaaaggggatggggcgcctgccacggtagccacggagtcacattcacaaagtcacacacagaagcactctcgcgatctcatacacattcctgtgccgggtcccagtccaggcccactgtccccagacccagagtcacgcccagcctggcgcactcattcagaatcacaggcacggagcccacactcctacccgcacacacccacccgcaatcgcacgcgtcccacccccacccttgtcttgagctcacacagtggctcaccaccccacacagccctcactctggcatgcggacacacacacacacacacacacacacacacagcccctcacacgcacacactctggctgtgcttttgtgttttgtcagaattaatgagaaaagttcccgtgccctgcgggtaattagtgtccttggagttaaataagctaatggcgggcacctctggcccaagcaattatgtttgtgtattgaataattgattcaaaggggggggaagggccgctaatcagatctgagcataatgaattgatttaattaacaggggaatctgaggggccctgggaaatgcagccttcactctgctgaggcgagtacggccggcgcggaggaaggacgcgcgcgcggctcaggctccggctgcggcccggcccgggcagctgctgctcgcgaggctcccgcgatcccggcctggccgtctcgcccccgcgccttccccccagtccctcctcctgcgctccctgcccgcggggctgcgctccggactccggtccgtctgcccccgtcggcggtcgcggctctccggactcggcgcccgcgcggggccggcgggagcagcgcaggcggccggcggcgggagtcggagccacgcgcccctccgtatcctcggcgctagtccggctggagccgtcgggaccatggtgttggacc

SEQ ID NO: 6646 - DNA, 2300 bp, Homo sapien
tcccacctcctctcctcctccgcctctgcagccagtgggagggtgcagctggcctgagtggggttccagagagctctgatgccggagcttagcaggcctgatctctcttcctgctgaccccagtttctttatttgtagaattctgaactctcactgcttgcaaattcctgaaaggctgagctccagcaaggccccaggaccttggttgctgtgcatgccctctgcacagctaaggattggggctgggggctagtctttgaggcttgagatgctagggctttagcctaaggggccagcccaaggaacactgtcgccaacctgcacaccaaaggctcagtcagtgagtgtttctgagtgagaattcagagccctggatgggggatgccagagagaggcagttgtctgatctgagtctctgtctcaggcccttccgtgttaacaacagccccgttctggtgctccagctacaccaatgaaggcaggaggagaccccgtctgaggggccacctgccctcccaagggccagggctggcttggagctgctttgggaggattgcggtagagctaagggggaacagggaaaataggctgattcaaacctgggcctcaaaagatgaggcttttttttttaaagaagtggtgcctcactctgccacccaggctggagtatagtggcacgatcatagctcactgcagcctccaactcctgggctcaagcaatcctcccacctcagcctcctaaatagctgggactacagaagcatgccaccacccccagctcatttcttaattttgtgtagagatggggtctcactgtgttgcccaggctggtctcaaactcttggcctcaagtgatcatcttgccttgcctccaaaaatgctgagattacaggcacgatccaccctgccaggccccaaagctgagactttctccaactccctggtgctttctccacttagggctgtaagggagaagcagagggcagcactgggcccaaaaacactccattcctgaggctacagatacggggcccagacctccaacaggggacctcagtggggcaaatgcaacatcctgaatttagggtcaaaaaatcaactgctgaagttgcagctggaggagacaaggtagctcctgggggctggaggggccccgggcaagagtgtcacaccctcagccacccaaggcactgccaacctaggctctcttgtcaggaggactgcgcccagcacgagaagtggctgggaatttggttcctgggctccatgtaaagagccatgttttaagagggactttgacaaactggtggtccagaaggggatgaagaggatagtgatgagtttggagatcatgaagtgagactagggctggagagagttgtggaaggagcggggctgtttgccctggaccgaagctgaggagcatggctaatgtctgatcctggagggctgttgggggctgaggaagcacaagtgctcagtgggggcctggggcagaggaggaaccatgaaggaacgtaatgggctaaagggtgtcctcccccaaattcatgtccatttggagcctcagaaaatgaccttgtttggtaaaaacgctctttgcaaggtgaaactagttaaggatcacaagatgaaatcatcctagatttagggtgggccccaaatccaatgactggtgtccttagaggaagaggagaggagggaccacccagagagacagcaaggaaggctgtgtgaagacagaggcagagactggagggatgctgccacgagccgaggaatgccaggagccaccaggaactgggagaggcaaggacggatcctgcccaagaagcttcagagaaagcatagctctgcaaataccttgatttggacttctggcctcctgaactatgaggaaatgcatttctgttgttttaagccacagaatttgtggtaatttgttacacagccttaggaaactgatatagggagaaagcatgggaggaagggttcagatgagcaagaggacttttcctttctctttctttctctttcttttccttccttccttctttcttcctttcttttcttttctttctttcctttctctccctctttcttcttttctttcccctttcttcctttcatttatttccctcccttcttctctccctccctccctctctccctcccttcctctttccctccatcccttcgttcctttctccctctccctctctctctccctcccttcctccttccctcccacccttccttcctccttccttccctccctccctccctccttctctttattt

SEQ ID NO: 6647 - DNA, 2300 bp, Homo sapien
cattctgtagcccatggatcaaagagtgatttctgttttgtagccttattatttaagagataaatttcataaggttatatctgccacagatagtgattcctctgatggatctgggcagattaagttgaaaaccttttggaaaggattcatcattctggatgccattgagaacatttgtgattcatgagagaaggtcagaatatcaacactgatggagtctggtaaatgttgattcccaccctcatggaagactttgaagggttcaagtcttaagtggataaagtaactatagatataatggaaacagcaagagaactagaagtggagcctgaagatgggactgactttttgcagtctcacgataaaacatgaatgagtgaagaattgcttcttatggatgagcaaagaaagtgatttcttgaaatggaatatactcctagtgaagatgctgtgaatatttttgaaatgacaacaaaatttagaatatcacataaacttagttgataaagcagtggcagggtttgagaggactaacttcagttttgaaagaagttctgctgtgagtaaaatgctatcaaacagcatcacatgctacagagaaatattttatgaaaggaagagtcaattgatgcaccaaacttcatggttgtcttatttttagaaattgtcacagccactccagtcttcaaccaccactaccctaatcagtcatcagtcatctacatggaggcaggaccctccaccagcaaaaagattacaattgcattgttatgtttgttcgcatttttttttgcaatgcagcattttaaaattttgtgtacatttttagacataatgctattgcagttaatagattataatatagtgtaaacataacttttatatgctttattgcaatttttgctttatggtggtggtctggaactgaatacacaatatctctgaggtatctctgtatacagttgagagttgcatataaatataagaataaaattatgttttgtactattttataattaagttttctgactttaattctattatgtgctattaagtggtatcaaggaagagagaagagctaggtttttttaagagatacaaaagaaacagcacctttaggagcttttagaccatcttggaagaaaaaaaaataagccaaaaggtttgtaaacaaaaaagcaataatattgtttgaggaccaatgcatacatggtgaaaggagtaaaaataacagaacagacacaattgtgttaaacaaggaagcccttcatgaaggaggtgagtaattagttgggcgttgaattttctgttacaaaagaagggaatgtaagcattagaaaatacgaagacaagcctctaatttacctgttgcatggtgatatggtttggttttgtgtccccacccaaatctcatcttgtagctcccataattcccatgtgttgtgggagggaccctatgggagatgattgaatcatgggggcaggtttttctcatgttctcatgatagtgactggatctcataggatgtgatggttttaaaaatgggagtttctctgcacaaactctgtctttgcctgcttccatccacgtaagatgtgacttgctcctccttgccttctgccatgattgtgaggcctccccagccatgtggaactgtaagtccaatgaacctctttattttgtaaattgcccagtctcgggtatgtctttatcagcagtgtgaaaatggactaatacagtaaattggtaccagaagtggggtgctgccaaaaagatgcccacaaatgtagaagtgactttttttttttttgagatggagtcttgctttgtcaccaggctagagtgcagtggtgcgatctcagctcgctgcaaccttcacctcctgggttcaagcaattcgtgtgcctcagcctcccaagtagctgggattataggcacaggccaccacacccagctaatttttgtatttttagtagacatggggtttcaccatgttggccaggatggtctcgatctcctgacctcgtaatctgcctgccttggcctcccaaaatactgggattacaggcatgagccactgcacccggctggaagtgactttggaactgggtaatagacagaggttggaacagtttggagggctcagaacaagacaggaaaatgtgggacagtttggagctccctagagacttgttgaatgtctttgaacaaaatgctgataatgatatggatgatgaaattcaggctgaggtgctttcagatggagatgaggaacttcttgggaactggagcaaaggtg

SEQ ID NO: 6648 - DNA, 2300 bp, Homo sapien
gtgggaaagtatgtctgttgaaggcttctgattttctattttaaagatgttctgtgtttccacattagcttcctagagaaagattgcaatctctctgtcctaattccaaattcctgggagagggatatgattgccttatcttgagtcaggtccctactattggagcaatcaactgtagtcaggtggcctggttaccttgtctgaggatccaggtctagtttccagaaaaagacatctggttatactgctgtttttgaaatgcaacttgcattgaaggtcaagaaaccattagtgggtagaaactagccttaaaaagagattaaaagtatcagggtgcatagcatgtgatgtgggtaatgttttataaaacttgtttcatttactaaatatatgagtacctgtgtattgagtgataatgtaaaacatatttattttgatggattgtgctcaaaaaagtttgaaaagctctgcgctggacaagctggtaggattctgctacaaagatgtaataaacaacattcttaaagtaatccctctagtaaatgcagaggtatcatgaatttttttaaacagcatctcttaatataagcaaatggcatagtgctaaacatgacttggttcatgcaatgttgccaacggtgaagacaaaatggtacaaacatacagttttttggtggtctggtttaatccagggcaaaacgcagtccagtggttgcttttgtttttagaggcagggctggctatgtcgcccaggctggaacctgtgaatatgttaccttatatgcaaagggcactttacagatgtgattaaggaccttaagatgcgggagattatcctaggagatcttttttaatctcctagagcctggtacctagtaggacgtcattatatggtaggtttcttgcagccctttggtggccaggtagtttttaattttgtagagatgggggcctcccagtgttacccaggctggtcttgaacttctgggttctagcaatcctcctgccttggcctcccaaagtgctgagattatcggtgtgagccactgcgcccggcctagtccagtggtttgaagtttgaagttaccagtcacccattatgaccattttgagttttttgatgaaaaggactggatgaactagttgccaaatgtagcctcccccgaagcaatacaatgaatccacctgccgtatcaagttactggctatcaatcagctaattttagagaacatctgcctcaaataattaggctagtattaggagagttgaatttcttccccacactgctagagagtaggacccaggaccacagaagccattcttagttcaggccagtaaatacattagcatacagctggaccctctgttgcatggggcaggcattcagatggttctcataggtttgtagctaaaacatatccctgagaatcgtcatttgatctgtcaggagtcttctcagcccctgcgtggggacaaacaccctccccccagcattttcccgtctttttaggccagctccccactcactgcagttcaaggcttgcagcccttgctccaactggctggggcttgatgggcttgactccgagtgagaagagtggcctgagcatcaatcacctcagtactgtgatattcctgctacaaagctttattttacgtaacacgtggctgctcctctgtgccccagacggggttttaggtccttctctaaggcgagctgcccttgggcgcgcctggggctgcacctgggtcacgtgggcgccgttgtgcagccggcacctcccggccaaccccgcggcttggagaaggggctttgcacccgccgccgctgtttgtcctcgcgcggcccccgtccactgccctgcggttgctctgcgggctgaaaagtttctcccggtgcagaattccgggctcagcgacagcctgcgccgagtgtgcgcacctgtcggagacccgccagtccgccggccgcggtgagtggtccctggagtcactggctcagggcgggcccgcgggatggggcgggcggcccggggcgcagccggccaggccgttgctatggcaacgcggtggaaaaacgggcctctgggtatctcgctgccggccggctggtaaccccccagcggagggaccgggccgagcccgcggacccctccgagtgtctcctggggcccagccgttggtaccccatttcccccgggtccggtatttggggtggtctctgtctgccccggttcatctccaccgtctcaccttcaccccatcttgggacgtgaaactttttgaaagtttagaagcg

SEQ ID NO: 6649 - DNA, 2300 bp, Homo sapien
attgaaatatatttcttgcattgaccctcctatacggggcatataggtgattatattagtgtggtaggcccctcctcccaactccaaagagttggaaatactatatggaattcaaaggcaggaatacaattcatttcagaaaataccatgactaggaatggaaagccgtcagaactcttttggtctcttctttctgtatatctttttcagccttcctcttcttttcccattttccctgcagcctggctttctacattgcttttggccacatggtgggaaagtatgtctgttgaaggcttctgattttctattttaaagatgttctgtgtttccacattagcttcctagagaaagattgcaatctctctgtcctaattccaaattcctgggagagggatatgattgccttatcttgagtcaggtccctactattggagcaatcaactgtagtcaggtggcctggttaccttgtctgaggatccaggtctagtttccagaaaaagacatctggttatactgctgtttttgaaatgcaacttgcattgaaggtcaagaaaccattagtgggtagaaactagccttaaaaagagattaaaagtatcagggtgcatagcatgtgatgtgggtaatgttttataaaacttgtttcatttactaaatatatgagtacctgtgtattgagtgataatgtaaaacatatttattttgatggattgtgctcaaaaaagtttgaaaagctctgcgctggacaagctggtaggattctgctacaaagatgtaataaacaacattcttaaagtaatccctctagtaaatgcagaggtatcatgaatttttttaaacagcatctcttaatataagcaaatggcatagtgctaaacatgacttggttcatgcaatgttgccaacggtgaagacaaaatggtacaaacatacagttttttggtggtctggtttaatccagggcaaaacgcagtccagtggttgcttttgtttttagaggcagggctggctatgtcgcccaggctggaacctgtgaatatgttaccttatatgcaaagggcactttacagatgtgattaaggaccttaagatgcgggagattatcctaggagatcttttttaatctcctagagcctggtacctagtaggacgtcattatatggtaggtttcttgcagccctttggtggccaggtagtttttaattttgtagagatgggggcctcccagtgttacccaggctggtcttgaacttctgggttctagcaatcctcctgccttggcctcccaaagtgctgagattatcggtgtgagccactgcgcccggcctagtccagtggtttgaagtttgaagttaccagtcacccattatgaccattttgagttttttgatgaaaaggactggatgaactagttgccaaatgtagcctcccccgaagcaatacaatgaatccacctgccgtatcaagttactggctatcaatcagctaattttagagaacatctgcctcaaataattaggctagtattaggagagttgaatttcttccccacactgctagagagtaggacccaggaccacagaagccattcttagttcaggccagtaaatacattagcatacagctggaccctctgttgcatggggcaggcattcagatggttctcataggtttgtagctaaaacatatccctgagaatcgtcatttgatctgtcaggagtcttctcagcccctgcgtggggacaaacaccctccccccagcattttcccgtctttttaggccagctccccactcactgcagttcaaggcttgcagcccttgctccaactggctggggcttgatgggcttgactccgagtgagaagagtggcctgagcatcaatcacctcagtactgtgatattcctgctacaaagctttattttacgtaacacgtggctgctcctctgtgccccagacggggttttaggtccttctctaaggcgagctgcccttgggcgcgcctggggctgcacctgggtcacgtgggcgccgttgtgcagccggcacctcccggccaaccccgcggcttggagaaggggctttgcacccgccgccgctgtttgtcctcgcgcggcccccgtccactgccctgcggttgctctgcgggctgaaaagtttctcccggtgcagaattccgggctcagcgacagcctgcgccgagtgtgcgcacctgtcggagacccgccagtccgccggccgcggtgagtggtccctggagtcactggctcagggcgggcccgcgggatggggcgggc

SEQ ID NO: 6650 - DNA, 2300 bp, Homo sapien
cctctcgctggcttttcctttagacctagccaccagtgttttgaatcatggttttgttttgtttttgcatgcaaaaaccagaacatgacttagaaattaaaaaaaaaaaaatcctactagccaagtgactgcctgcagaggctcttcattaacatttgggctgatcctgcttttgacttattcccataatggcccagttttgaagtcagccaagtccttttgtccttgacaacatcatgcagtggaaatacggtgagttctagattcttatgggacagcatgcagccctagaggaaaaattgacttcttgggtatgctgagaaataagacagtaaaatggcttcagttgatgcaaggggattttagttaaaaattggttcaggatttttaaattttattttattttttggctgggcgcggtggctcacgcctgtaatcccagcactttgggaggctgaggtgggtggatcacctaaggacagcagttcgagaccagcctggccaacatagtgaaaccctgtctctactaaaaatacaaatatcagccaggtgtgatggcacatgcctgtaatcccagctacttgggaggctgaggcaggagaattgcttgaatccgggaggtggaggttgcagtgagctgagatcatgccattgcattccagcctgggcaacagaacgagactccgtctcaaaaaaaaaaaaattggttcaggatgaacttgcagagcactcttccacagaacatggttaggttagccctgcctgacttctagcaattgctaactatacaccttgcctgcctctaggacccctacctgagtggcaaccataccttccatatgctctgttccatggcagtccctgccatcccccaccagcggactctggctccctccctgtacccatttctagcaacagctccttgcctggctgctaagacggaggcgcctccttgtttgttcctgggctctgttctgctccctctctcactccatggagtcacttatagtcttcctttctgaacgccagaattgagcctttgctccttctggatcaccccttcctgggcttcttctccatccctcagtactgctaaaattgccctgctcctttagtccatttccatgacctcagccctctctctcctctccttgtcttttaactttctcctggacttcttcctctccccagcatgaacccagagcctatcacacactgatgtttttgtcagcatcctgaactttctcatgcccttcaactttatttatttatttatttatttattttttattttttgagagagagagtctcactctgtcatgcaggctggagtgcagtggtatgatgtcggctcattgcaacctctgccttctgggctcaggtgatcctcccatctcagcctcctgagtagctgggactacaggtgcatgccaccatgcctggctaatttttctactttaggtagagatggagtttcgccatgttgctcaagctggtatcaacactcctgggctcaagcagtctgcttcccttggcctcccaaagtgctgggattacaggcgtgagccactgcgccaggcgtatccccttcaattttgctgaaactatcagccattctccattttcggcatcatcatatttgctgcttccacctcctgggctgctatgcatgacagattcacagttggcagcctcagttgagctctcagtgttgactggaaattctttaacttgttgtgatccctttttttttccccacccatgcctccatctttgtcctccacaaatgactgagctcactgtctacttcacagaagacagcccctaaagcaagagcttccttgcctgctgttcctctctcccctctcattcatctgtgtctgtaactctccccaacccctccattcttgctcctatttaattctctatatcttgaatcctgttgtatgtcctccaagactgctccctcgcttactccactgctcccactccctggagtctccagcctctgtctccactggttacctccacacagcctgcaaacaagttctccacaagattaaaacagcatttctcagagtctgttaccccttacacattttccttgttaaccaagttacttttaaaaagatcctttttaaactgattcttcctcagctgttcttcagccctctatactttttcataaaagtcaccagtgactgcccagttgccaaatagaatgaatacctttcagtgctcagctgtcttgacctctccgcagcatttcacaccacccaccaaccctcagtgaaacaacc

SEQ ID NO: 6651 - DNA, 2300 bp, Homo sapien
acctcctgtcatttctctatatgttgtagccttacaagactttccaaagagacctcacactttcatatctataattctccatttatgatgttctttcctcctgaaatgccttttcttgcttgaaacatcctacacaaacttgaaggtccagctcagatgtgacccagttatcagaattagagttcacaaagatggacgtgggcttggaacaagcaaaatccccgtaatcagaattaaactccaaagggtgaggctagcacaatttaaggagctgttgctttaggccagatgtcataaactttctgcacaaggctagatagtaaatattttaggctttgtgggtcatacagtctctgttacaactacttagctctaccattgtagcagaaaagcagaaggcagccatagacaatatggaaatgaatgggcattactgtattctttatttacaagaacaggcagtctgtggttttctgacccctgttttaggttctgtctggggaaattgggtggtttgaatctgtaggtgacaccaagtaggaatagctgtagaggaaccaggcagagtcagaaaaatgtgcaagggactcccaggtagggaatagtgttaggatgaggcacacgcaggggaggggaaggcaaatattagaaacaggagggagttaattttggctggagtatgggatgcttgaaggagagaagtggggattctgttcagaaaggaaatttagggccaaattgtgaaggatcttgattaagctattctgtggacagtggggagccattgaaggtttttgatcagtggaatatggtcacatatcctgaggtcaggagttcaacaccagcctgggcaacatagtaaggccctgtctctacaaaaaatagaaaataaaaaataaattagctggttgcacgcctgtagtcccagctgcttgggaggccgaggcaggaggatcacttgagcccaggaggttgaggctgcagtgagccatgatcatgccaccacactccagcctgggtgacagaatgaaacactgtctcaaaacaaacaaagacaaacaaacaagaaaaaaacaaattcagttggcccagtgagaagaatgattggaggagacaggactggatacaggaagacctgctggacaaccgcagctgtccaggccattggttcctgattgctgggccttgaaccagtgctggtctgaatgcctaagaattgtttgtgatgcttgctaaaaatacagattcccagtcccacacccacacacaagagatttgggtttggtagattcaggatttctaacaagctctccagattggggcatcactggtccaggcaaggcagaatgaggcctgatattaagagggcaaggatgccagagaaaggaaggtatagataacatgagatttggccactgctctcttcctcctgttacctacctctgttcatgacagcccctccacttgattccttgttcttcacacaccaccactagccccaacatcctaatttgcttgtgtcctgtcagttctctttgaaatgagtcttcttttgcttttttccatttttacccttatttagggtcccattaatgctcaactaccctgacctccctgtgttcagtccatcaagataatcataaagcccagctcagtcactctccagaaactttttgggctgccttttattttaggatgaaggtcaagctcctgagcttagcattcaggtcccttcaggagcttactctccttccggtctttccaagcacatccctgccactccccctcatctggttgctctgtgcttttgaaattatgctgtacttgtagtcttgccccatcctaatgtctcctccagtcaaccctgttcattcttccctttttccctccctgcttgtgtgtgactggatcttcctggtgggtagagttaactgccaagggagacctcccaggacctttgtgcatcgtaaatgtgtgtcttctccatccgaagtcctaatcctctgcttgtgacggacaattggtcactatggcaactgactgtgacgtcacaggataaggacttcaggtgaagtggcaggagcaggtgagtatgtaggagacagatttcaatgtctgttgaaggcccccccacaccctccttcagtgccgggggcatggagggatatcttgggctcctgctgttttttaaaatgatgcggtgagagtgtgtgcctggcatctgcgtgctgcagcagtgtggggctgacagagtgtgtcaacttgagctctggctgtgcaggcaccgctgctgcgtgagc

SEQ ID NO: 6652 - DNA, 2300 bp, Homo sapien
taccaccacacaatctagtataacccttatgtaatttattgacctacgtttgtcttccctactagacctaattccttatgtggtcaaggactgttttttttaatccacactcaactagtgattgttgagtgaataaatgaacttaccctcacctccctgtcttcgctaatagcagcatgtcttcgctcttaagtcggttccttcaaccagtgttcaagatcccatcccctcgctagtctattaatagatcccatgggaaaaatgaaataaatttttaaaatcccatcccctcagttattctctgtgtgtatgtgtgagcgtgtatttatttatttttctttgtcttgcccccttcagctaaaatatattttagctaaaatatccaaaattctggccgggcgtggtggcttacttctgtaatcccagcactttggaaggccgaggcgggcggatcacgaggtcaggagatcgagaccatcctggctaacacggtgaaaccccgtctctactaaaaatacaaaaaattagatgggcgtggtggtgggcgcctgtagtcccagctactcgggaggctgaggcaggagaatggcgtgaacccgggaggcggagcttgtagtgaaccgagatcgcgccactgcactgcagcctgggcgacagaacgagactccgtctcaaaaaaaaaaaaaaaaattccaaaattctcccatgtccttgcccttacagccaagctccccaaaagagtagtctacaaatcctgcccatttgcaccttcccatccattgttcactgcggtctagctcacagcctgtgacttcagtgaaattgctcttactaatgtcattaatgaacgaattgccaaattggactcttcctattcttcatatcacttgttctttctgttgtactttaatctgttggcgtctttttctagaaaaagtcttgccttcctcctactctttggtcacttttcagtcttcttttcaggttcttccatccagcgttgtccaccatttgaatgttgatgttcctcagccttctgtccttgtccttatcttttcacagtacatggtcttcttgggtggcttcaattcacatccttattgctgagctccacacccatatggtcacttaattactggttagtattccttggacattctacagacaaagtaaacatatccaaagaactcaatctgcactgctcactggtgccttctcctttattctctgtcttggtgagtggcaccattgtccacctagataatgaaaattgtccccaagccttctcttcttctactacactgtcaccctatccttttgtttctgtatctccccaatgtgcttcctctgtttaagccttagtgccctgccttcattcaggcccccatcatatctcttaactggagtttacaacaccttcctttgttcactctgcctgcattctaaccctcctccaatttctgtatccttcacacctccaccacgttagtattccgaaaacatgactttcattcttttacttgatcaaaaagttcggtagctccttatgaccaacagaatatagcccacttgcctttccagccttaccccagcctctcccttacacaagctttctactgcagccgtgcctggtatatcccatttgcatttttgcctttgctcatgctgtttcccatcccggagtgcccatcctcttcctgaccacatgtcctgaatcttcctcaacctttaaggccaactttatattctgcttcttcccagaacacttcagtccacaaggataacaaccaacattttcagagcacttggcaatttacaaaatacatctgcctgaaggtacagcactaccagcctcattttacgtgtgtgaaaactgaagcacagaagaattgggtgacttgtcagacgctgcataggtggtcaggtacagagcctgggcctagcctttagtcttctctctccagatcccctgcttttacctcagtgaccagtccctctctgaccttacagcattatggtcttcatccctccatcaaccttaatcacatactgcatgtgaccagcaggaagaggggtcttgagaataggaggggagatcaaagaagacatcgtcgtctatttgacatcaaaactggccagtaagtgcacaagaaatgagctgggttacctggaacctaaccttgggaagatgatctgtcaatggaggtaagctgggcagggccttgggaatgaaagggaaccatcagtggtattagagctggggcctacaataaggaccaccactgcaaggggttgaggta

SEQ ID NO: 6653 - DNA, 2300 bp, Homo sapien
attaagtgaccatatgggtgtggagctcagcaataaggatgtgaattgaagccacccaagaagaccatgtactgtgaaaagataaggacaaggacagaaggctgaggaacatcaacattcaaatggtggacaacgctggatggaagaacctgaaaagaagactgaaaagtgaccaaagagtaggaggaaggcaagactttttctagaaaaagacgccaacagattaaagtacaacagaaagaacaagtgatatgaagaataggaagagtccaatttggcaattcgttcattaatgacattagtaagagcaatttcactgaagtcacaggctgtgagctagaccgcagtgaacaatggatgggaaggtgcaaatgggcaggatttgtagactactcttttggggagcttggctgtaagggcaaggacatgggagaattttggaatttttttttttttttttgagacggagtctcgttctgtcgcccaggctgcagtgcagtggcgcgatctcggttcactacaagctccgcctcccgggttcacgccattctcctgcctcagcctcccgagtagctgggactacaggcgcccaccaccacgcccatctaattttttgtatttttagtagagacggggtttcaccgtgttagccaggatggtctcgatctcctgacctcgtgatccgcccgcctcggccttccaaagtgctgggattacagaagtaagccaccacgcccggccagaattttggatattttagctaaaatatattttagctgaagggggcaagacaaagaaaaataaataaatacacgctcacacatacacacagagaataactgaggggatgggattttaaaaatttatttcatttttcccatgggatctattaatagactagcgaggggatgggatcttgaacactggttgaaggaaccgacttaagagcgaagacatgctgctattagcgaagacagggaggtgagggtaagttcatttattcactcaacaatcactagttgagtgtggattaaaaaaaacagtccttgaccacataaggaattaggtctagtagggaagacaaacgtaggtcaataaattacataagggttatactagattgtgtggtggtacaggtggggaagcgagcaactgtctgcattgtgtccaggaaagggtcacaggcgtgttatgtagattctggagaaaattcaaaaatagcatttatttttacttatttacttttgtatgtggagacgagggtctcactatgttgcccaggctggtgttgaactactcgcctcaagaaatcctcccgcctcgacctcccaaagtgttgggactacaggtgtgagccaccgcgcctggcctaaatgtggcatttagaaaaagtatttacaacatctgcattaaaaggaccataaagcaaccaggcatctaagtccctgaagcaatttaagttgctcaaacttgagaggacaaccaaatgatagcaaaagggcaaaagagaaaggaagctgcagtgcccactcagaagtgtgagagcgggagaaggcatttcgggagccgcccgagcttcaggaaaccgagcgagacaccaggtgggcacactgaggattaaagagggcctcgcggttccgcactgcggccgggagacaaaccagtagccactatcaccagccccgggcagaccactaagaactgtggaggtgcgcggggcggctcagggctggcgcatttggtgaggagctcagacaacgaggcccttagggtcggcttaggcggttccctgaccaaggcgccagaaaagggcctggctcaagcaagcacgggcggcgtgcagtacagcacacctagccccgattcttcaacagttctcgccctccgagcctagcacaacgagcctcaccgaaaccgtacaccgccaccaggacactccgtgatgggggatcaccaccctcagaaagaggaagcgactagcaggcgcgcaatcccgcgagaccaggaggccccgcccgaagcccggcctctgtgaccggaagtgaggcgttttgccccgcccccgtggccgatacctcgcgagacttggcgaaggccttcctttttcgtctgggctgccaacatggtaggtgtttcgtttcttgcctcctcttccttgccggcggagacccctaagctgtattcccattgcccctagtcatccactccctaccatggtcggggcttccaggctgcgcatggccgcctgcggggcagggtggccggcgcgggcccggggcggggctcccggagccgtgtgt

SEQ ID NO: 6654 - DNA, 2300 bp, Homo sapien
tggcttaatctaatccacttatataatctgtacttcccagttacctaccagacattgatattcttcctgtggtagaattatcataggtagttccctatccgtagcagtgcctactgtcactgcccaggttgtatcaggtttgcatttcgtgcttgaactatagctggttttcactgagcacagctcttggcccttcatgttctccagataatagaatcctaatatgttccattgatactcagtgccatgcattatctgaagagattttcccccaaaacagatgtattatgtctgtccttgcgggggttctggtccctgtgtcagtcttaactctcatgaatatagaggtagtgttaagaggccagaaccctagggacgctttaaattcacttcccagcctatttaatgtccattgagtagttctggtggtcaggaaggtggttgtcttcttttgcttagcagggggtatttgagcaggaggaggcttatgctttgccgagactagagtcacatcctgacacaactcttgtcctggtgtgctagagtactcgaagagaatctactggtcttgattcactggtgggggcagtcggtgcccccgttagtgcccagatcagaaacatacataccctgcctagggatttagaaagtgggttggcagtctttcctcacgcccatcacgcagttggtacctactacagtgtattgtaaacttttttctctgttcttctagggctactacaaagttctgggaaagggaaagctcccaaagcagcctgtcatcgtgaaggccaaattcttcagcagaagagctgaggagaagattaagagtgttgggggggcctgtgtcctggtggcttgaagccacatggagggagtttcattaaatgctaactactttttccttgtggtgtgagtgtaggttcttcagtggcacctctacatcctgtgtgcattgggagcccaggttctagtacttagggtatgaagacatggggtcctctcctgacttccctcaaatatatggtaaacgtaagaccaacacagacgttggccagttaaacatttctgtttataaagtcagaataatacctgttgatcactgaaaggcctgcatgtattgtactctgaattttacagtgaatgagagaatgtaccctaattgttcaacagggctcaaaaggaaagattccattttgatgggtcacattctaaagaggggcagtgtgataggaatgagatggtcctttaggacttaagttctcagcccaaggtttttccacgtggccccctcatcttttttttttttttaaacggagtctctcttgccaggctggagtgcagtggcacgatctcggctcactgcagcctccgcctcccaggttaagcgattctcctgcctcagcttcctgactaactgggattacaggcgcccaccaccatgcccagctaatttttgtattttcagtagagatggggtttcaccatgttggccatgctggtctctaactcctaacctcaagtgatctgcccacatcggcctccaaaagttctgggattatagtgtgagccactgcgcccggccatggctccttaatcttgatccaaattattgttacatccagaatgtgatgaatcaaaatctcgagatgggggtccagcaatctgaaatttcagtatgccagggcttttctgtatgtcaaagtgggtttgaaatagttaatttttcttctagtctgaaatgtatcgggaaaatttggaaatcctgaaggctggaaattgaaataagtttttctaggatttgtgtctcttgctattggaaaactgatggtgaccaattcatgtttacaaataagatcctcatagatctcggtaaattataatttgctacagttttatggttcttcctgtgattttgagctttttttgacccaaaataatacagtctaaaactatagacaaataagatggcacttagactcctgggttttagttagtggaggtttccttagtgcactgtggggtcataataagccgagaaccatggctgtctatgggacacatctgtcaggacaacctttagaggatgttggggatcaaatagaaggcacagagaagcactgaattggcttacataagaataggctagaattacaagtagtgaaacctcgattcagctggacaattttaaacaaatgtatcatttggcttgtatcttctgttgtgctggagaagttagaaataagggctctccagaccagcctgaccaacctggagaaaccttgtctctactaaataca

SEQ ID NO: 6655 - DNA, 2300 bp, Homo sapien
gcccagaggggctggattcttcctttaagaggatttgtgtgacacctttgggctctgataatccccttttagaagagtgcaaagcagaaattctcggtgatgccttttgtcccttatttcatcatccaagctgggaaaggttgagacctctggcttctccagctgggcttgctgagggccaggccttcagggaagagggtccacctcttcgtccctctccaagggtcatgtggactgtcccaagaaagctgtgtgggcaggaatgcaggtagaaatttgcagtctgccaggctccctgtctcccattcatgcccctgctgaatctcccattcagccttagctcctttagctctgtcctccctaggatgttctgcacaccatttcccagcctaccgtctcctccaactctgagccattcctttgatacttatttgctctcagctggttcagtttagtggtccaggactcagggtccacttgtctctgtacatctccatcccctggtcccctgtccacctggagagatgactgggagaatctatttgagacagctcctccggggcagtcaggaatggtccaggaagctgagagatgagttagggcagtgaagggaccaagctgaggctggggaggcagcgtgtgggctgcagccagccgtctatttgctggagaactgattagtggctttgttacattagacaggatgttaaacattgctggagaagagaggctggcacaaggggctggggaggagcaggccttcctgaaattgagtttccagagacaggacctatcttgagaacctgatgttgctggctgttttcccctgggttgtcagtgatgtgcaccaggcttgtacatctattacttccctgggcctcagtatcctatgtctttttcttggagctttggattttgtatcaatattcaaagctcttactgtagggaaaagaaggaaggaaggagggagtgaggtgaaggagggaaggatggaaaaaaaagagggctagtcttgggactcatgtcacactcagaagccattggaagtttagaaagctctatctaaagcagtggttctcagttgggggacaacttcactcttccctccctccattcctgcctccctccctctctctccctccttccctctgtccgtcccagagagcatctggcagtgtctggagacatttttggctgttatagctaaggagatgctaatgtctcctggtggatagaagccaaggttgccactaaacatcctaaaaatggacaggacagtctaccacaacaagaattattcaaccccaaatgtcagtggcttggagaaacccctgggattgggacaaggcttcctataggttggggatgacaataaaggccctggctgatcatgcagtccaaggcagtttcgatttgttgagcttggcataaatgttctccctgccgtgatgtggacagtgatgctctggtcctgttttaggggatcagaagactgtgtcctggcattctcccttcttagttcccccacctcctcactcctgcagggcatatgttggggaaggatcaagaagtagagaatccatccccaacacctccctaagtgccccacagtggggtaggctggagaaaacatgcagggggtgccgggtttgctatttggcttcttgcgacagggctgctgggccagctccgcttagtcagggctctggaatggagacaagtcattttaatagcatgactgtgttacaggaaaaggtctgttccattgctggggactctgcttggagttgggaatcacttaatccagtcccaaatcccagtgacccatctttgactcataagtttacagagatttatattgctcccactgcagtctatttagctgtcactgaaatccctccttcacacccacaccctaactctgttagagcatttcctaaattcgttgtggttctgcataagtagatgccacaatgtggagggagctccactttggaaatggaggaatctgcaagcatatagggattggctcttctcccgtgtcctctctaggaaagcttcactctcagcagcctttgttcctcgtcctccagctccttcttctgcctgcttcctgaggagtggggtctgagttcctctggggcgtaaggcacattcagacatctgtagaacaagtgtgggactcagtggcacccaggctcaatcctgctgctgagcagaggtgctggagtgagtcctgctctgcagcaggaaaatagggaaaggggtgcagagagggctgtgttctgagttccccaggg

SEQ ID NO: 6656 - DNA, 2300 bp, Homo sapien
cttgagagtgctttcacggacagcatctcttccgatgctcagtcccagccctgtcagtaggctctgtaggtggaaagggggaagtcatgggacttgcccaatggcacatggcccgttagtggtggagtcaggcactgccaaggtcttctgacccctggtgctgttgcaaccactgtgcttaatgtactcaagagacttgaaaggcttggggattgtttctagattttatttcctggttccatgacctggggcaagtaattttacttctgttgtagaattaaaaaaaaaaaatctgttaaattagtataataatgccaatcctaactttcagacctgtcatgttgaacagacgagccaagattttgagagtcgtttagaaaagtgcaaggtcacatatagctgtagggtagggctttttctccgagctgtgcatcaggacgttttacatcttagagatgctgtcttaaggtctttaggctgaaaggatggtagtcagcctatctcgccacaacttacaaggattctccaccttcccttgggagcccagcgttatctcataaccagttatcaaaaagttgacagtttttgaaatcaggtggcaatatactttagttgaaagtgtgctggactagggcgaacttggctgatctcttagttctttgactgcctaactgtataagtgcagatcaaatgtttaatctctctgagtctcagtttttccatctataaaatggtcataaggccagtatgctggctcacgcctgtaatcccagcactttgagaggctgaggcaggaggattgcgtgaagccaggagttcaaaaccagcctgggcaacatagtgagaccctgtctctataaaaataaaaattaaaaaagtagccaggcgtggtggtgcatgcctgtagtcccagctacttcagaggctgaggcaggagggttgtttgagcccaggagtttgatgatgtagtgagctatgattgcaccaatgcattccagcttgggcaatggagcaagatcctgtctctaaaagaaatttaagaagaataataaataaacttgaaaaaatggtcataaaaatatctgtgcagtgtatttcaaaaggttatgaggatcaaacaaaatgatacatgtaaaaagaatgttacaaagcagaaatgtatgctgggtaggggggagaggaagggacaggatggggatggggatgggactaaacttagggggtctgccgtgtcccagggactgtgctcattttctgacaggagcaatattattaccgactgtgacagcagctcccactaagcctgcaccttagctgcagatccttagcagggcagagagacaaggctgtatttgtatcaggtttgtcgtctgggttgtgactctcgacttgcccaggattcttcctggtcctgaccgagttgtctttgctctccatttcaggaagatgagagactgcttaggcgccaccactagtaccatgagtccctgcactggttaaagccatcgccacaacctggacaggcagcaaggtaagcagagaggccagtccaggcgagctcctgggatgtgagtgcatttccgccccaactgctgcccggaaaaatcccaagtgcacaaacaagtcaaggcagcgcatcagggtccctcctacccgagctccaggacccagaggaagctgggtccccttcaagcgcttcagctagctccctcccccctggcagggattcttccaagttataaaaaatgagacactggaggggaagaaaacaagtccactcactgtcttctcccttctcccctctgagctgttcaagcaagttcccaggagcagttcagagcccctgttggactggaagggaggtaggaggagtggaatgcatgcaaaaaccgagctgatcaaaagacagtgctgtttcatggaagcctcccagaactgagagagagagagagagagagagagagagagagacagtgagaaagaaagaaaaagagagcgcccttgtgcacgcgctaggccaagagcgcgccgctgtgcgcgcgcccgcctagcgaggacagggtctccatgacaaccggcctggccggctagcagtgctctgctcacttggctgcgaggagcgccacgaaaggtcagaggaaggagctgtgggaagctcgcagcaggtatcggagcttaagccagtggatttgggggccctgggctccctagccggctgcggtgtgagaatggagtgggcaggaaagcagcgggactttcaggtaagggcagctccgggctgggatcatttggcctccttt

SEQ ID NO: 6657 - DNA, 2300 bp, Homo sapien
atgatactgcatttgcccttctgtcttgtctttctttgtctttctttgtagacttgggattcttcagctggggcttgggtggggttggggatttatagtgggtgattaggttcactccctttcaagctctgattgcttcactaaagcagtagtgccccccatttaggatttgtgccattctgtcatttcctgttggattttataacactttcctaccttaacttctggtatatatttaccttttaaactcaagtcaatcagaatcttgttttgagaatgttgtgatatgctggaaattaatgaaaaaaacccactagattctgcataggatgttgcattaaagattctatcaggctgggtgtggtagtacacacctataatcccagctactcaggagtctgaggtgggaggattgcttgagctcaggagttcaagaccagcctgggcaacataataagacctcgtgtcaataaataaataaataaataacatcaggaccttttttttgggagcactgtttttgggagcagcattggaaaatatcctccttaagcctcagtgtcctcatcctggggagggtattaactgtcccagtgttttttgtttgtttttggtgaggagttgtcaagaggagtaaagttcttagttcagttcctgacttgagagtgctttcacggacagcatctcttccgatgctcagtcccagccctgtcagtaggctctgtaggtggaaagggggaagtcatgggacttgcccaatggcacatggcccgttagtggtggagtcaggcactgccaaggtcttctgacccctggtgctgttgcaaccactgtgcttaatgtactcaagagacttgaaaggcttggggattgtttctagattttatttcctggttccatgacctggggcaagtaattttacttctgttgtagaattaaaaaaaaaaaatctgttaaattagtataataatgccaatcctaactttcagacctgtcatgttgaacagacgagccaagattttgagagtcgtttagaaaagtgcaaggtcacatatagctgtagggtagggctttttctccgagctgtgcatcaggacgttttacatcttagagatgctgtcttaaggtctttaggctgaaaggatggtagtcagcctatctcgccacaacttacaaggattctccaccttcccttgggagcccagcgttatctcataaccagttatcaaaaagttgacagtttttgaaatcaggtggcaatatactttagttgaaagtgtgctggactagggcgaacttggctgatctcttagttctttgactgcctaactgtataagtgcagatcaaatgtttaatctctctgagtctcagtttttccatctataaaatggtcataaggccagtatgctggctcacgcctgtaatcccagcactttgagaggctgaggcaggaggattgcgtgaagccaggagttcaaaaccagcctgggcaacatagtgagaccctgtctctataaaaataaaaattaaaaaagtagccaggcgtggtggtgcatgcctgtagtcccagctacttcagaggctgaggcaggagggttgtttgagcccaggagtttgatgatgtagtgagctatgattgcaccaatgcattccagcttgggcaatggagcaagatcctgtctctaaaagaaatttaagaagaataataaataaacttgaaaaaatggtcataaaaatatctgtgcagtgtatttcaaaaggttatgaggatcaaacaaaatgatacatgtaaaaagaatgttacaaagcagaaatgtatgctgggtaggggggagaggaagggacaggatggggatggggatgggactaaacttagggggtctgccgtgtcccagggactgtgctcattttctgacaggagcaatattattaccgactgtgacagcagctcccactaagcctgcaccttagctgcagatccttagcagggcagagagacaaggctgtatttgtatcaggtttgtcgtctgggttgtgactctcgacttgcccaggattcttcctggtcctgaccgagttgtctttgctctccatttcaggaagatgagagactgcttaggcgccaccactagtaccatgagtccctgcactggttaaagccatcgccacaacctggacaggcagcaaggtaagcagagaggccagtccaggcgagctcctgggatgtgagtgcatttccgccccaactgctgcccggaaaaatcccaagtgcacaaacaagtcaaggcagcgcatcagg

SEQ ID NO: 6658 - DNA, 2300 bp, Homo sapien
actatatttagacaatttaagggatgttaacttttctttctgagagagcagatctaatgaagtttttttcctaagaattaaaacagttccatgcataacttacaatggaattggccaacaaaaagaacaagtatttatatctaattattgccctcttacattgcttcagcacatataagaggcagcagcagcagctgccaatgatgaaaataattattgtcctgggtctgattagagaaaatcttgatgctgtctgttgagttgtctttccttagagatgttacaagaaaaacgggactttagtagtagaggttctaatagttttgaaagtgggagacttaagaacctccttacagagctcagagagctgcaggtagaatttacctggaggctggctaaattctgtggcttgcctttacattcatgagttctcttgttccacgtttggggcagaaccatcctaatttgagattggagagattggaaaagactggagagggctaagttcatccaaatatggcccaggtctcctgaggtgttcaagcacttcagtgaactagagtagaaactcacttagattgtgagtttggagaaaaacttgttctgattaaagtaaaactgttctgatttttggagtaaaacctgtgctgatttttggcctttgtgttttcaatgtgcctcaacaacagctgaaatcttgggctttcctaatgtagaagcaactcaacgaggaattgatttatttttcatgcgcagactgcatcacaccgcatataaggccttctgctagaaaggccaaactgtcctttggcctcagtattttggagacaaagagttaatactagtaattcctgtgtaatatccttttttggcaaaggaacagtagactttatcagtttggttcttgccattacttgtgttcgatcttgaccaagttaaattatttccaggatgtatctttttttttctttttttttttttttttagacggagtctcactctgttgcccaggctggaatgcagtggtgcgatcttggcttactgcaatctctgcctcctgggttcaagggattctcctgcctcaaggctccctagtagctgagattacaggcgcctgccaccactcctgctaactttcgtatttttagtagagatggggtttcaccatgttggccaggctggtcttgaactcttgacctgaagtgatccgcccaccttggcctccaaagtgctgggattacaggcctgagccaccgcgcccggcctcaggatgtatcttaaactcattatttttgatgcttgccctgcagctgagtaaatacctctttaggatatgtgacaattgaactggcttggattttggaacatgtcctggccttggagcctgcttatgttcatacacactggttccttagaaatgtaaatttgtaaagtcaatgtaaaactgaaacttcaaaagtcaattttcattgctgctgttgtgcatttctattatcaaattttatttacagtgatttacgtgagtaaaaaatggattacacgatttcctaacatctcactaagtatgggtttggatcttaagtaatttacatttttcttttccaagttgattgttatactgggctaatgatttccttcaaattccactaataaatcacagattctcagtgctgttattccattgctttattattaaatggcacccttttctagtttttgtttttgcaaaccagtggagtatttaaagtaaaatttcagaatcccttttggagctttcggttgagaccaggctccttggaaccctagtgctttgggagttctgctgctgctgcagtaccaaaagtagcttctttgaatttcatttgggttttgtagggctcccccgaggcccgagaactgggagaagggaaagagctcatcggtttgtttgaaggccggcgggcggtgcaggcagcttttcccagactctcccagctccggcttttcacgcataccagaagagccgcttttttcctccagtgattgaaaccatctggactccaggggggtcacgtgtgtatgagaaaatgacataaagtttcagaccccgttgtgctttgctccagacccagacaactcttggtcggatggtgaggaggtgagggccgtccagtttgggggccaacttctcctccctgctgcccccggcccccgcctccctcacccctgtcccccaccctccctcgcacactctcggcgcggctttctcgctgcctccggcgcctccgagcgctcccctccgccgggctccagcagcccac

SEQ ID NO: 6659 - DNA, 2300 bp, Homo sapien
acactacagatacagtcccttccctcaagaagctcagtctaaagaagttagtactattggaatccccagatatagagatgaggaaaagtgaggctcaaagaagtaatatgtttgcccagaaccacagagcaaaaaagtggcagagagcctgggcaacatagggagaccctgtctctacgaaacatttaaaaaatttgcagggcgtggtggctgaagaagaggatcgcttgagcccaggaggtcgaggctgcagtgagccgagatcgtgccactgcacttcagcctggctgacagggtgataccctcgtttctttattaaacaaaaaagaagaagaaggaagaaggaagaagaggaagaagaggaagaggaaggaggaggaggaggaagaaggagaaggagaaggagaaggagaagaaatggaaaaaaaaagatggcagagccagaattcaaaccagctctcccgagtggatatacaggaccccatgcacgtacaaccactatgttctaaaggaggcacttgataaacccttattgaaggaaatgttttggaataccaataaaatgaaaaaaaaatcatctcaagaataatgtagggtttcactcactgttattcttttttataaggggaaagcaggaaatttgcaaaagttaagtagcatagaaggaggtcgtattggtcggctactactcacctggtacctgataattgctcatcaagccatctgttgagactaggtgaggatggagtttctctcctttttcatgaaccacagaggagacttaaaggaggatttatttgtgttccttaaagtgacccccactgagcgtgtccctcaaagtggaccttcctaagcatcggcgctttgctttgcgctgggtggtgcggctgagtcactaattagcagtgagagcctgggctgtatctcctaccaaataaccagcggagtggagtgacaggtccttacttaaacatggtttaagtaagcattcacagttccttacttaaacatggtgcagtcttcctaaaagatggagtcagaccccaagagaacaggtctccaaaaatatgtgaatccgtacttcccactggaggggagagagagctgcgctgagggattatgagagaccctacaacttctcaggcgccccctgccccgggggccaggaacatctgcagacagccccgcctccgtctcgcctcaatcccgagctgttcccttctccaaaggccaccttggcagccacacagtttggcctaatcacctcctcaaacaagagtagcgacaccccaaaatgtagaccaagcagaaagaggcgcgggaggcacttgccttattccccatgatgtttttgttttgagacgaagtcttcctctgtcgcccaggctggagtgcagtggcgcgatctcgtctcactgcaacctccgcttcccgggttcaagcgatcctcccacctcgaccctcccgagtacctgggactacagatgcgcgccaccactcctcctactgtgtgtgtgtgtggacacgggttgtcgctatgttgcctacctagctggtaccccataaccactcctggctagtgtgtgtgtgtgtgtgtggacacgggttgtcgctatgttgcctacctagctggtaccccataaccactcctggctagtgtgtgtgtgtgtgtgtgtgtgtgtgtctacacgggttctcgctatgttgcctacctagctggtaccccataattttttagctcaacaggagacctgcctttatacccaccaagttaagcagcgcagtagccctctaagggccagccccacgcccagaggctcctctgacagcgtggacagatgccctgggctgctggctcgactcagtcctcagcccccagcccccgacccccgacccccggcccccgacccccgacccccggcccccagcgcccggcgccccgcctccagcgctcagcagttaaccaggcaactcgcgcgcagacgccaaggctgggacgcagaaggcgtgtttggccgcccagccgccccgcctcccccacttctcccgcctctcccgcctctcccgccttccgccaatggcccagctgcgccggcgccgccgggagcgctaggcctggtccctcttcctagaatagcgttgcgcgcatgcgccttgacgagtgagccgggtgagggggctccctaagtagcggaaggggtagatgaaaatggaaggggcgggcgcgctaggcctagtcctggctgggctcccgctggagtgtgcgttgggggcggaccaggagcggtggtctccaggga

SEQ ID NO: 6660 - DNA, 2300 bp, Homo sapien
aaaaaaaaaattagctgggcgtggtggtgggcgcctgtagtcccagctactagggaggctgaggcaggagaatggtgtgaacccaggagggagagcttgcagtgagccgagatcacaccactgcactccagcctgtgccacagagcaagcctctgtctcaaaaaaaaaaaaaaaaaaaaagttaaaaaaaacccctaatatttaacttatttgctatgaaattcggcaaataagctattttccccccactagactgaaagatcactgagggcagaagaccttttctgacttttcattgctatattgtcagctacagggttaggcattcaataaacatttattgggtgaattctaacttggatttaccccctggtttaagtccttgactgattacaatctgaccgtgaaggctgggcaggagaaacaggtagtgtccagattctccgtaaattccagaaagatccaaatgtggtccatcagcaggtgatggggcatagttttggttcacaccaacttaccccacactgacttgaagtatagtccatgaattcagccattgttctgaaggaagcactaagggttgggggtctctcttctctctatttgaataaatggcacgtcacaggttagctctaggattccctactggagaatgaagccattttggaaatagtctcctttttacttttggaaaggctctgcaagtttatgtcagaaagaacgatgttattgagaaagaattccaactctaaaagatagacatgcaatttatccaggatctaagagacaggcttgcaggctttcctctactatcagatgatagctgtaagattttttttttttttttttttttgagacggaggtttcgctcttgttgcccaggctggagtgcaatggcgcgatctcggctcaccgcgacctccgcctcccgggttcaagcgattctcctgcctcagcctccctagtacctgggattacagacatgcgccaccacgcccggctaattttgtatttttagtagagacgggatttctccatgttggtcaggctgctttcgaactcccgacctcaggtgatccgcccgcctcggcctcccaaagtgctgggattgcaggcatgagccaccgcgcccggctaatttttttttttttttttaagtaaccaaccagggctgaacactaccgttattctacagctacccaacaagaatctgtcaaatgtaaagcgttttgaaaggacttttccattcattgttctgatcctttccagcttccgctaagggaaggtttcctcagctgcttctgcgctgcgcacccctggctcccagcgggctaccgcggcgcgaaggactggggcggcccccggcacagcgaccctcacctctcccgggagaacgcgctgcgggccggctgccggctgtttctctaggtggggcgcctcccgggcaaggacccccatgcagcctttgggacgctccagggcatgccagtccaccgccctcctcttggccctctccagcacttctagagccagccttgctgaacgctgcagggaacgtcggtccaccccattcagcgctgcggccgccaaacagttgtccatggctccctgagtgggcacacaacgtacaaacgccggcgggtcagctgggccgcggcgaccctgctccaaatccgggtgggagccccagcctcgacctccctggagaccaccgctcctggtccgcccccaacgcacactccagcgggagcccagccaggactaggcctagcgcgcccgccccttccattttcatctaccccttccgctacttagggagccccctcacccggctcactcgtcaaggcgcatgcgcgcaacgctattctaggaagagggaccaggcctagcgctcccggcggcgccggcgcagctgggccattggcggaaggcgggagaggcgggagaggcgggagaagtgggggaggcggggcggctgggcggccaaacacgccttctgcgtcccagccttggcgtctgcgcgcgagttgcctggttaactgctgagcgctggaggcggggcgccgggcgctgggggccgggggtcgggggtcgggggccgggggtcgggggtcgggggctgggggctgaggactgagtcgagccagcagcccagggcatctgtccacgctgtcagaggagcctctgggcgtggggctggcccttagagggctactgcgctgcttaacttggtgggtataaaggcaggtctcctgttgagctaaaaaattatggggtaccagctaggtaggcaacatagc

SEQ ID NO: 6661 - DNA, 2300 bp, Homo sapien
cttaccgcaggcagctctttcgctcttcagaaagaagctttgaagacacgacaggacagagtacacgcccctctccctcctccaccccgtcatctcctgcctgagtcactacattccttaaaagataaatgacccgagttttggccttttcctatatgtaagataacatctgatgggattagcgatgatgcctctgtaatctataagcaggattactctcacacccacactctgatgtgagtctgctttaatgtgactcctaagcaagttcaatgtgattttgcatgtgctgaacccatttcccccaaacagaaaatcacagtctcgcaaatgtatccttctctcttctctcttacttcctacctaaactagaatattctccttttcccctcctccactgaaatcccactgtctcattcaagaatcattctttcactgccagagacttcacgggtattttttaatttattttttattttttgagacagagtctttctttgtcacccaggctggagtgcagtggcgcgacctcggctcactgcaacctctgactccctggttcaagcgattctcctgcctcagcctcccgagtagctgggattacaggcgtgtgccaccatgcccagctaattttttgtatttttagtagagacggggtttcactgtgttagccaggatggtctcgatctcctgacctcgtgatccacctgccttggcctcccaagtgctgggattacaggcatgagccaccgcgcccggccatgggtctttcttagactctctgtgtgccaaataactccgccttggtatacggtcctgggcagcagtcattctcctgactatgaagtgatgcttcgggagggcagtcatcagttaagaggcttttggttgcaagtaagaaacagcccaatccagagtggcataatcaataaggggaattattggctcacagagctgaggcctagagtagcagcactgcctgcaggcaggactcagtactgtcaccgagaacctattttcagctgggcgttggggtgcatggctgtagtccgagctccttggaagactgaggcaaaagcatcccttgagcccaggagtttgaggccagcctgggcaaccctgtctcaaaacaaacaaaccaaccaaccctctatttcctgaggtctatcctctctttctctgggaatagcttcagtgttcccaaaaggctgtcagaggctctcagaactatcagctttcttattcaggcataggaagaaagagaaagcctatatcccaggattcccaaccaaagtctccagattcctgctgattggagaggttcaggaacacgccactgcctgaccaacccctggggccagacggggatggaaggggtgactgacacccactctacccctggaggtgggtactttggcctccctatccacatggatctgccaactgaaacaggacctggtagaagcggggtatgaatgtgggggagacacatccaaacgtgcctgcataccaggcatataaccagtgcacagtgactggcagaggcctccaaatacgagcccctcccacaagcagaatctggacttctgttcctttgttgccagtgtccacacctctcactccaaatggtcacaacacctctgctcctcaacagagtcctgcctgttatagacaaacaggcccacacctttggttattttggtttagactagggacaaattctatcctagagtccccaggccgccagtggctcccccattcctgcctctagtgtgtacagggaggacgccctcagtttctgcggaggtggctcctccctcacaggagtctcctgggatccgtgagggcttcccaccaccactgactcttccagcagtggagcagcctgagctttggagaactgaggctacactggcctttttcccttcttcctcctcctcttctctccaaagggaaacctggagaacaccccctcccccatcacttcctgccccacccctacctcccaaggcctcctgtccccctctccgcatgctcggtgcactcactggccacagacgacagcgtccccaggctgcacccatggtaaccggcgtggcaaccaggagtcggttgggctgagaccctgagccccaactgtcagaaggagcctgaggctgaggtggaggctgggagtttggggctgtgggtaagtccttgtggggtcagacctgtggacttgggcaggggcagaccctcacggggctctggtgggctgcagcagtgcggcttgatcttgggccctggtggcagctgtctcc

SEQ ID NO: 6662 - DNA, 2300 bp, Homo sapien
atacccttactatatggtccagcaattgtgctccataataattacccaatgagttgaaatcatgtccacacaaaaccctgcatgcagatgtttatagcagctttactcataagtgccaaaatttggaggcaactaagatttcctttagtaggtgaacggataaacaaattgtgatacaaccagacaatggaataatcagcgctaaaaagaaatgagatttcaagccatgagaagacatggaagaaccttaaatgcacactactaagtaaagaagccaatctgaaaatgctatatgcggccaggcgtggtggctcacacctgtaatcccagcactttgggaggctgaggcaggcagatcatgaggtcaggagatcgagaccatcctggctaacgcggtgaaaccccgtctctattaaaaatacaaaaaaaaaaaattagctgggcgtggtggcgggcacctgtagtcccagctactagggaggctgaggcaggagaatggcatgaacccgggaggcggagcttgcagtgagctgagattgtgccactgcactccagcctgggcgacacagtgagactccgtctcaaaaaaaaaaaaaaaaaaaagaaagaaagaaaatgctacatgcataattaacaactatctgacattgtggaaaaggcaaaaccatggagacagaaatatcagcggttgcaaggggttagagaaggaggagggatgaataggcagagcacaagatgtttaggcagtgaaactattctgtgataccacaatggtgaatacatgtcattatatacttgtcaaaacccacagaatgtaaatgtacaacaccaagggtgagccctaatgtagactatggactttgggtgattatgtatcaatgcaggttcatcagttctaacacagtaccataatgatgtggaatgttcatagcagaggaggccatgcacacgtgggggcagggagtgtatgagaattagctctactttgtgttcaatttttctgtgaacctacaattgctttaaaaattaaagttggggccgggcatggtggctcatgcctataatctcagcattttgggaggccaaggtgggcggatcacctgaggtcagcagttcgagaccagcctggccaacatgatgaaaacccatctctattaaaaatacaaaattagctgggtgtggtggtgcacacctgtaattccagttacttgggtggctgaggcaggagaatcacttgatcctggaggcagaggttgcagtgagccaagatcacgccattgcactccagcttgggcaaaagagcaaaactgtctcaaaaaaaattaaactcggcatggtgcagcagtctataattccagcactttgggtgggatttcttgagaccaggagttcaagaccagccaggcaacaaggtaagacctcatctctataagaaatacaaaaattagccaggcaagttggctcgcacctgtagtcccagctgctcgggaggtggaggctgcaatgagctgcggtcatgccactgcattccagcctgggctacagagtgagatcttgtctctaaataaataaggagagaaggaatgcttctaatatttatatttttaaaaagataaaagtatacttaagaagaaaaaataaaatggctatttaagaaaaaggtattggctagttcctatgatactgggttatcagaatttaacatccacattcgtgtcactaaagtccccactgctaaatccaactggctttaaaaaaataaaaagtaaaaaaaagatgtaagttcgtattgaccttcctagttctggccttaacctctatctaaaagaatactggccaatatttgcacattatgagtctattgctccataaataattttgatataatatcatataacccagaagaatgggggacattctttaaacaaaagaatttgttacaagtatccagttttgtaagcacgcctttctatttagtatggttatctgttgtcatatctacacattggataggaaaaacagccaaaccagaactgagcagttctgtttaactgtaagctactttgcatattgttattaaatgatcacctataaatcaggttaagtccaactcagcccaaaatacagcatcctgacgacaaaactcaggtaagagactattctccagagtggcccgtggggaagaataagaacatgatttttaagaaaatccctaggtacagttgataaatactgaattttgtcagctatcggattattccattatttcaaactaccaattattccccatataatggaag

SEQ ID NO: 6663 - DNA, 2300 bp, Homo sapien
gcactataacattttctagcagccacatttaagaggtcaaaaaacaagtgaaatattttactaatatattttatttaacccaacatatctaaaatatttaaaccatatttttaaattactgaaatattttacattttaaaaatattgtctttgaaattaagtgtatattttatacagcacatttcaattcagtctagccacatttcaaatgctcaattgccacatgtagctagatagtggttatactatggagctctaaaattccgcccagactgagtgtgcttggtgtttctccattaaacagatgaggcccatcagtctgaggcacaactatgtattttctctaagtctctgtacccccaaggccttgaaaacaattcggaaggaagagaaggcctatgaggtttcagctacagcaggcactccctttagatgccaagcctagaaaaccctaaactgatgcctaacttgcagctgaatcacctttcagcaatcagattcagtgcctcaccaacacatttgatccagggagtctccagtttgtcctttgtccagtagaagacccactacaaagccttgataattcatcaaagtgacagcaccttcactgggcagtctggtgagaggacatctagccctgccaccctggttcctgttgggaacagtatcagatacgttgtgttagattcacatgaatctaagaatcacatgggcgaaaaatattgagagcattctgttaaaacatttccacaaattgggaaaagaccatctttaaaaatctgttggggccgggcgcggtggctcacgcctataatcccagcaatttgggaggccgaggcgggcggatcacaaggtcaggagatcgagaccatcctggctaacacagtgagaccctgtctgtactaaaaatacaaaaaaaaaaaaagaaaaagaaaaagaaaaaaaaaattagccgggcggcgtggtggcgggcgcctgtagtcccacctactagggaggctgaggcaggagaatggcgtcaacccgggaggcggaggttgcagtgagccgagatcgcgccactgcactccagcccgggggacagaacgagactccgtctcaaaaaaaacaaaaaaatctgtttacagaggtaaaaacacgggtattacatggagcataatttgaaatccattccctcatattcagccaagaactacaggcccagagaagggaagtgatttgccaaaggtcattcaacaaatccctaggggctgtgatgatccgtgtccttgccattacctcccttgtctccactaacaaaaatatttcaatgggagaatgtgccgatctaaggcactcctaaagtacttgctgagaatgacagccctggggagacaggtcggcagccctgaacaggcactgccttacccgggcgtagtgccccaattcgccacctcttggagtcctaggcggaggatactactggggcagttgtttcgccaattccacatctcccggagcctggcctggcccagcccagccccgtcgctgtgacccacttcctagctgcaggctggaccaaggggaggcacatggggagctccacagggaggccacgcccacgagggcagctcacagaattagaaagccgacggggtgctgtggtcaggaggcgcgtgggcggcaggttagtacttaaggtgcagagaccacccccaaccctttgactggcggtgggcatcccggaaaggcatggctcggccaattccagccccgtttccacgctcagcacccgccctgcctgtgcgcgaacggctccggcccgcacgggtcgccagaggcgactgtgtgacactcggagtttgctggggtctccgtgggcgggaggactttccagcgcaatggcgactccctaagccccgcagcttctgcgcccgggaaagatatccaagagatgcaaagctctactgggcccaggctgccaccccagaggcccccttccgtcccggggccggggctaggccaaggcgggcaccaggactgcccagcctcccggcccttcgcactggtaaccggttccggggcggatgctttttgcatctgacccggcgcgcccggtgacgccttcgcgtccagacggaagtgcgggcggaggatccccagccgggtcccaagcctgtgcctgagcctgagcctgagcctgagcccgagccgggagccggtcgcgggggctccgggctgtgggaccgctgggcccccagcgatggcgaccctgtggggaggccttcttcggcttggctccttgctcagcctgtcgtgcc

SEQ ID NO: 6664 - DNA, 2300 bp, Homo sapien
tctcctagagactctgtcctccgtgtgtaggggaaagtaggggatgggcacacagggaggaatccagccctggggcttccttgaagccaagtgagcagccttctgtatttgttttcccacaaacagtctttgaaactggggcaagtgttgaaggcagaacagagtaaaagaagcagcttcatgaggccaaacccagtctctccaggtctaggtagtccagcacaggttctgggagtaaatgccagctttaccacttgatttctttggtacgaccttaactttttgccatcctttcactagtatttgagaaccctctgcatattagggcatcaatgctaagcaaaaaatgggttcagtcaccttcctggaggttccaatcagtggaggagacaaatattaatccaacaaccagtacccccctacccctacccccacagaaagtgtcaaatgcccaagagatagatagtatataattagagagacttcactctctctggaaggtcagagaaggctttcctaaagaaatgataatggagctgaggtctggaagaagcataggagtttcctgaagagggtaggagggggcactgcacacagagggaacaggacagtcaaaggcaggccatttggcaacaggtgactggaaggaactggaagaaggcccatgaggctgaagtacagagtgaatatgcagggtctaggcagaccatgcaagaatgtgggtttctcctaagagcaataggaagccttttgaggtgctcttagcagggaagtgagatgatcacacttatcgtttgagaagattactctggcagcacagtgaacaacgtattggaatggaaccaaggagcattcaggaggccagacagaaggtatcaggtatttgcctgtaaaatgggggtgatgagaatactatcttacaagctgttgccaggatccaatgagatactgcattttaagtgtctagtctagtacctggcacatagtaaaggctcagtaagcgtcgatattgttacttttatcattggttctttgcagagtgcacatatttcttatccaggtctgctcctgcgtgatggggtggagggagtagttgtggtttccagagtgaaaacgtgatttgtgtcaaatcacaatgtcgagaccagaatccaggatgcctgaaggcccgattagaatggcttaaaagtatggattattcaggaagaaaaacgggttccaatcgctcctactaaggacgctggagggatggtgaacgatcctttagatggtaagccctagcacttattgagaaaaacaggtgcttctttggtcggagagcaggtgtagggctcgcagccgcgtgcgctcccgcggaggcgggggaccctcgccactcccccgccccacgcccacccgcgggcttccgactgcacctgctcccccggctcggaaacgcgggccgggtgccgggctgcaggcagagggtgcccgggggaggaggtcccgaaagcctcctccacacgcctgcaccggctgccccctccccagtcacgtggcccggtgggtggggaccgacctgaagttggagaaatccggagcgctcccaacctcggagggagtcgccagtcctccgggcccgggcggtggaccctggagccccggctggcggcgtggaggtgcgtttctgagaagccgagcagcggcgcgggcggcgggactcgaggcatggcccggctgtcggtgatccccgggtcggccacggcgtggacaggtgagcaggtacccgcggccagcggcagagatggccggggctgccagggcatcgggccccagagcccacgccagtccaggggatgcggggcccccacgcaggagggggcggttgggtgaaaaggccgcggtggattctcggactgccgggtcagtccccaccagcgccgccgcctcctcgccggctttgccaccgggtgagcaggggacgcgggacgcgggacgcgggacgcgagggagccgcgcggggcgtggactctgtgccggccccgccccccgcgcgcgcactggctgctccccgcgacgtcacgctcggctataaaaggcgcggctcggggcccttgcggcgctggaggagctcgaggctgaggctgccggggggctgtgggctaccgggccgccggcgcctcagcgatgttttactcagggctcctcactgagggcggccgcaaggagaccgacatgcgggaggcggcgtcactgcgacagcagcgccggatgaagcaggcggtgcagttcatccacaaggactccgccgacctgctgcc

SEQ ID NO: 6665 - DNA, 2300 bp, Homo sapien
cgaagggagtctcaggcagaccaggaggcaaagcctcggatggatgctgaggagaccggtttgtgttttataggaagggggaagcaaatcatttaaggacttgctgtctaggctttttttttaaagccactatttataaccaaaattacaacaaaaactctgtagtaaaggccaaaagtaaatcccagctaatctttaagatagcagtcagaggagcaaggaggccccccctaaactggaggagcttgggactgaggggggcagtacatcattagaactttatgattgaaagatcatctggttttctctctattgcaaggaagtccttttaacaacatctttataagtagccttccatctagtctcttcttgaatacctgctgtgacaggaagcttgctacctcatgatatcctagcttgttggtggattggactttagaaagctcacagtgttagaacaagatgaatgttcccttgtattccaccacctggcccttggttggccccatgggagccttatggcacagttcctagggcagcccttcaggactgaaggcaattctccgccccatggctcccccttcctcctcttttcttccaagaagaaaagcctatttattttttttctagtaataataaatcccagttgtaactagagagggaaaaagtaatcccttcaacatcttctcttgcacagatttacctgacagtattaaataatgagctccttgagagcaaagactgtgtctttctcatttctgagctctcagagctttgggtgacacttctgggatgaatgaagatgcagctgggtgctgtgggtgaaggaggggtctgtgcaagcatgtgcacatgtgtgcagcctctgtctttggtgccagacgtaggtatccagcatgccctgtacctactgatagctaattagaattttcttccttccttaaaaataaaatgtgggttgggtgcagtggctcatgcctgtagtcctagcactttgggaggacaaggccgggatagcttgagcctgagttccagaccagcctgggcagcatagaccttgtctccacaaaaaaaaatgaggaaaaaaaattagccaggcctgatggcacttgcatatggtcccagcttcttgggaggcttgagcccaggaggtgaagggcgcagtgagccatgatcgcaccactgcactccagcctgggcaacagagagagacctcatctcaaaataataataatttttttaaaagatgaataaaaaataaaatgtggtcttaaccagagagaaaagtgaaaaatatatgtctgtcttcatcaaagttctctgaaaaagggtcagatagtctctgcagagcaatgagctctgttccccctattttgagagacctagaagttctgtctcatgggttcttctggcacttggacttggtaaacaaaatactgaaagctaaatttatccttttgttcacaattacctgccctgaccgtgaacactttcgggctaatgagaaaacagtgcctcaggaactcagaggggtagactccttgtggggagctaatggtttggctcccacagggggccctctgggaaggacagactcattcccagatggtgtcattttcatgccccattcctgggtggcaacaggggtgctgcggggctcggcaagctagcggtggtcaggacagagatgacagtgtcgtgccataactcggggcatctcctttttcagacagaagatgtggaggggagctgggagatttcactgggtacattgaatccccaaactacccaggcaattacccagccaacaccgagtgtacgtggaccatcaacccaccccccaagcgccgcatcctgatcgtggtccctgagatcttcctgcccatagaggacgactgtggggactatctggtgatgcggaaaacctgtgcgtctcactccctccctccctttctcaggccagctgggaagcctgatgacctgctcctcaggctttcaatgtgaggaggcaggcctagaacgtcacctccatattagagcagaggtgaacatgagtttatagagttggtgagaaacaaaatttaaatgaaagccacacactgaagcgtcttgctgggccccagaggtagtgatcctgcaggtcagtcttcccctctgtgctcactggggcgttttggaccctcttccacaaggacccagagagccagtgaggatcatgcagtgttggccccagacaaggcctcatactgagttgcaactgatggcttggagactgaccgagcctggccaggtggggacct

SEQ ID NO: 6666 - DNA, 2300 bp, Homo sapien
aaacaacaaaaatcaaatgactctgcttttgggggtaattaccaaatctgcgtgttctctctgggggctcactgtgttcaaggggcttcattcacggggtgctgttcttggacattggctttgttttttttctgttaatttccttgatgctgtgagcatgttccagggtgttgttgcctgcagtcctggtgcccggaatgtgactctcccatgtaacagatacttactgtgtggccactgtgtgtcaggaggctgtggtcagccctggtgggtcatcaccctgggcagaggcccacagaaccccaggaccagcaggctgtactccagagcacctcaaaggcccagggaatgtgcctggagcacatggtgtggatagaaataggcaaagcaggggcagcagggattctgtgccgagaaaggggcccaaaccctttcctgtttgtcaaaagatgaagaatgaaatccaaggtttttaggaggctgtgtcctcccggatatagacgcctttgtcattatgtcattggaacacctgaatgaggttcatattacatcctgatgttcatattacatatatgagcaaagctagagactcaaagcaagacagtacagcttgtatgtgttgactgagcaattcaaatatgccagctaccatagtacacgaattaactgacttaagccatactacaaccctctgaggaaattttactattattctcattaaccagatgaagaaactgaggctcagagaggtgaaataacttactcaaagtggtttagataagaaataggggagctgggatttgaacccaggcagtctgggtccagagtctcaagcactatccttcactgcccctttcaatgcacgtttggactcagccagggcatacatcatggtctgtttcgccaaatccctcagtgacagttccttggtgatttgggccaccccaaggtggggcaagcaaatagctaatggctatgcagttattactacgtaccaggcaaggagctaaacattttcctttttttaaatgcattatctcattttatccttacaacagcctggtaatataggtactataattatgcctgttttacagatgaggacactgaagcttagggagattaagtaacttgctcaagttctcaccacaacttaaaagagctgtagggcattgactccagatcctaccggatggttaagactgactgaccctgggaggagaacagaattttgcacatcaggctctcacagtgggaccctcactccctctcagacctcagagcctagccatgtttagtgagtgccatctgtgtctggaacaacagctccctcagccctgtcctcccacgacgggcttgtttaggagaatctgcccttcaccgtttcgccaaacgggcttatccagatttgaactgggggattctggcctttttttctcaggaaggcacaaaaatgacttcatgttctatttcaccgtggaggctatttttgaccctcagttttagatagatagataggtagatagatagatagatagataggtaggtaggtagatagatagatagatagatagatagatagatagatagatagataattttttgttttttttgaaatggagtctcattcactctgttgcctaggctagagtgcagtggtgcaatctcagctcactgcaacctctgcctcctgggttcaagcaattctcctgcctcagcctcccgagtagctgggattacaggcatgtgccaccatgcccggctaatttttgtatttttagtagagatggggtttcaccatgttcgccaggctggcctctgttttatttgaacactggatttgcctctcacatgagggggtaactgcaattttaggaggctcctggtggccccagtccagggcaatgggcactccatgatccaagccactcttagcctcagggtaggagagggtctcagggtgtgctgtgtgtggtggaagccaccaatggacagcttgctgcttcccatctggtgtctccattcctttgcctctgaaggtaacatctctcacttgtttctttctgaagatgtcaccaccatcaggacaagtgtaacctttaagctaaatgaaggcaagtgtagtttgaaaaatgctgagctgtttcccgagggtctgcgaccagcactaccaggtatggaatcaggtggttggtgtagggagcttgcctgcatgtgggaaggggcctgcagccagccgagctggaggtccatgggggccaggggctgtccagccgatccaagcacactgcagatggaac

SEQ ID NO: 6667 - DNA, 2300 bp, Homo sapien
ggtcaaaaatagcctccacggtgaaatagaacatgaagtcatttttgtgccttcctgagaaaaaaaggccagaatcccccagttcaaatctggataagcccgtttggcgaaacggtgaagggcagattctcctaaacaagcccgtcgtgggaggacagggctgagggagctgttgttccagacacagatggcactcactaaacatggctaggctctgaggtctgagagggagtgagggtcccactgtgagagcctgatgtgcaaaattctgttctcctcccagggtcagtcagtcttaaccatccggtaggatctggagtcaatgccctacagctcttttaagttgtggtgagaacttgagcaagttacttaatctccctaagcttcagtgtcctcatctgtaaaacaggcataattatagtacctatattaccaggctgttgtaaggataaaatgagataatgcatttaaaaaaaggaaaatgtttagctccttgcctggtacgtagtaataactgcatagccattagctatttgcttgccccaccttggggtggcccaaatcaccaaggaactgtcactgagggatttggcgaaacagaccatgatgtatgccctggctgagtccaaacgtgcattgaaaggggcagtgaaggatagtgcttgagactctggacccagactgcctgggttcaaatcccagctcccctatttcttatctaaaccactttgagtaagttatttcacctctctgagcctcagtttcttcatctggttaatgagaataatagtaaaatttcctcagagggttgtagtatggcttaagtcagttaattcgtgtactatggtagctggcatatttgaattgctcagtcaacacatacaagctgtactgtcttgctttgagtctctagctttgctcatatatgtaatatgaacatcaggatgtaatatgaacctcattcaggtgttccaatgacataatgacaaaggcgtctatatccgggaggacacagcctcctaaaaaccttggatttcattcttcatcttttgacaaacaggaaagggtttgggcccctttctcggcacagaatccctgctgcccctgctttgcctatttctatccacaccatgtgctccaggcacattccctgggcctttgaggtgctctggagtacagcctgctggtcctggggttctgtgggcctctgcccagggtgatgacccaccagggctgaccacagcctcctgacacacagtggccacacagtaagtatctgttacatgggagagtcacattccgggcaccaggactgcaggcaacaacaccctggaacatgctcacagcatcaaggaaattaacagaaaaaaaacaaagccaatgtccaagaacagcaccccgtgaatgaagccccttgaacacagtgagcccccagagagaacacgcagatttggtaattacccccaaaagcagagtcatttgatttttgttgtttgttcctgagaggagaggaagagccacaggtgacagagtaggccccttgcagtcctgacagacagaatgtcaattgtcaaatgcataagcaaggtcacaggctatcctggtagcagctaaactgtccccccaccccactccacatgggccactagaaaaatgcccagcatatggggtctcgaagcatggacctctcaaagcacggtggtcggggcatctggcggaggacctggaagccctttgagggaatctaacacctggaggccagagaggcctggccccagtgtgaggacctgccccgggaactgggccccactcacctgaagagaggtgaatgccagagtgacatctgaggaagcacccgtctcctccaccactcttaccgcagtgcagggacacacggggtgacacacttgtgggcaggagccccttcacttctagacaggacaaaacagacacttacagaaagagaaggacatttccaagtgtgacaaggatggttgagtcccatgcaccaaaggccccaagaaaagaaggtagagctcatgcccagcacagaacatagatgctaggccttattcccaccaagggaaaggagcccctgatatgccatttcttcatgcagaaaagcaaccaggaaaacagaagtgagttccaacctacacagaagcacagaaggaaacaccaaagatccggcaaagtatctcctgtttttgaactatttaaagaacagttgctgcagctggtggggaagtcagtggagggacggtcaggtgggatgtgggagcacgcagagctgcactgcc

SEQ ID NO: 6668 - DNA, 2300 bp, Homo sapien
actgacatttggacacagttttcccctggagcttccccctgtggaaattcccggttgtaagccatattgactttaatctcaagtgtcaaaaaggttgcccaggagtctgggagccaacagctgaaagcacgtttgtaaggatgtcagcgcaaacaaaataggatacagaacattttttgagatctgtgccagtggtggacttttctgggaaacatgacaaaagctgacagtcttaggcaaaaaggcgctgattcttgtcattattaatttatgtccttactgaaagatcaagttagggaaaggtaaaggggaagaatagcacatgtgtgatttctttgccaggcacaagggcgctgcaggaggctccccctagagtttaatgggcagctttatgtatttatatgctttaactggagctaaagaggtctgtgccacacaatgggcagtttctagttggattttaaaagaaataactttgatcatttcaaaagcaatgaagcctgatgcagtggagagaaaagaaggcagtaatttatggctaccattaaggacacaaagacaaaggtggagagaacgtttcactaactgaagatttacaaatgtgtaaaaaccacccttatgaccagaaatagctgagtgtctctctcagcaccaaacaaaagggagtgggagggaggcgcagacagaaagagggacgcaacctgcctgccttcactgaaagggtcaaaagaaaaacaactacagaaaagttattttctcagatagctccatcaagcagctgcactagccacagcccaaagaggcaggcccccgtgggcatgttcgggggctggggtggcagacagtgggtactgagggtgcagaggctgggagctctgggctgtggataggccccaagaagacataagagtttttgtgcatgagctaggtggggattttttggtgacatctattttttttctgatctccaaaggaatggtgtgtgtgtgtgtgcgcgcgtgcgtgtgcctgcatatatacatatgtgtatgtatataatcgcaggagaaaattgaataaatacggagaagctcagtgaagaacattactatccctaagtgtgatgtttggttgcgtccggaaattgttactatatttgttcctggagtgatggtgggtgtattgggctccagccatccgtgtcaagtgtgatatgggaagaccctgtgtacctgttcccttgcaaggactgtctttcatggaaggctaggtgctaggccctgcctgtgtttgaagctagccagacctgatgtttatgagttcaggtgatcgtaaatgccacctgtactccggcaaagtcggggctgctgtctgttgtctctggtggctcacctttgacctctagcccccttccccttaggctgccctgagatatacataagtagcttgcagggattctaggcccagtgtgccccacagtgggacaagtggaccagtgccctcagggctgtgggatggaggatcccagagggcctggggtgggcagtgtggagaagggtgcagagggtgtgctggggtgggcagagaagccagggtcaccttctccattcaaacagctgttttcccgaattggaagtcacccccaattccttccactcccacctcccacctcccacgtggaaagccccaagatggctttggggtttggggactatacggaacactttctgggcgccctgaccccgaatatttcaatctagaagggctgtttgtcctcacatgagggcctgggtcgagttgtaacacactggaacaggcgcggcaccgagggctccgagcgttggagcggagcggggatgcggggggcagcgggctgggtgccagggctgcgcggggcgcgaggcacggtgctgccgccccgccaggctgacagccgcgctcgggccaccgcggccgcgccccctccacccgaggccggggaggggacgggaggaggccgggcggggcggcactgctcccgcctgcgcttcccgccccggcccgggagggaccgtgtgaaaatgaggccggggctcggggggcgggcggggccgggccgggggtggcagcggcagcgggcagggcgtccgcgcacacctccccgcgccgccgccgccaccgcccgcactccgccgcctctgcccgcaaccgctgagccatccatgggggtcgcgggccgcaaccgtcccggggcggcctgggcggtgctgctgctgctgctgctgctgccgccactgctgctgctggcgggggccgtcccgccgggtcggggccgtgccgcg

SEQ ID NO: 6669 - DNA, 2300 bp, Homo sapien
ctgggcctagaatccctgcaagctacttatgtatatctcagggcagcctaaggggaagggggctagaggtcaaaggtgagccaccagagacaacagacagcagccccgactttgccggagtacaggtggcatttacgatcacctgaactcataaacatcaggtctggctagcttcaaacacaggcagggcctagcacctagccttccatgaaagacagtccttgcaagggaacaggtacacagggtcttcccatatcacacttgacacggatggctggagcccaatacacccaccatcactccaggaacaaatatagtaacaatttccggacgcaaccaaacatcacacttagggatagtaatgttcttcactgagcttctccgtatttattcaattttctcctgcgattatatacatacacatatgtatatatgcaggcacacgcacgcgcgcacacacacacacaccattcctttggagatcagaaaaaaaatagatgtcaccaaaaaatccccacctagctcatgcacaaaaactcttatgtcttcttggggcctatccacagcccagagctcccagcctctgcaccctcagtacccactgtctgccaccccagcccccgaacatgcccacgggggcctgcctctttgggctgtggctagtgcagctgcttgatggagctatctgagaaaataacttttctgtagttgtttttcttttgaccctttcagtgaaggcaggcaggttgcgtccctctttctgtctgcgcctccctcccactcccttttgtttggtgctgagagagacactcagctatttctggtcataagggtggtttttacacatttgtaaatcttcagttagtgaaacgttctctccacctttgtctttgtgtccttaatggtagccataaattactgccttcttttctctccactgcatcaggcttcattgcttttgaaatgatcaaagttatttcttttaaaatccaactagaaactgcccattgtgtggcacagacctctttagctccagttaaagcatataaatacataaagctgcccattaaactctagggggagcctcctgcagcgcccttgtgcctggcaaagaaatcacacatgtgctattcttcccctttacctttccctaacttgatctttcagtaaggacataaattaataatgacaagaatcagcgcctttttgcctaagactgtcagcttttgtcatgtttcccagaaaagtccaccactggcacagatctcaaaaaatgttctgtatcctattttgtttgcgctgacatccttacaaacgtgctttcagctgttggctcccagactcctgggcaacctttttgacacttgagattaaagtcaatatggcttacaaccgggaatttccacagggggaagctccaggggaaaactgtgtccaaatgtcagtgtttttggtgtcaggaggaacttggttggctctactctggctgcaggctgccctctattctgcagctgaggtccccacaaacttctcagaaaggcctcagacaccgtccctggactgaggctaaagctccctcttcctctccctgtctcctctccacaggctgagaggccatgaaccaggcctcaggggtgcgaagaggcagtccagccagcccagtcacactggtgtgggcctttgaggaggctgaagaaagcctggtagtggccggccatgcgtgcccctgaactacacataagcaggtgccactctgcactcatgggacaccattcagtgcccacctttcttgactccccccccgcccccagcagcctctgacatgtggactacttctccctggtggaaactctccttacccttggttgtcatcgtggcaaactcctggttttcctcctacctctcaggaaatgccttctccaccatcttctaggagtcctctttctataccctctctctggatggttcactcattcccttgattccataatgtcaatctccagcctggattcatccccttggttcaatcccatgtatccagttgcctactagataccaccttgatcttccctagatcccaccttgatcttccctagatccctctgattgaacatgttcaaaacgaagctcatgacctagaagaagcttctctgctttctcgaatctctgcctggttcagcccacccacccctccactactgcctccaccatgtccatcagggtgacccagaagtcctacagggtgtccacctctggcccctaggccttaagcagccgctcctacacaagcgggcctggtg

SEQ ID NO: 6670 - DNA, 2300 bp, Homo sapien
tcgatgcttgggtatgtggagttcccaaggagaccctttaggttgtgataacctgaggcaacttcctgtttggctctgcctcatacacttgaaagtaagtagaaggagggtttcttctgttgtttctttttctttcttttttttttttttgagacggagtcttgctctgtcacctaggctggagtgcagtggcgtgatcttggctcactgcagcctgtgcctcctgggctgaggcgattctcctgcctcagctccccgagtagctgggatgataggcatgcaccaccacgcccagctaattttgtgtttttagtagagacaggtttcgccatattgaccaggctggtcttgaactcctgaccgcaggtgatccggccgcctcggcctcccaaagtgctgggattacaggcatgagccatcaggcccagccagaaggagggtttctaggtgaagatgtgtggaattgctgtgcccagatcccaggccacctatgccactcagggtgattctctgatgatacatggtggaaccagcagagcattgaaggagtctctatcctggtttcagagcctatctccagggattggctttgttgatggctcttcctgtgagcagcagggaggagctggctgctctgacagtccattgtctgatcttcaggttcccgtgtggccggtggttagggaagggcatggatgatggaagcctggagcggatcctagttggggagctgctcacatcccagcctgaggtggatgagaggccatgccggaccccgccgctgcagcagtcccccagtgtcatccggaggcttgttaccatctcacccaacaacaagcccagtaagtgggaggaggggttgggccctcatgccatacagtctagggaatgggtggatctctgtgagccctgataatgggaacctgggtcccagcctgtgcagctgcctcaggaaacacttctgctaacaaagccacctcacacatatggcacccttctcttatgaatcactgagagcatttggcactctccttagagggctggcaggagaggagagaactcatgctgccaaacctgggcgctgtatatattcatgcatgatccattaaaggagaggggcctactttctggactccccctgcctgattcctgggcttcacagccaaggcttggctctcttttggttacccacaattccaaggtaaaatggaaactaaactttaccagcatttcttagagatagaactctaaggtgttagcttttgtgtttttcccccaagatttgcggaagagctaaatcagcaaagctgggtgggcaagcgcctctgcttcctagggtccagctgccctgcctctcctatgggccctccccgtgtcctcagtctcctgctcaggcagctaagcactgttagcctcagagattggttagggatgtctgcttgatttttattagagctgaacactgggcagatccaggagtccatcggggaggcagtcaatggcattgtgaagcacttccataagcctgagaaagaggtgagccttcctgccctccaatccagggccttacattgaataagagagaataattttgtttttccgattatcttgttatgctcttccaggcccatgtgctgtggacaccctagagtcttgtagagtgtgtgcctcagctagttggagatggagcagactccttcctctgggggcctttgcctcaggttaccctgttttccctccatactgatgacccaatagagtccctgggcccctagtgaacagtgcctattcctgtcctcttctagatttgcctgggtctccttgaatagtggccacactggctttgtcctccagtggagaatctccttgtgtgtgacccagatccatcatctcttctttcatccatttattcagcagctcttcactgggagctgctctgagccaggcactgtgccaggtgttagggaaacagacaaagtcctagcctgtcttttgcagccctcccaactctgggctgtgggtttagggatgcaatggtgggagggcagctcggctgagacaagcctggcaccctcccctgtttccttacgtagcgaggcagtctgacgctgttgctctgtggagagtgtggccttgtctcggccttggaacaggctttccagcatggatttaaatcgccccggctcttcaaaaatgtcttcatttgggatttcctgggtgagttgagctggagtatgagggtgggagaagcatgtagagatataaggggactcaccagcatagcatgggtgctgaccact

SEQ ID NO: 6671 - DNA, 2300 bp, Homo sapien
tgatgaatggtgaccacagaccttcatccactgccactcacacaccatacactagctgacagcctagctagaagcctgagaagacctgtgtcatccttgatggaatttcattccagccctcagtttagaaaaggagatttcatgacttctgacacttgatattatagtaacatcaacataccttggacacaggcagtatttgatttttgttgttcctgctgtagcttaaaccgttgtccctctgtcccttagttagagtagctagctttgttcctttatagggtgaacctaaggaacttgaagcttgacatcttatgcttcccttagctgtctccttccagaactgaaaattctagtttctttcccttccttttggtcggagactgatgtattacctcctctccaacagaaagttatataagcgctatgccttcctgcgctgtgatgacgagaaggagcagttcctctatcacctcctgtctttcaatgccgtcgattacttttgcttcaccaatgtcttcacaactatccgtgagtagccctgtgctcccagctggccttctcaaggcagtctttatgaacctgcctgagactcactcattgtcccctttttaaagaaagaagattatcccttgtactttctatttgtcttttgcctctgtggggagagaggtgcacttgccctccttggaggctgtgttttctctgaagtttctcattcttgttctgaactggagagctcagtcttttttgccattgtgttgtcggtgttgtcctaggcactgctctgggagcctaagctgatgaaggtggagtggagtcagttgagctgatgcagtttacctccctccctgcatacccacaaagaatctcccttttgttttcgcctgagaggctcacttggcatcacagaatgtttcaaaccaggctgaagggaaaaagagctcttttctgaggtagcagaaagaactccagataccagtgggagatttcattctgggctcagctttggctaactcattatgtgtctgtgagcagagtctatcctgctgtgagtcccagtctctctatttacagaagagggaagagggttcaatatggtctaattccctttgagcctcttctttccctgatgccaggattctctactgggtggagggtagtctctgagtttgccacatggctagttctttggccagttactcagcagcatggactcttgtttctgtctgatgctgcatcttcccttttagagactagggctgtgggcttaatagaagtagccctggactggaatttagaagacccgaggcaaactttctttctctgtgccttggaaaaaggattgcaatacttcctctccaaagattatgattgttattagggttcatgagatgatagattgaagagtgctctaaaaagcagttcagtacaatgttaggagttggggatattgtttaacgaacaggttcatttagttctgagcctacagataggcttggatctttgatgtttgggtggtaagcctgagaggagtgaaattgaggaggggccatggggtagctggctaatattctacattagccagggactaggtcctggggccctcttgttccagggctctgcttgagctgagatagcaggagccacagttgtgccagccttcctggagcaggtcagagtcccatctggtatgggaaagattcctaattctcctcaatacttttgtggcttcccctaaacagtgatcccgtaccacattctgatcgtaccaagcaagaagctggggggctccatgttcactgccaacccatggatctgtatatcaggagaattgggtgagacacagatcatgcagattcccaggaatgtgctagagatgaccttcgaggtatgtgttatttggggccacagctctgtggggatctgagtttgcaacagccgctttggggagttttctgcagggtttttcagagggcttgctatgtacagtgtaatgcttcagcatagctgaccttcctgagatgatctgaggctggatccaaagactgaccctgaggagggggaccccaccctgtctaaacaatgtttggaaggcacttacttgtctggacatgcacatctctccatgcatagtgtgttgagaagtccccaggagttctttcagctactcagcccacctgttcccagagacctcagaacccacttccagaatctcttgctccctgaccctgttcttctaggtagagtgttttctttctcagccttgggcacccccatgagatagtgctgtaccgcag

SEQ ID NO: 6672 - DNA, 2300 bp, Homo sapien
agagacagggtttcaccatgttggccaggctggaatcgaactcctgacctcaagtgatctgcccgcctcggcttcctgaagtgttgggattacaggtgtgagccaccgtgcccagctgcttttttctttcttatccactggtcccttaccaggctctctttcccatctcctttctattcccagtaggggaccctttcctttttctgttaccttccattgtttatatttcttctggattttagtaaattgatatatttgcatacactgtgtcctggatgtacattgaaacaagaaacagtacatatatttttttagcaaaagcttctatctgtatgttgaaagccttgacccctgaaatctaaactgataggtgtttctcccttgcattggttccaggggaaatcagccttatggtcccacctgttacattatcaggacaaccggcagagaaaactcacatcaggaagcctcagtacctcaggtaagatagtctctgcaatggagagtctgccctctctccacttttccatcacccactggcgtgatcactttgaagcaaactattccaggtcgaagaagcttttgctctggaatgttttctcttttaaatatggagccaccagactctctgaaccacagagcataccaaaaccatggcatttgctttcattatgtatttctataccctttttatcggcaagatagaaaatttatttgggcaagaggccagtctcagaatgaatatgggttttactgtggtactggtgtcctgggtttggagcaggctgttttcagagtcttttgttttatttctctgacatgggcattatgattatctatcccgttagtcaagagagctgttggtcagtgtccttccttggacctcctcaaagtcaagtcctggtgtgaatgatcccttatacttcctttctgtttctaacctaataaaaatgtcagagtttgtggcaactccagaggtcatctagtccaggccctttattttacaagaggaggaaacgagtctggagaggaattgaatttacttaagatcacaaagtgagctcatggaagaggccaaacaagagccagtcatcttatctcctgctctgatgtttagaccatcctacagtgtcctttccaggctagtctccctgcttcttttacttcttgggtgcatctccccttcacatcatcctttgttctccactctgccagacatttgtttacctttcttggatgtttttatcttaatggtaaaggtgagttaaatggggtaaaaagatgggcatgaactcgttgcccttgaactagttgaccttaactagcactgaacctggggagataattggctgaaaactagagacaagagttctccaggtaggcttatgaggaatttttttggcccgctttctggatgtgtaaaagcaggttcttattaagaatgctatagaagtcattgctgaggaataaactgtagccaaaaattctcaacagcttgatgatgaaaatactaagttttaaacattaggccagacatgaggatataaaggtattatatcttctcttctcctagaggtcctatcattctggaacagaaccagaacattcttgttctttatatattctcttgggcttttgtaggctgctgtgaagccagaacaggatgtgagtagtggctccaagtggaagcactgcttctgtggatcatggtgagagcatgatagactaggagccaggaggtctgtgttccagtactgactttgctgcttggtgacataggcaaagcagctaacctctctgaatgtcattttccttctctgttaagtgggggaaattgtgatatcttttttggctaccttataaattgttagagaattaaatgagataatatccataaaaatgtaaaattcggtctctagtaggaatttcataaatatttatgaaacaatcaattaaagtgttaccagtgtaaccacctgtttcccatagcaatttgtgatttaaggtaagggaagggcagtcagctatttggatattcagatctctttggacatgaccaacttgtttattctaggaatacttcttgattcagaacgtaggaagtctgatgccagctcactcatgcctcccctgaggatctccctgattcaggatatgaggtcagtatgggctcacatgtaataagccactaaaatcctgttttcagttgctgcttaggtgtccacttttagtaacaaggtctcagtggctgctacagcatctcagctaacatggaagccctcctaatcacaaagccttgt

SEQ ID NO: 6673 - DNA, 2300 bp, Homo sapien
gcatgtaattgggttttgcatttttatccaatttgacagtttccggtttttaactgaggtcttcagaccatgtacatttaatatgattattgatattgctgggtttaagcctgtcattttgctgtttgttttctatttgtcccatctgttctttgttcccttttcttctttttctgccctcttgtgtactaattgaatattttcaatttttttttctttttttttttttttttttttttttttgagacggagtcttgctctatcgcccaggctggagtgcagtggcgagatctaggctcactgcaacttctgccttccgggttcacgccattctcctgcctcagcctcccgagtagctgggactacaggcgctcgccactgcgcagcccagctaattttttgtatttttagtagagacggggtttcaccgtggtcttgatctcttgatctcctgacctcgtgatccgcccgcctcggcctcccaaagtgctgggattacaggcgtgagccactgcacccggcctttcaattttttttatgatttcattttatctactttgttggtttactagctataacttgtgttattttagcagttgctttaggatttatagtacacatttaacttatcacagtctacttttaggtgatacaatatcactttccacatagtataagaactgtacagaactgccaggcacagtcatgtgcacccatactcccagctgtttggtaagctgaagggggagggttgcctgagcccaggagtttgagtccaacttggatcacatgatgagaccctgtctctaaacaacaacaaaaagaacttcacaaaactctatttccatttctctcttcctagccgacgtgctattgtcatctattttacttttacatatgtcataaacctaacactacatggtcatttttgtttaaacagtcaattaccttttaaagggatttgaataataagtacaaaatctaatacattaactgtgtagttagcatttctggtgctcttctttcttttctgtagatccatacttccatctggcattattttcctactgccagaaggacttcctttaacatttcttgtagtgtagatctgctggtgatgaattctttcagcttttgtaattcttttgtctttgaaaggtattttccctgagtataggttaatagctttttcctttcagtactctaaagatgttgctccaggccaggcgcggtggctcactcctgtaatcccagcactttgggagtctgaggtgggcagaacacttgaggtcaggagtttgagaccagcctggccaacatggtgaaaccccgttgctactaaacatataaaaaaaaaaaaaaattagccaggcatgatagtacgtgcttgtagtccaagctactcaggaggctgaggcacaagaattgcttgaacccggaaggtggaggttgtagtgagccaagatcacaccacagcactctagcccgggcgacagaatgagaccctgtctcaaaaaaataaaaataaaaaaaagatgtcgctcctctgtcttctcactttataattagtttattctcatgctgctatgaagaaatacccaagactgggtaatttgtaaaggaaagaggtttaattgactcagttccgcatggctgggaatgcctcaagaaacttacaagcatggtggaaggcacctcttcacagcacagcaggagagagaatgagtaccaggagggcaaatgccagatgcttatgaaaccatcacatctatgagaactcactcactatcgcgagaatagcatgagggaaaccgcccctgtgattcagttacctcccactgggtccctcccaccacacatggggattattacagttcaagttgagatttgggtgcggacatggagccaaaccatattacacttccattgttttctgataagaaatctgctgtcatccttaattttgatcttctctatatacaaaatgtctactttctctaccagattttaagattttctttttatcactgattttgagcaatttgattatgatgtggcttggtgtagtttccttcatgattcttgtgcttgcagctcattgtgctttttagatctgtggattttttgtttacgtcaaatttgtaaaaattctggccagtatttcttctagtaatttttctgttctccccatccctaccttagggactgcagttacacatacatgtaatatctgggattgcgtagttatcccagaaccgctgatactcttttaatggcaacagttttttctctctctctgt

SEQ ID NO: 6674 - DNA, 2300 bp, Homo sapien
ctcttttattttttgagagaggttcttactctgtcactcaggctggagtgtggtggcacggtcacggctcactgcagcctcaatctcctgggctcaggtgatccttctgcctcagcctctcaagtagctgggaccacaggtgcatgccaccacacccaattattattattttttttttgtagaggcagggtctcactatgttgctcagctagtctcaaacttccgggctcaagcagtcctccagccttgcctcccaaagtggtgggattataagtgtgagccaccgtgccaggcccagatctcttttagatccattgccctttgagtttcacagcaacctaaggcagatagaacaggttttatagccaaagaaaccaaggcttagagagcctaagtgttttgcccaagattaaatgcctaatatgtagctgagctgagcctagaatctagtcctcttgaattctcactgttaaattactttcgtaagttacttataaaccaatgggccaatgtaataatcttgttgggctgttttttagtgaaatatttcattttttctgctttagtggagcagattttttttttgcttagtagactagatatttttcaaaaatcatgggcagttaaagaggaacagaaatatttggtgagattaaaaaggtgttttgggctggatgcggtggctcacgcctgtaatcccagcactttgggaggctgaggtgggaggatcaccagaggttgggagttcgagaccagtctgaccaacatggagacaccccgtctctactgaaaatacaaaattagccgggcgtggtggcgcatgcctgtaatcccagctactggggagggtgaggtaggagaatcacttgaacctgggaggcagaggttgcggtgagccgagatggcgccattgcactccagcctgggcaacaagagcgaaactctgtctcaaaaaaaaaaaaaaaaggtttttttgcagaaagaaggaaagtgatatgagggaaaaaataaaaaatcaagagagccagaatttaaccttgttggtttgttaaattgacctcccacattccttcctttctccctgacctttgagataattagcaccttttctttcatggcagaatctctctctgcccataaagatcttatctccactttcattgagttgttggatatctttaagtgaaactctttgacttttctctcctctgtgtctgagtccctttccttttatttatttattttttccagtttttcctcttttgttctcatcatttcctgctaagtaaattagcactgtaaaaaaaaatcagataaaaaaatcaggaattgcattccttgggttaaaaggaaaaagtgtatgtgttctcaactgctttttctttttttgtagttggaagtgcgtgaagaccccagcagcaataaggatctcaaagttcagtgtgatgaagaagaactcaggatttaccagctaaacattcagatccgggaagtttttgcaaatcgtttcactcagatgtttgcagattatgaggtgtttgtcatccaacccagccaggataaggaatcctggtttaccaacagggagcaaatgcaaaactttgataaagtgagtgtaatcctgcttgggaggtggtgaggaatgagaacttgccagttatgtcttgaagaagtaatggaaaattactcgaagaagtaatggaagattatcatatgctggaaacaagtttatggtccatttgatgttgataaaataggtcttgttgcttatgaatagatgtgctgattattattatcagacgatttaccttcagccaaagggatctcttaaggcaaagatagacatgtagagtgaacatcaggattctgggaagattggttgactcagtaggttacccaagtgagtttgttccagtgtcaaagtttcaagatacctgaacttacatgagtgggtttttttttttttaatgtagagattttgcagcttggtattcttaaagacctaggcagcctcagagaataattaacctactggatcccttgggcacattgacattacccttttccctgtcaattactgcttctttttggtcccaccaggcatcttttctgtcagatcagcctgagccctacctgcccttcctctcaagattcctggagacccagatgtttgcatctttcattgacaacaaaataatgtgtcatgatgatgatgataaagaccctgtactccgggtatttgattcccgagttgacaagatcaggctgttgaatgttcggacacctactctccgtacatc

SEQ ID NO: 6675 - DNA, 2300 bp, Homo sapien
tagaacagattcatgagtataagataaatatacaaatatgaaaggcttctgtaatttatacctgcaagaacattccaacagggacaagaactacaaagtatttaaatatatatgtacacacacatttttattgacacataattatacatatttacagggtatggtatatttcagtacatgtatgtaatgatcaaatgggggtgtatgtaatgatcaaatggtaattagcatatccatcatctcaaaccttttttatttatttatattggtaacattcagaatcctcttttctagctacttgaaaaaatacaacaaatgtttgttgagtgtagtcaccctacagtgctatagaagactgcaatcctcctgtctagccataattttgtattggataatcagtctctttctattcctcctccttgccacccttcccagtctctggtaaccactcttctattctctacttcagtgagatcaacatatttagctcccacatacaagtgagaacatgtggtatttatctttctgtgcctagcttatttcacttaacataatatgctccaggctcatccatattgccatgaatgacaggatttcattcatttttatggtggaatagtataccattgttaaactacaaagtatttaaattaaatgtacaagaccgctaaagaggagaagagtagatggttaagagcttaagcatatgactgaagtcagggtagctgagttcaagtcccagctgtactagttaatagctgtgtgacttttggcatgttacttaacctctctgtgtcagtttttgtctgtaaaatagggatagctagatactgctgcattactgtgggggttttttgttagtttgttttttgagagggagtctcactctcttgcccaggctggagtgcagtggcacaatctcagcttactgtaacctctgcctcctgggttcaagcaattgttctgcctcagcctcccgagtagctgggattacaggtgcccatcaccacacctggctactttttgtacttttagcagagatggggtttcaccatgttggccagtctggtctcaaacctctgacctcaggtgatctgcctcagcctcccaaagtgctgggattacaggcatgaaccactgctcctggcccctaaattgtttgttaatccagattatctaccccatcagcagtgtgtgagcactatctctttacattctctcagaagcaattttaaatccagaaggaagcacagaaagaacaaagatcagccactaaaccttacaaattaagactgaggctcagaaagagagaatggtatatccagggtcatagagggagatcataacagagtcaaatctggaacctagactttttgaactcactcctagggttcttttcactgagtatagaattcacaaattcaccaggaatttattttttattttttgagacagagtctcactctgttgcccaggctggagtgcagtggtgtgatcatggctcactgcagcctcagcttcttgggctcaggtgatccctcctacctcagcctctcaagtagctgggactgtaggtgcatgccaccatccctggctaatttttgcatttttttgtagagactgggtttctccatgttgcccagaccagtctgggcaacagtctgggttcaagtgatccgcccatctcagcctcccagagtgttggcattgcagatgtgagccactgcgcctggcctttaccaaacatttaatgagtgtttaccatgtgtgagacttttgtgtttgatgctaaacatctatgacattataaaatcttcaccactctaacatacattgtttatctctttatctccattttacagctaaggaaatagaatcagaaaggttaagtaactttcctaaggtcacacaacgagaatgtggcagggtaatattggaactcaagtctgtcttatttctgagccctatcttccttataccatatctcaaatatagccatttcaggtgttttgtttttgccctcttgttcactaacctttctaaaacttcttcctgtaatgctctggagttattcatactcctcatcctgttttgacttccaggctaacctctgctttgtggacattgacaaccacttcattgagttgccagaggacttgccacagttccccaacaaattggagtttgtccaggaagtctctgagattctcatggcatttggaattccccctgaagggaatcttcattgcagtgagagtgcctccaagctgaagaggctgcgggcctctgagcttgtctcg

SEQ ID NO: 6676 - DNA, 2300 bp, Homo sapien
ttcaaagctttattagtgagcaaatgtaggatgttttgctaaacttctaccttaatacttttcagcttctgttccctttgtactgagacttcctcatttcctagaaagttttttgttacttacaactactttatgaaccaagctgtgatttaaatggtggagtgggtttttagtgcataacatcattttaattcctatgacagctcatttgaaaccagccattccagaaggattttactcatatgatttaaaaatgcatatttctgctttgtccttaaatgcctgaaaccatcatatcatcatatcattacaaatagtaatttgtaaaatttaagttttaggccaagcgcagtggctcattcctgtaatcccagcactttgggaggccgaggcaggcggatcacctgaggttgggagttcgtgaccagcctgacatggagaaaccttgtctctactaaaaaatacaaaattagctcgggtggtggcgcatgcctgtaatcccagctactcaggaggctgaggcaggagaatcgcttaaacccgggaggtggaggttgtggagctgagattgtgccattgcactgcagcctgggcaataacagcaaaactccgtcaaaaaaaaaaaaaaagttttaactagtcaattttattggctgtaccaatatatttattagtcattaaaaaaaaaaaaaaaaggctggctgggcgcggtggctcacacctgtaatcccagcactttgggaggctgaggcgggtggatcacaaggttaggagttcgagaccagcctggccgaggtggtgaaaccccgtctctaccaaaaacacaaaattagccaggtgcggtggtgggcacctgtaatcccagctactcgggaggctgaggcaggagaatcacttgaacccaggaggtggaggttgcagtgagctgagatggtgccactgcactctagcctgggcaacagagcaagaccccgtcacaaaaaaaaaaaaggcctagaaattacattctgaagataagccaaatatgatcacaagcccacgagccttccctttaggctatgatctctgacctataacaagagttttgagtagctaaagtcaatcctctgagtctttcaagttctagggaagccttttttttttttttaagaaggagtctagctctgtcactggctggcgtgtgcagctgtgcagtctcggctcactgcaacctctgcctcccaggttcaagcaattcttacgtctcagcctcccaagtagctgggattacaggtgcatgccaccacgcccggctaatttttgtatttttagtagagatggggtttcaccatgttggttggccagtctggtctcgaactcctgacctcaagtgattcacctgcctcggcctcccaaagtgctggcattacaggcgtgagccaccatgcccagcctctagggaagctttttattgaaacgttataataacatttttatgctgttctcattcaggaaaggttgccaggtgtagagcagacttggctagtgtggaaaaccagcttctgcatgcttggtggttctttgtgcttgactttgcaggcaaagctcacataagctccttataggatgttctgcagatgtatcttagtgagaactgagcatgtttttgcttccatgctgaatggagacccaggaccactgtctttctttttgttcagttctcctaccccctttcttaagaggatctacttaacattctgtggtagtatttggagcaagatgtcattaattatttttgttgtatttccatattagattttattatgagcaaggacctgtgtgtgtaggtttatttcaatttgtggtccacaagggtctcttggttgtctcttggacaccctcaagggaatcacattgagcataccctagctgaagtttatcgtgatcgtttctaaataagaaattgtactgaaagttttaacttactgtttggaaagcaagtgccttgtttttgactgatttgtgtgtgtgctttttttgttgttgttgacccagattaccagagactgatgactgtggcggagacgattacagctctcatgtttcctttccagtggcagcatgtctatgtccctattctcccagcttctctcctgcatttcttagatgctcctgttccatacctgatgggtttgcattccaatggcctggatgaccggtcaaagctggagctgcctcaagaggtgagatcttgagtgttggtgcctctggccccaatccaggattggggagagaagggctttgggatgaacccagcatgc

SEQ ID NO: 6677 - DNA, 2300 bp, Homo sapien
ttacaggtgtcagccaccacgcctggcatatttatttatttatttatttatttatttagaggtagagcctcattctgttgcccaggctagagtgcagtggcacgatctcggcttactgcaacctctgcctcttgagttgaagcgattctcctgcctcagcctcctgaggagctgggactaaagttgcctgccaccacaccctgctaattttatatttttggtagagatgggatttcaccatattggtcaggctggtcttgaacttctgaccttaagcgatccgccagccttggcctccccaagttctgggattacaggtgtgagccaccacgcccagcctctgtgactgtttaactcactaatccccctctactgtctctgtgtccccagcatgcaggatacgggtggagcatcaccatgaatgggcgttttgaagcaaccttctcctccccacttttctccccctagttcaggcaggttagatacagggaggaacaggtgctatggctccgagagacaatggctataacctctaggtaaacctccccaagggaaacaatatttgagagaagtacccaggagaacctaggagagagcctaggctcagcctttggggaagccagctgccttctacagctcttagtggcagcctcccagaacaaaccgtaagagtacttccttctggaacaataataataatccaggctgggggctcattggctcatgcctgtaatcccagcactttaggaggcagaggagggcggatcacctgaggtcaggagttcgagaccagcctgaccaacacggtgaatccctgtctctactgaatacaaaaaattagccgagtgtggtggtgcgcgcctgtaatcctagctacttgggtggctgaggcaggagaatcacttgaacctgggaggcagaggtgcagtgagccgagattacgccattgcactccagcctgggcaacaagacagaactccgtcttgaaaaaaaaaatctgtaatatttactgagtgatttccatgttccaggcagtattctcattgttttacctgtacttgcatttaccttatgtaattgtctcaaaaaccatgacgccaggcacttagagattaacttgctcaaggtcaaaagtaaatgatcgtcaggattgaaatccgagcatttttttctagagcccatgctagtgaccactatacctgtgttgcctttctggcctctgatctccagtttccaacaaagacacatctgcctagcttctatgggaaaggaaatcggagggtcctaggacaaggaccaataggtaagtttcccttcgcctcctccctatcctcttacaggaaaacaggtttaggggtggatctgagagttttcacagagtgaagaggaagaggagctcccaaatggcaggcgcctctggaggcttccagagaaaaaaggagagagcgtgggaaaagggcaggctgggaggtgggagcggcgaggaacggggagctgaccacaagcccaggattccagaccaggcttatgtctcttagactcagcgtaaccttggataagtccttgcttctttctgagactcagtttccccgtctgtaaaataagggtaaatataaaaccggctcatccgcccctgccaaaagagaggacagggagaaggccctgtctggggtctaggctgacacgctgcagctaggattaggtgagcttccgagctcagtcgtgagaccccatcctcatggcaaggccgcgctaagatctctggacctctgcttgctgggtgggtggttgggggcagagcatgggccaaatgcccggctctgcaggctgcgcccactcttctcgcacctcctcagccctccctaaaggagtctcaatcccgggggagtggcagttgcgggcgaccaagcagtcaccggctgcgctgcggcgacctcccgggaagctgcggccggcggggtccgaagagcatcacgtcatcctttcccccaggagcccgccccctcccagacggcgcctgcgcaggcgcggtaggaggagggtcacggtgggggctgtccacgcgctctccgcccttctccaggctcgctcgggccgcggcgctctcggctagctgcagcggcggcggcgcggaggggaaggcatccaggatgcggtgcggggcggcccggtgcccccccgccccgtcacggcagccgcggcggccgaggggaccgggccagggccgggggcggcggcccgagccgcggtagcggcggcggcgggaggggcggcctgagggcggacgggcgggcgcccgg

SEQ ID NO: 6678 - DNA, 2300 bp, Homo sapien
catatctttcgtagcatttctttccattctcccaccctttgcttgaagctttttttctaatataagcagtagcttctagcctttgcaaaagctattttctctgctttcaactttgttaattcctattcatcctctaaaaatcagttttaatcctgcttcctgggagactttacagccccactgtaatttagatattcctctcttctgctattgcaatctgcgcacccctcagtcactcttatcacactgcactgaggttgttcatcttttcctaattttttggaatttcctaagttttggagttggctttcccactgcgcactcagatgtcttaagcacatttaattttttcttctgtgtgttgataattcatattctttgcccatttttctgttgagttgtgctttccttactgatttgtagtaattcttatgtgtcaaatacttctcagtgtttgtttttagtttttgttgtacttcaatttttaatgtttgcatagtaaaatatataaaatgttttcttttttttttttttgacttgaactcccgacctcaaggtgatccgcccaccttggtctcccaaagtgctgaaattacaggtgtaagccatggcacctggcccataaatataatttcctaagattgaaaatttattcggctgggcaccatctcaaaaaaaaaaattattcaacaaattcattgaatggccacttaggtattggcactctgtcagctaccggggatacaatggtgatcaaaaagacaaagcccagctgggagccatagcatggagcctgtagtcccagctactcagagggctgatgcttgaggatcccttgagtccagaagttcagatccagcctggacaatatagtgagattcccatcacttaaaaaaacaaaaaacaaaaagacaaagcccctgccttaaagcttatattctaaaggtggaggcagacaataaacaagtaaacaaatagttcacagaattaattgcttttaatgactatgaaggaaataaaatgggagccagaagtaggcaaaggatgtgtacataaaacagttcaattgaatgggtttcccataatttacttaaccatttttatttagtgttggatttttatattgcttttagtttttcactgttatactaatacagaggaattatttatgtttattttcatggaataatttcctacaaatgtaattactgaatagaaacaatcaggattttttttttttttttttgggacggagtcttgctttgtggtctatgctggagtgcagcggtgcaatttctcaccgcaacctcagcctccggggttcaagcgattctcctgactcacactctcgagtagctgggattacaagccatcatgtccagctcatttttgtatttttagcagagacggggtctcatctcaccattttggccagtctggcctcacactcctggtctcaaatgatccgcccgccttggcctcccaaagtgttgggattacaggcttgagccaccgcgaccggcctctaagttgctttcaagaggtaaccacggtgagtaagctgaatgtgctctgaggggtagaagcagaaaaagttacctgtggaaaaggcatgtttccgcttagcttagggataagctaaatgtagagctgacttgggtttagtagtaaggggcagcagctaatgcaaaaccgttagctttgggaacaggacaacctggattctaagcccatttttgccatcctgtgatcttcacaggttgtacgtagccctctctgagccttagtttcctgaaattcaggtaggttttgctcaacctttgtatttcccaccatcttttagatcaagcactctctggcgcctccaaattgaagacagcagctgcggaattgatgtaatgggctgaatcagcctcagccgcgaaatgccgactaatcacaggcacctccggcggcctggacaaaaggtttgaagtccctgggaccgcacttccgggtaattaaggctacgctttagacgccagggccagcgagtcgcagccgggtgactcgagtgccgcgactgcgcatgctctcgccccagcgcccggcggccacctctttcccgcgggcgggccggggcggggcactgaagggggcggtccaggaccctgacttgtctcgcggttactgggccggcgcgagcacgcgaggctcgggggcggcacggggcggggtttagcctgtggtgggcgctgcgggtgtttgcaggaggttgcagtactcgctgggctgaggtcgtctcgggtgaggaggtcgcg

SEQ ID NO: 6679 - DNA, 2300 bp, Homo sapien
ggctggtctcgaactcttgacctcaggtgatcccgcccacctcagcctctcaaattgctgtggttacggttgtgagccaccatgcccggcctaaattaggaataattctgtcttacttccagtacttccaggcacagtggctggcatatacaaggtagtaacattgcaaaacccaccgcttcagggaaaggctttcgtgagcctttccttctcttttttttgtaaattaaaaacaataagtgatcatttaacacattgtatttgaaggcttataattaattttaagtatatctgtttatataactttgttacaataataacagatatgaaaggaaattactccaaatctcaccatcctgttaatagaaaataaattattttcatttgctaaccttgcttttcagtctttgtccatgttacaaagctatatccttccataaatacttttttgttatattttttaatggctgtgaaatatttaatttactggattcttgctatttgcttaaccagtcctatattgttcaacatttctcttcagaggcagagtgatttagtggaaacaatggaaagtttgaaaacaaagatcttaggtttgaaatcttagttgaacctcttactacgtgaccttgggtaagttatttaacctttctaaaacaaactttttcttggctgttataaaagaggactttttctttctttctttctcccccacctccctctttttttagagatggggtctcgctatgtagcccaggctgtagcgtagtggctactcataggcacgatcttaacaggctgtcaccttgaacttctggtctcaagcaatcctcctgcctcaacaggaggattacgcctggctaggaaggtgtcttttatttttatttatttatttatttatttttgagatagagtctcgctctgtcacccaggctggagtgcagtggcatgatctcggctcactgcaagctccacctcctggattcacgccattctcctgcctcagtgtagctgggactacaggcgcccaccaccacacccggctaattttttgtatttttagtagagacggggcttcaccgtgttagctaggatggtctcaatctcctgaccttgtgatccgcccaccttggcctcccaaagtgctgggattacaggtgtgagccaccgcgcctggcaggaaggtgtattttaatagggattatgcttttactctgcattaagaggtgatttatatgaagtcccaactaaaatttggatactcaataaaaagccatgatttcagtatttggtaattactaatacgtaatgtgataaaaacctttcacacataaagttcatttaatcttccgtgttattgccttaggataaagtctcataagtggaattactgggtcagagtttaaacatttcgtttcgttttgtttttttgagacggagtttcgctcttgttgcccaagctggagtgcaatggcacgatctcggctcactgcaacctccgcttcccgggttcaagcgattctcctgcctcagcctccctagtagctgagactacaggcgcgtgccaccacgcccggctaattttttgtatttttagtagaaacggggtttcgccgtgttagccaggatgctctcgatctcctgatctcgtgatccgcccgccttggcctcccaaagtgctgggattacaggcgtgaaccaccgcgcccggcagtttaaatattttagtggctatcagaaacacatctcaaattgcttttcagaaagtttccttcaatcacgcagccattagcaatcgattgcaccacacactgtatctgactccctttatgaacattgtggatatagtatgtgaaaccttttgtaactgattgttttgcttttctttttgtggaacttgaacatttttcgtttttgaacagaaagacttgtctgtaggaacgacagctcaggcagccacgtgggctgcggactgtgtttgtggactacatctcccaaagtgctccgcaggcgcgcccacaggaagtcgccggagcatctcccgcctccacgccgaggcgaagaggttctatccggggccttggcgcttctctttcctttcgcgccggttgccgctgcggagcgcggcgggtccatgtgcgcagtgagtggcgctattcctggcccagtagcacccgagccccgggtttgaccgagtccgcgctgcgatggaccccaacaccattatcgaggccctgcggggcactatggacccagccctgcgtgaggccgcggagcgccagctcaatgaagtaaggacg

SEQ ID NO: 6680 - DNA, 2300 bp, Homo sapien
ttttgtagtttaatttttttaaagatttgtttcaaaaaggtttatgaacaatgcagaagaaacaacatttctacaccctccataggaaactagtttggtgtatatttttctttgcacatttaatagatataaaatataacttttaaagttctcatatacatattgtgcacctttttgttgtacaatttataatccgtgcaccgattataaataaacagttcagtgagttagcacaattattatgtacccatgtagccatcacctcagaatgtttgctcatggctggttctagtcatctctggcatcatctcattcccggcacaatagatttaatctgttttagaacttagtaagtaatcttttgttcctggcttctttcacttaatatatttataagattctttcatgttgtatagtggtagtttattattttttattgctgagcggtatcccattgtatagatatatcacaatttatgtatgttgatggacatctgggtagttttactttttcagtattatagataaagctatgaacattcttacgtgtctttttgtggtcacatgtttttcacactcttgcataaatatcaaagaaaggaattgggtcataaggtaggtgtatgttttactttacaagtaacttccaaagtggctgtagcattgctttcactagcgatgtatgagagtgttcacttgctctgtatattcacttccttatcctacttaaaaaaatatgtcatggataggctgggcgtggtggcttacgcctgtaatcacagcactttgggaggctgaggcgggcggatcacgaggttaggagatcaagaccatcctggccaacatggtgaaaccctgtctctactaaaaatacaaacattagctgggcgtggtggtgcaagcctgtagtcccagctactcgggaggctgaggcaggagaatcacttgaaccagggaggcagaggttgcagtgagccgagattgtgccactgcactccagcctggcaacagagtgagactctgtctaaaaaaaaaaaaaaatatatatatatatatatatatatatatgttatggatgtcttaggttattaatgtataatgatccaattccttctttcagtgattgtataggagtcttttatggatcttccataattgaacattattaatgaatcttcaggttcttggaaattttttaccattacaaataatatgataattaatattctcatacacaaatcgttgcgcatttatacttatatatctgaaactagatttctgaaatggagtttctcatgccctttccattatgaaatatactgattttgattaagctacaattgtcgtggccttgactatactatttagatcttggctaaaatgtttggctttaagcttgtagaattattttaaaaagcatgtcttttataaccaactagtgaagcagtgaggatgcctctttgatttaaatagggttaatacttttccaagtctaaccttctactatgaaaggccaacatcaggccaggtgcagtggcgcacgcctgtaatcccagcactttgggaggcggaggcgggtggatcacgaggtcaggagatggagaccatcctggctaaccccgtctctactaaaaatacaaaaataaaattagctgggcgttgtggcggccacctgtagtcccagctacttgggaggctgaggcgggagaattgtgtgaactcgggaggcggagcttgcagtgagctgagatggcaatagagcaagactccatctcaaaaaaaaaaaggccagcattagtgaagcattcacatttttgtcaatctattctcatctcatgctgttcctcctatattgtattatctctatcattaaataagtgtctttttaaaggaaacacttcaagttgaagaagatgatcgacctgagttaccatggtggaaatgcaagaagtgggccttacatattttagcaagactttttgaaaggtaatctcatccatatatggtgatttaaattaatttattaaggttttgctttaaagtgctagcataaagcattataaagaaacaatgggcattttgatgttcttttagatatggaagccctggcaatgtttccaaggagtataatgaatttgctgaagtatttctgaaggcatttgctgttggtgtccagcaagtaagtctgtttttagtttttctcagtggaaacatggcatctttaagttaatttatatattgcttattcccagtttctttgacatctaaagagtgcctgtttggaccctgtaccaggtctc

SEQ ID NO: 6681 - DNA, 2300 bp, Homo sapien
tttcttgtctggagtttatagggcaacatttgccctcaacaggctgcctcttcctccctccgttcctctctcccctactggttttttgtgttattgttgttttcttttttaaagagaaaagggtttcctagaaatgtcaacatcttagctttttgtagttctttacgtgagaaaggttaggtgttttagctaccacctgtgtatgagaagttagtggttgtcaacttgctgtaatccagaatggcactacaggataggtgctttgatcacaaagaccaagatgccagagggctagactatgaaagataggaggcagacagctccagatcctcacagctatccagatcctttagtctttcatctgtgcaatgaacattgcagttattcatattaattagggtacctcaagtaatactcagagcctgtacacagggtaggaaattgtttccttgatttagatacctgatttaaaggataaagccttactgcaatttatattctgttttgatcaggttcttacaggagttgcaggagaagatgcagagtgtcatgcagcaaaattgttagaggtcatcattctgcagtgcaaagggcgtggcattgaccaggtcagtgaagctaataatgatttgtagttcagaggggtaatcttttccttccactttctttcttcattttttggcatttgttgcatattctgtatgtttttgtttattgagacatctagacaactaatatttttagttcaaaatgtaactaatatataataatgatcatatgtttaatgtacaggaattggactaagttttatggctactttgttatcatgaaaggtaaacttttgcttaagattttttggatagctttagtaattaaatatccatggtcagtttttttgtttgtttgttttgttttgtttgttttttgttttttgttttttttgagtgagagtcttgctctgttgcccagactggagtgcagtggcacattctctgctgactgcaaccagattcaagcagttctcctgcctcagcctcccaagtagctgggattacaggtatacaccaccacaaccgcctgattttatatatatatatatatatatatatatttttttttttttttttttttttttttttttttttgagacgctgtctcgccctgtcgcctaggctggagtgcagtcgcgcaatctcagctcactgcaacctctgcctcccaggtgcaagcagttctctgcctctgcctcctgagtagatgggattataggtgcctgccaccacacctggctaattttttatatttttagtagagaaggagtttcgccattttggccaggctggtctcaaactcctgacctcaagtgttctgcccacctcagactcccaaaagtgctgggatcgcaggcatgagccacgtcacccggcccacggtcaattttaataggaacttgtgaagccatgattgatatcatcgtgagcttttatttattttttatttatttcatatatttttttgagacagagtctcgctctgtcgctcaggctggagtgcagtggcgcgatctcagctcactgcctctgcctcccaggttcacgccattctccttcctcagcctcccaagtagctgggactacaggcacccgccaccacgcctggctaattttttgtatttttagtagagacggggtttcactgtgttagccaggatggtcttgatctcctgacctcgtgatccgcctgcctcagcctcccaaagtgctgggattacaggcgtgagccaccactcccggcccgtcgtgagcttttaatagctccatgaagactactagactttctctaaaattagatttcccagtgcagtgcctcagcagtaaatattggtcatctaatgctacaatagggttaattgaggcaacaaagaagttaatatttttagaatgtttgcatgctattaattatagtcttagaatatcttgctatctttttttgtagtgcattcccttattcgtggaagcagccttagaaagactgacaagagaggttaagacaagtgaacttcgaactatgtgtctgcaagttgcaattgcagctttgtattataatccacacctactactcaataccttagaaaatcttcgcttccctaataatgttgaaccagttacaaatcattttattacacagtggcttaatgatgttgactgtttcttggggtaagtgatgtattgcaattttactacatttgctttgggaggaactctgcttatttaagaaaagaaaacagttttttttttttt

SEQ ID NO: 6682 - DNA, 2300 bp, Homo sapien
aatccttttttttttttttttttttttttttttgagacggaatcttgctctgttgcccagcctggagtgcagtggcgcaatctcagctcactgcaagctccgcctcccgggttcacgccattttcctgcctcattctcccgagtagctgggactacaggcgcccgccaccacgcctgctaaattttttgtatttttagtagagacggggtttcaccgcgttagccaggatggtctcgatctcctgacctcatgatctgcccgccttggcctcccaaagtgctgggattacaggcgtgagcctccgcgcccggccacctaatccattttttatatgtgacacttttattttaagggcttaaaaagtaatccgggccgggcgcggtggctcacgcctgtaatcccagtactttggtaggctgaggtgggcggattacgcggtcaggagtttcagaccagcctggccaacatggtgaaaccccgtctctactaaaaacagaaaaattagccgggcgtgatggtgggcgcctgtagtcccagctactcaggaggttgaggcaggagaaatcgcttgaacctgggaggcggaggttgcagtgagctgagatcgtgccactgcattgcagtctgggctacagggcgagactccgtctcaaaaaacaaacaaacaaacaaaaaacagtaatccgaactgatttaaacttctttattaacagaatatatgttcaaacaaagcttaaagtcccattttctttccattggcgtctaggcccctattactcaactatccgttggttagggcctgcacctcaaggtaggcttaattgtaaatcaaaatatttactatccacacttagagggctatctgtaacatcgtttttatttatccccgtccattcgataatcgtctgaaatgcaagacattaagttgaacatcatccagctttctccctgtttttctaagcgcgatccaaatctgttacaacagggtagtctctcattctcttggtagctcaattctaccccctggccgacttaagaaattttgagtctaatacacccacctcatctttagtcggcctggtgcgccaacgcaaatttgtactgagtaccttcggaactgactagtaagtatatccaaaggtttagaaagggctgggttaagagctacaagaagcattaaccgcaacggccacaactaatttgtatccattcttagtaactttagggaaccagactgaatgcttctcccacccttttgactttcctttattagttcgcaacacaagaacatacaaaagaccgtagcgacaaccatttctgacgccttcaacttttaaatccaaattacgtgaaaccacaaagcatcagtggtgtctccccgaggaatccaagaccccccggccggttgccaagccgccggaatttcagcaggagaggaaggctcaccctcccaccgcatggcgatgcccgggagactggagaagctcaggcaggcttggaagccaatccccggcatacagcagctctcgggaatgcagagccctagagcaagaccaagggcctcggccgacactgagagcctccagggagaggtcaggtctctctttctgtcctatttctcccttcgacttccctcccagcaggctgctattgagcattcagcaatcgccagacaaagcccttctggtctgcagaacgcactccggcaagcccaccgggagaaccaaagccgcctcctcgcccctgtggggaaaatggcgctcgtcaccccggctccctcccgggtaatcacaaggaccagcctccctccctcgctacaaaatggcgcctcccgctggggccccagaatcggtatgactcgctagtcagtgaggcggggtccgtctgggataagcggttatgtcaaccagtcagacacaggagctttgattctgcactttgcgcgagccactcaggggcgggctgtaaagtcaggcttggctgacgtcagttgagtgggcgcggctagggcggttttctttcgcgtcgaccaaacgtgggccaatggaaaaccggaagcgtcctgtgagtgatgtaatgacagcccaatggaagctgggggcgggcctcagacacactatgcgggttgcggggcctgggggccggacggctgtttcctgtcctggtgcatggtggtcggacgaaggaattgttggaaaattttctcggaggttcgtatataaatgtgtttttacccagtgtgcattattctccgcctggccgccgccctcagcgcggcggcgcgggcccgcttgggccc

SEQ ID NO: 6683 - DNA, 2300 bp, Homo sapien
cctgggttcaagcgattctcctgcctcagcttccagagtaactgggattacaggcgcctgccaccacacccggctaatttttgtatttttcgcagagacgggggtttcaccacgttgaccagactggtctcgaactcctgacctcaggtgatccgctggcctcggcctcccaaagtgctgagattacaggtgtgagccaccacacccaggctaaaattcaactaattatcacttttttttttttcgagaccggtctctgtcacccagacgggagtacagtggcacaatcacggctcactgcagcctggaactcctgggctcaagtgatcctctcacctctgcctccaagtacctgggactacaggcacacgctgatttcacttaaaaaaaattttttttgtagaaacatgggagggccgtctccctatgctgcccaggcctaattacacattttaaatgggtgaactgtaaggtatgtgaattacatcactaaagctattttaaaaaataaaggcgggcatctgtaaagcaaaaaaaaaaaaggcactcaagtatctgtagacagctgactgctcatagaatttccaaatagtggacactgacaattaaaaaaaaaaaatttccaaacagtcaaaatacgccaggacaaaattagctatgcatcttatgggtgtttttgagtgatctccttatcacgttattttcttactaaacgtaaacttgatctacatactcagcaagaaaaaacattaaatactgcaccgttttttgtcaactacaggaaaacacaagtatcttctggtaagattcaggacaaagccgaccacaatctcgaacctacaatttctccccacattctcacttgattatatcagctgatttagacacttccaaagcaaaggctgacgctgattttaaacaaataatgggctggcaatggtattcttctttcctctttttaacttcgttattatgtggaaaaaacaaatgtccaaagcaaaaggggaaggaataaaaactagttcgcgttccacaataatacgtttcaaagagacttataagaatttgttcactcttttggccaaaactggagaaaagggaggataaaattgtaaatttctaatatccgatgttagacctcagtaacctttttttttttttaatagaagaaagggtgagggggaaacaatctgcccacgatacgcatgggaagcaagcgctaggtgagaccggcaggtcctgggagggcctgggccagccctgtccccggcgcccccgctgcggcctggtgtggcccgtgggcccggcgtcccaggcggcggaactctgcctcggcggcgcctggggactcgctctgcgcggaggtcaggccgagaaacgcggccaaggctcccgagggctccaccctcccctctttcactccctccccttggcggtcccctgagggaaacaggcggggcgcatcgctcagagacaagctggggggagttgagtcctcaacgaaaaaagctccgccgcctagagtggcggccgcgggttattaataaactccgcttctgcccagacgccgctaccgcggccggcccataaaatcggcaaggcctgcggcggaggctgagcagcgggagccggagcccgggcccaagcgggcccgcgccgccgcgctgagggcggcggccaggcggagaataatgcacactgggtaaaaacacatttatatacgaacctccgagaaaattttccaacaattccttcgtccgaccaccatgcaccaggacaggaaacagccgtccggcccccaggccccgcaacccgcatagtgtgtctgaggcccgcccccagcttccattgggctgtcattacatcactcacaggacgcttccggttttccattggcccacgtttggtcgacgcgaaagaaaaccgccctagccgcgcccactcaactgacgtcagccaagcctgactttacagcccgcccctgagtggctcgcgcaaagtgcagaatcaaagctcctgtgtctgactggttgacataaccgcttatcccagacggaccccgcctcactgactagcgagtcataccgattctggggccccagcgggaggcgccattttgtagcgagggagggaggctggtccttgtgattacccgggagggagccggggtgacgagcgccattttccccacaggggcgaggaggcggctttggttctcccggtgggcttgccggagtgcgttctgcagaccagaagggctttgtctggcgattgctgaatgctcaatagcagcctgctgg

SEQ ID NO: 6684 - DNA, 2300 bp, Homo sapien
agaatactgcaataaacaagggtcccctaccctcggggaccttatttttctagaaggagatagtaataaactaacaacgtactttgagatagaaataagcctgctaaggaaataaagccaggtgttgtgaaagagcaaagagtgagggaggggacgtgagaacagagatacggaattcttacataggaggagtttaggagcatcagtctagttgtggagaggcaactaaagggctttaaagtcccatttacttagaaagcacactattttcacatgcagtttatgttacagatcgataaaagtagggttctctatttttatttatgcttcataataaattgagaaaatgtcaattatatcaaataattatatttgtcatcaggagtggcaggagggggcccacagcctgggcaatatggtggctcatgcctgtaattccagcactttgggagacggagacgggcagattgcttgagcccaggagttctagaccagcctgggcaacatggtgaaacagagtctctactaaaaatgcaaatattagctgggcgtggtagcacacatcattagtcccagctatttgggagggtgaggtgggaggatctcttgagcctggggagatcgaggctacagagccgtgattgcaccactgtactccactttgagacagggtggacagagtgagaccctgtctcgaaaaataaaaatttaaaaaaaaggagtggcaggaggggaagtgttggagcaagggttctgaaaatcactccttggctttggccactgtggatcattgactaactctccttatacaagtctagaattcttgtcctccaagagcttaaaattaagtttgcatgaccatataaaaaacacatttatacaccagttagcaaatgttaggagaaaagacagctgttgatccttcactgtgtcttcagttgtgtgatctcaggaaattcccgatttgatgtgttaagtactaccgtgtgtttcaagaaaaattcagcttgagtttatttagcctttgaaaagcattagaacaacatatatgacaaagtgttaatatgcataaagtgctaacaataagaaaaataggcaatagagataaatgtaaattatcattaaacccatgacaactgttcaacaatatgaatcaaaacaacaaaaccacatcaacgaacatccactgatgtcctgaattcacagagtgtgctctaatccactgctagtgagaatgtattgtgtttctggagggggagtttgccagtttatatcctttgactgaggaattctaactccagggaggtatccaaaagagtattttaaaaaggccaggcgcggtggctcacgcctgtaatcctagcactttgggaggccgaggcgggcagatcacctgaggtcaggagtttgagaccagcctgccaacatggtgaaactccgtattttgcattttgtaaaaatacaaaaattggccaggcctggtatgtgcttgtaataccagctacccgggagacaggagaatcgctggaacccgagaacccgggaggtgggggctgcagtgagccgagatcgcgccactgcactccagcctggggcgacagagcgagactccgtgtcgaaaaaaaccaaaccaaacaaaaaacatggagaaggaagcatatacaccacggggttgtttacaacagaaaactggaagaggccgggagcggtggttcacgtctgtaattccagcactttgagaggccgaggcgggcggatcacttgagatcaggagttggagaccagcctggccaacattgggaagttcgtctctactaaaaatacaaaaattagccaggtgtggtggcagccgcctgtaatcccagctactcgggtggctgaggcatgagaatcgcttgaactctaaaggcggaggttgcaggttgtagtgagccgagatcgtgccactgcactccagcctgggtgacagagcaagaccccgtctcagaaaaaaaaaaaaaaataaataaacaaagaaagaaaaaagaaaactggaagaaacgtgtaagtgcattaagggacagattaaatcagtttaacgaagcactagggaaattttttaaaattgcgtttgagtttgccgcgagccgggccaatcggttttgccaacgcatgcccacgtgctggcgaacaaatgtaaacacggagatcgtgtgccgggcacttggtttcgtggtgggcaactgtgctgctgtttcttttggccgcggacaaggtcggcagaggtggacccctgcttgggagagctcttctcgctgtgc

SEQ ID NO: 6685 - DNA, 2300 bp, Homo sapien
aggagaaaagacagctgttgatccttcactgtgtcttcagttgtgtgatctcaggaaattcccgatttgatgtgttaagtactaccgtgtgtttcaagaaaaattcagcttgagtttatttagcctttgaaaagcattagaacaacatatatgacaaagtgttaatatgcataaagtgctaacaataagaaaaataggcaatagagataaatgtaaattatcattaaacccatgacaactgttcaacaatatgaatcaaaacaacaaaaccacatcaacgaacatccactgatgtcctgaattcacagagtgtgctctaatccactgctagtgagaatgtattgtgtttctggagggggagtttgccagtttatatcctttgactgaggaattctaactccagggaggtatccaaaagagtattttaaaaaggccaggcgcggtggctcacgcctgtaatcctagcactttgggaggccgaggcgggcagatcacctgaggtcaggagtttgagaccagcctgccaacatggtgaaactccgtattttgcattttgtaaaaatacaaaaattggccaggcctggtatgtgcttgtaataccagctacccgggagacaggagaatcgctggaacccgagaacccgggaggtgggggctgcagtgagccgagatcgcgccactgcactccagcctggggcgacagagcgagactccgtgtcgaaaaaaaccaaaccaaacaaaaaacatggagaaggaagcatatacaccacggggttgtttacaacagaaaactggaagaggccgggagcggtggttcacgtctgtaattccagcactttgagaggccgaggcgggcggatcacttgagatcaggagttggagaccagcctggccaacattgggaagttcgtctctactaaaaatacaaaaattagccaggtgtggtggcagccgcctgtaatcccagctactcgggtggctgaggcatgagaatcgcttgaactctaaaggcggaggttgcaggttgtagtgagccgagatcgtgccactgcactccagcctgggtgacagagcaagaccccgtctcagaaaaaaaaaaaaaaataaataaacaaagaaagaaaaaagaaaactggaagaaacgtgtaagtgcattaagggacagattaaatcagtttaacgaagcactagggaaattttttaaaattgcgtttgagtttgccgcgagccgggccaatcggttttgccaacgcatgcccacgtgctggcgaacaaatgtaaacacggagatcgtgtgccgggcacttggtttcgtggtgggcaactgtgctgctgtttcttttggccgcggacaaggtcggcagaggtggacccctgcttgggagagctcttctcgctgtgctgacacccgcccctaacagtcacccaccccggggaaataatggggctcggaggcctcctcccagccagtgtccagcctaagcacatcggctcccgcagttcagaaaggtcccgaggcccgagtcaccatttccggctcagacctcgaccctgaacgtggctgcccactgccacgcccactacgccccagtggctcgccccaggggacgaggggcaagaagcggcctccgagggcagcggccgaaggccattcggtccctggctcttcccagctcgcagagacccggaggcgctgcccggccgcctgcccctcttcagatcccccagcaccggaggagcagcgaggggggtgcgtccaggccggctttcgggtcggcttaggcgaatccagctctcttttgcccctcccagaaggcccagccccgtccgggcggtgttcgggcggcgccgggccgggccccccgccgccccaggctcgctcataggcccggaacaccacagcccgcccagacttggctggcgccgagccgggggtggagccagcgggttcccgccaaaatcgcgtagctggtccttcccccgcgggctacgtcgcgccctcctttttttttcaaacccggagctgcactgggattggtggactgggcactcacgtggttaacggtcgcgggaagccgcggagcccgaacctgagactggacctgaggagacctcagcctcggtgctcgggccgccccgcctctgccggaaagtccgcgccgccgctgccgccaccgtccgcagcccgagcgccccggagccgcaggccgccgccgcgcagagacgccgcggctgcgactaggcgcgcccagccgcacgtggcggacccgcccccaggcccgcagtgtcctggaccccgc

SEQ ID NO: 6686 - DNA, 2300 bp, Homo sapien
cttgaactctaaaggcggaggttgcaggttgtagtgagccgagatcgtgccactgcactccagcctgggtgacagagcaagaccccgtctcagaaaaaaaaaaaaaaataaataaacaaagaaagaaaaaagaaaactggaagaaacgtgtaagtgcattaagggacagattaaatcagtttaacgaagcactagggaaattttttaaaattgcgtttgagtttgccgcgagccgggccaatcggttttgccaacgcatgcccacgtgctggcgaacaaatgtaaacacggagatcgtgtgccgggcacttggtttcgtggtgggcaactgtgctgctgtttcttttggccgcggacaaggtcggcagaggtggacccctgcttgggagagctcttctcgctgtgctgacacccgcccctaacagtcacccaccccggggaaataatggggctcggaggcctcctcccagccagtgtccagcctaagcacatcggctcccgcagttcagaaaggtcccgaggcccgagtcaccatttccggctcagacctcgaccctgaacgtggctgcccactgccacgcccactacgccccagtggctcgccccaggggacgaggggcaagaagcggcctccgagggcagcggccgaaggccattcggtccctggctcttcccagctcgcagagacccggaggcgctgcccggccgcctgcccctcttcagatcccccagcaccggaggagcagcgaggggggtgcgtccaggccggctttcgggtcggcttaggcgaatccagctctcttttgcccctcccagaaggcccagccccgtccgggcggtgttcgggcggcgccgggccgggccccccgccgccccaggctcgctcataggcccggaacaccacagcccgcccagacttggctggcgccgagccgggggtggagccagcgggttcccgccaaaatcgcgtagctggtccttcccccgcgggctacgtcgcgccctcctttttttttcaaacccggagctgcactgggattggtggactgggcactcacgtggttaacggtcgcgggaagccgcggagcccgaacctgagactggacctgaggagacctcagcctcggtgctcgggccgccccgcctctgccggaaagtccgcgccgccgctgccgccaccgtccgcagcccgagcgccccggagccgcaggccgccgccgcgcagagacgccgcggctgcgactaggcgcgcccagccgcacgtggcggacccgcccccaggcccgcagtgtcctggaccccgcaggcctccgctctcctgtcctcggccccgtccccagggccgcgatgagcttcctgagccgacagcagccgccgccaccccgccgcgccggggcggcctgcaccttgcggcagaagctgatcttctcgccctgcagcgactgtgaggaggaggaagaagaggaggaggaggagggcagcggccacagcaccggggaggactcggcctttcaagagcccgactcgccgctgccgcccgcgcggagccccacggagcccgggcccgagcgccgccgctcgcccgggccggcccccggcagccccggcgagctggaggaggacctgttgctgcccggcgcctgcccgggcgcggacgaggcgggcggtggggcggagggcgactcgtgggaggaggagggcttcggctcctcgtcgccggtcaagtcgccggcggccccctacttcctgggtagctctttctcgccggtgcgctgcggcggcccaggagatgcgtcgccgcggggttgcggggcgcgccgggcgggcgaaggccgccgctcgccgcggccggaccacccgggcaccccgccacacaagaccttccgcaagctgcgactcttcgacaccccgcacacgcccaaggtgagagcggcgggcgcgggcacccggcggccggggccgcggcgccggaggggccagcgccgctgcctgggttcggttacagaagcggccggccgctcccccctcgctttcctgcgccgccccccaaagttggcagcccttgtgtttggccctgccccgaggttgtccgttgagattatgtaactgaacaatgggcctcgtctggaacttcatcttacaaaggggccgatcggcccgtccgggtggccaaggatttgccgcccgttgagtccgggccgccccgagcgtgtcagccccgagtgcggcaccgataacgcggttcgcgaggatgctggagggtgccggcccggccacctgacactcccgagccataggat

SEQ ID NO: 6687 - DNA, 2300 bp, Homo sapien
attagccgggcgtggtggctggcgcctgtaatcccagctacttgggaggttgaggcaggagaatcgcttgaacccgggaggcggaggttgcagtgagctgagatcataccgttgcactccagcctgggcaacagagtgagactctgtctcaaaaaaaaaagaaaagaaaaaaaaagaaaaaaaatgcgtttggattgtatgaatgaggatgatgggagaagtaggaatttggaagtccacaatgtcctggtcttgtcataaaaaaaaggctttgaaatatgtttggtacttccagatactgagagagaagaagggtcatatagtggttaaactgaaccttgagaattaggaggttttcttcgtttcttttttcttcttcttcttttttttttttttttgctactcagggtaagctgacttcgcatgaataaatcagaggttaaaccatgtggttttgctgactggcagacttgggctggaaatggggaagataaatgatagaaattggattctggtagggcaagaaaagtcctgacaaatggtgatgaaatggggtagaaccttcaggacagtcacagtgaggggctggccacccttttgctcctgccccttctttcgtcagtggggccatcctctcctcttccccaccagttcctttttgatctcaaactcactgaagaggctccttcttgttcttctctttccaaatatccctttcttatgaagatcttttcctttcttaataaggcaaacatgtgcattaaggaacttaaaaaagcaaaacaaaaccaaacttcatctgagaaccacctcattttaaaaactcttggtgtttattgttctctccaattagtccaggattggagaggagaggtactgagcctggcgatttaatcagaccttagttaaccggcaatagttattatcctaggatgctagtactgcaagaacccttccagaacatctggtgcaaccctgctctttttatacgggataatttgaagcccaaagagatcaagtgaccattgtgaccaccgcgaacagatattaattcaacagctgcaatcgaatacttttttttttttttttgagacggagtttcactcttgttgcccaggctggagtgcaatggcgcgatcttggttcactgcaacctccgcctaccgggttcaagcgattctcctgcctcagcctcccgagtagctgagattacaggcatgtgccaccacgcccggctaattttgtatttttagtagagacggggtttcttcatgttggtcaggctggtctcgaacccccgacctcaggtgatccgcccgccttggcctcccaaagggctgggattacaggcgtgagccaccacgcctggccgaatacgttcttttaaatggtccatctctttggattagtaaaatgggtggagtgatttggaattggcccagatctcctattctgcaagcagagaaacactacagagaggtattacccaggtcaaacccctcctaagatgtgaattgaacaacagctaggcgttaggaagaaaatgctgcctgaccctgacttctaaactccccttaaacgtcgtcgctgtgtccctagaacccaagatagagtatgcatgaataaacttttgcgaaatgaaccaacaaacttccctcgaggtccttcctgcctccccgccgccctgcatctccccgacttgggactgcgctatcatttcagtcctggtctggggacttttcggggtcttctctggccttctcagacagtgactccgttcccaggacaggaccagggatccctttttcactgcggggcgctgggaggaggcgggtaggctgctcacctaatctctcgggtttttcctcaagacgcggtcatttgtgtgaggtgttgtactcgagcacccaaaatggcccgaactggtctgggaaacattagggagatgtgtttaccgtcctggctgacactgaaggccaagcattcttgccaccaggcgtggcttgactcgcagaacccacactctggcggctgtgggcgcggcactggaccggcgccggcagcagggcggggcctggcgggggcggggcctggcgggtcaggtgactgcgcggcgggctgtggctgcggaggttgaggggcgtccgaggcgcggaggggctggctgggcaggaggggttggcggggcagcagggccgcggccatggggagcttgaaggaggagctgctcaaagccatctggcacgccttcaccgcactcgaccaggaccacagcggcaaggtctccaagtcccagctca

SEQ ID NO: 6688 - DNA, 2300 bp, Homo sapien
gaatattctagaggatgtaggacttgaataaataccaattaactgggtcgagaggtgggaaaaggtattctagacagagaagacagagtggggaatgacataaagcataaggaaaatatggtaagagggtaaactacttataatctatggcaagtggtggcaaactacagcttgctggctaaatccagcccacagcctatatttgcgtggcacatgtgctaaggaatagtttttatatttctaaagggttgtaaaaaaacaaaatcaaggaagaacacatgatagggaggcacaaagcttaaatatttactgttcaaccctttacagtaaaagtttgcatcccctgatctatggtattggtggtattggtggagtgtaaagtctgaggtgggacatgtttgagaaagtaggctgggggatgatcaccaagggatgcagaggagcttggcctctgtctttgaggtgatagggagccagggcagggcttaaagaggggagggtcaggctctggcttttgttttagaaaaatccctctggcagaatatgtataaaaggtggcgacctggaggtacagataccaaccaggaggcccgaccaaaagcagatcaaataggagtgacagagttcagagctgcctgggacaaagttttaaattttattttcactgcaacccataggaagataaacattttatatcatgacccagcacacacacacactcaaagcaaaacttatcacaaaacactatttctttattgtggatgaactcacatgtttttcattccattaaaaaaaaatgctggttgctgcccactaagttgacttcatagtgggccataacccacagttttcaaacttattagggagctcatttagggaaataaaacagcaggattatatccttggtttgatgtgggggttggggagcaagaatcctgacatggatgtgtgaatggtgttattcctaatggaaatcaataatacagcggggaagccatttggaaagtagagaggattcattcatttttggacatatgttgagtttgagagcactgtataggatatttgggctttccagaaaataagaggtatcaattctcattcagttttactgccttattgttttgtttaactgctgttatttctttccttctttacttttttttttttttttttttgaaacaagagtcttgctcttgcccaggctggagtgcagtggcacaatcgccgctcactgcaacctctgtcttcaaggttcaaacgattctcatgcctcagccacctgagtagctgggattacaggtgtgcgccacatgcctggctaacttttttgtatttttagtagagacagggtttcgccatgttggccaggctggtcttgaactccatgcctcaagtgatcctcctgccttggcctcccaaagtgttgggattataggcatgagccactgctcctggcctaactgctattatttcaatagcagtattttctacacaaagtatgatgttttaggatttagtaagcttttcctgctcatgctaggtattccaccattatttacaacattgtagtgttccagtgggaggaagcagcatgaattttaaataattggcttatgtggaaagtttgtaaattgatcaataacttgtacatattactttgagatgtttaatttagcgcttgtttgttgagtaagactaatgttctgatatattgaaatatttaacagcgagtaatcagatcacattaattagtttgtatgctgtcatatatctgcagtttgttttagttctgcagacaaatatactacactattagagggttatcagtttttgattcctttacttattctgcactaatacagaccagtggcattttatttatacttctctccctgtattttaggagactctaaaggtaggcatttttggaactgtaaagagtatttcctaagttgaacttatcagtgtttataacataaatacataactatgttaaagttttttttaactaggaaataattatttcacattctttatgtagattgaatacctgcttaagaagcttacagaagctatgggaggaggttggcagcaagaacaatttgaacattataaaatcaactttgatgacagtaaaaatggcctttctgcatgggaacttattgagcttattggaaatggacagtttagcaaaggcatggaccggcagactgtgtctatggcaattaatgaagtctttaatgaacttatattagatgtgttaaagcaggtaagaattctgttactgtttttttttc

SEQ ID NO: 6689 - DNA, 2300 bp, Homo sapien
ctgctgcacctccacactcatgttttccactcccctcaaagtccaggctgataggagagcagcgttactgtccaactctgccaaacgtgtgtctccattcccatttggagggtgtgtctggaatccttgtttacaaggtgtagaggtggaagagttcatcccagagccccatggccctgtacacctcactgcagttagctggaagatggttaaagcagtgagtgactttttttctagagctgttgccctcccagcctgggctacaaacaatcagtgcttgaatcttcctgcctacccccaccccaatcaggcctttagggcactaagttggaaaggagcctggacttcagagtcaaacaggcctgggctctactgtggttttaccttactgtgtcatcttgggtgggttaggatactgtacaggtgatgtgtcctcagggtgtcacacctgaggcacctggtgttttgtcttcatgcatgttctttagaaagtcacgtggagggggttttccatctgggctgggccaggccacttaatgggcctgtcgctggtgggctggccggttctgagaagatctggcaggtgactgcggttggtcagccattcaaggctactactggagagtccgggaaatacctcaggtgctctctgcatttccacaggcaagtctgtaacttctgaggtgtcctgcaaaggcaggtagctggcaaatctgtgaatggatgagtgcacagaggaggtcccaggtgagggtgacagcccagcaacacacttccccagtcacacctgctctttggaaggttccagcaaggctgtggagaggacccaagggcctgtgactgccacctcccagtagaccccaaggacctccagcctctgctctcccctcaagggtcctgtcgctcccttggtggccattagctgtggtggccagagctgttctccactctacctcccagggcctctatcagcagctgacggttcctgcggcttgtaatgttcctgctgatctgcctcactcactacccgtcaccgctgatgaactttcccaaaagtcagcccagaactccttaagggaaggggcagcctcgttgtggtagttccagcaccctgtaccaagcaggttcttagtaaatgctgactgttgagtggcccctttctgaaataaattccttgttctcaaatatatcctggatctggtccccttgggtccaatcagcgcttgaaccagacagcaatgactgaccacctctactcaagagtttctggtttatttggagcctctaccccacccaaccctaaggctgggaacccttttgccttccttttttcttaaaggaagttaatcccagcacatgtgaaagatggaccatccatcccaatgcctcatgtcctgggcttcatttctccatttctcccagggcaccctgggagtctacatgcaaacagagatactagaaagttaacttccggaaacccccttgataggccaattcgtccccttttctctctctccatgtgatttttttttttcaaaaaatatcttttgtagtttttttttccttatcaccaatacatacccaatgtggaaaactgagaaaaagcaggtttgtaaaaagaataaaatgcttcgccataatctcactctgcagacaacctacaatggcaaaaatcgcaattaattttgcaccaacctaatactaggatttcagtgcacagccttccaggcctacatttaggtttgtttgaaacaggaacatgcggttcaaccgccaacctgagcccgcgtcccctaaggccaataccaccatcctgaccctccttgggaggtcctgaaatgaccccagttccaggggcaacgaaatgcatacgctttcgagggaaggaggggaggaaacgaccctgtggcgcaggtctgcacggccaagggggttccctgagctggtggagcggcgtggcgtggcctaggaagtccctgggcgagggaggcggggcgcggcgtggtgggggcgactgggtggtgcaggcctgcgcacgcgcgcagccgtgggcgggacgggcggcctgggggcttcgccgccaggtggcaggcgtgcgccacgcccgcaggttccagccccgacccgggcgcgcggggccgactagggtcgggtccagtgtgcggtggtcgctccgctccgggccgctccgctctgggcgtcagggcgcggggagctgccccggggttctgtccaccggggaggaaagccacgagcactgagcgcctcctgagagccagccctgacgtgaactcatttta

SEQ ID NO: 6690 - DNA, 2300 bp, Homo sapien
tctgtgaatggatgagtgcacagaggaggtcccaggtgagggtgacagcccagcaacacacttccccagtcacacctgctctttggaaggttccagcaaggctgtggagaggacccaagggcctgtgactgccacctcccagtagaccccaaggacctccagcctctgctctcccctcaagggtcctgtcgctcccttggtggccattagctgtggtggccagagctgttctccactctacctcccagggcctctatcagcagctgacggttcctgcggcttgtaatgttcctgctgatctgcctcactcactacccgtcaccgctgatgaactttcccaaaagtcagcccagaactccttaagggaaggggcagcctcgttgtggtagttccagcaccctgtaccaagcaggttcttagtaaatgctgactgttgagtggcccctttctgaaataaattccttgttctcaaatatatcctggatctggtccccttgggtccaatcagcgcttgaaccagacagcaatgactgaccacctctactcaagagtttctggtttatttggagcctctaccccacccaaccctaaggctgggaacccttttgccttccttttttcttaaaggaagttaatcccagcacatgtgaaagatggaccatccatcccaatgcctcatgtcctgggcttcatttctccatttctcccagggcaccctgggagtctacatgcaaacagagatactagaaagttaacttccggaaacccccttgataggccaattcgtccccttttctctctctccatgtgatttttttttttcaaaaaatatcttttgtagtttttttttccttatcaccaatacatacccaatgtggaaaactgagaaaaagcaggtttgtaaaaagaataaaatgcttcgccataatctcactctgcagacaacctacaatggcaaaaatcgcaattaattttgcaccaacctaatactaggatttcagtgcacagccttccaggcctacatttaggtttgtttgaaacaggaacatgcggttcaaccgccaacctgagcccgcgtcccctaaggccaataccaccatcctgaccctccttgggaggtcctgaaatgaccccagttccaggggcaacgaaatgcatacgctttcgagggaaggaggggaggaaacgaccctgtggcgcaggtctgcacggccaagggggttccctgagctggtggagcggcgtggcgtggcctaggaagtccctgggcgagggaggcggggcgcggcgtggtgggggcgactgggtggtgcaggcctgcgcacgcgcgcagccgtgggcgggacgggcggcctgggggcttcgccgccaggtggcaggcgtgcgccacgcccgcaggttccagccccgacccgggcgcgcggggccgactagggtcgggtccagtgtgcggtggtcgctccgctccgggccgctccgctctgggcgtcagggcgcggggagctgccccggggttctgtccaccggggaggaaagccacgagcactgagcgcctcctgagagccagccctgacgtgaactcattttatctgccacgacccagaaggtgggcgcaattttcctatgttccaggtgtgaaaagtgaggctcagggagctaggcagttgcccaaggggacacagcagtgacggctctgggacgaagcccaggtgtccagacgcgatggcctcttcccgcgttctcggcgggtacggcgcgccgcctgcctgcggcccgcggggaggtggtcgggtggccgccccggctcctcctcgggcccctgaggatttccggccgggaccccgaggagggccctgtggccttgcggcatccgtggtcacgattccagccccacacggcctcccgccagtccctgcgagtgcccaagacggggccgcccctcccgtctcctcccttctctcccctccccggcgtctcccgccgagggcgctgcaggcggcctggttgggatgagggcgggcaggcggcccacaagcaggggcctgtttcctgactcgtttgaccctggctgtccctgcggaggccccagcagacccagcaaggtcatctagggcgaaattccagtctgagccctgagcagtgacttaagttttcccgataaggctcaagaagggacacagattgtcctccccacaccccgcactctgtcagcacctccactctggtgaagcctctgctgcagacagcccggctcgagaagagacaaagatagacttgggacagataaggacagagacagc

SEQ ID NO: 6691 - DNA, 2300 bp, Homo sapien
atttggagcaagacaactccttctggacacagagcttgggacccaccccgcagggctgccccaaccaattttactgagtatccacgcagtgtggttgtcactcacgttttcacttgttagttcattcatttgtttactcattcattcattccacaaacatttattgatctgctggtatgatgcagcaggtacaacaggatgtgtggtgggcacatatctgtatatgtgtgtatatgggtatctctaagcaaggatggcagaacacactctgggtgccctccctcagggttcagtggtgatgatgactcacactcaggtgtatatggcatctgtggggacctgtgtgcaagtacatgcaggcacgtgctctctgaggaggtagctatgactcagtggcacgcggcatctgtgggtatctgtgtggatatgtgtctgagtgcaggcatgagcataggcgcttgctccccagggggtgggggaagtggttgtgactcagctgcacatggtgactgggagcctacaggccagctgtgactttatggctttgcttatttgccaagccaaacagttagtgttgggcgtaaatattctatcagagtgtgcatggaataagtcctgagctagggacctccagcaggcaggagagactcagtagtcttggcccagcagcatctgtcccccgcctgccccctccaccgtaggtatacaggtcctaccctccctccctcgccctctccactcctgcctcctggagactcagcgagctcgtccctcattgactctacatcacccctcacccaccggtcccaggtgcacacacgagaccaggcccagaggtacagggctgtggccttcgagctgccagcccaatccatttttctaccataccaaaaaccccttctttttcagccctcatgaccgcgtcttcctccaacatcccagccccggtcgtaggctcggcaagcccgctccagggcccacttcccatctcggcggccgcagacccgctgcctccccatcggcgcggccccatcttcacctctgagctccttgcccctctctccctggctgtctctgtccttatctgtcccaagtctatctttgtctcttctcgagccgggctgtctgcagcagaggcttcaccagagtggaggtgctgacagagtgcggggtgtggggaggacaatctgtgtcccttcttgagccttatcgggaaaacttaagtcactgctcagggctcagactggaatttcgccctagatgaccttgctgggtctgctggggcctccgcagggacagccagggtcaaacgagtcaggaaacaggcccctgcttgtgggccgcctgcccgccctcatcccaaccaggccgcctgcagcgccctcggcgggagacgccggggaggggagagaagggaggagacgggaggggcggccccgtcttgggcactcgcagggactggcgggaggccgtgtggggctggaatcgtgaccacggatgccgcaaggccacagggccctcctcggggtcccggccggaaatcctcaggggcccgaggaggagccggggcggccacccgaccacctccccgcgggccgcaggcaggcggcgcgccgtacccgccgagaacgcgggaagaggccatcgcgtctggacacctgggcttcgtcccagagccgtcactgctgtgtccccttgggcaactgcctagctccctgagcctcacttttcacacctggaacataggaaaattgcgcccaccttctgggtcgtggcagataaaatgagttcacgtcagggctggctctcaggaggcgctcagtgctcgtggctttcctccccggtggacagaaccccggggcagctccccgcgccctgacgcccagagcggagcggcccggagcggagcgaccaccgcacactggacccgaccctagtcggccccgcgcgcccgggtcggggctggaacctgcgggcgtggcgcacgcctgccacctggcggcgaagcccccaggccgcccgtcccgcccacggctgcgcgcgtgcgcaggcctgcaccacccagtcgcccccaccacgccgcgccccgcctccctcgcccagggacttcctaggccacgccacgccgctccaccagctcagggaacccccttggccgtgcagacctgcgccacagggtcgtttcctcccctccttccctcgaaagcgtatgcatttcgttgcccctggaactggggtcatttcaggacctcccaaggagggtcaggatggtggtattggccttaggggacgcgggctca

SEQ ID NO: 6692 - DNA, 2300 bp, Homo sapien
ccagttccaatcttcatgaggcctgaatgtcagtgctctctgcaaggttgtccactgtattctcacaattgtactcctcattcttgaaaacatttggagttttctttgttccttgcaacaaaaacaaccttgacttgagcagtatccttccaaccatccatccacccatctctccaaccctacatgccctcctaatcatttatacttctttttttttttttttttttttttttgagacagtttcactcttgttgcccaggctggagtacaatagtgcaatctcagctcactgcaacctctgtctcctgggttcaagcgattctcctgcctcagcctcctaagtaagtgggattacaggcatgcaccaccacacctggctaattttgtatttttagtagagacggggtttcaccatgttggtcaggctggtctcaaactcctgacctcaggtgatcagcctgcctcggcctcccaaagtgctgggattacaggcatgagccaacgtgcctgactgatcatttatacttctaatcatctgtctacagatcagtccactagtccattcatccctataagcatccattatcctagagtccacccatcacccatcgatccatataaccaacaactatccatccacatgttaccctttcataacctccaggtagaggggagtaaggtcatgaaggatctcatcacagggctgaggccatccaactttaatgctgaaaagtgggaagctatggaaggattttgaacaggaaagttatatagttggacctgtattttagaaaaataactctgacagctataagcaagatagataggtcttactgtctaaaggcgggaagaccagttggggtaatattaaaatattccagatgatgaattagggcagagacacaggggcttcagaaaagaagattcaagggagagacaggaaagcagctctgggaacaagcccaagccagaagggcaggcctagatggaaaactgtctaatagggggcctcagttttgcaatcaccagctcagcccaagcactgtatttgccccagatctcaagtggaaccaggcctcctgcacattctgcacatttggggcagagttcccaagaagcccaatccagaaccagtcctctctgggcccttcagcagagcactctgtcctgcatctcaggtctctgagtaagtggtatttccagagtacacatgcccccaccaactcatctcacagctcagccttggctacagaaagccagggcctcttctttgttaattttcttcaactcctcagaggttgggcctccggcccagtgaagtcagggtctgggaggcagccctggctccctgcccgcccacagaggatatatttggagcaagacaactccttctggacacagagcttgggacccaccccgcagggctgccccaaccaattttactgagtatccacgcagtgtggttgtcactcacgttttcacttgttagttcattcatttgtttactcattcattcattccacaaacatttattgatctgctggtatgatgcagcaggtacaacaggatgtgtggtgggcacatatctgtatatgtgtgtatatgggtatctctaagcaaggatggcagaacacactctgggtgccctccctcagggttcagtggtgatgatgactcacactcaggtgtatatggcatctgtggggacctgtgtgcaagtacatgcaggcacgtgctctctgaggaggtagctatgactcagtggcacgcggcatctgtgggtatctgtgtggatatgtgtctgagtgcaggcatgagcataggcgcttgctccccagggggtgggggaagtggttgtgactcagctgcacatggtgactgggagcctacaggccagctgtgactttatggctttgcttatttgccaagccaaacagttagtgttgggcgtaaatattctatcagagtgtgcatggaataagtcctgagctagggacctccagcaggcaggagagactcagtagtcttggcccagcagcatctgtcccccgcctgccccctccaccgtaggtatacaggtcctaccctccctccctcgccctctccactcctgcctcctggagactcagcgagctcgtccctcattgactctacatcacccctcacccaccggtcccaggtgcacacacgagaccaggcccagaggtacagggctgtggccttcgagctgccagcccaatccatttttctaccataccaaaaaccccttctttttcagccctcatgaccgcgtcttcctc

SEQ ID NO: 6693 - DNA, 2300 bp, Homo sapien
caccgtgggcaagtactagactggtccttgctgactatgtcaagaaatcttttgactactgttaggttcttagctattcctgtagcagcctctgcaatccttagcatcatagtctttactccagtgatttcaagggagagcagttcctacccaaacctccagcaactctgcaccctgcattactgagagctgcatggtctcctgtgttctgactgcaggccttaactccaccttgggactgaccactcagccttgaggctgaggcttacacattttgattctcaatgcatttatctataaaatggaatctgttaggaaaaacctgaactgttactcctgtacagtgctttggttggacctgcatctaaaagactccttccaaatgaagactgtatttggagtccagcttttcctctgctcaaggagtttcataacgattacagagtctttgtgggacaatatagatagataatttatgttcaaatatacaaatggaagccctgttagggagctatactctgaaatcatagagcctacactgtgtaaaaaagttccattaagcttctaaatataacataggagaatgtcataatttttctataatttacatcaaattacacttgcattcttaccagtcttctggacttctttaacatgaaagatagatacagttttttccacttagccctgctcataccatgcctgagaggagagacagagaaaagtctcaggtcagagccacggtatcagaagcaccactttcttgccatgtatactagagagtgaaatccacagattatggcccaataaggcttattccctagcagtctctttgacttttttccttttttctttttttttttttttcttttgagacagagtctcgctttgtcacccaggctggagtgcagtggtgcaatctcggctcactgcaagctccacctcctgggttctcgccattctctggctcagcctcccgagtagctgggattacaggcgcctgccaccatgcccagctaatttttgtatttttagtagagacggggtttcaccatattggtcaggctggtctcaaactcctgacctcaagtgatccacccgcctcagcctcccaaagtgttaggattacaggcatgagcaaccgtgcccggcctggaaagatgtttcaataggcataaacattctaaattttagttgatattgccaaattgttctccaaaaaatttctaacaaattatattcacactggcagtatttgagatgatctagtaccttattggatatcatcagccatttttaatatttctcaatccaaaagtgaaatctcatttattgtcatttatttttctttgattaatgaggttgatcatcttttcagatgtttatagatcatttgtatttctctgtgactcgcctgttgagatattttgagcatttttctactttatctttttcttatcaatttctgggaattctgtatattactaaacattagccctctttttatatgttacatatactttttacagttgttacttgacttcttttttttttttttattttttgagacagggtcttactcaggctggagtgcagtggcaggatctcagctcactgcagctcgacctcacaggctcaagcaatcctcccacctcagcctcctgggtagctgcaactacgggcatgcaccaccacgattggctgatttttgtatgtttttgtagagacggggtttcaccatgttgcccaggctggtctcgaactcctgggcttaagtgatccgtccaccttcacctcccaaaaaggactgggattacaggcataaaccaccatgcccagccttgattctattttttaagatgtaatacatttatttgtttgattttcaaacagtacataagtctttcccccaatgctttctccaagccacctagttcttcctagaagcaacaagtattattaattaattttttgtgtattcttcgaggcatagttcagcatatataaccaaggtacagaggaaggtattcaaatgcagtttgaaaagccatggcattttctctttctgtctcttatatctcacttgtatccttttggttccagctgcgctactatgactcaggtgaggacacaagctgtaaaggccacattgatctggctgaagtagaaatggtcatccctgctggccccagcatgggagccccaaagcacacaagtgacaaggctttctttgatgtaagttgatcttacttctcttttcctggctctgtctgcacatcattctgtctgtctccaagaat

SEQ ID NO: 6694 - DNA, 2300 bp, Homo sapien
aaaaaagaacatctggggctctatctcttaccctcaaatagcaattcaggagctgttatcagacagacaacaggtgggtgatgccttaatgcttttttgttagaaaaataatagtttattgattttttctaataatgaaagtaataatgttcatttttttgaaagaacacacagaaagttataaaagatgagaatcacccataatttataacctagaagtaaaccactatgctatcaaacttgttttacccttataaattcacatataaaagagattttctagacatactattttaaacctgctttttcactccacgttggcatacgtgtccttccaactgtcactgtgtataaaccagtgtctgccaggcgcagtggctcatgcctgtaatcccagcactttgggaggccgaggcaggcatgaagtcaggagttcgagaccagcatagccagcatggtgaaactctgtctctactaaaaatacaaaaaattagccaggcatggtagtgtgtgcctgtaatcccagctacttgggaggctgagtcaggagaatcacttgaacccagcaggcagaggttgcagtaagccgagatcatgccactgtactccagcctgggcgatagagtgagaccctgtctcaaaaaaaaaaccatcaacatctttattttttttgagatagtgtctcactctgtcacctaggctggagtgcagtggcgtgatcatggctcactgcagcctcaacctccagggttctggtgatcatcccaagtagctgggactacaggcacacaccaccatacatggctcatttttaaaatattttttgtagaaatggggcttcgccatgttgcccaggctggtctcgaactcctggactcaagtgatccactcacctcggcctcccaaagtgctaggattacatgcatgagccaccacgcctggtcatagcagcatcattttttaatggctgtctagaattccactgtatggaaatgccataatttgtttaatgtccctaataatggacgtgtaggttgtttccagttttttaccacgataactaactctgagattgatacctttgtacattattgttgcttattagtccagttttttccttgagataaatatttgtaaatgaaattttccagtcagtagtttaagtgtctgtaaaggtttcctagctcctgtcctgtctttttcagtcccaaagacacctgtcgagatccccaggaattgtgtctaccaacctaccttcctatcagaagaggtctctgctacatctcccagacagcagcatgggggaggaacagaattccagcatctccccatccaatggagtggagcgaagagcagccacgctctatagccagtatacatccaagaatgatgaaaacaggtgacatgctgaaccctgctcgctgtgctgaagacttccccacagcacctgaggctaaaccacaggtccctcaataagctaggcctgtgcagtacagccttttataaacttgaaatggatttgctttaatttttgtaatgttttagatgtttctttgaaaagacaaaaaacaaaaattacaactaaaaataattcgaagaggttgtagttatttgtagttgagtcctgatggctcttatctcctgtctgccagaacgtttgagggaacatgtgtcagccagcactttgtcagtggcacacatcagaaatccagcttatgctagctgaagcaaaaaggaatttactcacataagctaggacagccaagggtatgctagcttctcacacagtatcttctatccacttcctggctctgctttgccctctctctgtgttatgtcagtcccaacatggcacaaaggatggctactgatcattccaagcctcacagatgtggtaatcccagcagaaagcagcagtctttccccagaggtctagcagaaaaaatccagggagaactcttataggccatttttgaatcatctaggggaaatagagacttgacaaaaacaacagatatcccctcccctttacagcattttgtaagtgtaaatcaaaattaactctcctgtcatcatttcttctaggtcctttgagggaacactttataaaagaggggctttgctgaaaggttggaagccccgttggtttgttttggatgtaacaaaacatcaggtaatactcttaaagccaaaagaaattacttctgtctaggctagtcccagtccctggctattatgtggctctagcagacagatagattcctcatgtacagactgcttttttagtgcctctcatatgt

SEQ ID NO: 6695 - DNA, 2300 bp, Homo sapien
aatgcaacagactggtctgataagcagttccaccattacttagggccaagagaggcccctcccctgggccccaatcatagaaccctagtctggccttcctccagctgcatcctcctcatggaggtgagcagtacaagaaaccaaaggtacatgcttagatgcccctccttcatctaaaccatactctgtctgggtacttcagaattctttgcccaaattcaggctgctcaccaggctacttctccaagtcagtctcctaagtcagtgcatggaccccaaggcccaaagaatggcaaaaagtagcaggtttgacagagtggacagagtttgactttgtgggctggggtatacataatgattcatgttaagacccttagaatgtaagataggggtgggtggagaagagaggccaaggacagggggctggggccagctcctccagtgctaccacttgttagtataaaattctgaggaatccaagaattctctattgaacttgaccttctacgtcattaggaagttacatttctcaatgtaggagggaggattggagaatgttttatttaataatttatcttgatgtatgatttttaaatatttagaaatatggtatttgaactccattcatactcttcctcccctggactctataaatgttaggggtttgcctgacagtgagcttggggtactttggggtcaagatgaaactatatttctgttttctttaacaggctctaaagcccaatgtaaacgtctctagcctcaagaagtgggattactacatagaagagaccctgtccacaggcccttcctatgactggatgatgctaacccccaagcacttcccctccgaagactctgacctggctggagaagctgggccacggagccagaggagaacagtgtggccatgctatgatgatgtcagctgtactcagcctgatgctctcaccagccttttcagtgtaagtcaactgtagacacacacctaggggcaccaggggccctggaggcatgagggcaaaggaaccaggctaagtaacttctgaacatggctctccttactctgagctagggttatggttatgaagaaaccagatttgctccccatcatcagtgggggaccaggcttcactactggaaaagagtctcaataaaagtgattttccagcctggcgcggtggctcacgcctgtaatcccagcagtttgggaggctgaggcgggcagatcacaaggtcaggagatcgagaccatcctggttaacacagtaaaaccccatctctactaagaaatacaaaaaaaaaaaaaaaattagccgggcgtggtggcgggcgcctgtagtcccagctactcgggaggctgaggcaggagaatggcatgaacctgcgaggcggagcttgcagggagcagagatcacgccactgcactccagcctgggtgacagagcaagactccgtctcagtaaaaaaaaaaaaaaaaaaaagtgattttccagcgttacaagaaagcaatcaagcaaatagagcaatttactccttccagcagcttcccagctgttttagttgcccgagcagccttagtcaggtcttggctgtggcttctgtgggtgctttacttcctctggtcagaagtgtgggtagtcagtggcctgatgggagtgctgtcaaccatcttctgcaaggaatgttccggaaccaacccctcctggcagtagccagcctgaggaatagctttgagccctgatatgggccagacagttcctaaagagtcttccccatctggcttcctgaccaggaagagtatgcttcagtggtcatacagtcacagaggcagctgccctgatttccagcttccctgtcagaaggtatatctgtttccttgggcatttcttggttcattctttccacatctggtttgaatcatcagagttgaggggttcctcctgtcaaggactggcttctcatctacctcagctattagggctgggccacgggccagtgcttgacctcttgctttggctatcagatttcccatgggctgcccaagggtgcagatgtctgagatacatatttcacatcctagtatgtaagctatcctgtacaaaaaggcctagttataggtcctaataaaccatctttgccacagtacggcacaccaactagagctctcaccactattcctggctgggagacctcacaggcccatgtccaccactttcctcaactgccctctggccatgctgctcatctgggcctagtacagaagcagtgtggctttggggcccatcctgatttctatg

SEQ ID NO: 6696 - DNA, 2300 bp, Homo sapien
tgagacacccttcatggccttttaaagaactactttttgcctcaccccaacacattttcctccctattaaaaacaaagtgggctcatgttagtaatagattgactatttgaaaaaggtataaaagttctgcttttatttttaagtcacccaaggacacagactacacgcttctgtcatctagagtctcagtaaccatgatctgcagtatatatacactgctaaacaagaaaactctttaaatggcttcataataaacaaacagccaacaacttaaaagagaaacataaaattatgttttttactgagcttcatcaaatcaactctgaagtccttccattttctcttgaaaagtgtagactgcctcctgcatggacttctttgaatctagatatagatgcaggatgagggttggaagagtcatgattgatagactgctggctgcttaggcaaactttatcagatgtttcctccatctggatctgtttccctgtagcgatgaaattcattccggtctttagctttgcagttattttctaaggttttcacacaaatgttgctgtttttaaagccataaaaaatattccacttttttatctgctgcatgcatcatacgttttttggcaaagtgtgaatttatttaattttgttttgttggatttttttaatctacaggaactttatttgatgataaaggagaaaagcatgccaaaaaaggagtctgtatttgggaatgtattgacagaatgcacaagaggagtcccattttctttaattatttatattcaccattggaaatagaggtagagtaagaaatcatttatgtttcactttctgaaattttgtgttaaggttttccttagttttaacatatataagcagtttaagctttttataaacattggactaggtttcataccaaaaagctatttcaaagtttgagacactataggtttgggttgtgacacaaatggagactgttccctaaattcttgccacaaaaattaggagctggctctcaaaacctagaagggaaaacttgcagagaatcaaagcaaggcacctttccccagaaagaaagaactaacaaaatttgaaatatcaacaggtggtctaagctgaaaaaccttaaaatactttagaaaaggtttctttaagttcatctgtaccaaagccatggaaggacccctgtaggaagcagagatattcggagccaagcccaagaaggataacatatctcggggcaactgccccaccatgcacatctacataacacacgccctggaatgcaacagactggtctgataagcagttccaccattacttagggccaagagaggcccctcccctgggccccaatcatagaaccctagtctggccttcctccagctgcatcctcctcatggaggtgagcagtacaagaaaccaaaggtacatgcttagatgcccctccttcatctaaaccatactctgtctgggtacttcagaattctttgcccaaattcaggctgctcaccaggctacttctccaagtcagtctcctaagtcagtgcatggaccccaaggcccaaagaatggcaaaaagtagcaggtttgacagagtggacagagtttgactttgtgggctggggtatacataatgattcatgttaagacccttagaatgtaagataggggtgggtggagaagagaggccaaggacagggggctggggccagctcctccagtgctaccacttgttagtataaaattctgaggaatccaagaattctctattgaacttgaccttctacgtcattaggaagttacatttctcaatgtaggagggaggattggagaatgttttatttaataatttatcttgatgtatgatttttaaatatttagaaatatggtatttgaactccattcatactcttcctcccctggactctataaatgttaggggtttgcctgacagtgagcttggggtactttggggtcaagatgaaactatatttctgttttctttaacaggctctaaagcccaatgtaaacgtctctagcctcaagaagtgggattactacatagaagagaccctgtccacaggcccttcctatgactggatgatgctaacccccaagcacttcccctccgaagactctgacctggctggagaagctgggccacggagccagaggagaacagtgtggccatgctatgatgatgtcagctgtactcagcctgatgctctcaccagccttttcagtgtaagtcaactgtagacacacacctaggggcaccaggggccctggaggcatg

SEQ ID NO: 6697 - DNA, 2300 bp, Homo sapien
ttgagaccctgtctcaaaaacaacaacacataaacatgcatttcgaatcctagaatgtcattgccgaagcctcagtagaaatcatctacccagcctcctctctggatgttaggccacccacctaatcaacatcaaggaagcctagtttcgtgtccctagtccagactaggttgcctacttgaagtctgttccttcttgtgttctggtagatgcactcgttatcaggcctacagtgaaaccttgtttaggaacacctgtggtaactaccctctatctgccaaaatgacgaagtggagagtaagtaatctcaaccactgctggtagaattcatcagtcataatttttttttttttttgagatggagtctcacactgtcgccaggctggagtgcagtggcacgatctcagctcactgcaacctccacctcctgggttcaagtgattctcctgcctcagcctcccgagtagctgggattacaggtgcccgccaccacacccagctgatttttgtatctttagtagagatggggtttcaccatgttggcaggctggtctcaaactcctgacctcaagtgatccgcccacgtcagcctcccaaagtgctgggattacagatgtgagccaccgcaccacgctgagtcataatttttaagattttatcagaaaaacttaaacacaatgaattctcctgtgtcctaaaagcttaatatgttgattattacatactggattatagggttataatttgataggatttggcactagctgtctgatttggactgtttttaagatgttccttatatgtgtacatgttgccctaagccagccatatggatactgtaagaaaagtccattggacttggttccaattacaagatgttacaacagccctaaggaacagagggccatgtattgcatctcctcttctggtttcagctcattctctttctgtctacaaaggtgcctagagcctatttcaacttgggctgactaccacacagcctttcagtctaatccatgcctcaaggcgccaaatggagcaatatacaaggtggctttcaaaatcttactgcaacccctagagcatttgcaactttggacattggagttacttgaacttttaaaataactaatatctcgggccatccccagagattctgatttaattggtctgaggtgagacctggacactgggatttttttaaagcccttggttttttaaatccatgtccaaggttgagaactactgcactggaccctgcagttaaaaggtagagaagaaactgttaattagtcttaggggccccacatattatagaatttcatgccatcttgggcttgagtctttttttttttttttttttgataaactggtaaaatgcatgttgattttgactatgtcacttcattccaagcaagacaccactgctgagacacccttcatggccttttaaagaactactttttgcctcaccccaacacattttcctccctattaaaaacaaagtgggctcatgttagtaatagattgactatttgaaaaaggtataaaagttctgcttttatttttaagtcacccaaggacacagactacacgcttctgtcatctagagtctcagtaaccatgatctgcagtatatatacactgctaaacaagaaaactctttaaatggcttcataataaacaaacagccaacaacttaaaagagaaacataaaattatgttttttactgagcttcatcaaatcaactctgaagtccttccattttctcttgaaaagtgtagactgcctcctgcatggacttctttgaatctagatatagatgcaggatgagggttggaagagtcatgattgatagactgctggctgcttaggcaaactttatcagatgtttcctccatctggatctgtttccctgtagcgatgaaattcattccggtctttagctttgcagttattttctaaggttttcacacaaatgttgctgtttttaaagccataaaaaatattccacttttttatctgctgcatgcatcatacgttttttggcaaagtgtgaatttatttaattttgttttgttggatttttttaatctacaggaactttatttgatgataaaggagaaaagcatgccaaaaaaggagtctgtatttgggaatgtattgacagaatgcacaagaggagtcccattttctttaattatttatattcaccattggaaatagaggtagagtaagaaatcatttatgtttcactttctgaaattttgtgttaaggttttccttagttttaacatat

SEQ ID NO: 6698 - DNA, 2300 bp, Homo sapien
cagagacagggtctcactctgtcacccaggctggagtacagtggcacaattgtggctccactgcagcttcgaactcctggacacaagcgatcctcctcctcagcctcctgagtagctggggctacaggcacgtgccaccacacctggctaattgtttgttttaatttttgtagagaaaaggtctcactatgttgcccaggttggtctcaaactcctggcctcgagatccttccaccttggtcccccaaaggtgctgggattacaggcgtgagccaccacgcccagccagtttttataattagttgcttgtattgcatgatcataggaaacccatgatttcttatcccttcattttcactgatgagaaaactctacgtaatacaaatgcttacagttctacaaacctggagtatggcacgctacctagctattcagagccatgtcccatggaaagctctgctgtcctgtggagatctgatgcaacaggaaggcattggctcacatcaaggaagcagttccgtggtttgcaggcccactgcataggagtcaaactcttttttaatgcatcttcctaaaatccattttattttacattacttacaagctaaaattttacttcaattcaaaagccagtaagaaaatgtagaaaaccctttaatgatcacagaaaaccaggttcctaaccagatgataaattttgataaatcaatgatatccagatcacgactttaaattcccattggtccactggacaatcaacattatcacacacatgcctgctcactttggctgacccagctgactaagtacaggtccgtattgccaaattaaacatggaggagaacgctgacttttagacagcttgcctaaatttagtgttaatttgaaccagcttttgagcaagtacaattatgattggaacttacttcagccaaacaaaattttctagctggtcatgagagattgtttgagcaatatagaggtgagattgcgaggcagactagggagtgtcacagggtcatcagcctaccctctgccaatgtaagatggctccacagtctgtatacggtttgcctaaagcatgctatagctcaatgaccattccaagctttgcccagccttctgcctcccatgtcattcactcattcctattcctgtgcccaatgacctcactgcctaatttactgatgaaaaattagggctaaaaggcattagctcctgccctttcccttggcacttgaactatctttctcttgcttacctttcatccctccctgtttccaaagctgttccctaaatctaggcccgagcctcattcattcttgctttcccaggatcttattctcttagttattagctaacaaatttttctaaaatttgttttctctactggctccttctggattgccttcagacacacacacatttcttttgaccagaaaacatctcttgctgtccccttaagcagccaccttctcttctcaatccttttcattgccaaacttctgtaagaacaatttttcttgttgtatgtcacactattacaccacagttgcctggaaagcaagaaccataacttatgttaatatatatctatcaattgccaaacacagtataatgtagtgagtggggtagagactttggagcctaataagccagggttaaatttgggctcactaactactgtttaatgtcattgggtaaatgtcttaatcttgctgatcctatgctttctcaattgtaaagtggagataataatgcctctcttgctataccgtagagattaaatgagattatgtttatttaaaaaaaaaaaaccctcgtctggtgtctggcacacagtaggtgctcggaaaagctggttcccttcccatctctacttatggtagggattcaggtatttgttgagtgaatgactgaatggtctcctgcatgtttcagttaagccttcagtggcctggcatccactttttgttctgtttgattcttactcttttctttgccttgtgtgtttcaggttcacaaccagtatccaactgagtttgaattcaatctctattacttaaagttcttggctttccactatgtgtctaatcgctttaaaacatttctcctggattcagactatgaaagattagagcacggtatgtgtctgtatgcccttgtttcatcttttttgttagttctgcatgtttttaatgaaaattctaataatgtaactatccccaagactgacaagctgagttaaggtttaactctgaactatgaatgtagaggagtggataagtggccaaattctg

SEQ ID NO: 6699 - DNA, 2300 bp, Homo sapien
tggtatcttaagctaaaatccagaaacgcaaatctcattcttttactccatctcttaactcttcactcctaaagcctccaaaaccttgtgaagtcccagtgataaactggacaaagagatactgctgtttcctgacaccttcaacattctctgtgatctctagagctgctttctgtgtttcttctgatagtgtcattccttctcaaagtaggacgaatgaactgaggcaagcaagttaagggtctcaaaagattctctgttatgtgaacataccaggcagacacacatttagactggccagggcaagactaggtataaacatgcccatgccttgcaagtaattcatttccttgtaccgactcacagtacagagtctcttcattcttccagagttagataccactgtgagaggagcctcctatcatttaattcttcttcttctttttttttttttttaccctaacccctagttcttcttcctagcctttttctttttgctcccctattttcacaatttttttcattcttttcattgtcgtacagtcttagttccaagttttcttatgttatttccactgtgtgtctctcctggtctgatgagccagggttaaaattgaccttcacctctttttcagtcagggtgatcactttgcattcagcatgcatgttggtgagttcctaatacaagggctgcatccttttttacctaagaatcattttaaaagcaagaagtgaatagatcacattgtttttcatttaaaattaaagtagcatttaagcccaatggggaaacacatatacttacaacttggataaatttctttgttgagtagaaaaatgccttgagaaaattagtactgcctctcaaataccaaaatataatagctgggtatatttgagaagtagccacttggaggcagctttttaatttttcatcctttacattttaagtttttctccatgtattattttattcttgaaataacctccaggatatgtatttaaagaggcccagggagattaagtgacttggccaaggctgcatagcaaatattagtataactgggactagaattagttcagtgttgcatcgtatcagtgcagatatatttactgaatacatctagtgtctcatgcactgggccaggtataagatcacagtgatcaataaggccccacatgtgacctaagcatctcttttccctctcccctttcgtcagaacagagtagaggaaataacaccagtgcttaggaaacactagttctctgaacagtaacgcattcctatggggaaaatgaactgtgtcatatcttccctgaagcagtccccttagccggttcttactgattgggtccaaggtcacatggttcctcaggaaacaatacattaagagtttagtggccgggtgcggtggctcacgcctgtaatcccagcactttgggaggccgaggcgggcggatcacgtggtcaggagatcgagaccatcctggctaacacagtgaaaccctgtctctactaaaaatacaaaaaattagccgggcgtggtggcgggcgcctgtagtcccagctatgcgggaggctgaggcaggagaatggcttgaacccgggaggcggagcttgcagtgagccaggatcgcgccactgcactccagcctgggtgacagagcgagactccgtctcaaaaaaaaaaaaaaaaaaaagagtttagttacattctaattcaaaccatagtcccactacttactgtgtgattaagcaaattaggaaacctcttaattctcagtgtcttcatctttaaaaaataatatagacttttaaggtagttatgaggaataaattaaatagtatatgtaaaacatttaacttagtaactagcccatagtagcattttaatagatgttagttgtcattattattatagttattgttatcattgccattgcctaatactctgctgaaatgggaagaaagtcgacatttgcatttaaattgctttgagccttactgatctaaggcaagagatagaaggcatatgccctaggtttagccagtgactttcaaacttgtttgatcatgactcgcagtaagaaatgtattttatatttatatgtatatatacccattcattttatatcacaattcaggtagtactaaggcacatgcaaaatgtataatgtatacactaaaacaaaagttctgtgaaacaatattcatccgtaccacatgcagtgctcattagtattttcaactgtaatgtttaattttgaaaaaaatactgatttgacctattagagtgatt

SEQ ID NO: 6700 - DNA, 2300 bp, Homo sapien
gttttatttctttcttttcaatttttataccttttattacttttctagtctctttgcactgcctaagacctctagtacaacactgaatagaaatggtgataatgggcatccttgtcaggatttcagagaaaaagcttttaatattttatttatttctaagataagtaatttcctgtgtaggatttttaagacagaagattaaggagctacccactgttccactgtagacttctctgaggccttcagggcgctactcatgggagctcattcttactctcttttgctgagagcttttttctaaagatcacaaatgtgacaaaaaatacagaatttacataaataaatttacataaataaaactcataagtgtactttgcatttgcaaaatgcttatctttatataataaacttctttttaattctgttaatgtggtaaattacactgactgattttcagatgtgaaaccagtactctattcctacaataaactccacttgatcttaatgaattgctgtgtgtaaaataaaccttttgtcattatcaaccatcctttcttactgcttttaaagtctactttgatattcatatagtgacaacaactttttttaaaggtagttttgcgtggtatattttttctatccttttactttctacctttttatatacttgtatattagatttgtcccttaaaagcagcagaaagctttttttttggagacggagtgttgctctgtcaccaggctggagtgcagtagcttgacctcggctcactgtaacctccaccaccagggttcaagtgattctcctgcctcagcctcccaagtagctgggactacaggcacaagccaccatgcccagctaatttttgtatttttagtagacacagggtttcaccatgttggccaggatggtctccatctcttgacctcgtgatctgcctgcctcggcctcccaaagtgctgggattacaggcgtgagccactgagcccagccactttttttttttttttttttttaaagcaaaccctgatctctttctttgaattggaacatttagtcaattaataattaatgcaattatggatatatttgaatttaaatctaccatcttactacttgttatttattccatttgttctatgtccccttttttttcctttcttgccttcttttggattattttttattattccatttccttcctgctaataacttaatggatatatattactttttaccatcataaatgctttataaccagtgttctaataagtcatctattaaaattttattttacttctgacagattggaatgataaatgagtctgttttctcaatggctggcataattttgatagcaaactttccaaacagcaggacatcacaccccgacaacatgactcatcttcagagaaaatttagttagaatgacggagaattccagaaaaattactgcatactcagagtgccaatttttcagaacttcatgcaaaatgtttatttggccacaatctcaaaactatattcccaacttgtttctgaagtttcatattaatatttgtaaacttaaattgccatttaaaatgacatatctatcttcaagagcaacagggttgaaagtaacattaagataactttctaaaatatgtacaaagcttacaatttacaaagtgatttcagagctgtttaagcaggaatttataaatgcaaagaaaaatcttacctggagatgaaaatgactaaacttgtggatggtgaaaatgtaattttagaaaatatatatttacatatagtaaagcatggaataagactcaacatatttgaaaaacagtgagagatgacaagaactgaaaaaagaaaatgcctctttatttacatcctttaagtaatattcccttgaaaacattccaattagaccgcataagaaagccttgcctacacctgggtcagcaaattatagcctgtgggccaaaactggccatgcctactcatttccttactgtctgtggctgcttttgcggcacagttgaatagctgcaacaagagactctatggctcataaactgaaaatatttaccaactgaccctttatagaaagagtttgtggctccccagcctacaaaagactttcatgtcctctattgggctgggaaaatcctgttcttcaagttatctttagtcatgctagaaaagaagcaaactgggaagagaaagacaagagaaattcatagggggtgagtactttacctttcaccttctcacctactagaggtactttcagtaaggtaattgttccgag

SEQ ID NO: 6701 - DNA, 2300 bp, Homo sapien
gtctaacacaatatacaatggaatattattgagtcataaaaaataatgaagtattgatacttcaatgtgatgctacaaccttgtactgtatctgcccgtaaacaagctgagaacaatatactaagtgagaaaaaccaagacacaaaaaacccacatattgtatgatatgaatatgaaatattcataataggtaaatccatagagacagaaagcaaaatggtgattgccaggggctgtgggaggggagaatgagaatgactgcttaatggttgtgaggttttcttttgggtgatgaaaatgttttgtaactagatagacatggtagttgtacagcattgggaatgtacttaattgccactgaattctacattttcaagtggctaattttacaatatgtgaattttgccctatttttagaaaagttgggaaggaatatgatagctgccttaaaaatctatcatatgaagatagattttttttttctggatagttccggagagcagaatcaggggaagttacagtaagacaactctgaaataataaggaagaactttctaacaatagggctgttaaacagtggaatgcgctgcctcccaaggaagtaagattactttttactgaaagtgatcaagttggatgatgagctctcagggaagttacagagaggattgctgcacggggtatgactgaggtttttttttttttggtttaattattttcaggatcaaactatcttccctccacgtttgcaaattcagctgattcagttttaccattagcaactgacatagaggtcctggagttaaagtattccttcagtttcagttctagtgcagcccaaccctcccaatttgtagatgaaacaagtgtggcagagaaaggggaaatagtaaattacagcagagtaaatcttcaggagctgagatgtcaactctctcagttcagagttggagccattgcggcttcctgctggtcgttggggaaaatcgcacatttactcatttaaaatattttgtaggcacctactatatactagacgctttgctaagaggccttgtcttatgtgtaaatatgaaggatcaaaccctcaattaatagtgagcagtgataagcaaccacaaagacaacttctaaaccacggagatttccaaaactttggtctaccacttgtacaaattctactaaaacttcgtgagatattaacaaatgacaaagtgagttcacctgaatgtcacaccagccaaattcgaaatggtcaataggaggttcaacaaaaaagcaagcgactttgataatcccgagacggaaggacgggaccatctattcatttttgtgcatgtttgagcagggaagttggaagtccacctgctcgggctgcgagagccctgggaccgctgcgagggaagcaagccgaggcgtgcggggctccccagggagaggccagcccagttcgggaggatcccggggatgccgcgttcctcggtggaatctggctctcccgggcgctccgggggaagcccaggccgaccgcccccggcccacccggcattgaaacccgaggctccttggaggattgcgtaaaagcctctccctcccccgtctgctcggtggcatgtttctaaaattcccatctacacaacataaacaggaaacgtgcagcaaaagccctgtcgatgcaaattccttgcttccaaccgagggcgggagaatttcatctttggtggtggtggggagcagaggaagcagccagctttccaagtgacccctcaactctccacatcccttcttccaaatccaaacagaatagagaaggcggaaggaaggaccccctgctttaggaaaaatagggaggcagagggggccgtgaagcagcatccaggcctcaaagtgaaccacctccaggggccgcggtggcggcgcgtggcgggaacacgcccgaccgcccactcccccagcgcagcagtccgcgaggcccgcggagggtggaggtgggctcgccgcccgggcttggggcagccgagccagcgcgggtgggggcgggggaggagcgggcactaggcgccgcgcaagcgcagagcgcgcctcggttgtcaaacatggctgaagcgctgccgctgccgctactgccgctgcagggaaaatgctgagccctcccgggccgggtgggcggcggcggcgagggcggcgacggggacccgcttcccgagcgcggcggcggcggccatggcccggctggctgactacttcatcgtggtaggctatgaccacgagaagccaggtaagggtgtggggcggcaccg

SEQ ID NO: 6702 - DNA, 2300 bp, Homo sapien
tgaaagtaaaacctgtcctggcgcggaaccaagtggaagctggcgacaagtaggtcgcatcctcagagcgactgatagccagtcctggatctgcgcgaagagcttgactcgcagaggataaagtgaaaggaaaaggaaatgggagacaagggagaagaacaatagttaggctggggaggctcctggtcaccgagcaggcgttcagtaatagctgctgtctgcggtgcagacggactagtcgcccggccaggccacttcggtgactgccctgcgcccagccgggcggccggatccagaccagtgcgccgcgctgcactcctctaaccctccgcgtcccaaccccttaccagggccagggtcagggcccggaatctgtcctccgtcctcagatggaattcaggtccgctcaggtgactccttccaggaagagtccttaaataacttccgcgcggccatttcttccccaggtgcaatgtccactgttgagtcccgagagtgaaaaggcagctaagccagcagtgcgcggcccagacagaccactctgggcaaggtccgcgcgacccactgcccagccgcctttgcaccggagctcagagccatatggcagagtaggaaggaagcttaaaggtctgctggggaccggctctaagatggggactcgagagatgggacatgactcgcccaccttcacacagcgaattgccgggaggtgaggactagaagcctgtttggctagtggtctcgcacctttggcctctccgtcgagtcgctgggcttcaggacattcgattagaggagtggttagtaggaccccagaaacccacaagcacgaagcaggaagccccgtggcttagcctttccttcccagtttggcccccaggagagaagtaagaaagagaagaagctgtgatgaaagagcacaaacgggtgacaaacgtgtctagcgtgattcatcatgaacaggcacaaattctttgggcgggggctaggactctcctttgccccttgagaagttggtgaccccagcctagaggaatccacgccgcgccccagtcggccgtgctagcgtgtcgggccgagtagggactctgctgcttcctacctgcagggtgacttcccctctctgcagatacctcccctctctgagcttgaattttctacctgctgaaatgggaaaaggaatgttaccttccttgcctgactcaagggtggctgtgaagctcaaagtagactgggatgtggccgtgcttggtaaactgtaaaatgattagcatacgtgaagcgttagtgtgctccctggcagtcagtcctcacgtttacgatggattaatgaaggcagccaggcacaatctcaggttatgaccttataaggcataataggattacaaggaggcaaaatgaaacagtatatttcctcctaattttggttattcctatgtttccaaatagaaatgaaaattctgaaatttcagataattcccccctccaaatcccaattctcaatttagcttttctgagccttgtccctaccgtgaaatcttactagctcaccccgaaacgccggggtcttggtcctctgggggactagtgagtcctgctcctctcggctttgctccgtccctgccccggcccctccgcgggagtctggggtcgcggcccggtcaggcgccaagccggcaggggggcgcggtccacttgaggccacagctccccaggtccagggctcgggccatccgcgctgtcccttccgcgggctcttgctgttcttcgccaggaggctttgcactccgggccgcatgggtcctggataaggacctcaagaggttgtagtggcgccccttcgctccggcgtactgtctgaaccctgtgcccaaagagggctgtggcagttcctgcaccaaccgcctggagcccatacctaagccctctgggcacgagggacctcctctcccccgctcccccctccccccatcccaactccagccccaaaggaagcaatgcgcgcgtccgagagcaggagcgcgcgtggctgaggaaagaaagggaaggcaaccgggcagcccaggccccgccccgccgctcccccacccgtgcgcttataaagcacaggaaccagagctggccactcagtggtttcttggtgacactggatagaacagctcaagccttgccacttcgggcttctcactgcagctgggcttggacttcggagttttgccattgccagtgggacgtctgagactttctccttcaagtacttggcagatcactctcttagcaggtaggtgccgcagaccctg

SEQ ID NO: 6703 - DNA, 2300 bp, Homo sapien
aggaccagttttagcttcagggtgacacacctaggggtgggagaagggtgatggagggaggaggaccatcggggccacactgacccccatctccacaagtttatgctgctgctttcaatgctgcttcctctaatcttttttcatcattatcttaataactgtcgtgccactataccacctcgaaaactgtcttccagaaatgtcccatggagacagtggctccccctttcctggccctctggagtgttgatcctcaccccagccctcctctttcatgctcaggaccacagccctgtggctccaaaaaggaccttctgggtcagtgcacagagcacttagaagcacccttgccccttcctcacttacttcctgttcctccatcagcattctacagctctggccaacaccaacagcctctactcaatacggtgcttcattccactgtgggagggaaagtgaggaaataaaaatatgacaaaggaagagagagctgagagagaaagccagaggagaggagaggcacgattcaggaaggaactgctgagacacttcacccctgaaggagctcaggaatcactacatctggtaagcagggacaaggagctcatcagaaaagactctgcttcctcaagtgtgtcctctaaagccaagaagagtggcagcaggaatctccatggtagggggaaggaggtccctgaggtcaagttgggaacttttttattttattttattttatttttttgacatgcagaagggttcagcaggtaaagggaaaactgtacctatcgaagtcctatccttttcacaagtaccagcccagatgccccaagaaaacagcccacatctccaaatgggaatgaacatctccctccttctctatcccagagagctcagccatagagaatccagagccctaggcaggaaatattcttcctggcagccagagaagcatgtcgtgttctcctgccacaccaaaatgacattttctcctccctttccaattctacctttcctgccttgaatattagactgactcagtgcccctgttcctccacatcacgtgatgctctgcgtgggtttctcaggggtgaagggttgactcagcctggctgcctgaacccactttccagctctctggcccgcggcacatcctcagcatggcctccacaccacaaagcaagatgcgccctctctgccttcactgcattcaaatccaaaagaatttttccatgatttgtcactttcagagagggcttacataaagagtagttgtttccagagcaaagcaaagaataatcaatggaatttaaaacaatcctaagaaaggccagccccagtggagccaagaaagttctcctgccccagttgaatcactattatgcacagtcctggccctgcaggaacccaagagccctcatattggaagggtattccaggtcccccacccctgatgcctttactcaagtctgtttgaaagaccttagctttagtgcaaggctcccagggaaacagataagagggtgtccctcctaccttacctattctccatatgctgacaattcagctttcgctccagcccaagcctcttctgagttccagtctcatttattcaagtgcctacctgaccttcgtggatgtctaacggagatctcaaacttaacatgctcaaatccgaactctggatttcctccctgaactcggaagcttctctgcttgtgatcttcatatctcagttaaagacaccactatttgtggggaaaagcaagagagatcagattgttactgtgtctgtgtagaaagaagtagacataggagactccattttgttatgtactaagaaaaattcttctgccttgagattctgttaatctataaccttacccccaaccctgtgctctctgaaacatgtgctgtgtcaactcagagttaaatggattaagggcggtgcaagatgtgctttgttaaacagatgcttgaaggcagcatgctccttaagagtcatcaccactccctaatctcaagtacccagggacacaaaaactgcggaaggccgcagggacctctgcctaggaaagccaggtattgtccaaggtttctccccatgtgatagtctgaaatatggcctcgtgggaagggaaagacctgaccgtcccccagcccgacacccgtaaagggtctgtgctgaggaggattagtataagaggaaggcatgcctcttgcagttgagacaagaggaaggcatctgtctcctgcccgtccctgggcaatggaatgtctcggtataaaacccgattgtatgc

SEQ ID NO: 6704 - DNA, 2300 bp, Homo sapien
gcctgagattgtcacaagtgtgatacatagcagaaagaaacacacatatacacacacatacacacacacacacacacacacacacacacacagtatccttttgggtaaaggtgatatttcagcaatgaactgacgtaacaaatgtgctttagaagaattgtgttatagggaaggcactttgaaaattgacgtttggaactgtttccattatcatgtgattttcatgccaaaacgaagcgtgctagtgtcacctatactctcatagccacaatctgcaaaatgtagaagcatacttctaaatccattttacaatattgcaaatgcagaatttcaagtgttttaaaagtcccatttgttaaaatgatttgcaagaacagctgaggaaaacatcattgaaaatgttgatttcatagacaaagaagagttttcacatttgcaaaattgatagatcaaatttaaacagtaagaactatgatttaataagtgcaaagatacagttcttctattcaggtctatttaatctttgtgagatatcttttttttttttttttaaagaatagccattaagaccaagtatggacattaactgaacttacaagtacactttctggtctcataaagtattaaactaagatttatttaaatcatttttaatgatttaatcactaaatcactaacagattagtggaatcactaaacagattattgctaataactttaaaatgaaaagaaaaaggtatattgtaccactcataaaaatgaaacaatttaaaattattgtttcatctttaccacatcctttaatttttttagtgttctttataatatgtaactcattaacgcagtctcatgtgcaaaacgtttatgaatacacgaattgcgagtatcagaccaatcagactatggggtagaaggaatacaacttggtgcttacatgagacaactctgtgaaagtggttgacacagtgaggacacacagtgggtgctcactaatgaagtttcctctccgagcttggtgacttactcgttgagagaggaaagggagaccgagtcaagaatggctcccaactgtggccccgtggtggtgccgaccccggtatcattcactgagactggaaacacagaagcaggttctggcgttttcctgggaagcaactaggtagtttgggtctggaccgcttccgccggcctaggaagatctagaggagatgttccctaggcagttagattcaccatcttcagcagctcgggggcattctgggctggagatgaaattcaagagccatcatccggcaggaggttgttaaaaccatgggagtggctgagatgcccagagtgggccttggagtgggagagcgggctggcacggtgggaccctggggtgggaccacagagaaaagccaggccgcggaggccgagaagctgtaggtacccaggtatgtgaaaaatctggaggtgggggccgcgggtgccaactctggaaactgcactccaagcgtttcaggaaggaagacgtggtcagcaggctcagatgccaggaagaggtgagcgagggaggctgcacggcacccagtggctttggcaactaggaggtcattcaggactttgaggggcaggtgaaggcagagcgaggagggttggagagggagcgtgtgcacgtggtgtgtgtgtgtgtgtgtgtgtgtgtgtgtgtgtgtgtgtgtgtgtgtaggtgatccaagtgaccagaaggacgcctggaagagtggacggttggcgagggagtgtgtgtgtgtgtgtgtgtgtgtgtgtgtgtgtgtatccaagtgaccagaaggacgcctggaagaaaccaatgcttgcgggttgctgcaactacagggagcaagtcacctgtgcggggccgagacccccagagtctcgcgctgggaaaagttgtgcggggaggggaggacgtcgggcaagcccgggcggcacggggagcggtgtggaagcccggcggggccagcgcagttgaggtctggggagcccggctggcatctgctccgggctgcggcgcgggccccgcggagcccaggaggcggcgggtgcttccggccaagggccctggcggccgccgcgcccctgctgctctcaagtttcccgttggcggcgcggcccgggcgcttcaggtagcctctcggctctctctgctccgctccgcgcccaggtagggcaccgacgggggctgcacgcggctggccggcttcctccctgctgaggcggccctccctcctcccgcggggccctcctggccggggatccgcagcgctgcgccctct

SEQ ID NO: 6705 - DNA, 2300 bp, Homo sapien
ggtctcaaaactcctgacctcaagtggtctggccgcctcggcctcccaaagcgctgggattacaggcgtgagccaccacactcagcctgagtctacgtttttagccatacactctactcattcctgagattgccataggtggattgatctattataaatagctagttcacttgttcattgttttatgcattcattcattcaacaaatacttgctgaatgtcgaccatatttcaggtatggggatacaactgtgaatgagacaggcgagatttgtcatggagctggtatttagcaagtgaatcccctttgtccaactccttgtgtgagtcacacacacctcacaaatgagaagaaaaatgaacccctctatgcaagctcatgcctggcttttggggaggagagtgatatctttctttttctttttctttttttttttcttgagataaagtcttgctctgtcgccaggctggagtgcagtgcagtggtgcaatgtcagctcactgcaacttctgcctcctgggttcaagtgattcccctgcctcagcctctcaagtaggtgggactacaggtgcgcaccaccatgcccagctaattttttgtgttttagtagagatggggtttcaccacgttggctaggatggtctcaatctcctgaccttgtgatccacctgcctcgggctcccaaagtgctgggattacaggcatgagccaccatgcccggccgatatctttcttgatgagacataatttgattccgtcctctcctgtcttttagagtttgtaaggggtgcttaagtgataaaaggggatgcagtctagtctcgggcaggagaagcgggccctgtatctggttatcataaattgtcttgatgtttgttcgaaagggaaataaggctttgagcttgggatcagtgctcttcagtccacagagacatcttggctgcaagaagcagcaacaagttaggctcaaggtggaattgtgaggtcctgagaagagcttgctcttctgggacagaactgtatttttcttctaaactgcccatgttctggggagtcttcccgccttttggcttcagcaggacccttggtcattgttacaacctgtgtcatcttagtggagctgctgctggtttctgtctgaacccgatgcaatgggtctcatacctgtaaactgggctccaggaaggcagctttctctaagttggaaaatgaagactcaaggtggagggtgtttcccaaagccgataccacaagatattaataggtgtttttttcctatgacagcagttctaggatggtcaaataagtgcgtcgggttaaacaaagttaagcagctttctttactgcaggacttctcaggtgttgaatttgctagtagaaactgtgcatgaatacccataagggactacaggatgcagtgttttccaagccttctgacctttcatgttctgcagactgcactttgaaaaatgcttgtttagactaaggctagctgggatccggttaaaggtgcagaataaaattccctgaacgtgtcggacttaaatccttgggctggaatcctcccactgcagtccccactctacctcccctttccccaaaacactagcagaaaaagtcatctgcccctcctccttctggcagaatagtactaagggcttggatttttttctcatactgtaagttcatttaattgtttaatgaataaatattaccctccctctaggttgcttgtagcctgctggttgcactgtttatgaaacagctgtgaggacaggtgggccgtaatctctgggtagctaaagcccagcagcagcccgaggatcatgtgtcaaccctgtaatactgctctgtgcacacaggaattatgatgtgagctcagtaagacacaacctcacgattggacatgcggaggtgactcaggcccaagtcagggttacagctagcctcccggtaaacaactgacccatccttcctgagctcttctccccaggatttcaacagcaccacagaaatagccattttgctcatggttatttcccaggaccacaggatttgcctaagtcactgggaggctatgtgtctgttctgagccttcccactctcctaaagggcagatgaagatcagagctttgcaccctgtgatgccattttaatcaaccctgcttggttttagaggattgctcctgtgggtcacttgaggcaggctccaccttccccaggaggagtggcagagtccagccagcgctcggagctggaggcccacgtgggagcagtgagcggctgtaagcaggggaggg

SEQ ID NO: 6706 - DNA, 2300 bp, Homo sapien
aaataaggctttgagcttgggatcagtgctcttcagtccacagagacatcttggctgcaagaagcagcaacaagttaggctcaaggtggaattgtgaggtcctgagaagagcttgctcttctgggacagaactgtatttttcttctaaactgcccatgttctggggagtcttcccgccttttggcttcagcaggacccttggtcattgttacaacctgtgtcatcttagtggagctgctgctggtttctgtctgaacccgatgcaatgggtctcatacctgtaaactgggctccaggaaggcagctttctctaagttggaaaatgaagactcaaggtggagggtgtttcccaaagccgataccacaagatattaataggtgtttttttcctatgacagcagttctaggatggtcaaataagtgcgtcgggttaaacaaagttaagcagctttctttactgcaggacttctcaggtgttgaatttgctagtagaaactgtgcatgaatacccataagggactacaggatgcagtgttttccaagccttctgacctttcatgttctgcagactgcactttgaaaaatgcttgtttagactaaggctagctgggatccggttaaaggtgcagaataaaattccctgaacgtgtcggacttaaatccttgggctggaatcctcccactgcagtccccactctacctcccctttccccaaaacactagcagaaaaagtcatctgcccctcctccttctggcagaatagtactaagggcttggatttttttctcatactgtaagttcatttaattgtttaatgaataaatattaccctccctctaggttgcttgtagcctgctggttgcactgtttatgaaacagctgtgaggacaggtgggccgtaatctctgggtagctaaagcccagcagcagcccgaggatcatgtgtcaaccctgtaatactgctctgtgcacacaggaattatgatgtgagctcagtaagacacaacctcacgattggacatgcggaggtgactcaggcccaagtcagggttacagctagcctcccggtaaacaactgacccatccttcctgagctcttctccccaggatttcaacagcaccacagaaatagccattttgctcatggttatttcccaggaccacaggatttgcctaagtcactgggaggctatgtgtctgttctgagccttcccactctcctaaagggcagatgaagatcagagctttgcaccctgtgatgccattttaatcaaccctgcttggttttagaggattgctcctgtgggtcacttgaggcaggctccaccttccccaggaggagtggcagagtccagccagcgctcggagctggaggcccacgtgggagcagtgagcggctgtaagcaggggagggtttggggtgggctccggtgggtcagttggggtgtactccttttctgtgtgtgtggatgggggtgggggttctggtaaagcttatcaggcttcgcagtcacctgtgatgtgggcttccttctgggaagaaaggaaggagtgggatggggctgtcagcttttcatcctagcctgcccctgtcctctgtccgcctctgtgctgaggcagttcctgctccctgagtctctgtcctttcctgggaaaggtggaagcagttcatggtctttccctttcagaggaggaggggatggaggggattgtattagcaactgggattgaagctccccctggcagttatggggtgcccttgggagggctgctttaggggggctttctgagaagaggcaggtcgggctgtacctgagaccaatccccttgataaaatgcagccaggcctgaagcacgttcagaacggaagcagcaaaggtgatgatatcgctcgttgctactcagctttcaggaggaggctgggcgttagagggaggctgtggcttatctcctgcagctgggcaggacggctgagtttactgttgtaaagaggaagccgccgctttagtttcctcttgtgagggctgtgaagagggccaggacactgcattcaggataccacagccattttgttttggataactgggattacctggggacttcagggctcttggaaattttccactcatatttcatattcacgagagaatttccagcccaggcttttcctgctctggctcactgctgctcacagatatgcaaaacagagacctcctactccagccggcagacaggacccagccagctgcacgcacgcactgactcagctgagcctcctgggtggcaggcagcacctcacc

SEQ ID NO: 6707 - DNA, 2300 bp, Homo sapien
tgatctgacaggaggtggagctcaggcaataatactcactcgcccgcggctcaactcctgctgtgcggcctggttcctaacaggcagcagaccagtactgtccacagcccaggggttgtggacccctaccccaacagacagcaaaaataaaatgctcaaccctattgtagtttgtttaccttgtaaaatcatttccaaaatataagaatgtaattagagaaacatcgtagaatcttagtgctgaaaagtgcaaggacataagaatgagtggcagttggtagttaaattgactgtatcatcatactgtggagaaatgcacattttactgtcaaaatacataaaagcctttgcagagataggttttgacacgcttgcagctgtttatagtcttactctctgtcatcttctatcttactaattgcaaaaatttccaaggaactgtttatctggttagtattcccctagttacacttgttctttataatgatcatagttcaggcagagtatttgggtatatcaccttcagtcatgtctcaaacgcaggaaatgaagaatattgtttcaccaacactcagaagtaaagagaaagcaagagaaaagtgctttcggctcttgtttaatccaagaggccgtgaaaaatcacaacccaggagctgtgatttgttttcacgaggcaaagagcaatgatgtcgatcggtttcagcggtacaatttgaagtaacacataaagtgaacttgagcccttaaggataaagaagggataactgcctcaaaaactgttgctttagaaacctaagccagtatacaattaattgcctcttattccagttgcaaacacaaaggaaagtagggatttgtcccccaaaaggccaattaagtatagcaatgtaataaaagcacaaagtgctatagaaaagatgtcagaaaagcttgcaggacaccgctgctagccccataccccgagccaaccaaaccccaaagacaccccatacagtttatgtagcttacttccccaaagcaatacactgaaaatgtttcgacgggctcatatcaccccataaacaaataggtttggtcctagcctttctattagctcttagtaggattacacatgcaagcatccccgccccagtgagtcaccctctaaatcaccacgatcaaaaggaacaggtatcaagcacgcagcaacgcagctcaaaacgcttagcctagccacacctccacgggagacagcagtgataaacctttagcaataaaccaaagtttaactaagccatactaaccccagggttggtcaatttcgtgccagccaccgcggtcacacgattaacccaagtcaatagaaaccggcataaagagtgttttagatcaattcccctcaataaagctaaaattcatgtgagttgtaaaaaactccagttgatacaaaataaactacgaaagtggctttaatgcatctgaacacagaataactaagacccaaactgggattagataccccactatgcttagccctaaacttcaacagttaaattaacaaaactgctcgccagaacactacgagccacagcttaaaactcaaaggacctggcggtgcttcatatccctctagaggagcctgttctgtaatcgataaaccccgatcaacctcaccacctcttgctcagcctatataccgccaccttcagcaaaccctgacgaaggccgcaaagtaagcgcaagtacccacgtaaagacgttaggtcaaggtgtagcccatgaggtggcaagaaatgggctacattttctacttcagaaaactacgataaccctgatgaaatttaagggtcgaaggtggatttagcagtaaactaagagtagagtgcttagttgaacagggccctgaagcgcgtacacaccgcccgtcaccctcctcaagtatacttcaaaggacacttaactaaaacccctacgcatttatatagaggagataagtcgtaacatggtaagtgtactggaaagtgcacttggacgaaccagagtgtagcttaacacaaagcacccaacttacacttaggagatttcaactcaacttgaccgctctgagccaaacctagccccaaacccattccaccttactaccgaacagctttaaccaaatcatttacccaaataaagtataggcgatagaaattgtaaatcggcgcaatagatatagtaccgcaagggaaagatgaaaaattgcaaccaagcataatacagcaaggactaatccctgtaccttctgcataatgaattaactagaaataactttgcaaaga

SEQ ID NO: 6708 - DNA, 2300 bp, Homo sapien
ggaagttcaaatattccttataaaaatattaaaattacatcatgggtaactggcaaagcaaaaacgaaaaaactgctcaaaaactcctaaaaatttaaaccataattcattcataaaataactaaagcaaaatggaaaaggctgaaaatgcaccaaaatgactaaatgacaagtactgcactgtagtattttaaaaacctctctgaaaccagttctccatcaaattttgtatcaacctcacctaaaaggatttaattgaaataaacatcaatgattttcactgtcaagtcaactttaacatcagtaataaataccaagtactactgactgggtccctaaggatattatttactttattactcattgtttactcaaactgtagatctgtaaacagatatcaacttttttttttcaagacaagttaatatagatacatagtgaaataattaggccagagtcactatagagtccagaatgcctgttccagaatcaaagatcttgatcagaaaaagatacatacatatatattagagagagaaggagagagaaactacaaaaggatagagtgccgtactaggagattaagaatatggatttctcacagtaacagtgtgtttactaaatgcatttcatattggaaaaagcatattagacttgtaagaattctctctggacctcccttgcctttttgggaaggaaagcgtgtttgtatttagatgggaaccaagaaggatcaggctacacacatcgaatataaagttcatttacaccaaatgacaaatattaatttttgaaacatatagtcatattcttgagaaaaagttctagaaactgaagtcaggcaatgtgaaagaaaaggataaaaatccatactatttttgagctctgaattcagaaagcatcacttctcagacgggtgacttcgacatggaggtgactaatttaggatcgtcggccggtggcagctcatgcccccagacaaaattctgaatgggtagaggtcattttatagcaagaagaatgggcagaagggagtgaaaacgaataaattcgtgctgaagatgtaagaattataaacaattgaaagtgttccagcagctttatatatatgccagaggcaagaactgaattagctggcaccgctaaataggacagtgtcagaatataaaaggtacactacctttaataaggggcatagggatcgatttcaataacaatcgtaaatccacattttgtaacgccgagacaaataactgaaggaataatttcaaaagctaacacagaagccttctgctcctgctgtgtaatcactaccttcttattattagcaagaaaacgttcttttcttagccgggtctcaaggtagcagctagtttgacaaggaaagacctttgggaagggtagcagcctaagccaattcataagtgtggggctggctaagtagatcgacgtggctatttctgagctatcgtcccaggcaaaaggtttcttatttgggtgtccagcccggcggagaccgagcccgcgggccaccctagcgctcgctctggctacgccgcctcagcccctcctcaagcgcacctggacatttaaccaacagctaagtccggcggccgaatgactgagccggcggcaatattcaaacaaccgttttgggatagagaaggaaaaactctctccgggtccctcagaaccaccccgaggcgggacaagccaccgccaccccgggcaactggaacccgccgggcagaagacgggcgtcaatagaatggcctccccagccgtccccacgccccaatccgaggcccggggagggcggcggggctaggcctgtctccccgcggaagcctggctcggcagcggagggccctctggggtttctcttcccagacccagagtcctggagcagctagcaagggaaacacgaaaggacagcgccgcggagctcaccccaggttcaaggcatcgcgcaccctgcggcagcggctgcgctgcctcagcccacagctcagacctgcgggtggccgcgactcaggccgggacccggtcgcacctctgtgacgcaaagccccgccccccgcgcgttgccgggagacggcgcccaaccttcctctgcagcgcccctaccgacccgcgctccgcagctcctgagggctttcgagcccagatggtcatctgagacgagaggtggcggcgaaggagagtctcgcctgtcacgctcccggagcaggggcttcatgaggtggccatggaaacagcctggcagactcccatctctcctggtgccatctccggagcgg

SEQ ID NO: 6709 - DNA, 2300 bp, Homo sapien
tatttaggtcttctttaatttctcttaacaatgttttttattttattttagattcagggggtacacgtgtagttttgttacatgggtatatcgaacaatgctgaggtttaggcttctaatgatccaggtcacccaagtggtgaacatagtacccaatagtagttttttctacccttttggaatccccagtgtttattgttcccaactttgtgtctgtgtactcaacgtttagctcctacttataagtgagaacatgcggtatttggtttcctgtttctgcattattttgcttaggacaatggcctccagctgtattcatgttgctgcaaaagatatgatctagtcctttttgtggttgtatagtattccatggcgtatatgtaccacactttctttatccaatccactattgataagcacctgggttgattccatgtctttgctattccataatattttatagttttcagtatacatgtctttctcatctttggtcaaatttgtcccaaatttgctgcttttttttttttttttttttttgctgataagagatatttaaaaattttccatttctaattgttcattgctagtatatagaaatacaactgatttttgtatatttgattttgtatcttgcaacttttgtaaactcacttatgagttctagcagcttttttgtagtattccacaattttcttatgcaaataaatgcagtgctacaacttcctttccaacttggatgccttttatatatttgtctttttttatttcattgaccagaacttccaatacaatgtttaattgaaggcaatttttacagagtaatatttctaactcccaggcccggattaggctgaactatggaatcttgttgaatttgatatcttttggaatttattaaatcattatttatacttcatttttaagctttttccttttccagtgttcaaatattcatcaaatgttcaaatattgaacaagtaccatgctggctgtcagggaaataatggtgcacaaacaggcatggacctagcgctaatgaagtcttaccgtactaccgaggcagtttaaaacaggaattaaaaacacaggttcagggttctgtctgcttgggtttgaatctggctctgctccttaatggttgtttgaccttggaaaagttaatcgacttttctaagcctgtgtcttagtgaaggtattaataatacctactcacaggattgctgtgaagattaaacgaattaatacctttaaagtccttaaaatacggtttgacatatagtaaatggtcaaagagtattattattagagggaagaattagctcttcacaaggtgaatctacaagtgactggtgaaggaggggtgtacaaacaagaaacataaaaaccagtttaactgctaagcatagaggcagcagtgtcagctgtacctgggttaaaatccttgctctgctgtttattgtctaggcaactttgaccagacgacttaaacaagagcaatgcccgtaaagtgcctagtgcagtatttggcacacaacagatgcttaaaagacagcaattactgattcagacgtcccgcagagcagtaatatcactaacatgtgctcatcatcatatctatcatttatcaaagctcaggattttgaaccttgtaattacttttcatacattctcttatgcttaacaactcggctaggtgaacacaatccattgcctcataaagaaacaagatgacctttgtgtatctatcatcagtggggaggctggaggtctgggaagtggtaccttggagcccaactgttgaccaaaccagggctctcagtgcggccttggtcgccagcggggcgctccactttccgctccggagatggcaccaggagagatgggagtctgccaggctgtttccatggccacctcatgaagcccctgctccgggagcgtgacaggcgagactctccttcgccgccacctctcgtctcagatgaccatctgggctcgaaagccctcaggagctgcggagcgcgggtcggtaggggcgctgcagaggaaggttgggcgccgtctcccggcaacgcgcggggggcggggctttgcgtcacagaggtgcgaccgggtcccggcctgagtcgcggccacccgcaggtctgagctgtgggctgaggcagcgcagccgctgccgcagggtgcgcgatgccttgaacctggggtgagctccgcggcgctgtcctttcgtgtttcccttgctagctgctccaggactctgggtctgggaagagaaaccccagagggccctccgctgc

SEQ ID NO: 6710 - DNA, 2300 bp, Homo sapien
aagcagacagctcgccgggcgcggtggctcacgcctgtaatcccagcatttgggaggctgaggcgggcggatcatgaggtcaggagatcgagaccatcctggctaacacagtgaaaccctgcctctaccaaaaatacaaaaaattagctgggtgtggtggcgggcgcctgtagtcccagatactcgggaggctgaggcaaggaatggcatgaacccaggaggcagagcttgcagtgagctgagatcacgccactgcactccagcctgggcaacagagtgagactctgtctcaaaaaaaaaaaaaaaaaaaaaaaaagtagagagctctgcttgagcccaggaggtagatgctgcagtgagtcacgatggcgccactgcgctccagccaacagagcaagaccgtgtctcttaaaagagcagagaactttctctggctaactgtagaagtgaaagagagactagaagtatgagaaggactcagtgtgtcattgctgctttgaaaatggaagggctctaggagaagagaatggtccctggctgacaccctgcaaggaaacagggacctcattcccacaacctcaaagaaatgaattctgccaacaacccaaatgtgcttcgaagtggattcttccccagagcctctgggtaagagcccagcccagccagcaccttaatgtcagtttcgtgagacccagggcagaggacccaactgagcccactcagacctctgacatatagaagctgttaaatgataaatgagtactgtttaagccgctaagtctatggtaatttgttggacagcaatagaaagctggcacagcgacctttctaaggcctcttcattggtattccagaaattctatggctggtgatcactgtgactctcattctcctccttgacacaaagccttgccttccctgattcattcttccccttcctgtcttccttcgttctttttgcaataagtgaacaaatgctagaaagctagctctctttcgggcatggtgttaggctttaagaataatcatgaagaggccaggactctgcctgtctgcctccctggtgctgtgatgatagagtcatgcatgtttctgagaaactggggcttgtgctcacccagatcatgaggtcggtattggagatgtgtaagggctgttaccctggtcttttagaagttccctgcatttgtttagagcagattctctttttgttattgatatttttcacacaaatatctaactttatgaccagtaccacttatataaaaaagaattcgttatccatatacttttcctataaaagacattcattttggaaaaatctcataaacctttgcccaagacattgcttacaagccagaactccataattaccatgaagcaaaaaccactgaaaatccggctggaaaaacatagaatacactctgctggtacacagcacagataaacctcatgttcatcgaacaacaaaggtggagtctgacttgaattctggcctaccagaatatgaaaggagttattaagagaaagttatttcataaaagacccctgtggtgattactattgtaaagttaaaaatccttggggaaagtgtaaaatgtttaattttgtaaattgccctcctacttgtgttatgtaaatgtgaatgtttatatgtgcctggtttctttgaaaaaggaatcacctgtagtggtgtagagatttcaaatgtgtaaaaggagactcaaaggaaggcagaaggttctagactcagtatttaagtggacatttactttcatgagcttcagcatcataccctgcagatcacaaggccgaacagctgggtggaaaaatcactgattgcgggaggaaaagaggcacaacctatgctcagtctcctttagggacagagatgtttctaggagtacataaacgatggactccacaggcagtaacagtgaatggtgtgagaactgagctgctgggggaggaggaacagcagggaatatgggaattgggagaacctttagcagttcacactgtgctatctgccttcctcatttgtgtgttttctgagtcagcattagctaaattttccagaaggccatccacaaagtacagcctgggcgttcaagggacgtcattcatttcccccagtgaccttgacaagtcagaagcttgaaagcagggaaatccggatgtctcggttatgaagtggagcagtgagtgtgagcctcaacatagttccagaactctccatccggactagttattgagcatctgcctctcatatcaccagtggccatctgaggtgtttccct

SEQ ID NO: 6711 - DNA, 2300 bp, Homo sapien
cagtaggggtcaccctaactgttccagagctgtgtgggctaacttgttcattgcagagaaagacagcaatcaagatggtggtcaccttgaccaatcctggggctaaaagtccctagttctttaaacataaatcaacaatcattctttgctgaatcttttgggtacctaggatgaatctgacaccttgcctagctcaaggagctcagtccaggagtctagaggtatgtgtgttggctggggggtctgtcagagctgggctgatggcagctcaggccttttctccagtgccctgactctaggggctttccgagccctttctgaaggacaggaagaacaccaagtattatgggaggtggcagggctttccggttcttcctcctacagcctccagcagtcagcagtaccttccagaggacctggaacacagttggtgctcagtaaatgacagtgtccttcatctccacccccacccaccatgtcccatcagccaaaggtcacctcactatgttatctgcatggtggtcttaatctactgtgcagtggagcagctccttcagggaatctctaaaagttgcagaaccaggccagttgttagttctatagattcctgaaggtattgcccaccccactaataaaagaaggagggagtttaaggatggggagaggccaggcagagcccttggagcttcggccaagcttcctgggctgcagacccccgtgcaggtggcctctgtgggaactactgtgaactgagtgtgtttcatccttggagcatcctgcttgggaggcattcttatctgttttgacaagaaaactgggactcagagatgaagcctactttccaaggccacatagccagtgagtggcaaagtgaggactcacaccgagatatctggttccaaagcctgtgttctttctacattgctatcctgcctttccctatggaaacctggcattgctagtctcctcttctaagaggaagcagaggagctagacccattggctcaggtctgttggcaggatcatactcctaggcatcttgacagacaagaagcacgaaagagtagtggagcatgttttcagttacaaggaacaaaaacccaacacaaagtgatttcaacaccaagaggcttaattgttcatgtaaccagctagtccagaaagtgttcaggcttcaggcacactttaatcagggctccagttctgtttctctgcaggtcccttcgctctgccctcctctgtgtgtatcatttagattctgtctggctttcctcatggaagcaaaatagtgtccgtagcaccaggtctcatatcttcacactccaccactcagagcaggagaaagcatctggtcctagaacaccactttaagctcatcgatgtaggctgggtccattgtctatccctgagccagtcactgtgggaggtggatgagattatgctgattgcagtcccaatcagcactgggaccccagtgcccccaggctgctgcaccatggggaagggatagcctggcttctgggagtcaatctaaggttgccaggggtgggcacagggcacatggaattcaccctgcctgagcccccaggttttagtagggctggtgtagtccccataagggctgaactcaaatgagagagcctgtgctgagggtcagaagagcatgaggggaggtgtcagggaggaagtcaggaaacagcacctcttactccccatccacatggctgaggaacactgtgtagtatagcagaaaaagccccagcctcaaaatcaggaagatctgggttcaaattattggttctctgtatgatttggggcaagtgactttcactctctggggcggttctctcatctgtaaaatgggaatattaatgcctacatcagaggtcatcttgaggattcaatcagatgatggtgatgctcctaggacagggcctggcacccagtaggtgctcagtaagtggtaaacaactgccaatgtgatctcaatggagtatcttccattagctacagctttgaggagttcgaagcacatttctcccttctgggatagctgtgtttactgtaaagaccaaattagatgcaaaatctctaaggtcacctctgactttgtaaacaaagccagagagccggaggaaatgaaattccaaatgccctctcctagcctggtttgacctccggtgttgatgcaaactcaagccggctctcactgtggcttgtggctccgggaaatggaacccagcttgggacagggatgggaatggatttgacttgtccttttggcatctccccagcctgtg

SEQ ID NO: 6712 - DNA, 2300 bp, Homo sapien
tctgttatggccccagttgctagacatttatgttgtttccaatccttttgcttttgtaaataatgctgcaatgaataatcttgttcgtttgtcgtttcccaagtgtgggagtgtgtttatagaataaattcctagaagtggaatcgggtcaaagggtataatcttgatagtgctaagttgtcctctatagaacttgttccatttttacacactgacaagtcatgtgttttataaaatggtattgctaatgcaatgattaaaaagttatttggtgatgcctttgtgtggtgaaagctgtgggtctttacccaagagaaacataaaccacgtagtggcttacatgcaatttcagttggctcagagacccctgaaggttatccgtgaaccctgggttcagaaaccctggctgaaacggaggcagcatgataaagaggacagagctttagggacagaccacctgaattcacatctcagtgctgtcacttatttactggctgtggaacatcaagcaagttgttttacttcttccagcctcagtttccttttgaaggaaaggcgtagacacttgtgaggatagagtgcttttatgtaaatcatctaatctaatgctaggaatatagtaggtactcaatatgatatatgattttgaactctctctctctctctctcacacacacacacacacacacacacacacacacacagccagccctaagttccatttcaacttctgattttgattgtccctgtagtgcctgctgctggactcacaagatcaacctttgaagcgacattccctaatgtgggatccttggaccaagtacatgagaatcacccaagggccttcactaaaatgcagatttctgggtctatgtcagatccatagaattagaatttctgaaagaggaacccaaggagcttcacacttgggggttctaatgcacattgaagttggagaaacagcactgaagagtttggtcagttccttctagaccatatacttgcaattctagtagttaccaccatgtggctttgtgggggacgggggttgtggggggagcctgtacctccatgtggacaggtgtggacacttgagagaaagcatggctagtacccaagacagcctcctctggtttcatttacaaaaaacaattattgatgagggtagcggacttcatgcgctgcacccctgttagtgatctctcttacaacaaccacacagaagagacaggacttcctgagaaccacatgcctgaggaaggtgctgggatggaggctcagtgggccaggctcagtggagagcatctgccactgctgcacaactgatctgtggccaggagctgagcataaggactgtgtttgccaggagagcttgaggccataggcctgggagctccaatccctagtgctctctaccatgactactgaatgttttctgggtggctaatgatggccaaaagctagggttcccggatttatcaaacaaaaatagaggatgactaattaaatttgaatttcagataaataacagtctttaatacaagtatgtcctgtgtttatctgaaatccaaatttaaatgggtgtcctgtaatttatctagcaactttacctagggtttctctgtgctgctctaaccacagaaggggctgaagtccccatgtggcttgcccccagcttggagctccatgatcctggccttgggtaggccctatacccaaggcaggtgaagagtgtgtatggacagggtatggatttcctgggcaggggcaggaagctcattcatactgatctagctcttatgagatgctggcagtgtgttaaacacttgactaacatctcatttaatcccctgactacctagtgagtcgggcattatcattattatttccactttagagatgaggagactgaggctccacgatgttaagaccacaggctgtttaatggaggagcaaggttgacatccctggggctggtgccaagtctgggagtagctgaatctcccaggccattctctctggcaatcccaagagtttaacgcagtgggagcagcccctgcccccgaatccccaggacaggaaccattcccagtttctcttggcgctggcccagggtcttctccaggctcacatgcttgctggaggctccaggcgggtggggagatctgcagggtccctttgttcccgtccggccaggacagtgtccagtggcacgagttgccatggggactgccatctgctgtgtggatacccatcggaggggcccagggtgagcgactgccccaaaggcccagcctgcc

SEQ ID NO: 6713 - DNA, 2300 bp, Homo sapien
aaaaccccaaatcattaatatatactaagtcaaaagaaattctgaaggacaaaagcatttagaaaaaaagtttacttacaaaaacacttgcaaaagtatacaggtgaatttacgctttagaaggactgatacatcaaatgaacacacaccaaggtttacagttagttgcttcatggtgagaaaagagcaattttctcatatgattgccatatgaccccaagctcccacatatcttcagactgtagcagtacaaaagtcagcaattaaactgtaagagagtcagtaatatatgggaaatgctgaaagttttgttcactttggagactacagagtgtgatactgttgtttcacggtttatttcagaacacaaagtattttgtttttcctgtgggaagtaatatgtacactcactcattttggaaacaggacaagatgtcagttttgctttataagcataaaccccagcatgtctgggtacttcttatatcagcttcaactcatgccactctccccctcattttctacattctagtcacatgaccttcttgcaggttctcaaagctcttccccaacatgccgtcccctctgtctggtacacattcccctacatactttacctgccaaaccttactcattttcccagatgcaacttaaatgtcacttcctccaaatcccactctaaactgagtgccccaactattcaatcatagcactctgcattatcaggtatgatgcctttggatgcgaataactgaaaaaccaaacctatcaatagagtttttaatatcagggaggcttttgggcatggagaataacaatcaccactatgtgtacttttgtttaatgcttactttataaactttaaaatatattaaacagtatttctgggaaatactgtctgatgccatccaatgcagtattcactaaccacatgtggctattgaacacttgaaatatgactaatccaattaaggaatttaattaggaatttttttaatttaaattttggaaaaactaaagtgtgtgaacctattttttcaactgcaaactttataaaatctaaacacagatccaatatttccaattaaaatcaggcaactgagatcagtgtatgcatgtgaaatacatatcgaattttcaagactcagtataaaaaaatgtaaaaattatctgaatttttatattgactacatgttgaaatgagattttggatatattacgttaaataaaatatattactaaaattaatttcctcttttttttttttttgaggtggagtctcgatcgatccccagtctggagcgcagtggctgatctcggctcagcgcaacctccgtctcccgggttcaagcgagtctcctgtttcagtctccctggtagctgggattacaggcgcccaccaccgcgccgggctaatttttgtatttttagtatagacgggttttcaccatgttggtcaggctggtctcgaactcctgacctcagatgatccgcccgccttggcctcccaaagtgctgggattacaggcgtgagccaccgcgcctggcctcatctgcaattttacttaaatcacaaatatactagatcttcttacatgcttcgaagaactaaaaaaaataagacatgaattatcacaatgattaccgaattaattgtaaatttttttatttaaactagtcacaaaggtatcacaggtatgacttacacctaacgggggccaaaagatgggttgcgaaacgaatgactgaattatccctaacaatcttgggaagaaaacaggattggccaggcccatcccgagaggtccacgtcaggcaggggccccgcccaccgcgggaccaagcggctacgccttccaagttttcattcggggccgcgccagcgctgaggagagtcagacgccagatggttccgaaggtcctgcaggctctcggggcaccctacagccgacacgccaacaaaagcttcggagccgccaaccccaaaacggaaacaccggagccacaagctgagctcgcgtagggcacgctcccccgggagtgcttccgggacagggggcggggtcgccggaagtggccgtccgccgtccgctgctcgttgtttaagcggctgacgggaaggagaagccagagctccagcggcgccgcggggcggcagtcaagaccagagccggagccgtcactcacctctggattagcctgaagcggagactaccggctgcggagcggcggggcgagacacttgctcgccttttgaccccatcatgtcgcggggctccatcgagattcccctccgggac

SEQ ID NO: 6714 - DNA, 2300 bp, Homo sapien
caccccgctaattttttgtatttttagtagagacagggttccaccatgttggccaggcttgtcttgaactcctgacctcatgcaaaccaaggcttgggcctcccaaagtcgggggattacagatgtgagccatcatgcccagccttgtctgccatttttggaagaagttatttacagaaataacataaattatggtttaatattctaggtttccccccctagttgcaagaattttagttttaagtgaaatagtgtccagagacaaaaagtgcatattcacttcatttctaaaggatctaggggtgtttattcctgctcctatggctcaagggatgagaagtgacttctttctggagggaccgttcatgccacccaggatgaaaatggatagggacccacttggaggacttgctgatatgtttggacaaatgccaggtaattttgaaaaaacaatggttgcgttaagctgaaaaatcagttaactttagttttgagagttgtccgtatatgtattttaaggtagcggaattggtactggtccaggagttatccaggatagattttcacccaccatgggacgtcatcgttcaaatcaactcttcaatggccatgggggacacatcatgcctcccacacaatcgcagtttggagagatgggaggcaagtttatgaaaagccaggtaagtaatatttgagtgtgcatgttttctaaaccttatctgcaacatttatttcaaactgaaatgtttatccttaagattagtaaagtattagtaaaatcacatcactttatttgataggttagatttttattcttccctgtttcatcttttactttctctgggcaaattcagttaaactaactttatggcttggctcatccctttggtacttgattaccataatttgtggacccctttttatctagactttctttctccttttctgaaataggggctaagccagctctaccataaccagagtcagggactcttatcccagctgcaaggacagtcgaaggatatgccacctcggttttctaagaaaggacagcttaatgcagatgaggtacatttgcctatgttacttatataccatagtttgtccattcagaaatttattgcccgatgattataaaaagacgcgttattaagaggactttatgctggagttcttgacgtttttctctcttttctatacttctttttctttctttgaatgtccagcgtcctgtgagcgaagattatgagatatgagggcaagtctcctaaagtctgttagagcaagaaaactggttgtcaaaatattgtggtttctttctttgtaagggtgatttaactaaggataaaacagggcattttctaaactgtagttaaatttgcagttttttatttgaatattttagtcatgctaattctaagagaatgtaagatttataatagtatcttactactgtatgcatcagatctttaaattttttgccaaaaattaaacctgttaatgtggagtaccttctttagtttttcaaaaagcttaatgtttccctagattctgtcactgtataggattttagaatgttgtatttaatatgttcgccaactgcatgttgttaatttagatatattttgttttcaattccagattagcctgaggcctgctcagtcgttcctaatgaataaaaatcaagtgccaaagcttcagccccagataactatgattcctcctagtgcacaaccaccacgcactcaaacaccacctctgggacaggtacagaccatagtaggacagcattttctaaagatatctgaagacttttttctaaatttagtgtgttcttccccctaatttcatagtcctctttttaaaaaaagtctgtcattgcttgttttttagacacctcagcttggtctcaaaactaatccaccgcttatccaggaaaagcctgccaagaccagcaaaaagccaccaccgtcaaaggaagaactccttaaactaactgtaagtttcaaatatcccattttagtgtaattagcctgtatttgagatagagaatacattaaagatacttgtgttcttcacaggaaactgttgtgactgaatatctaaatagtggaaatgcaaatgaggctgtcaatggtgtaagagaaatgagggctcctaaacactttcttcctgagatgttaagcaaagtaatcatcctgtcactagatagaagcgatgaagataaagaaaaagcaagttctttgatcagtttactcaaacaggaagggatagccacaagtgacaacttcatgcaggta

SEQ ID NO: 6715 - DNA, 2300 bp, Homo sapien
catctcgtctagtgcttcgtgcaggaatccatttctgagcgttttgccctggggttttccccaggaactcgctgattaataaaaatcagcaaaaacacttattgtcacacaccaaatgttaaacatcataaattctcttacatagaaaaaagtaatttaggctttctcgacttcccctccaagaaagccaactctggaaattagtgcttctggaacagtagtgtgcatcagaatcacctgaagggcttgttaatacagattgctgggcccacccagtttctgctttcactggtttggggtggggcctaagaatttgcatgtctagtaaatattcccagtatcaacgctgtggaaccacattttgaaaattaacattttttttaagagatggggtcttgctgtcttgcccaggctgatctcaaactcttgggttcaagcgaccctcccacctttgcctcccaaagttgttgttgggattacaggtgtgagccactgtaccggctgccaataaacactttctaatgttttattgaccatgttgagtgcgtactactttactaataacaatcagtaggaataatagctactgatttcagaaaaacacattagtaaaaataacccaaagaataaggaaaaaaataacagcttgagagtctcaactcacttagaaaatttggctaaggaataatcaggaactgatattctgtatttaggatacccaacagaaaccacgccccttaagattaggagtcttgatggctattgccttaattataccgtcacatgggaaagacttttaatctgttaaataaagctcactgtttttttacatgtttaccacacctgttgccagcagtcttgggatagtgctgaggtgcacccctacttcctcctccgcccgaagaagcactatttaaaagaaaaaaattgtttactgtatcccaactatgtctcactcaaaaagaataagcatctattttgtgttttgctttgcttgtagagatgggggtctcgctattttgcccagactggagccaggcctgtattttagtgcttgtatattatgctacaaatgaagactgaactcggacccaaaggaaaggcaaataattgattttatttattcttcagatggcagttcttagaaggctgtcaatgaaaacttaagaacttttcaaatgaaaattgcagcccattaagtcggacttatttgctgtgttaactactttttgagactggccttttcaaaaggattccccaaaataaatctacaagtacctgaaacgagaagcacccccttctgcaatcgcactctccactttggcggcttgacaacgaagaatcttcaaaagaataatattaatagatggggtggggaggggaggggacaggagaaatgaaatacctggaacgagaaagagcaccaaaattagacactgctaacatacagatctataagccttcattcaattacaacgtatttcagatcctggcactgtcactgcattgcagatctgtaagactaacctaaaatgtactcaaaacactgacaattacattttgtttagccacctggaaattccccggtgttcaaggatgcaaagagacttcgtagaacacaagagcattttaaacggctcagaacgaatcttttgaaaaagccacattctactatctttaaaactgagcactgagatcaatagaaaagtctaactacagacacgagcaacatcacgtggaaaatgtctgccctaggaatttttactgccttgacgaggccagcgactagatgaggtctctccgaaagctcttcagcagttttcccctgtccaccctttcgcctcctccccgtggagagctcgtggaaagacgcgcgagagggggccgggtgtacaggactagcacttgcaggcggaagaccagggccacaacatggcagcaggaacctccgccccgtttttcccttcctgggaacaaaagagcggagcattcctcccacccaggcgcaagttagggaagtgcttccgacaacctccccgcgaggcccgggtcgctcgacggggaggagcagctgaggccacccccgccagcccggcgcccagctctttgttctccaagcaggaaggcggcctcctgcccacccgccgcctccaagcgggccccctcctgcaccataaatccccccgggactgacaaccgcctcgccacggcctcctctgctgacaaaaggggcagaaatcatcactctctctttcctccccgacgaagggcagcccctgccgactccaggtcctacacac

SEQ ID NO: 6716 - DNA, 2300 bp, Homo sapien
aactactttttgagactggccttttcaaaaggattccccaaaataaatctacaagtacctgaaacgagaagcacccccttctgcaatcgcactctccactttggcggcttgacaacgaagaatcttcaaaagaataatattaatagatggggtggggaggggaggggacaggagaaatgaaatacctggaacgagaaagagcaccaaaattagacactgctaacatacagatctataagccttcattcaattacaacgtatttcagatcctggcactgtcactgcattgcagatctgtaagactaacctaaaatgtactcaaaacactgacaattacattttgtttagccacctggaaattccccggtgttcaaggatgcaaagagacttcgtagaacacaagagcattttaaacggctcagaacgaatcttttgaaaaagccacattctactatctttaaaactgagcactgagatcaatagaaaagtctaactacagacacgagcaacatcacgtggaaaatgtctgccctaggaatttttactgccttgacgaggccagcgactagatgaggtctctccgaaagctcttcagcagttttcccctgtccaccctttcgcctcctccccgtggagagctcgtggaaagacgcgcgagagggggccgggtgtacaggactagcacttgcaggcggaagaccagggccacaacatggcagcaggaacctccgccccgtttttcccttcctgggaacaaaagagcggagcattcctcccacccaggcgcaagttagggaagtgcttccgacaacctccccgcgaggcccgggtcgctcgacggggaggagcagctgaggccacccccgccagcccggcgcccagctctttgttctccaagcaggaaggcggcctcctgcccacccgccgcctccaagcgggccccctcctgcaccataaatccccccgggactgacaaccgcctcgccacggcctcctctgctgacaaaaggggcagaaatcatcactctctctttcctccccgacgaagggcagcccctgccgactccaggtcctacacacctccccgccgggaggccaggctccgggacgcctgcggttccctggtcccgcgccaacggcctggccttccctgccggcccgcgtgcctcccgccacggcgctagcggtccgagccacgctccctcgccgtccgagcacagccgtgcctcggtccgccacggcctcgtccctgcaggcgtcggccatccggccatgaccgcacggcggcctggccaacactgacgttttccttctactccgtcagcaacaggaagagagaacaaaagccaagactttccaggtatctgaagcgcagaggaaatgctaaaaaagggtcgccccacccggctccgcctgcggccgccattttgtaccactcgagaagaagcgaccagggacggcggccattttagagcgctccactcggcggcggcagcggctcaactcaccttcaccgagaactcagcagctgccaccgcagctgcctcctcaggatccggtcgtcggggatagggaagggaggggaaaggggaacggaaaacaaaaaaaagggggagggaagggggaggaaggagtcggggacggcctcaaactcagctcagaggagtcgctgctgcagccgccactcggtacccgctgccacctccatagagctccgactcactgctggcgctaaggcgtgtctgaagccgaacttatcactcttggggcagccgaacccaccagagtctccccgaatggctccttcgccgcccaatcagcggcccggttgccgtctgccaccaatccgcgcagggcagcgaggaggagccacagggctgagctcggttgcggcgcagccccgccgcagtgcgcaaagccatattcgcgaagtctctgaggctgagccagtggcgtaaggggcgccgagcgctgtcgagatgagggttgcgtgcgtaaagccggagagcccttttgagtctgcgttggcgtggctgctgcttcttgctccagtccctttgttcactgagtccatatgccatgctccagttgtatcatccccttttccctcgacctcgttttctcaccgggaatatgggaagaaaacgcacccttacctcccccgaaccctgtgcgtggcgagtgagcattgcttttcttggcgccccttggagctgtggctgccctcgcgtgcctggcctctcccggggctgagcccttcgggttgaggcctggagcccccgggcgcagcgccgggacac

SEQ ID NO: 6717 - DNA, 2300 bp, Homo sapien
caggtgctctaataccaagagctgttttgacacatcaaaggttaagtttgggtctttgaaaatcctgcctcttactgaacactttaaaagtcattcatgttaaaacacacacattcttgcctttgactatacactgtaaaagtactacatgttaaaatggagatggggacatttttgttgtttaagtttatggaagtatgactccattttagtatagctacaatgtcgcaaacgatggaataaggtactcatcaatacattacctggtaagtataaatagttcaacttgccggctttgaaaagcttaatcctatttcttatggtgaaccttaaataaaatgaaaatacacaactgacaatgtttaacgtgcacttaaacaaacaaaaaacaaaaaaaaacaggagctagcaattcgaaatcctccaaacacccgcggaagtctgacacacagggtgttttcctcggtgaccgccagccggacattcctatgggaaaagcagcttcttctgtgcggttcgaagaaaatcaaccccttcctttcatcactttctcattcactctgcagggggtgggccaataaggagctgaatgaagctcccctttggcatccgggcgcacgtctcgcctcctccccactactttctgggttccctaaggctgccgaagccgaggacctggagccgggtagtgtcccggcgctgcgcccgggggctccaggcctcaacccgaagggctcagccccgggagaggccaggcacgcgagggcagccacagctccaaggggcgccaagaaaagcaatgctcactcgccacgcacagggttcgggggaggtaagggtgcgttttcttcccatattcccggtgagaaaacgaggtcgagggaaaaggggatgatacaactggagcatggcatatggactcagtgaacaaagggactggagcaagaagcagcagccacgccaacgcagactcaaaagggctctccggctttacgcacgcaaccctcatctcgacagcgctcggcgccccttacgccactggctcagcctcagagacttcgcgaatatggctttgcgcactgcggcggggctgcgccgcaaccgagctcagccctgtggctcctcctcgctgccctgcgcggattggtggcagacggcaaccgggccgctgattgggcggcgaaggagccattcggggagactctggtgggttcggctgccccaagagtgataagttcggcttcagacacgccttagcgccagcagtgagtcggagctctatggaggtggcagcgggtaccgagtggcggctgcagcagcgactcctctgagctgagtttgaggccgtccccgactccttcctcccccttccctcccccttttttttgttttccgttcccctttcccctcccttccctatccccgacgaccggatcctgaggaggcagctgcggtggcagctgctgagttctcggtgaaggtgagttgagccgctgccgccgccgagtggagcgctctaaaatggccgccgtccctggtcgcttcttctcgagtggtacaaaatggcggccgcaggcggagccgggtggggcgacccttttttagcatttcctctgcgcttcagatacctggaaagtcttggcttttgttctctcttcctgttgctgacggagtagaaggaaaacgtcagtgttggccaggccgccgtgcggtcatggccggatggccgacgcctgcagggacgaggccgtggcggaccgaggcacggctgtgctcggacggcgagggagcgtggctcggaccgctagcgccgtggcgggaggcacgcgggccggcagggaaggccaggccgttggcgcgggaccagggaaccgcaggcgtcccggagcctggcctcccggcggggaggtgtgtaggacctggagtcggcaggggctgcccttcgtcggggaggaaagagagagtgatgatttctgccccttttgtcagcagaggaggccgtggcgaggcggttgtcagtcccggggggatttatggtgcaggagggggcccgcttggaggcggcgggtgggcaggaggccgccttcctgcttggagaacaaagagctgggcgccgggctggcgggggtggcctcagctgctcctccccgtcgagcgacccgggcctcgcggggaggttgtcggaagcacttccctaacttgcgcctgggtgggaggaatgctccgctcttttgttcccaggaagggaaaaacggggcggaggttcctgctgccatgttgtggccctggtcttccgcctg

SEQ ID NO: 6718 - DNA, 2300 bp, Homo sapien
aaagtgagactctgtctcaaaaaaaaatttttttttctaaaggttttacttaatgtttttatttaatctttgctaattgtgaacccttctgcaatgggctttgcaggtacgatttcaacttcaaatctttctatttaagtgagagaaaggtaattgaaagattgttttatcaatatttttactttttctaccttaggttattcccttccaggtcaatttctcacataaactcatatctgcaaagcccataccaaaagggttcccaattagcaaagattaaataaaatattaagtaaaaccttttttaaatttttaattactgaattttaagtgtcttaattataagaacatccgacttttacggctaggtgaatattctctttgaagtctagacaatagtttttgaatactactcttcttagtaaactaatgtattcgttcattatcagataaatggaatgtaaaccagttatgtaaaaatatcacatatactaatgcatttttccaaaccttaaagccctacagaaattataaagaaacattattctcgtgttatcatgaagctagaagggtccaaagaaatacaaagtgaaacctcttgtatttaaaacaaaacttgcaccaccaccaccaccccaaaatagtttttttttttttttagaatatctcttccaagttttaaagttcaagtaaaattgatgtaatagcaataagtgtagtaacagtaaagtagggaatggtgactattctatagcaaagatctacagatgttggaattgtgttaaaaaccttcagagccacaccacagccttctattacatttaaatgtcgtaggaaaaactgcaattttccggaaaattgtattaaggaccaggtgctctaataccaagagctgttttgacacatcaaaggttaagtttgggtctttgaaaatcctgcctcttactgaacactttaaaagtcattcatgttaaaacacacacattcttgcctttgactatacactgtaaaagtactacatgttaaaatggagatggggacatttttgttgtttaagtttatggaagtatgactccattttagtatagctacaatgtcgcaaacgatggaataaggtactcatcaatacattacctggtaagtataaatagttcaacttgccggctttgaaaagcttaatcctatttcttatggtgaaccttaaataaaatgaaaatacacaactgacaatgtttaacgtgcacttaaacaaacaaaaaacaaaaaaaaacaggagctagcaattcgaaatcctccaaacacccgcggaagtctgacacacagggtgttttcctcggtgaccgccagccggacattcctatgggaaaagcagcttcttctgtgcggttcgaagaaaatcaaccccttcctttcatcactttctcattcactctgcagggggtgggccaataaggagctgaatgaagctcccctttggcatccgggcgcacgtctcgcctcctccccactactttctgggttccctaaggctgccgaagccgaggacctggagccgggtagtgtcccggcgctgcgcccgggggctccaggcctcaacccgaagggctcagccccgggagaggccaggcacgcgagggcagccacagctccaaggggcgccaagaaaagcaatgctcactcgccacgcacagggttcgggggaggtaagggtgcgttttcttcccatattcccggtgagaaaacgaggtcgagggaaaaggggatgatacaactggagcatggcatatggactcagtgaacaaagggactggagcaagaagcagcagccacgccaacgcagactcaaaagggctctccggctttacgcacgcaaccctcatctcgacagcgctcggcgccccttacgccactggctcagcctcagagacttcgcgaatatggctttgcgcactgcggcggggctgcgccgcaaccgagctcagccctgtggctcctcctcgctgccctgcgcggattggtggcagacggcaaccgggccgctgattgggcggcgaaggagccattcggggagactctggtgggttcggctgccccaagagtgataagttcggcttcagacacgccttagcgccagcagtgagtcggagctctatggaggtggcagcgggtaccgagtggcggctgcagcagcgactcctctgagctgagtttgaggccgtccccgactccttcctcccccttccctcccccttttttttgttttccgttcccctttcccctcccttccctatccccgacga

SEQ ID NO: 6719 - DNA, 2300 bp, Homo sapien
cgacggggctagtgaagtttgagaacaattgcttcctacccagccgctccgctatcacctaggtagcacggccgctgcggctgaggctgtgactgcggctgcggctgggccgcgcctcaaccgagcttggtcctttcctttggtcccgccccgctgctcagcgcggattggtggcgggacgcaaatctggcgctgattgggcggcggcagagtcgctcgtgaagattgtagggttcgggtgctctagagtgctaaatttatcttcagaccggcgaccgcgccagccgcgaatcggatctctatggagatggcctaggcgatatccctgagctgagagcatcaccctgtccccgaatccttctttcctctctgttttgtttttcattcccctccctctctcccctccccctccagtccacgacgactggctgttgaccctgttcaggcctcggtgaaggtgagaagcagagccgccgccgcggctaagcggtgcgctctgaaatggccgcttcctggaactgcctaagatggcggtcgcgggctctgctgtggaccgcggcgctgctgtgcagcccagccgcggcaaaatccgttctctccatcgctgatggagatgaaatagagagatggtgttgggtgctgagacgttttcatgtggtcgttagcgcaggcggccgcccggggacgcgagagaagacctgaggcgagggtgggctgcgactggtagggagccccccagtcgtggcaatctgtgggcagcgcgcacctgtgacagggaggagctgagggatagttggccctggctgcacatccaggtgaccgtttaaaaaagcatttaggtgttggaaggagcatctgttcccacctttttggctggcctgcactcagatcctgtcctcctgaccctgagggtattgttcccagccggaaccgcccgaagataggggagaaaggattgtgatacttgtcagtttaaccggaaggagactaaagacggaagttttccccgctcttcagggagtggaaaggaaactttactctcaaaggagtccagattctttgtcctcgagaaattcggggaaacaccttcgaagaggtggggttgaggaccttctttctgaaaacaaaagcttcctactcttctgtgtcctctggcaacgagagggatcctgatcttttacgtgaaccagcagctccacagagttctccgttgcaaaatccaaaaggagactgtggaaggagaatctgcttttttgctcccaataagaagcagggctttatgctgttgctagtatgagaccctcgactttctggcagttataatccattgttcatccgtttcgctgcataacccaactcctagtaacgagattttttagtagttggggaattaaaagtattcaggaacacccaagtaatggctagacacatgggctatgcagtcaaactttttgggctctgaacttggtttttcacttacaagaggtgttagcgagatgtgttaacctgtgtctgtttatctctaaagtggggttattaataatccttgtgtcttcatagatgagataatctatatgagggatttagcagtaattggcatacagtaaacaatcatcagtcattagacattgtttacctgaggagattggtcactggggggctaaaaatgattgtagtgaaagaactgcttcatgtaatagttctatgtataattccattttagattcaagacctagttttagagacattgatgaggttgtacttttaaaaattaggcttagtttcaagttctagaaagtgtggtggtggtgttgttttaacatgtttctatgaagtcagtaggtgggggaacatctcaaagcatctaaattgccaagatattgaacaggatgaaaatgttagaatttttactatgctaggcgtcttctctttcagtccaagatctgcattgcagtaaagaatcattttcactgcttagatccagaaagaataaacccatcttacgggtttatagttagttctgcttgttactgtatctaattttaatttttctcattctaggcttttggttactccccttcccaccccatcccttaattttattcttttgaagagtgcatttcaagctgccaaggtggagagagggattacagaaaggagaacaccttatttcaggtatcttatcctctaccccttaataggagaaccattttgactcaagatctaacatgagaatacaaaacttactctatagccaggttataaagtttaaatcaaaagtagctatatttggacagaca

SEQ ID NO: 6720 - DNA, 2300 bp, Homo sapien
ctcctttctgtaatccctctctccaccttggcagcttgaaatgcactcttcaaaagaataaaattaagggatggggtgggaaggggagtaaccaaaagcctagaatgagaaaaattaaaattagatacagtaacaagcagaactaactataaacccgtaagatgggtttattctttctggatctaagcagtgaaaatgattctttactgcaatgcagatcttggactgaaagagaagacgcctagcatagtaaaaattctaacattttcatcctgttcaatatcttggcaatttagatgctttgagatgttcccccacctactgacttcatagaaacatgttaaaacaacaccaccaccacactttctagaacttgaaactaagcctaatttttaaaagtacaacctcatcaatgtctctaaaactaggtcttgaatctaaaatggaattatacatagaactattacatgaagcagttctttcactacaatcatttttagccccccagtgaccaatctcctcaggtaaacaatgtctaatgactgatgattgtttactgtatgccaattactgctaaatccctcatatagattatctcatctatgaagacacaaggattattaataaccccactttagagataaacagacacaggttaacacatctcgctaacacctcttgtaagtgaaaaaccaagttcagagcccaaaaagtttgactgcatagcccatgtgtctagccattacttgggtgttcctgaatacttttaattccccaactactaaaaaatctcgttactaggagttgggttatgcagcgaaacggatgaacaatggattataactgccagaaagtcgagggtctcatactagcaacagcataaagccctgcttcttattgggagcaaaaaagcagattctccttccacagtctccttttggattttgcaacggagaactctgtggagctgctggttcacgtaaaagatcaggatccctctcgttgccagaggacacagaagagtaggaagcttttgttttcagaaagaaggtcctcaaccccacctcttcgaaggtgtttccccgaatttctcgaggacaaagaatctggactcctttgagagtaaagtttcctttccactccctgaagagcggggaaaacttccgtctttagtctccttccggttaaactgacaagtatcacaatcctttctcccctatcttcgggcggttccggctgggaacaataccctcagggtcaggaggacaggatctgagtgcaggccagccaaaaaggtgggaacagatgctccttccaacacctaaatgcttttttaaacggtcacctggatgtgcagccagggccaactatccctcagctcctccctgtcacaggtgcgcgctgcccacagattgccacgactggggggctccctaccagtcgcagcccaccctcgcctcaggtcttctctcgcgtccccgggcggccgcctgcgctaacgaccacatgaaaacgtctcagcacccaacaccatctctctatttcatctccatcagcgatggagagaacggattttgccgcggctgggctgcacagcagcgccgcggtccacagcagagcccgcgaccgccatcttaggcagttccaggaagcggccatttcagagcgcaccgcttagccgcggcggcggctctgcttctcaccttcaccgaggcctgaacagggtcaacagccagtcgtcgtggactggagggggaggggagagagggaggggaatgaaaaacaaaacagagaggaaagaaggattcggggacagggtgatgctctcagctcagggatatcgcctaggccatctccatagagatccgattcgcggctggcgcggtcgccggtctgaagataaatttagcactctagagcacccgaaccctacaatcttcacgagcgactctgccgccgcccaatcagcgccagatttgcgtcccgccaccaatccgcgctgagcagcggggcgggaccaaaggaaaggaccaagctcggttgaggcgcggcccagccgcagccgcagtcacagcctcagccgcagcggccgtgctacctaggtgatagcggagcggctgggtaggaagcaattgttctcaaacttcactagccccgtcggcgcggacgcttgtcgagaatgcagattcctgggtactgccagatacggttggtgatcttgtagggctggagtggaagccatgaatctgcattttcatcatttctggccctctgcccgggctggggtgattcacggggat

SEQ ID NO: 6721 - DNA, 2300 bp, Homo sapien
agaattcacttaactatcagaacagcatgggagaaaacgtcctcataatccaatcactttaatccttccatacgtggggattaaaattcgatataagatttgggtagggacacagagtcaaatcatatcaggacctaattcctaaactttagatgtacttatttaaacactattctgcctaacagtttaatattttgggttttccctcttcatgaagatgtaaacaagatgtgtaaagattggtttgggagcccatggcaaggacaggaaaatcaaacacatgttctcactcataggtgggaatagaacaatgagaacacctggacacagggtggggaacatcacacaccagggcctgtcgtggggtggggggaggggggagggatagccctaggagatatacctaatgtaaatgacgagttaacgagtgcagcacaccaacatggcacatgtatacatatgtaacaaacctgcaagttgtgcaccctagaacttaaagtataataataaaaaaaataaaaaataaaaaaagattggtttgggagcacatatgtaaaaggtttttctaaaatatgaaacacgaaaatatattattccaatattattctgaagccagacaactcccgcaatgacaaaatcccttgctcttcaagcgcgactgtacccccttcccaaaaacgatttatgcatttatggttaaagttcaaatgaagctgatttaatagaaataatttaaaaataataatgagaatatatggacagcttactatagggtgagatgatgttgtaattgactttaaaacatttggaactaaatgtcagtcctaggaaattatgcactcctgtaaattgtgctattaagggttaggtttctttcaacactttagatatttgatcagaagcatatttaagaaaaacgaaagctgcccttgcttttgaccccaagttgagaattttctatcattggtgcagtgcctgaaaatacgatccaatcttcatttagtcatttgtacggagtctggaaaggctaaaacattgcaaataataggacctactcgtactttccccgcttaagaagcgtatctatttcaaggtgcctatttggaaaaacagactccaggtctccaccacagaacttaacacaaaatgaaagcacacaacccgcagcctttggctgtggtgtttttgaaaacaaggaagggcacagaaccatggcttaaaatacccgaaagctgcagcccacaaaaagagtatttcagggcgggttggccgttccctgcaggcaaacgttcggtgcaggcggccgggcgttcctgcggggagggcgccactgtgatgcaaagacatcaagcggactttcagcttgcccgtggacgctgcggtgccgctttccctatccagtcctgttcccgcggctccccagcctaccccgggccgaccaagaggtccggcggggtctgcgccgcatcagcgcccgctcgtcaggcctagccctccgcacagccaaggccgaccagacctctagacactccgtcgtcgggtgtggggcggagaagtaaagggcgagttttcttcctagattccagtgggaaccaagaaaaggagttggcagctgtgtaaactggacctggggtgcggcctccgggaacaaaagaggtgataaatgcacagcagccgaggttctgcgtgctcctttggggccactacgaatccccgtgaatcaccccagcccgggcagagggccagaaatgatgaaaatgcagattcatggcttccactccagccctacaagatcaccaaccgtatctggcagtacccaggaatctgcattctcgacaagcgtccgcgccgacggggctagtgaagtttgagaacaattgcttcctacccagccgctccgctatcacctaggtagcacggccgctgcggctgaggctgtgactgcggctgcggctgggccgcgcctcaaccgagcttggtcctttcctttggtcccgccccgctgctcagcgcggattggtggcgggacgcaaatctggcgctgattgggcggcggcagagtcgctcgtgaagattgtagggttcgggtgctctagagtgctaaatttatcttcagaccggcgaccgcgccagccgcgaatcggatctctatggagatggcctaggcgatatccctgagctgagagcatcaccctgtccccgaatccttctttcctctctgttttgtttttcattcccctccctctctcccctccccctccagtccacgacgactggctgttgaccctgttcaggcctcg

SEQ ID NO: 6722 - DNA, 2300 bp, Homo sapien
tggtggctcatacccgtaatcccagcactttgggaggccaatgcgggtgactcgtttgaggccaggagtttgagatcagcctagctaacatggcaaaaccccatcgctataaaaaaatacaaaaattagccagacacggtggcatgcacctgtagtcccagctactcaggaggctgaggtggaaagatcatttgagcccgggaggttgaggttgcacagagctaagatcgtgccactgcactccagcctaggcaacagagtgagaccctgactcaaaaaaacaaaaacaaaaacaaaaaaagcgtatacaatagctccccggcctacattatgtattcaataaatgctagctatgtattactggtctgagttctacattgtctgtattttttcttatctgtcccatcaacattctgtaataatttgacaaaacgattacaaaaaaagttaagtttcatgaactttaattatgagacacttcagatttggggccctatattaatccattctcacactgctataaagaaataccgagactgggtaatttataaaggaaagaggtttaattgactcagctgcacatgcctgggcggcctcacaaaattttccaatcatggaggaaggggaagcaggcacgtcttacagggcaggtcttacatgacggcaggtgagagagagcatgtgagaccacaggaaaaactaccatttataaaaccatcagatcgtgtgagaattcacttaactatcagaacagcatgggagaaaacgtcctcataatccaatcactttaatccttccatacgtggggattaaaattcgatataagatttgggtagggacacagagtcaaatcatatcaggacctaattcctaaactttagatgtacttatttaaacactattctgcctaacagtttaatattttgggttttccctcttcatgaagatgtaaacaagatgtgtaaagattggtttgggagcccatggcaaggacaggaaaatcaaacacatgttctcactcataggtgggaatagaacaatgagaacacctggacacagggtggggaacatcacacaccagggcctgtcgtggggtggggggaggggggagggatagccctaggagatatacctaatgtaaatgacgagttaacgagtgcagcacaccaacatggcacatgtatacatatgtaacaaacctgcaagttgtgcaccctagaacttaaagtataataataaaaaaaataaaaaataaaaaaagattggtttgggagcacatatgtaaaaggtttttctaaaatatgaaacacgaaaatatattattccaatattattctgaagccagacaactcccgcaatgacaaaatcccttgctcttcaagcgcgactgtacccccttcccaaaaacgatttatgcatttatggttaaagttcaaatgaagctgatttaatagaaataatttaaaaataataatgagaatatatggacagcttactatagggtgagatgatgttgtaattgactttaaaacatttggaactaaatgtcagtcctaggaaattatgcactcctgtaaattgtgctattaagggttaggtttctttcaacactttagatatttgatcagaagcatatttaagaaaaacgaaagctgcccttgcttttgaccccaagttgagaattttctatcattggtgcagtgcctgaaaatacgatccaatcttcatttagtcatttgtacggagtctggaaaggctaaaacattgcaaataataggacctactcgtactttccccgcttaagaagcgtatctatttcaaggtgcctatttggaaaaacagactccaggtctccaccacagaacttaacacaaaatgaaagcacacaacccgcagcctttggctgtggtgtttttgaaaacaaggaagggcacagaaccatggcttaaaatacccgaaagctgcagcccacaaaaagagtatttcagggcgggttggccgttccctgcaggcaaacgttcggtgcaggcggccgggcgttcctgcggggagggcgccactgtgatgcaaagacatcaagcggactttcagcttgcccgtggacgctgcggtgccgctttccctatccagtcctgttcccgcggctccccagcctaccccgggccgaccaagaggtccggcggggtctgcgccgcatcagcgcccgctcgtcaggcctagccctccgcacagccaaggccgaccagacctctagacactccgtcgtcgggtgtggggcggagaagtaaagggcgagtttt

SEQ ID NO: 6723 - DNA, 2300 bp, Homo sapien
tttttaaaagtattttgaaataaaaaaatttgtaatgttttaatgctaagttttatattcttatatgttactactatgaaatgaataaataaataataaaagaacatacggacgaccctgaaaaaaaaaaaaaagaagtagcagaagcagacgcagaggtgttatgagtggagttgggggttaggtcagcctcagaaagccagagagaagggatttgcctggaatactgaagaagctctagccacagatgaggctaagttgagtgtgaagaaggctgaagaaaagaaaaggattttttttgttttgtttttggcatggcacatagtaataattatccctcacaagaatgtagcatgttagttttcaaaacacttccatgagtgatctaacttgctgtcatgacaagcaaccccaagtgaagggcaggggctcagaaaaccagggccactgaatggggaaagctgttccttcccagtgcaagctcatagcctccacggggaactgacagtccatgttgtcagtaaggaaaccgcagctcagacaggtggactgacttgccccaaatcccagagctactaactagcagagacttgatcctaggtctctcaacttccaacccactgctctttccacaaccaggtatgaattaaaacagaatgaaacaggaaaagttaaacataattctcgaccgcgtcgaagaatgaaaggatccctattgtatgttaaaactcaaaagacagaagtatataatttggggatatattttaaactttacacaatcctcccacccctagctctgagtaggaaaaagggtaaaaacagaatctggggtgagaagtcatctgactcatccatgatgtggtaaagaatctgtaagcaaacaccctgcatttatttcaagtactgtgtctcattctgccagccctggcagccggcccactgcttgtgcttcaggggccctcctttggagacgtgctcagagccctattttaggaggacagaagtggcctaaaacatgtggccattaagctagaattttaaaggacacacacacacacacacacacacacacacacacacggacacagcaagctatctggtaagctggtggttaagaatccgaatgtgtgctcaaggcccctctgacacaggcagccttatccacagaacttcatccctgtgttttggcctgttccaggaagagccagcaaagttgcctgcaagagagagcacgtggcctgaggggtgaaccagggacagcctctgaagagcgaaggatttatctgagcagccaaatgtccactgacagacaggtctgtgtgtgctagagaaacttgttccacagctcagatgaaaaacgtattgtggaattcacccacaaggggaagtgagttaatgactggggcgtttcatcttctgcctagatgcgtcataaaatcaacttgtaaagcctggctcagaaaatacatttactctcccagatgtggttccatatagggctatgaaacatttcaaagagtgatcgctcacagaggagtgcgttcttaggctttctctgtgctgggagtggggccggtggcctgagcctgacagcccatccaggctgtggtcaaatttgctgacaagcagcccaaatctgcccagagcatctgctcacatctgggattgtgactcatctgcctctgtctcccccagcactattcactcactcctgcaggcctgagcatgtaagccccacggtgcccagggcccagcgcccagacttgtccctccacccaagcacccatcacggcttgtccttatctccaacactgcctgcccctcccatttagacttggtctgctttcccagctccaggttcagggcaaaccatgcttagaccttcttggactcagcctgagctatcataagaggttcccaggctaaaacacatgcacagtctcctgcacagtggtgtctgttctggccctttaaatttagcagatccacactcccaccacgcccagctggcccaccagagtgagccacaggcaacacatgttctaaaccaaccctgttcaccctggacctactatttttgcactcacctccctggttctcagatttctggctccggttcccagctgccatagcccctttggtcccttcactttggtgaccctttaggcttccctttttagaccacagctgtcacatgtttctgactcaacttgcttctgccatgccagcgtcacccctggtctcaggtgagtaccccatgattcaggcccagaccctgaagaccccctcccctgagatca

SEQ ID NO: 6724 - DNA, 2300 bp, Homo sapien
aagcctcaaatgctaagctaacctcttgtatttctccattttattcttaccgttccctaaaatttttataatcatagcagttttactatgcctccaaacagatttttaaaatattttgtttagattgttccaccgtttttagagaaagatttggactcaaataacctagtctgccattgccagaagtaggggcaccacttagttttttaagatgctcttctgagcttgacttactgtgcaaagtaataccatagccgcagaatttaaaataagactgttctgcttactatggaagaaaggagggaagtgcttaccaactagaagttcggtgaccaccaccatatcctaggtctttagcccctgaaaatcatggccttttttttttaatgcacaagtatagtgcaagatctcctctgagaactggcttatggttagcaagagatgagttggtcttttggtacttaggtgggaaagagctcatgatactcaggggaagtgagggaaacctaatagtcctgcattagggaatttcaaaaagtttttgtaagagatactgataacgtgcatttttgagatatctatcattttgttgagattttaacttttttggcaacattttacattttgtacatctttcttttttatatcatgttacattacagagagagatgcaggacttacttcttcctcacttggtactggctagtactgtttcagctggggaaggagacttggaaaatagtatcttttccaatatttagtagaaagaagggaaggcatttatctctttgctctagcctgctttcaaaaaggactagagaatttctgaaaaagttctctgacttcttggaaactccctattccaacaatggctttggctaaaatttatgcttttcttggggcctgttgattattctctaaatagtgtgctaatgcatggaaaacttccaaagtggctgtcatcttgagtgacacagttatagcctgtgtgcaaacccttgataagaaaatggaaaagaaaaaaaaatcatcaagataaaaaaattgcctgaagataatgaaggtgagcaatgaatagtgaagggcacagaactgcttttttttccagggatgggaaaaagaggcagagagggaaaagttccatgttgatcccaggggacaattccttaccttccttgttcgcctgatagtcaagtgagaaatggcttgcatgacaagatactgcatggaaaaagcctgggctttagaggataaggaaggaagaccatgtactggttctaccacttaatcagtacatcatctgtgaatattattcacatcttcgaggctcgtctgtaagatggggataattcttccttcactggcttgttacgagtatgaatgtagaaaccactgtgaaagtgtaatattagcagcatcagatagaaaaaagaaaagcctggtttggttactttattgttatggttaaatgtggattttggcagcagacaaacttgagtttgaatcccactttctacttcctcatctttcagaattaaatgaagtgatgcacgtaaaatgcttagtgtagtttctgtcatacggcgaataagggtttatgtgcccagtaagggttatctgctattattattgttctggtgatgatgatgatgatgatgatcatgatcatgatgatgcaggggatctgcttatttgtttttgcccatttggtgatcagaacattgtttattatagtcagatttggctttccaagtccaaacatatgtctttaattaaatagcattttaatgtaagatctaaatagattgacaaaagcatttcgggagaatttctgaattcatgttctagaatgagaattagatacagttcattctaccttaacctcagcataaatatatgcagccagttaaaaatgacctagaaagtgttctgaggaaaacatctactggttcctcactaaggaacagatgaacatccttatcagagaagttacggggatatgtttgttttggcttggcatgtatttctcttactccattctagagagtcccatctgtgccatctgatgctcttgttttacagtatttgagctgagatcctaccttcctgtataacaagaaccttaacatcacagtcagctcttgattatctgagccagacagactggtttgaagagcaagatatagcagtgacctggtaagtgcttaccttcctagaagtactagggagctaagtggattgctatttacccttcccgccttgggactaggagaagggcgacaaaatctgaagctgagctt

SEQ ID NO: 6725 - DNA, 2300 bp, Homo sapien
ctgactttttgaaatgtgtccaggctctcataactaatacatggtggatctgggattagaaccctggagtctgcctgcacctccagagaaaattctttgaacaggtcaactcaaacctgtgacttttcagagaggagaacctgttcagcattcttcttttgttgtattcatcccctctacagttacacattatcttagaggatcagctgtacaaaatttaagatcacacaattcactttgttttcttcttgaccctcatttttttaaacttgggatttaatttttttccattaagaatgtgaaaagaatgagtattgccttctctttctagtcctgtggtggtttaggaagatcccaagaagggctgaacttccagggctcctcctgggagagggggcagaacagaaggaaagattacaccttagcctgtactcaagggcattgcttgtaagtctgtccaaccagaagaaagttcagatcctttatttgtgagctggattatacctctggaagagaaaaaagggagagacaagttttactccctcctggaggcagatttctctaccttgattttttcagaaattgtgtacattctctcctctcatgtatgtatctcctacataccatacacacgattcttctcccccttctataccccagcccacgccaacccacacccactgttctctcttccagctatggatcaagggaaatcttcccgggtccctagttggtatctgttttcatagcatctttggggaggttttgtaaacaaagcattggtagaagggcccttggctgatggggccataaagtgccctttctttggttttgtgctctccctctcttgtggggccagtcatttgaatccagaagatatcccaggatggagctgccctgagtatttctgtggctggttggaaggctggcacacaacaaagtgggcatgcagcaggctgcctccctggcttaggccaaaaaaataaagcaactcagagatggagaagaggcaggaaatctatgttgtaaaaagtctttgtttaaaggaattccgttcaggtgctgagaacggggtgttcagcagaagaggataatatgagtaaacattggcagtaagaacaaacacagcagtatcactgtctgcgtctggcctcctcctgtgctcagtcacaggtctctcccaccgccctctatgatagcaatcataaacaacatgtagaagggctttacagttcacagacctcagttcccctcagcggcacttccttgcagggtttctttatgcactggatgaccctggttccacataaatgaaaactgggcttaaaggacacatccatgtcctgggagctgtacagacttaaagaaaaacctagataggggcaaaaattggggcaggcggtgggggtggggggtggggggtggggggggggaagaagtggtcgagagagtcatctaataggtcaccaatgttgcttctgggaggttgccggagggttggctcctttcagccaggtttagggccaggtctggacacactcaggaggccggtggctgaagggcagagggcagggtggaggcccaagtgaggccaaggaaggagtggatgccgctggggctggcacttccttggcttctcagcgtcctggcaaccaagaaaagattccaggagtcgactggtggcaccaatgcgagaagccccgggcggatgaaagaagctgacccgtgcgaaccccccaccccctccacaaaaccaggagattcctgcccaagagcaagagatggaattcccctaacggaggaagctgccgacctaagggctgggactggcagcgcgccctctccgggagcttcaggtctggggcagcctgtgcaggcgcgggtggaggcccgggcgcgtccctgggggcgggagccaggggcggccagcaggtggggcctgggagctggactccgccccccgctccctccccgttggtccgctgccgctcagcaccggcccctctcccgagccggagcgcgattggtggcagcgcttgtcgctcggagggggccgggccgctctgcttcgcggctctccccgccgccgctgccgctgccgctgttctcctagcagcgcgggccggtcggaccgccaaggcagccggcgctggcgatgggaagcggcgtggccgccgacacaggcagtggcaaagtttcccagacgtacacatctggacgcgcggctgccggctacccgtgacccctctaggaagggttcagggatttttaatttggaaaaaaatccacctggtttcctt

SEQ ID NO: 6726 - DNA, 2300 bp, Homo sapien
atatgagtttacagcctataggagaggtgaggacaagggacgtaacatttacatataaagtaaataaacacatatccatgtaatctcagtaataatatattaggaagagtagccatatatttgtatttgtccatttattcattaatcaattcatgaatccacatacttattccacaaatattcattgtatacttaccatcttatcaggctctcctgcaatagtcaagccagtggcctataaagaaaagagtgtgcaatcagaaaagggggattgtaggaagaaaatgttagactttctttttatatttattttaatctaaaaacgcaaaattaaatcttacttatattgaatatataaacaccagcatctcactactcctgagtgagaagtgtgagttctgcaatgtagagaattcagagattccttcattttcttttagtatgttgtcacttattccagtttatgtgggctgggttaagtagatttatcaattacattcttatttcattatatcaacctttactaaaatgaaagtgactaaaaaggatttctggaaagacaacatgagtttgaaataatattgcaagcataagcaaaaaagatgacagagatgacatttttacttctagggtgagcactacagcactggccagcactacagaagacaccttactaagtcatgggatgacattttgaaaataaaagtttggaaatatttccatcatgtgattttgatgcaaaaatgatatatgtgagccacccaagtctgggactatggtgaagcaaatggttttcaaggtgaaaaccgttcaccttgggcacaaaatttaaggggggggtgccaaaaattcaataatcaagacaactaatcttaatacaatattttaaaaagtcaaaatttatcttaatcaatccatgataatcaaaatatcaaaaccttaaagacaagatctataactcccaaaactcatacatgaatacttaaaacttgaagatagaaattttcaacttcttaaaaatcttctaagcaatttattccaaagagctttgaacccatttgtaaaaatataaaaatgcaacatcttctggttgacatcaggaaagatggaacactactagctgaatttcaataaaaacctttgcatggttgttggatggaatggataaaaatgaaacttttttcatatcagtttttttttttaaatcgttctaaacatgcattaggaagagtggccaaagatgtacttcctcctttaggatctacatctttgtgagttacctttttttcagcttatgacagccattaaaaccaagtacaaaaataacctgacgttcaatcagatattttaataactatttcacgaagtattaaagatttttaaaactaacgaaacctagtcaatcatattgatttccttaaatatttttagtgagaataacaaagatttttataccattaatatggaaaataactaagttattttaaatgtttatgtcatctttgtcttagcctttttacattttacaaatgttttataattctgcacacagcaggacacgtataaaacttatataagtatatggatttttttttggtaacgggattacaataaaaaaaagtttggagaacacaagtgcaggcagttaatgctgtgggtgttaggaacatgacaagattatattatctcagcatgctgtaagatcactgtatccataaaagtcttcatgaaggagccccgccgagtctccataatggaagcaggatttggagaaatgacttctgcaaactttgtttagtataacacaaagcaccatgcttactactagagaagattaaaattctctaaaaaccttgttaacggagatcacaggttgaagcatactgcagctctactcttggaaggctagctcagtctcagacttggccctgatggagaaggaagttccctggaagagggcaggggagcgcctctccaatgtagttgcggggggcgggcggtgaggacaccgcttcataagggaaggggtggctgcctccccaagcagggggtggcccctgaggtccctccagctgggggcccttgagagggagggtggggagaggggaaaagaacgtcaggagagtgaacgggagcaaataaaacgctgtccattctgactggaagggccagagccgtgtctaagggcgggggccgggaggtggcccgcggtggtgtctctaccaggacgaggcctggggtatctgaagaggggatgacgtccaggcgctttgctaaagggaagccagaagggtatgagt

SEQ ID NO: 6727 - DNA, 2300 bp, Homo sapien
tggaaagacaacatgagtttgaaataatattgcaagcataagcaaaaaagatgacagagatgacatttttacttctagggtgagcactacagcactggccagcactacagaagacaccttactaagtcatgggatgacattttgaaaataaaagtttggaaatatttccatcatgtgattttgatgcaaaaatgatatatgtgagccacccaagtctgggactatggtgaagcaaatggttttcaaggtgaaaaccgttcaccttgggcacaaaatttaaggggggggtgccaaaaattcaataatcaagacaactaatcttaatacaatattttaaaaagtcaaaatttatcttaatcaatccatgataatcaaaatatcaaaaccttaaagacaagatctataactcccaaaactcatacatgaatacttaaaacttgaagatagaaattttcaacttcttaaaaatcttctaagcaatttattccaaagagctttgaacccatttgtaaaaatataaaaatgcaacatcttctggttgacatcaggaaagatggaacactactagctgaatttcaataaaaacctttgcatggttgttggatggaatggataaaaatgaaacttttttcatatcagtttttttttttaaatcgttctaaacatgcattaggaagagtggccaaagatgtacttcctcctttaggatctacatctttgtgagttacctttttttcagcttatgacagccattaaaaccaagtacaaaaataacctgacgttcaatcagatattttaataactatttcacgaagtattaaagatttttaaaactaacgaaacctagtcaatcatattgatttccttaaatatttttagtgagaataacaaagatttttataccattaatatggaaaataactaagttattttaaatgtttatgtcatctttgtcttagcctttttacattttacaaatgttttataattctgcacacagcaggacacgtataaaacttatataagtatatggatttttttttggtaacgggattacaataaaaaaaagtttggagaacacaagtgcaggcagttaatgctgtgggtgttaggaacatgacaagattatattatctcagcatgctgtaagatcactgtatccataaaagtcttcatgaaggagccccgccgagtctccataatggaagcaggatttggagaaatgacttctgcaaactttgtttagtataacacaaagcaccatgcttactactagagaagattaaaattctctaaaaaccttgttaacggagatcacaggttgaagcatactgcagctctactcttggaaggctagctcagtctcagacttggccctgatggagaaggaagttccctggaagagggcaggggagcgcctctccaatgtagttgcggggggcgggcggtgaggacaccgcttcataagggaaggggtggctgcctccccaagcagggggtggcccctgaggtccctccagctgggggcccttgagagggagggtggggagaggggaaaagaacgtcaggagagtgaacgggagcaaataaaacgctgtccattctgactggaagggccagagccgtgtctaagggcgggggccgggaggtggcccgcggtggtgtctctaccaggacgaggcctggggtatctgaagaggggatgacgtccaggcgctttgctaaagggaagccagaagggtatgagttgctagggtcagagatggggctttcggctcgagtctttccctgcagggcagagagtccgaagagcccgagaaggcagggaggacagtgggcctggtccttccccggccggcagagggagtcccgagatggaacgtccagctctcctctaacgaaaagcgtttgcatggctgtctcgccaattctgtacctcccggggctgaggaagagccgaggtgactagaagctagcgacaagtgccggccacctccgacgccaggcgccgggcttggagcccgacgggccgaattctcgcgagagcggccgccgccatttttccattgattgcagcgggctgggggaggggccgacgacgaaggcggctgtggtagcggcggcggcggcggcggagccctgggtcggtgtctgcgcgctggtgtctgaggcccaggctgaggcctccgctattgctggagcgcaggcggcggagaggatgactgccgctgccattctctcttgagctagcgagccgccgccaccctccaccctcccccggcagggcggagaggagcggc

SEQ ID NO: 6728 - DNA, 2300 bp, Homo sapien
agtcatgtttgatgctttggaacagaaatggaagcaaacagaacaggtaatttatatctctcaaatcaaggggactgtttcctaataaatcacttgttaccctaaatgacttttattctgttggaatgttttaaaacttgggcattagtctcatggttaaagtacccaatgggaaattgaaagtactgagttctcatttagccattaactgagttataaataccatcattaaaccaccctagacctcagttttctcatctttaaggaaattgggctgtataacctggaagttctcttttagctctgaaaattatacatttaaaaactgtatatatgtgttttggggatgatttttgaacagcattttcagataattaggtaaattatatgttttgtaatctgtaacacaagtatagtcatgaagcattacctttattttgaccaatgaaatatagtcatatgtatttgacatttaggatcctcattaatctaacccgattcttatgtaatggaaagaggagcaggttagaagtggaaagaacattagatgttgggatgaggagtaaggctgaatgggatggggctcaatacatgggagggtttatactgggtatagtaaatgaaggtcacagggataaaaggggaagagtatataaggtagctagaagggtctgatatctgattggaactactgtgatggcttggaccagtttttccaaatgtagattacaatctattcacgggttataaaatcagtttattgggcctacaacagcattttcaaaaaatggaatagaatagagcataagagaacatcacataagagtaagtattattttataaagctcttgttacagttatatgcactgggttgcagtgtaaattattttcttatggtgatttgctattcagtatttgaaaaacactggtttgaaccacttcaaaaggccgtcctaggtgaagaagacaatcacatatgactgacgctgatgaatgaagaaggcttcattaaataagtggttttagtgtagacagtgacggtcaatccagtttgaaggcttataaatcctatttgtttgaagaaatgtaagtttatgaaagaggcaagatgtagtacacttatcctcatgcctgttcttacttaggagattatgaaaaaatttttaagttcatttagtgatctagtttctctcatagtcttatggggctgtgttttagtaactatgtagatggtattgggggctgtttcttcttcatagatctgaagttactctttttcctggttacatccctttctgtgggtcagcacttccattaagatcagctggggcattcctactgagttcccaagttttggtacaaaactctttggtccttacttagggagttacctaccgcctttgagtcagaaaagccctagttaactaagtttggggactaggtgagagatccattcttttaggtgaggatattttgagagaggtggattttaagattttttttgaatttccatacattttaaaaagattatggtgtaatatttctctataaaattgtgttatgtatattactgaaagctaaaaagtttgatttgcatcttgagctagaggatatgatttatacatcagaatatattattgtgagaagtgatatacatatgtaagttataaaaactcaaccaattgtttagctgtataattattaacatgcttaaagtgataggttaggatttactctcatcttaatgtaaagataatttgaggcttaattggtaactgatttcatcaaaacattaatcgttcggttttctcatgatgaatattgaaatcgttaatttttgcacactgactcaaattagtgttaatctaattttattgattttaggttatttgtgttgttttgattttttctataaaattttagataaatcttaaatattacataatatataataataaatatagataaatattaatgttttcaaagattttagctgtaaatatcaatatccttttgtaaaccattctaaaaagtgtagaatgttacatgttttaaaggttatttttaaggaacacttaaaaatgtaaatattttatttttaggctgatcttataaatgagctatatcaaggcaagctgaaggactacgtgagatgtctggaatgtggttatgagggctggcgaatcgacacatatcttgatattccattggtcatccgaccttatgggtccagccaagcatttgctagtgtggtgtgtacctttcacctgactgcttgtgtatccttacacagaatacat

SEQ ID NO: 6729 - DNA, 2300 bp, Homo sapien
gattatattatgtgcagtctgatgtagggacgataacatttttggaattattgcttttaaaatattgcagtgtttgttttttcttgctaattctgactcaggctgtattacaaatatctaggggggtgtgtacagatacatatacaggtgatgtgtttgctcatagtcttttcataattaaaaaaaatataatcacaatctttgatttcagtatatttcctttgtttagacactaccgttgctattagtaaatctgtttcaagcattatgtttttattcacatttttgtaaaccctcattagatggtgaattcaattggtacaaggcttaggacttactcatcttttcacataaagtatattctaggatctgtcatatagtaatgttcaataatttactatggaattattgaaaaaataaatggaaattatagtaagtcatttcagaacagagatttaagagcagaagtaatcatttgtactgtattataaagaaactaccccaaagagtaagctgacccaggtcatagctatctggaagcagagccagtattgtaattcatgtccctcacgtggacccaaccttccaatagtgcaataactcagccttcttttactcccccaactctagttttgttataaagcaccagagggcgctgtatgacatgacatggaatattttttaaattagagttctttcctagaaacaacagcttttaccttttacggacacatgctgtttttgataaaatttttttcccctttttaatgccaaataatcattggctttattaaatggtgtcataatttcatattgtccctttgaatgctttgagttacatatgaagttgtaattattaagaaaaactttcgtaaaaatgattatatgtgagtctatagtaatgattttttgcatatactttattcttttaactaattgtttaaaagtagcctcacaaattatatcaggctgtcctcgcattgctataaagaaatacccaaaactgagtaatttataaagaaagatttaattgtctcacagttctgcaggctttgcaggaagcatgatgctagcatctgcccagcttctgatgaagcctcagggagctttcagtcatgtcagaaggcaatatgggagcaggcatttcacatggcaaaagcaggagcaagcaagttccggggttgggggaggggtgccacacacttttaaatgaccagaactcatgagaactcagtatggcaaagaaagcaccaagccatgaggcttgacccagacatctcccaccaggccccacctccagtattggggattccaattcaacatgagatttgggcgaggacagatgtccaaactatatcacataatcatcactttttgtattcaaatgaatcttgaccatatagagagggagaaatccaatagatgaaggtgtcagttttatgactctgcattctttggttaggaagcagctaaagactgctttgagaacacaggaaagataatagtaaacaaatgggtagtactcagtagcagcaacagcagcagtatttattaagttttattgtatctcaggtagtaactttatggggtagatgatattaataagctgaagagacctacatttggagaagtaaacttgcccaaggtcacacagtttgatggggatggcatgatttgaagtcagaaattattttcaagttgcagagagctttttcattctaaaatattaatccacatactggagttgttctggagccaagagccattttgaataaatacatggctctttaagatatggacctaaccatgtgtccctgttaactgtctcttaacccttttctggacgaagcttgtattccaagttgagagaaggatgtaatggagatatatctccatgagtgctacagtagaagtatataccatgagagcatagtgaagcaggatgaataaaggcagctcagtttcagtgacactgtcttatcctgtttttattactaatagaatttctagaagtggatgaatacccagaacatattaaaaacttggtgcagaaagagagagagttggaagaacaagaaaagagacaacgagaaattgagcgcaatacatgcaaggttgaattccatcattttatttttaattgaaagtgctatttttaagctcgcttacctgcaattctaatgactaactcattgggttgattctgagacaattatgctatcatgatcattgaacagtgtaaccaactatactataaaggtaaaatttgatttgatttgatgtgtaaaaacccagtaaca

SEQ ID NO: 6730 - DNA, 2300 bp, Homo sapien
tctctgctgcttttaagaagaactcagcagtgtcttgctttcccatatttttaagtcaagcagaattatttttgaaagagtactttttattaaattgctttcattataggccatccatttacctgctgaaacaatgagaatagtgctggaacgctgctacaatgatttgcgtcttctcagtgtctccagtaaaaccctgaaagctgaaggattttttagaagtaacaaggtatgtcatttactttttcattactattttctatgctggtagtagtaaatgaaattaggttcaatattataagcctggcctccacagctgttcaacatctgtctggaacttaatttaaaattctcaacccagtaattaccttcctttgtagtcaggtcaggtcaggctcccttctgtcctgtgaatcagtcctactggttctcctcttctttgcctttgttcatgtgcactcccacctggagtgttcttcctcctctccctgcattttttttttttcagtctccagattagtcctacctctttggtgaagacttcataaccatttcttcccacagtgattatgtcccctggattgtgtttattcttgagcttgtcccataaagcagtgcttcatggtgagggtcagaggcatacctggtatagagaaaattataatcttgagttcacccaacattattccttttgcctacttatttttctctgttggaaatgagaaagttcatgttaatcctcttcttttgtcttgctattattatgtgtttgatcatttatcatttttcatatgtgtttttatcactctagtctcattcatcttagtacagtctagtcttttatctcatttaacttttttagtattttattactaatatgtaatttttattcacctacacttctaaaacttttgtgtggtgggggaggggatgtacgtgtatatgtgtgtgtatatgtaaaacattaaaatttctaatcccctccagtacattactttagggtaagaagtgcagtagggaaacttttctttttccttaaacggttagcgtactggtttcaatttgtaacatttactgaataggataatgatagtgttatccttttatgcaaaacccaacatgctatttataattgccaaatttatgccaagtacgaatttcattttaaaaaaagatttattatggaaaatttcaaacgtaaacaaaagtagagaaaatagggaaaatagagtgaacccccacacatccccatctctcagcttccacagtgatcatctcgtttcatctataatttaaccacctacttcgcccagattatttgataaacttcctcaggatcatatcatttcatctatagataatatgaacatatatatctaaatgaagagaactcttttaaaaaaatgacaattacattatatacctaagaaataccttaatatcagtcaatatctagtcagtgttcaaatttctctgattgtcttagaaaatttttttctgtaaattttcctgtgtcttttttgtttgcttccttgcagtttgttacaaagccaagtcatttgcccattaaatttttccatgatctggattttggtgttatattcacaaggtgtctttacacatgttcctgtgtctgtagttcaggctaaacttggatttcctaaaggtgaaagatttctacaatctaaagaaaaaccagagtattaatttcctaaagagaaggatatataatacacaactttctgaaattggacaacccaataaacaagatgtttgtgtgtatgtgtatgtccataccgtctatcttagtgtagttttatggctagttacaaagacatttgagcctaatgttcattttattcagtctccaaaacaatagagtccttcagaaactatatcatcacacatgttataacataactgtgtattgtgttgtattgatgcaatataatgatgatgatgaatgagcatgtcactaaaattaatatataataaaactctgacttactatgtaggtgtttgttgaaagctccgagactttggattaccagatggcctttgcagactctcatttatggaaactcctggatcggcatgcaaatacaatcagattatttgttttgctacctgaacaatccccagtatcttattccaaaaggacagcataccagaaagctggaggcgattctggtaatgtggatgatgactgtgaaagagtcaaaggacctgtaggaagcctaaagtctgtggaagctattctagaagaaagcactgaaaaactcaaaagcttgtcactgcag

SEQ ID NO: 6731 - DNA, 2300 bp, Homo sapien
ttatgtcccctggattgtgtttattcttgagcttgtcccataaagcagtgcttcatggtgagggtcagaggcatacctggtatagagaaaattataatcttgagttcacccaacattattccttttgcctacttatttttctctgttggaaatgagaaagttcatgttaatcctcttcttttgtcttgctattattatgtgtttgatcatttatcatttttcatatgtgtttttatcactctagtctcattcatcttagtacagtctagtcttttatctcatttaacttttttagtattttattactaatatgtaatttttattcacctacacttctaaaacttttgtgtggtgggggaggggatgtacgtgtatatgtgtgtgtatatgtaaaacattaaaatttctaatcccctccagtacattactttagggtaagaagtgcagtagggaaacttttctttttccttaaacggttagcgtactggtttcaatttgtaacatttactgaataggataatgatagtgttatccttttatgcaaaacccaacatgctatttataattgccaaatttatgccaagtacgaatttcattttaaaaaaagatttattatggaaaatttcaaacgtaaacaaaagtagagaaaatagggaaaatagagtgaacccccacacatccccatctctcagcttccacagtgatcatctcgtttcatctataatttaaccacctacttcgcccagattatttgataaacttcctcaggatcatatcatttcatctatagataatatgaacatatatatctaaatgaagagaactcttttaaaaaaatgacaattacattatatacctaagaaataccttaatatcagtcaatatctagtcagtgttcaaatttctctgattgtcttagaaaatttttttctgtaaattttcctgtgtcttttttgtttgcttccttgcagtttgttacaaagccaagtcatttgcccattaaatttttccatgatctggattttggtgttatattcacaaggtgtctttacacatgttcctgtgtctgtagttcaggctaaacttggatttcctaaaggtgaaagatttctacaatctaaagaaaaaccagagtattaatttcctaaagagaaggatatataatacacaactttctgaaattggacaacccaataaacaagatgtttgtgtgtatgtgtatgtccataccgtctatcttagtgtagttttatggctagttacaaagacatttgagcctaatgttcattttattcagtctccaaaacaatagagtccttcagaaactatatcatcacacatgttataacataactgtgtattgtgttgtattgatgcaatataatgatgatgatgaatgagcatgtcactaaaattaatatataataaaactctgacttactatgtaggtgtttgttgaaagctccgagactttggattaccagatggcctttgcagactctcatttatggaaactcctggatcggcatgcaaatacaatcagattatttgttttgctacctgaacaatccccagtatcttattccaaaaggacagcataccagaaagctggaggcgattctggtaatgtggatgatgactgtgaaagagtcaaaggacctgtaggaagcctaaagtctgtggaagctattctagaagaaagcactgaaaaactcaaaagcttgtcactgcagcaacagcaggatggagataatggggacagcagcaaaagtactgagacaagtgactttgaaaacatcgaatcacctctcaatgagagggactcttcagcatcagtggataatagagaacttgaacagcatattcagacttctgatccagaaaattttcagtctgaagaacgatcagactcagatgtgaataatgacaggagtacaagttcagtggacagtgatattcttagctccagtcatagcagtgatactttgtgcaatgcagacaatgctcagatccctttggctaatggacttgactctcacagtatcacaagtagtagaagaacgaaagcaaatgaagggaaaaaagaaacatgggatacagcagaagaagactctggaactgatagtgaatatgatgagagtggcaagagtaggggagaaatgcagtacatgtatttcaaagctgaaccttatgctgcagatgaaggttctggggaaggacataaatgtatgtacttcaaaagaaaaacggtccttgaaacagcatcagtttttctctcagtttatttaaattttcagtta

SEQ ID NO: 6732 - DNA, 2300 bp, Homo sapien
attcagaggtaaaagatatgcctgttctcagagagcctataatctagagtattttggaaagtttaaaaatgggatgagaatgggttgtttattctgctgagacagcatgtctaaaaaaatgtttttaacttatagattacaattagactggggagagcacttaaaaaaggagaatacagagttaaagtataccagcttttggtcaatgaacaagaggtaagtaatacgtttaagaataatataaggttactttttacagttactgaaaacatagaatatattttattcatagtcattttatttctctgaagcaaaggtcagcaaattttttctgggccttgcagtttagcaggccatactgcctctgttgcagttactcacttctgctattatagcacaaggagccatagacaataataagccaatgagatggctatgtctcaacattttatttacaaaagcaggcagcagtgaacttggccctcaggccactgtttgtcatccctgtgctctaaagtgttgctacaaatgctgaaatgagacaaaattttcctgcttttaaaaggaaaagaaatttttttgtgcgtgtgcttgctttctggaaacaatcatacagtgctacaggtgaatagcagttgcaagtcattttagtatgtaacaagcatttatatagtgtctactgtgtgctttaggtgcttgcaaatattaactcatttaatcatcagttaactaagatacaagcactatttcttattctcattctatagatgaagaaactgaggcacagagaagttaagtatcttggtcaaggtcactgcttgtaaacggtgtgggtgaatgatctaaacaggccgtgttttttaaggggtcaataaaatattttagtcctgtggtatactagccttaccacaaatacccaaaagaataaggcaaagatcatattttcagaatgttataacatcctattgttataacattctgttataacatgttatagcatcctgttgaagaactagacaaatgtgaaaaccataaatttatcataaaatgcctttattcatataagatattttatctggcatctgttatttctcttaatgtgacccattacagtcattttgatttacatatttaatctgagtttgtggaaactgtctcttttgagacaattggttaaagtatttggagaattagtatacatttccctcattttagtccataaaagtggttctttttgctttcaaaattataactgttaaaagaaggaaaatacaagtgtgttatcctatttaacctttacaatgactcagtgaggaagatactgttcccagtttacagaactgagacacagagattttaagtaaacttgcccaagatagctgagctcataaatagtggagctaaggtttcaaaaaaggaagatagactctgaaactcaggcccttaattgcaaataaaatgttttggtaatttttattttaatgtgttaatattaatgtacttaaggtataattcaagctctgattgtttatgtttatatttctagccatgcaagtttctgctagatgctgtgtttgctaaaggaatgactgtacggcaatcaaaagaggaattaattcctcagctcagggagcaatgtggtttagagctcagtattgacaggtaaagtaaaattaatgtcatcagcgatttgaagaaagactatgtggtcagttgaaatggactggtatgattttctaaaactaggagaattaaaatttcctgtgctattcagaattttagtatgacagattagtttaataggactaaacaagagtattaaaattttgtttggatttcctatacagaattctaaatttgaattactggaaacatttctttatttccccagattttaacaactcattatttgacttttgtatttgaacatagttcatttttctttggtgtcagattagtgtcaatctttaaattgagagtttcaaattatagtcgttttaaatgtcttatcacatttgtaggtttcgtctaaggaaaaaaacatggaagaatcctggcactgtctttttggattatcatatttatgaagaagatattaatatttccagcaactgggaggttttccttgaagttcttgatggtattttcaatatttttggggggaagtatcagttagaaatactctagaactaatagaagcctatagtttttaatcaaataatgagttacgaggaatctaatatacattatagtgttttgtgttatattaagcataacgatatccttattatggattgatg

SEQ ID NO: 6733 - DNA, 2300 bp, Homo sapien
ggccaaagaaacaaaagctgtggtttcaggaccatgccgtgtgtagctgatctgtacgggacgtgtatgtaaggaagagcaatcatgatagataagaacagtgtgtgaagcagccttcacactagagtgtttggtcatctcttataatgtaagggaaggtactttaaaattctgggaagatgcgatgaactcatgtcccagtcagaaaataatccaatgaaataagcattggttgccaggccacagttaggaattgtattgtgatacatctagaggccaagagagcaggagagagctaccaacttacactgtggtttaagctaaatgaccgcacagcatcatagcattgcagtgttgttactaaatctggaagtgacctgtgaatgtatggaatacaataaagtcttttattctggttcatttgctagtacttcctttttgattggatactgtagttcttcctctggattttattttgttcagcgtcaaggccctaattttgcaaatgtagtctaaaccacattacgtggactagaggatactctgaattagcaagttttttgtttgctgaataaaactattccatcttaacaattctgtgtaatttttgaaaaacatcaacattttggtcactagtagtcaaaatcttataaggccatatgtcctgaaaggcaaaactctgtgtatgtgcgatttaccagggagatagtaggacagtttttatgagggtttcaaaggagttcatggcccaaatgaagcttgtggccacctaggtttagtgtacatgaaattggaagatgcttcttgattgtagttcccatggggaagagggaggctgtgatcatttggttagatacagcattaattgtcacaacttgactttcagaaacaagaatactgcacaaactcaagcatgcattggagcatgtgttactatttagaaaagagtgcagccatcagtaggtcaagctaggagggcaaaagagagttgagaggaatgctctgccccttccccatcacagcactgcccctttccacctcctcaccagctcacctgtacaagagaattgatctcaactgagtgtcagctcaccaggtcagaaattgttattggaccctaaaaccttgcctcacaggtgggcaccaagctccccttccctctgctttccatgtttcccacctgccctctccccacctgttttcagcctcttttataatgcttaagtaacctgcttgaagagtataatttatggagataaaaatactcaatgcttacatttttttcataactgtgccaattgttttgtcaaatgcagttacccactgggcagtgggcttatcaagtgctcagtgcaatcctgtgacttttaagtcattttgcattattaagacaatcttatcttaaagttcagtggtttcattcaaagctcccctgaacctccatagtgcctccaagatgtgctgtccctgccaactcctgcaccagcttgactggtggtggaagaggccaggaagagcggggggaagacatgtgctaaccacttcttagcaatgaggctggtaaggttactgtccccttgtgcctggtcactagtaacttttttgtagacatgaaggtagatgccctgcaggtcctatcagcaaaggacccaactcctaacagcattggtgctccctcatgaaatttgacagtgtcttgccagcctcctgctggcagacacttctctgcagtgaataccactatcccatgctgcactagtccctaccaagtcttcaaccctcaatttgatcttccatgagtgtctcaaaaagttcccctcagaagtttcagccaagggaataaaatctaacctctcctccctcaacggagtgtcagggaggggaagaatctgttttccaaacaccacaatctcccaaaaggggatttcaccctcccttggtcatctttatacagggcaattgtgctgctgctgctgaggtggccactttcagcaagccctgtgtgcaggggcctagctgcatttagaaaccaagcatagctatcaaaaagtaatctccaaatagttgaattgcatttcttgagtatctggagaggatgtgcagaccacaggaatacctaatgccttttttctcttcctgtctttgtccctcacactacagcaggcccctcccttccctcttcaacctcatcctccctccccacaggcccagagaaccagttgggctttgttctcctgcaggctatggttcatcatgcaaatagctcctgtgtcagaaatgctttttggcttcaaataaca

SEQ ID NO: 6734 - DNA, 2300 bp, Homo sapien
cctcactccttctctccctgtttctccagccaggcagagctggcagccatgaggagacagcacctgggctgggagggctggagtccagccaccctcctctaattcatttccaagctggcagctgcctttccctcttgcagggaccctagacccaggaccctgagggcgctctctgtgggcagggctgtggctttctggcagggtccctagcgatgccccctctgctgcctcccagtcttcacagtcagcagagcccttggggcctgtcttccagcctttcctgtgcagtcgggcgggcctggacctcattagcactttttattaaatccatatgttctgtgtggaagaccagccctgagtccctgtgctcccgccctgggtgtgggtgggggagaactgtgcacagatggcgattgtgtgaatttggtgtgggatcctccaggctctgggctgccaagcctcctaggcatggagatgctgaagggcagtgcagccaggcagggatcaggagcgactagagtctggaggcctttcctgaccctgctgagcctgtggggtcaagaatggggaatggaagcgggcctggcccttcctgggcactgtgggcctgctgctctgctctccattgacacatctgctccctgtgcccttccccaggagtgcatcatcgacgaggactgtgggcccagcatgtactgccagtttgccagcttccagtacacctgccagccatgccggggccagaggatggtgagtatgccagggcctctggggctgtggcaccagggtctcaggcacctgggggagaaagccaggggccccagcgttctcagctgggcttcccagaagagcctcaccatgatggggaggacccaagagggctccccagagggctgactcctggaggacaaggaactcattccagtttgggatgacaggaagccatctgcagacccagggccactcccatccaccccatgtcctctggtcatgttgtttgtgtcattgatggtagagaaggggagggacggccaggcaccgtggctacacctgtaatcccagcactttggggagaccaaggcagaaggatctattgaggccgggagttcgagaaggggagggaagggagaggaggtgtccctacacctgttgcttcccctggggatgacccatcctaatagacaaacagagacattccggcagcccccaggcagggagagcggcagctgctctccttctggacctgcaccccacccaccagatctttctccaatctgccaataagagagggcagagggacagggcaagaagaggccagggcactgccccagtgcaggttagattgggaaatgtggagccagggcaaaggagactcttcacccaacaggcattttggacgaagccacatggactcacagacttttcatagtcatttttccttattcagacaataacacagcatgctaataagcttggaaagtcaagcagttcttattaccttacccgactgtctgtggtgaggccactgctgttgcacctcgcagccaaccccactcggtaccgtcactgggcacagccgtggggacctcactttgctctctaactgccatgccctgtgtggctgcaggaccctggcacccacaggccatcctcatcttgggctggcttgggccttagtttaatcggctcatcattgggccttgcctctttgggcctggacctagggacctaaggaaaaagggaacagcacaagtctgtggggaccacaaagaccccctgctgttctttgcaaaatcttaagctgtggagaaagactcagatccatgagtcctcccggtgccatttttccagcgttctgacccccatgtctcgccagccaagctcccacctctgtcccactgactttcactgaaatctcagcctggtctgcctgtctctacaatgggaggatgcaggttggcctatctgtggtatcttcaggctgggctctcagcaggcccccagtccctaagccgctggctctaggctctttccacctgtctgcagctctgcacccgggacagtgagtgctgtggagaccagctgtgtgtctggggtcactgcaccaaaatggccaccaggggcagcaatgggaccatctgtgacaaccagagggactgccagccggggctgtgctgtgccttccagagaggtgagtggcctcccctcagatgcaggaaaaaccctgtcccaagctccaccacactggacctcctggagccacgtccatgccaaccacatggtttcgcgtcccacctctt

SEQ ID NO: 6735 - DNA, 2300 bp, Homo sapien
tatagagagatttttaggttgactctgaaagtcaagacctccagaccgcatggtagaaggtgtaaggcagaagacaatctcagctggggaaattcctggtctttaagccagcaacatgaaggactggaagagcatgatgtgctctgtaaacccgcagcactgcatttcctagctcggccccacaatatgcccccacagcaccctccagttcggcattagtttcttcctaatgtccactctgcccgaagtgacaagcgggggcatgtggagactcagctccaggttcctggacgggctcagccacccccagaaagctaatgaatgctcaaccagggcttccagatgcccaggggacagagcaggagatgccggggaatggggctttccttgcagttcaggagggccctgccccaggcccagaagtagaagggaaagcggctgttttggcggtaaacagtaatgtggggagtgctgcagagaaaggcagtcttggggtttcaagctggagagcagtcagctacactcaggacctctggccatccctgccttcacctgctgtttggcctgatcgtctaacttctctgattctccactacccactccttattacgtttttgagacttgtcaaagttttatattagggctaactgggacgcatacaaatctggtaacttcgccagggcgggaagttaggaaggagcagagctggctgcaggtgtctggtcctgaccactcctctatgccacccttgaggagcttgctgactttctcatgacgttctcccattccaggagctgcaagtgcgttatcctggctggagcacggtgtcaatcacggcagactaaggccagcggtgatggcttgaatgccaggctgggggctgggatttttcctgaggatttcacaggacagaggttggcttggaaagaccaaggtgggactgaggaacattccccctacccccaacctcggtgggctgttgcaagcctggaggccagagaagacgggcctgggatgccgcgggcgcaggggcaggcagtgaaggagatggctgccttcggtagagctggtcgctgaggcagaagaggagggcgtggggcgtggggcgtgaggtggccggcgccccggctggccaatggccgggctgcggcccctccgcggggcggggtgggcctggtgggcgggcggggctcggggcgggggcggagagggagcctggtgggcgggcggggcgcgtcttgcgggctccctcgggtaccggcgctgccgcaccccgccgcgctcccgcacccgcggcccgcccaccgcgccgctcccgcatctgcacccgcagcccggcggcctcccggcgggagcgagcagatccagtccggcccgcagcgcaactcggtccagtcggggtgggtgaggggcggcggcgggggaggggacgactctgctgagctcagcctctcttggtggatgtggggcggggcgctcgagtaggacccgacgccaaggggagggggctgacctgtgcttggtccaccccaggtaggggctgagagaggcttgaggtggaagtgggggtcgggcactctgacctggtcgaggaggggctagggtttgaaccggggacagagtctaggtgagctggggcttgggagctattagcgtagaggatccgggttcggttgctctggcgagggctccagcatcacaggtgaggagcagagctcagcttgtgctcgaggatgggggtgcggggtcctggggcgatcggggctcgggctggagcgggtggggtcgcgtcttttcgggtgtaggggagctgcgttttcaggggcctcggtttcctcccgtctccgggcgggtgcgggaaagaggggcgccaggggcgggcggcggggcggaacggggcggggcggcgggcccagcgaggggggtggtccgcgcgcctctgatcgcgttccgggacacacaggcggcggctgcgggcgcagagcggagatgcagcggcttggggccaccctgctgtgcctgctgctggcggcggcggtccccacggcccccgcgcccgctccgacggcgacctcggctccagtcaagcccggcccggctctcagctacccgcaggaggaggccaccctcaatgagatgttccgcgaggttgaggaactgatggaggacacgcagcacaaattgcgcagcgcggtggaagaggtgggtgcgccctggcggcgcggggctctgagaagcgccagactgggggcagcgaagtctgggaaggcatggaagagcgctggccagggacctcgggt

SEQ ID NO: 6736 - DNA, 2300 bp, Homo sapien
atacagagcttagccagtgacacaatgggaattgtggaaatgtagaatgttctctactctacctatgattgtcctggatggctctgcactctctgcctgctctgtgcccctcacctcacaatggccatccagactggccctttctccaacaagtccccgaccccactgggctccccagtctgagttctttggagctgacactccttgtccagatctggtttgggctcatctctacagctggccccagggcttttccttcgagcccatgaatgtctcaggctggtgcgcggactggcatggagctgggcaggaagaccacttatatttgagacctgtagattttcttaccgtttcttctctctccctttctttctttctttctttctttctttctttctttctttctttctttctttctttctttctttcttttctttctttctctctttctctttctctctttctttccttcttttctttcctttctttttttcgtttgtagtttaacctaataattgaactactgataaattattacatttgggaatacaaaatgtagactccacacaagaaaacaagcgtccctttgcctgacacttggggcagttcgatatagagagatttttaggttgactctgaaagtcaagacctccagaccgcatggtagaaggtgtaaggcagaagacaatctcagctggggaaattcctggtctttaagccagcaacatgaaggactggaagagcatgatgtgctctgtaaacccgcagcactgcatttcctagctcggccccacaatatgcccccacagcaccctccagttcggcattagtttcttcctaatgtccactctgcccgaagtgacaagcgggggcatgtggagactcagctccaggttcctggacgggctcagccacccccagaaagctaatgaatgctcaaccagggcttccagatgcccaggggacagagcaggagatgccggggaatggggctttccttgcagttcaggagggccctgccccaggcccagaagtagaagggaaagcggctgttttggcggtaaacagtaatgtggggagtgctgcagagaaaggcagtcttggggtttcaagctggagagcagtcagctacactcaggacctctggccatccctgccttcacctgctgtttggcctgatcgtctaacttctctgattctccactacccactccttattacgtttttgagacttgtcaaagttttatattagggctaactgggacgcatacaaatctggtaacttcgccagggcgggaagttaggaaggagcagagctggctgcaggtgtctggtcctgaccactcctctatgccacccttgaggagcttgctgactttctcatgacgttctcccattccaggagctgcaagtgcgttatcctggctggagcacggtgtcaatcacggcagactaaggccagcggtgatggcttgaatgccaggctgggggctgggatttttcctgaggatttcacaggacagaggttggcttggaaagaccaaggtgggactgaggaacattccccctacccccaacctcggtgggctgttgcaagcctggaggccagagaagacgggcctgggatgccgcgggcgcaggggcaggcagtgaaggagatggctgccttcggtagagctggtcgctgaggcagaagaggagggcgtggggcgtggggcgtgaggtggccggcgccccggctggccaatggccgggctgcggcccctccgcggggcggggtgggcctggtgggcgggcggggctcggggcgggggcggagagggagcctggtgggcgggcggggcgcgtcttgcgggctccctcgggtaccggcgctgccgcaccccgccgcgctcccgcacccgcggcccgcccaccgcgccgctcccgcatctgcacccgcagcccggcggcctcccggcgggagcgagcagatccagtccggcccgcagcgcaactcggtccagtcggggtgggtgaggggcggcggcgggggaggggacgactctgctgagctcagcctctcttggtggatgtggggcggggcgctcgagtaggacccgacgccaaggggagggggctgacctgtgcttggtccaccccaggtaggggctgagagaggcttgaggtggaagtgggggtcgggcactctgacctggtcgaggaggggctagggtttgaaccggggacagagtctaggtgagctggggcttgggagctattagcgtagaggatccgggttcggttgctctggcgagggc

SEQ ID NO: 6737 - DNA, 2300 bp, Homo sapien
ttatagatactgcctcagtaaacatctttatacatgtcttcttttgcacatggtcatgagtttctggagggtggacagctaattgtgaaattgctgtgtggccactttctaggcaattttcagccagttatatccgctttgctgccatttcctcaaccatgaaatgggtccccagtttatgacttgggagctccctcatagagaaaatgtgagaacctaaaattttaaataataattccagaatgtgtttccaatgacttaaaagaaaaaatcaactgttcccagtggatacagagcttagccagtgacacaatgggaattgtggaaatgtagaatgttctctactctacctatgattgtcctggatggctctgcactctctgcctgctctgtgcccctcacctcacaatggccatccagactggccctttctccaacaagtccccgaccccactgggctccccagtctgagttctttggagctgacactccttgtccagatctggtttgggctcatctctacagctggccccagggcttttccttcgagcccatgaatgtctcaggctggtgcgcggactggcatggagctgggcaggaagaccacttatatttgagacctgtagattttcttaccgtttcttctctctccctttctttctttctttctttctttctttctttctttctttctttctttctttctttctttctttcttttctttctttctctctttctctttctctctttctttccttcttttctttcctttctttttttcgtttgtagtttaacctaataattgaactactgataaattattacatttgggaatacaaaatgtagactccacacaagaaaacaagcgtccctttgcctgacacttggggcagttcgatatagagagatttttaggttgactctgaaagtcaagacctccagaccgcatggtagaaggtgtaaggcagaagacaatctcagctggggaaattcctggtctttaagccagcaacatgaaggactggaagagcatgatgtgctctgtaaacccgcagcactgcatttcctagctcggccccacaatatgcccccacagcaccctccagttcggcattagtttcttcctaatgtccactctgcccgaagtgacaagcgggggcatgtggagactcagctccaggttcctggacgggctcagccacccccagaaagctaatgaatgctcaaccagggcttccagatgcccaggggacagagcaggagatgccggggaatggggctttccttgcagttcaggagggccctgccccaggcccagaagtagaagggaaagcggctgttttggcggtaaacagtaatgtggggagtgctgcagagaaaggcagtcttggggtttcaagctggagagcagtcagctacactcaggacctctggccatccctgccttcacctgctgtttggcctgatcgtctaacttctctgattctccactacccactccttattacgtttttgagacttgtcaaagttttatattagggctaactgggacgcatacaaatctggtaacttcgccagggcgggaagttaggaaggagcagagctggctgcaggtgtctggtcctgaccactcctctatgccacccttgaggagcttgctgactttctcatgacgttctcccattccaggagctgcaagtgcgttatcctggctggagcacggtgtcaatcacggcagactaaggccagcggtgatggcttgaatgccaggctgggggctgggatttttcctgaggatttcacaggacagaggttggcttggaaagaccaaggtgggactgaggaacattccccctacccccaacctcggtgggctgttgcaagcctggaggccagagaagacgggcctgggatgccgcgggcgcaggggcaggcagtgaaggagatggctgccttcggtagagctggtcgctgaggcagaagaggagggcgtggggcgtggggcgtgaggtggccggcgccccggctggccaatggccgggctgcggcccctccgcggggcggggtgggcctggtgggcgggcggggctcggggcgggggcggagagggagcctggtgggcgggcggggcgcgtcttgcgggctccctcgggtaccggcgctgccgcaccccgccgcgctcccgcacccgcggcccgcccaccgcgccgctcccgcatctgcacccgcagcccggcggcctcccggcgggagcgagcagatccagtccggcccgcagcgcaactcggtccagtcgggg

SEQ ID NO: 6738 - DNA, 2300 bp, Homo sapien
cctaaaaactctattgcaccactgaccaagattctctccttgatcaaactttagtcggtctttagaattctatttttaactaggctctaacttttgggtttctgtgtttgtttctgcgttatccaattttagtaaggatcctgctaagtcattgtaacgtgaacccttcgccctcgatatctgatcaggttcctcatccactatcccatagatgacgtccaaacaccttggcctctctttagcaagaaataggttgggcctgtttagccagaattccttcataccccaatgtttccacttgatatttttccatccagtgacacctatgtggagtgctaattggggaaaaggagtcaggctggtgggaccaggggaaagccagaagaaaaagcagataagctacaagtctgcctttcttcctgttccaggacaccaataactcacaatctttctgcacccagctatcaccaaacccttggctggtacaaaaaattccaagttaattcactgcaaccttggcattatcagtactgcacataccaccctgtagcccagtaactattctgtaaaatccccagcaagcttttgtttctttgcagtcagctcctctcttgctggctgcctgttgctccctggcaatgtatttttctactttctgtaataaatctgcctttctttatctacaactgtgttggtaaattttttacccctgtaccactggcccacatagccgctgctcacgactgacatcctaccctgctccttaactttaaattctcacttttccttgttgtattcagagttgagcccaatctctctgcccactgccaaaccccaccacagaagcccctatacctatggaaatagttcccctgaattagatctgccttgctgttctttaataagtgtcatgaataactttttctttaacaccccctgctcccaagccttcgcttaatcaaagtaatgctgtaacacataggcaattaaccttcccactgtctcattcaaatcacgaataaagattctttcaaaagcctttctaacgttattgctctatcctatgcactatatctactcatggaagcctgaggcctgatgcggagatgggagctgacatgcttcactgtttccaatgccactcttgagcattgggaatgtaactgagagtggcaatgcctacctttacatggccatgggctggggatgctggttgtgctgccatgtgtagataatggaaagtgttcccttaagtctgcctttctttggttctcaagatatttaaatatttgcccagctaccctaaatttggtgccattctatttgatctttcacattcagctgtgagtcatccataacctctttgaccctgctggaattctgaattagttccctatttatgccgctggagttcccagctctaatgaatggcagtggttggagcctccttgcgactcatggcttgctcagctcccctgtgtcacactaaggccttttcaaacaaaaccacccctttacccatggaagggcaaaaggcagacccagtaaagtgtaattagagtggatttcaaatatttcatggaacacaagtcatgtcttaatgcatatattcaatgactatttggaaaaacagcaagtaagaaaataatgtgatgccaacttttcatgagtttctgttgtcaccatatataaactcaccaataccatatttttaattatcttccaggccaaaattatacatcagaagcaaagattaaacatgcttattctaagaggaaagagagtagttcttatttttgtagaaggagaaatgaaaggccatttaattttgccaactgatatggtttgggtctgtgttcccacccaaatctcacattgaattgtaatccccagtgttggaggtggggcttggtgggaggtgactggcttatgggggtggtttctaatggtttagtaccatccctctagtgctgtctcatgacagagtcctcaccagatctggatgttgaaaagtgtgaggtacctcctccctctgtctcttcctcctgccctggctatgaaagatgtgcctgcttccccttcaccttccaccatcatggtaagtttcctgaggcctccctagaagccagtatgcttcctatacagcctgcagaaccgtgagtcaattaaaccccttttctttataaattacccagtctcagtctcaggtatttatctatagcagtgcaagaatacactaatacaccaaccttcactgtacattaacagatgcaacagaaatagtgacttttttcagagga

SEQ ID NO: 6739 - DNA, 2300 bp, Homo sapien
tctcctgcctcagccccctgagtagctgggattataggcatgtgccatgatgcccagatgattttttgtgttttttagtagaaacggggtttcaccatattggccaggctggtcttgaactcctgacctcaggtgatctgcccacctcagcctcccaagtgctgggattacaggcctgagccaccatgtctggacagcattgtgtacttctgattattcatctgttgcattataagttacatgagtgcaggaaccacatttggttcggagtagggtttgttaaatgaatgaatgactctgtctccatctctatccaccacatgggtgtctcaggtccaggccaatagcaagaggctttatgtccagtgtagttaaggtggggacagatgtaacactgcttcctgaagctcctcactgccttgggtttcctgtatcactcttctaaataaggtagggccaggccagtggagtctcctctcccttacagtgccctggcctgagcttgacagactgtttggatggactgggagtgggtcaggcctagagcagctctttcagggttagacttgacctgtcaagtaccctagaggcatgggcagtgctgtagaggccccagcacatagtgtttaggcatgtagattctggaaccagatctggctcaaatccggactctgatacttactaaccatgtgatgttgaccagttgctttacctcactggtctcagtttccacatctgtgaaatgggatgatgatacaatacatacctgtcaagccaggcttagatgagatcacgtgtgaagggcactccccaggctggcatcacaggcagatttccatcagagtggagtgctggccctctgagagtacaagctgactgggccttgcaaactgggtaggaacagcttttgctggaaagttcatctacaggaagttgattgaattctgaagagagagctaagagagctgccaggtaggacaatacctggtaaacaccaaagggctgagagtaggatcacatggcaagaagtagagtagagaaaaaataataataatctgcaggtttggggaggcaaactgttctgtttgcacttgtctggcaagggaacatggtgtctcctggaggtggtcttgtgctggggaaattccagcagcctggagccacaatactgtttctcactgctcaagcctgcctgttttcctctgcctaggtagctcagttccaagaacacttattgatgcttacaccgggccaagccctgtgatgggccctgggttccagaggtgagtcagacatggttcctgcccatggagatccccatttcatgataactgctacaagagccgtttaaacacaaggtgttttacagtagttatagtctacagagtgcttctgattgctcactaggccccactccattcacactgtgttgtctgtgaatgttgctctctggagctgtggggggtaagggtaacccgggaaggtgggcagagcagagattaagatagggatatgacagccaaaggtagagggtgtttaggtgatctgaccaaggtaacacaggtagtctgcaccaccgcccccttcccactagctttagccaagcaaggccaggtgaggggaagatcctattagctagcaaggaggtttgcggaagctcagggtggtcaaggagccgagcaaagagggaggtccacaggacgtacacagtcggtactagaagtgccatgctgctcccccatgtccaaaaggggatgccgtgtcttgctttccagccgcctagaccaagaagcgtgaggcccaggccctcgccgctcccttgatacccgcttaccaacaccgggggtttcatctcgcagcgccaccacgccccactcccagcagccctcccctggtctccgccctgtgcgggtcagggtgggagcgcccggccactccctgcgttctgggccgggctacagcccacgtgcgccggcggcagcggcggtgacagccggccccacgggggcggggcgggctccgtgctgtcctgtcattggccgcgccgctgtcgggggcgttccccagcccggtccaccgcgcggcgcagaaccgcaggcgctcggctggctaagcctgcgccgggccgcctcgctcgctcccagctctgtcagtggcccgcggggcccgatcgctgcgcccgcggccagggccgaggcaggcctgacccggggccgggcagcccgcgcgactttcggtaaggcgggggcggcgctggcctcagggtggggagggcgggcgggcgcgggtggggaccgtgc

SEQ ID NO: 6740 - DNA, 2300 bp, Homo sapien
atggcccaggttctttcaggagtcttttcctcagccctgcaaggttggtggaagtctctccattttacagatgaagaagttgaggctcacagaagggaaatggcgtatgtgaggttaacctcgtgtaatgtgagatgattgccctcctgaaatgttctaattaatttgctgaaaaataattagaattcaaaaggcaggaaaaggtaatgaaaagcacctaaattcttgaaaattacaagaatattgagagatatttaaagggttgcaaaagcagtcccatgggactttgaaattactagttcttaaaaaaactagaggctggaacatgatcatctttgaccagatcatcagattgtccaactttgcatttagatgaattgttcccagcctaattataagctcttctcttgaccagcctccccaggagtgtggtgtcttgccatcaatgcatgcttctgtttggtaggaaccactggactggctctaaccctgaggtccacaccagggtgacttatctaggatttctccatgagttgagcatttatttctcaggatcgtgagaacctgagcagtgctactcaaagtgtgggccacaggcagggactgggctgtaatcccatgattatagcaagtgagagagagtaagtgttggaaacttgtagaaccatttgatattgccacacattcaagtgtgtgatcatatttctagtttattttcattgtatctggaaataacaggccataatggattaaatgtttaaaaagaaaaaacctgtcattagccacagatagtttgaggagcagtgagctaagccacagtgagtttgaggagcagtgagctagcagaagccagctagttagttatatcctcactctgagagccggtaaggccgtcctgctgtcaagaaatagaagataacccttgatgcccagggcaacattcaccttcacattggcctttggggttggcttcaaaggctctcccctcatcccaggagacaagttctccatcaccttatttccctgtggcctctcaaagaagtgctggtctacctcttggtgattctggaatgcatttcatcaggttgggaagggcaggtaggagacccagtactgatttccttaagggtgcttccatttcactttaaaaaaaaaaaaaaaaaaaaaaaaaaaggaatgtcaccctctcggggtggatgtgtgggtgccacggggagaaagggggcttttggacctaatgaaaggtgggaccaggtgtggtcttcatcctggatcccctgcgcagatgacccagactgtgccctgtgctgcaggacaatggagcagctctgcagctgctcagttttggctgcacctcccagcaacctcgcagccctctgcatgcttcagtaatgcctccccaagtcacggttgctcagaagctcagtgcacaaagtgcttattagctaagtagttaataaggtctcattagggatttgtattaaaagctccaaaaagtatagtctctgcttactcaggggaggcagtaattgtgcatgggtatcttggcatcactgtggtgcctttctgggagaataccgtggagcccgttcacacactgtgccagtggaggcagtcacacaaggggctgggcaggcagtgctgagaatataactgacctccctgcctttcctcccacaaagcccaggaagtcctttgtatcctatagcccctatctgaggggccaagctgggggccccagcaggggatggaacatcaggcaaacaatggcttattgtcctgagctgatacacctgaacctttcttggaagcaggggctaaatttcttggcatttgtggcctcctggaaatggcagacagtatgcttagaagcagaatcctaatccctcccaggttgggccagagtagaggccagggtggaagggggagccaggcctgacagctgctcccaagaagtggcaggcttggtaaactctgatgaggtcccatctgtctaagttcaagggatcagacacccccagcaagcctgcatccatgtcctctgcaggccccaaagccacacacatggtctggagtgaccattccaaaggtgctgtaatgttgggcttcctaatcagaaagggagcaaggagctcctgggctttgtttgcaccagtctgccaggcactcctttccctgctcagccctatttagtgcctgtgctttcgctggaagccagtgagttagccttaggccctgaggatgggcactgctaccaggaataggggagctgtggtgagcccgtcatctgctttgcagtt

SEQ ID NO: 6741 - DNA, 2300 bp, Homo sapien
tttctagtttattttcattgtatctggaaataacaggccataatggattaaatgtttaaaaagaaaaaacctgtcattagccacagatagtttgaggagcagtgagctaagccacagtgagtttgaggagcagtgagctagcagaagccagctagttagttatatcctcactctgagagccggtaaggccgtcctgctgtcaagaaatagaagataacccttgatgcccagggcaacattcaccttcacattggcctttggggttggcttcaaaggctctcccctcatcccaggagacaagttctccatcaccttatttccctgtggcctctcaaagaagtgctggtctacctcttggtgattctggaatgcatttcatcaggttgggaagggcaggtaggagacccagtactgatttccttaagggtgcttccatttcactttaaaaaaaaaaaaaaaaaaaaaaaaaaaggaatgtcaccctctcggggtggatgtgtgggtgccacggggagaaagggggcttttggacctaatgaaaggtgggaccaggtgtggtcttcatcctggatcccctgcgcagatgacccagactgtgccctgtgctgcaggacaatggagcagctctgcagctgctcagttttggctgcacctcccagcaacctcgcagccctctgcatgcttcagtaatgcctccccaagtcacggttgctcagaagctcagtgcacaaagtgcttattagctaagtagttaataaggtctcattagggatttgtattaaaagctccaaaaagtatagtctctgcttactcaggggaggcagtaattgtgcatgggtatcttggcatcactgtggtgcctttctgggagaataccgtggagcccgttcacacactgtgccagtggaggcagtcacacaaggggctgggcaggcagtgctgagaatataactgacctccctgcctttcctcccacaaagcccaggaagtcctttgtatcctatagcccctatctgaggggccaagctgggggccccagcaggggatggaacatcaggcaaacaatggcttattgtcctgagctgatacacctgaacctttcttggaagcaggggctaaatttcttggcatttgtggcctcctggaaatggcagacagtatgcttagaagcagaatcctaatccctcccaggttgggccagagtagaggccagggtggaagggggagccaggcctgacagctgctcccaagaagtggcaggcttggtaaactctgatgaggtcccatctgtctaagttcaagggatcagacacccccagcaagcctgcatccatgtcctctgcaggccccaaagccacacacatggtctggagtgaccattccaaaggtgctgtaatgttgggcttcctaatcagaaagggagcaaggagctcctgggctttgtttgcaccagtctgccaggcactcctttccctgctcagccctatttagtgcctgtgctttcgctggaagccagtgagttagccttaggccctgaggatgggcactgctaccaggaataggggagctgtggtgagcccgtcatctgctttgcagttccctggactccctgctttatgtttgaggctttctcttatcagtttagatgtgacctcccaagggcagtcttgggttttgatggaagtcatcatttcacccacacacaagttactgttatttggtgtggtgatggatatcaacccctgcccagaggccctgcagcctccattgctgctctctctggccacatctcccagaggctgggttcagaagctggggaggacctagagcttccctcactctacgatcctgggatcaggagcagtgtttctagaatctcatgctatgtgtatttacctcccacaagaagagactgcagcgataccagggtgggcttccagagcaggcttccagagctgggggtgaggggtgaaggggagagcaagctggggtttgcagaagggggtatgtataattgtgccatgctctttgggctgtcagcttccaccccttccccagctctttgacaccttggtgggggtccaggcatttgtaggtaccctcaggagcacaggcacccacaacctgtcactgggccatgcaccccagggcccaggcagagctgccacctcgctgtctccaagccgaccttgcctggcgctagctctggagcctgctgcagtccccatcctgtcctacctgcccagtgtgcgcccattccacatactgctcttgttggcagggtgggctgtggtcctgct

SEQ ID NO: 6742 - DNA, 2300 bp, Homo sapien
cctggggatgcttacacagaatgcacacacttggcaccactccagacccactcaatctgaatttctgatggtgagaacctgggaatctgccttttaaacaagattatcacgaatccctgaccctgatgttttagggggctttctgcagcctccataacatagggtgtgagctgtatttcaggccatcctcttgggcacgctctgtgaactttgaggatgtaataagtttcttcatgtgccaaggtagtccccgaagtctttttaaaaattgtggaaaataatatacataatataaaaattgttacttatacatttttaagtctagatttcagtgacattaagtacacttaccctgctgtgcagccatcaccacctcaccaccacccatctccagaactctgccctcatcccaaactgatgtatgtccttttatgactggcttatttcccttagcagcatgctttgcaggttcatctaagttgtagcacatgtcagagtcccttctttttaaagtctgaataacattttgctgtatggatatactgcgttttgtttatccatttgtctgttgaacatttgatttgtttcccccttttggctaatgtgaataatgcttctatgagcatggctggaccaacgtagagtctttttttttttttttttttaaactccacactgcaaccaggagtcttttcaaagcaatatcctggtcttgtctggcattcccttggtctaccttggaggcatttatccaggtgagaattgtggttaatgaagctccataaaacccacacaaagggtcaaccctgcattatttggtaaagtgatggggttaccataaccagcagcacaaagcacagcacttagacctgtgccagagagcttaactgtacaatgtggtccacctagcaatgataaaacaatgactgatgaagactaactcgacaaagaattgtttgagagtcacgcattctacccacttacctactctgtattttattctggcgttaaactggactgtcagaaacaaaatgctttggcttcactacccaacccaactagtctcccaacacaaccccatcccgctaagaaaactgctatcactgagtcatgtttttttgtcatgccctcaccttccagcaagggttgctgtaagaaacagcctcgagaatactaaggctgcattttctgaggaactgttaagacatgatcgaacacatttctcaatatcatctatttggtatgagccagaaactacagagttaagcattaggagaagttgtgcctactcagagacctgctgcaaaccaatatatgttttcctcataaacaatgagagtaacgatgttctgtgtttccttttaaatgctggaagctagaaaactcagaatcaaacttatgattcaattagagcaactgtttaggattatggtctgcctctctggggtctatccctcctaaactggttttgttagacctgattttgaggcttgatctttcatatttataaatgtacaattttgttttatgtttttcttgtaagttgcctaaaaccgtctggcaattggaggggaaatggagggaagggatgaaaggcaggccaacttcatatctggaaatggggagctggagcccagggggatggaagggtacaccaaggccacgcagtaaccagaggtggggctggacccagctgggcacaggagagtactcagttcagtgccagtgctgagcctttctgcacagccccacaaatggtacttaacaaatgtgtttggatgataatctgtcctttttaaaaagtgtcacttttttaaaaaatgagggtaaaattcaacatttctagagtaaattcaacaattccaggatttaaaaatatctatatgagttctttccgccccagccctcgtcttcctgggaaaccatcactcctgaaaacatttcacggaccaggtggcaattctgctcatgaccaccaggtggcgatgcaggacaagttgagctccagctctcccagggcaactaaggctgtggggccattgggcagcaagtttccgtcaggttagactgtttcttcccaggctcgtccagaagttacccataaatcagacgatttggtcccaaattgttgactgaatcaaaacactcagttccaggtcaactttgtattaaacacaagctgggctgctaaagacagctacctcttagtaagccagagcttgggcagtggtggctggagggtggcaccagcactggctgagacttcgggagaccactcagcctgtttgctcacctgtgaa

SEQ ID NO: 6743 - DNA, 2300 bp, Homo sapien
tccatacaggctcctcctcaaacccatgggcttgattttgagagcaggcctgtgggattgggaacctgccagacagagcagacatgaagcgcctccaaatgtaaccacccgaagggttctccttgcctgctgcctagactgagctgatttctcaagacaggggaattgcgatagaaaaagagtttaatttacacagagctggctgtacaggagaccagaattttattattacttaaatcagtctccctgaaaactcggggatcaggatttttaaagataatttgttgagaaggggttcggaaaatggggagtgctgattggtcaggtcagagatgaactcatagggagtcaaagctgtcctcttgcactgagtcagttcctgagtgggggctaaaagaccagatgagccagtttatcaatctaggtggtgccagttgaacctctgagcgcagagtctgcaaaatatcccaagcactgatcttaggctttacaatagtgatgttagcctcaagatgcaatttgggaaggttcggaatcttgcaacttccagctgcatgactcttaaaccacaatttctaatcttgcggctaatttgttagtcctgcaaaggcagtcttgtccccaggcaggaagggggtttgtctggggaaagggctgttatcgtctttgtttccaaactaaactataaactaagttcctcccaaagttagttcagcctacgcccaggaatgaacaaagacagggtggaggttagaagcaagagggattggttaagtcagatctctgtcactgtcataattttctcagttataatttttgcaaaggcattttcacaaatggagtaagggaaagagaggagctgaaggagctggtcttgaggaaggaaagcccccaggtagtaattgtcacctgtgctccacagcctggctgctaagaaagagttccactgtgagacctggcagggagtggaatatctaggactgtttctagacagaaagaaagacagagggctgggctagctgggccttggatttagggtcctggattcagaccctccctgcgtccatctcccacacccacatcatgcccttgggcttcctttccgttcatgcttcctggccctgcctgtgtgcacattcagatgttcaccgtccccatcctttctctccagcagtgatggaggcgcaggggcctgaagcctgggaatgcatctgcaggccttgcctgggaacagggaacacgtggaccccactgcccactctcacaccctaagtgaccaagacctgtttttcttctgcatgtgatgttcattttgctcagctaatcctcaaggcccagctggcagaggggtcttccacaggaagtacagtgtcccgcaaatatgtttcccttggaaccaggccaagggagggccacagcaatgatggtccacagcctcaattaaacctggtttccaaagggtttggggggctctgtggggaaaggggaggcagagagtagaacttcctgcagcttcctggcttcaatcagagcagctccagtttttaatgtattacatatatggaacattgatggcccgtgatgaccttagctttaaataactgttctgacatgaatgaatatgtgcatgtacgtatgtacacatgcatgtataaatatgtctacacatatgcatatacgcatagatgcatgtagatgctcactgatgatcttagtaatgatggttcataatttgaggcattctctgagggtggtacctgtcccatagcagggtctcaaatatttgatgccaggtgtggtggctcatgcctgtaaccccagcactttgggaggccgaggtgggaggatcacttgagcccaggagtttgagaccaacctgggcaacacagtgggaccctgtctctataaaaaataaaaattaaaaaattatctgcgtgtcgtggtgcatgcctatagtcccagctactcgggagcctgaggtgggagtatcatttgagcccgagaggtcgagggggcagtgagccatgaccccaccactgcactccagcctggtgacaagcaaacaaaaacacaaaaatatttgatgtgtgaacaaatgaaaagtttggtagagtgtgttgtggggacagcagtatggtgtgagggaaggagagagttcagtctattataatcattagtctattgacttgtggtaattgagctataggagataaattcctacttactctacacatttaatggactcttcctcccaccccatcttccctgtccctttctttttccacagcagctctgcaacg

SEQ ID NO: 6744 - DNA, 2300 bp, Homo sapien
atggctaaaggtctagcatcttgtgggaagaaagctcaggtggtttattgactgagtgatttaacacagcccagctcccaaccacaatggttttaggatgctctttggaggcagatgagcatttctaagaaatgttctggaaatgccctgatacacctctcaagagcatcatcgcatgagtctgaaacacaatggttattagacttctcaccctgggacttcctttgccccacgggaccctgccactgctctacccattcctctgagtcccacgccttgggcaccaggaacctctgagtcaggctctgacatcttcctctttctgactgtttatagaattggagcttcacttaaagcctcctcttttcttgataaaataataacacctttgtaatgaagagtgtgttctttccttggtaggtttgacgccagtgaacaaaagaactatgtcacctcctaaggacccttctccttctcttcctcttccttcatcgtcttcccattcatcttccccaccatcttcttcttcaaccagtgtttctgggaatgctccagatggttcctccccgcctcaggtgagtgtccctgagggtcctgcccaggtgtcaggaagctaacctacctgtactcttcccaccttccacacttatctctggattccacgtgctcataggtcaacctaagtgcaaagccagcgccagaagatactctgtcaagggtctaccccagctgccttcatgtatacctttcacaaaagctcctgctgttccttcacagccatccctgaggacacagtcattccctcagcaaactttacagggtttagactccatgccaggtctccatgagatacagagctgctaggacacctttcccttgagaacttgcaaagggcattgaggaatttgcagctgtaggatggcaggcacagaagtgagggtccctttggtagggtccaagaaccttggaagcaacatctcccttgaatataaaatgtcatcattggtatgcaggctggactctttccttctgtatgtatttatcaagcctctgttacctgccaggcctgttctagactctggaaagtagaatgcacaagacagaaaagatgggtgctctggtgaagcccctgtgctatgacctgcccttcaggcaccagaggtcttgggagggcacagccacccctagagtccactcatgttccctctttgccaagggccaagttcctgcatgctagaaatagctcctttctcagtggtgcaatgtgggaggttaaaaagggtcattgaaaggtcttaagggccatccttgtgccaccacagcttcagcccagagagtgactgtcgcttcttactttgatggcctccaaggaagaagccttggtttcttggttgttggaggaacatacctatgggtggatcatgccttttagtacagacaatggctgagcaagaaaatgaagagcttatcttcccctatgtgcctggccacccacagaggcccagccagtcctaccatcatgggcccgggagcttatcaacagcagtgtcctacctttgccttccccctggcttccaacccagctaatctgggattcagaaaagcctttcgtcagtactgattcgggggttccaggcagatcctggcaggacccaaggcagctacttagaacaaagagtatccctttaaaatcatcttaggcaaaattattttttaatttgggcatctgagatgggaagaaaaaacagggagggggttgtagattgagatttgctttcatcatataaataaatgatgaaaatttttaaataactgctatttttgcccatcccatctagatgacagcttctgagcccctctcgcaagtctcgagaggtcatccaagtcctcccaccccaaactttcggaggcgagccgtagcccaaggagcacccagggaaattcccctgtatctgcctcatcacccaaagccagagtgggcagagtactgcctggtgagccctggtgaagatggcctctcagaccctgcagagatgacttctgatgagtgccagccagcagaggcccctcttggggacatcggaagcaaccacagagacccacaccccatctgggggaaggacaggagctggacagggcaagagctatctcccttggctggagaagaccgggaaaaagggagtactggagccaggaaggaagaagagggagggccagtgctggtaaaggagaagttgggcctgaagaagttagtcctcactcaggagcagaagaccatgttgttggattggaatgactcc

SEQ ID NO: 6745 - DNA, 2300 bp, Homo sapien
aacaattactgaggagtattatatatgcaaaagcatgcatgggcaactgaaggaatctccatgggtaattttgattatggcacatttaggactaagccttgcatacagatattagcaatttttgaaagaataaagaaccacagactgttaagagctgaaagtagccctaaatggcaagacatcagggtgtgaatcagctattaatacatcgaaatcacctgatgtagtctgtttaaaaaacacctatcccttggtttcacctgagatcgactgaatcagaatttctggagatggggcctgtgaatgcaacaaacttctaagcgactgtgatgcacgatcgagtttgaaaaccactgttctgtgccaaccatttcattttgtagatgaggaaatggagactcagaaaagggagtaaacctttccaagatcacaccgctattgagctacgtgtctcttaattccctgacaagagctctcggggctggagatacgcttttggagatgtcctatatctgatatcctgaacaaaaatgattaatgatgtaatcaaaacacacttatattttggcttctcaccatccctttaagatttattgtctaggaggagttgtagtaatcttcccaggctagcagacatcatgacttttctgctgttaagtaagaggcaccaactaaagcagattttttttttttttaaaaaaggtaaaattaagactcttaagataaaatgaacctatacggtgttgagaatctgttgactatctttttgttaaattttagttctactcagaaactgttgcttgtcactttatttagtttaaggaactgtggatgggttaataaaaggctgagtaacatctcctgggaagaagcacagctggccctggcaggaagtgcaagtggggtctgggaaaagattcaaggtccaagcagctactccccacggtttccattactcagaccacgtggcttcttgagcacacttctttgctccattctttggtttccctactcctcagcatgcacgtggctagaaacagccaccctagttttgattgcgaatgatcatcagtcacgagcacaacttctgacaacagtctctccagcttagtgcagtcttaactggggccagctgatcgtctgctcttcagtaaagcagtagcgccctttggattaggtgttcacccaggttcaatcagctgtggcctagaaggggccacaaggaggaaacacagttgccaaggtgctgtgagtctgtgtgtgagagacagacagaaggacaaagagccagagtgagaacttgagatgggtaagctcaataacacgtgccttttaatcatttccagtatgagtccttcaaacactgtgctttgtatgactcccctgttatctcaaatgagtctggttgtcactctcttgcttttatttaggcaggataaattttgcgggaagtcctgtaggagctcatggttgtgcttttcccattcatgtttccaccaccacgtgggatcttcctttgtataagctgctggaaacacggatgtcttacaagaataagaagcctcggctttacccttgtgcactccaagcttctcagtcttggatgggagtagagacgaggaggttgacggtcatggataggttcaggagtgattggttctgcccactttggtggggcctggacacattttggttcactgcaataatttcttccaggagctgcagtcttgtgggcgcaagacgtgggcctgataaccccacaggcagtagtgctggggcagagcgagctcaccagccgccggctggaagaccccgggagagtagcagggttgggttggttctcagatgtgttttgcgccaggctgtgtggtggggacagagcctgggtaaatgaagctttccggctcgaccgctcccaacctgggcacacacgtcctcctgtcctgcaaggggcagttttggggcatcctccctgcttggggcaacccaggggcgcaaggcgcggccccgggagcgcagctccttccagggcagagggcggcgcgagggagggagcgagggagggagcgagggaagggaaaggcgagcgtgagctgcctcaaatgcttggaataattccgcttccgtttggaaagccgcagcctcagtcccgccgccgcccgctgcgtccgcccagcgccagctccgcgtcccgaccggcccgcggcagcctgcgccgcgccatggccacctccccgcagaagtcgccttctgtccccaagtctcccactcccaagtcgcccccgtcccgcaagaaagat

SEQ ID NO: 6746 - DNA, 2300 bp, Homo sapien
ggctccagtttcacatgtgcaggcacagagatgacatttcccgatctgggagaaggcttctttatcagcacatcatcagtgttgcctcgagttggttgcaattttcaattgctgctattggtgctttttaattatgaattactgttagcttgcattatcatcagtttgttttgttgtgggttgcttggttaaccctacagagtatacttgaagcttatttgcatcaacagtattctggagctgtaatttttcaataactagactctgagacatgtatacattgtggttcaaataggaatcatccatagtccagtgctagaacaaatgtatacataatccactccccacaaattatcactcatttatttttccactggaaaataagactagatggagtcggtaggtgaaacagttttgccgtgcctaagtggaggctgatcaaaactaatttgagatccgctgcctttaatagagctccacctcaggaatcttacctttataatacatcctagataggcaagagggatatgtcctgaaatcttcactaattccaagattgcgtgtcatttcccccaaaaatttgcttaactctattggaaaatccaagagaattgctgcagctgctgaaaacaagagagctgcattaagctgcaaggccgggtagggtaggtagactgactcaccacctatgggacctgcctccacacatcagcttcccaaatacttgcagatttgggtcttaccaaaagaaaagtcagtatgagttactcacaatcctaactacaaaggctacatttacaaataccagagtttcgactgtgtttttactctctgctccctgaaaactgtaaccccaggctagctccaaactctgcttatagcccatgctttactacagtggtggtcgcatatgtgaacgtgtgcatgcgtgttcacgtgttcatgacaacagcaatgcagccatgagggtgctgcccccaaaccaagcctgatgaccttgagaacctcaggcttcccagtaggatcctgcaagaaagcatctcttaaaaataaattctacaggatattagtaaatgttagatgaaaaaaaaagtcacgtttaaatatgtttaggaaacatgaggtgaagaaagttagcttactgacgctttttgttttctagttggagcgcacctcagagtcccctacataatgcgtattaggactttctaagggaagacggggtacgatgggtcccaatcttgtttgatcacaggatgtatctgtcccctgagaaatttctaggatgagtactctgaactcaggacttcatttagtcatatattcggcaagtatgtgttgagtgcagcatgtccaagggtgagtgagagattatagctagcaggggagacagatgaaaaataactatgaatcgacgttagttacaaattgtgactgtcgcgatggagaagtactaaaatctatgaaagagttctaatgtagatttaaggtcatgagaagtctccggcaaagtggcattttaaagtaatccctcagtcgtggagctactccaatgagaagcctgccactccagggcgcaccacggaggaggatccccagacaagaagacctggctccccagaggagtgcggaaagccagcatggctagaggacacagaatgagggagaagacggatccgatcgcaggcatcgggagtgctgatttttctcctttgaaaaacaggttgccatctacctttttaaatgtcccactgtgtaggaaaactctggggaaagctacgtcagcaatatggagtctggggttgcctttctcatgtcataccatggtcctggctggggagcggaggagaccaggagaggagatcagacctctgcccaccccaacaccaatctggtcttagcaacctctgggcatcccatagctcctcctaacctgctgctgctgatggacaggaactcctggactacccccagcctctccacaatgtgtcctgagaagagctaggggaactggacagagtggacgaggctgcatgtgtggagggaatgaaataaggggcctaccaggccagaacgctgatccatggagaccagtgcttccagccctctcacctcggaggaggactcctgttttaccaacggcaggagcaggaatcccaccattcagcctgtgggcttgacaaactataagcaagcctcctggatgtggaataatacattttcaaaattcatactaatcagcatgaactataactgctccaatgcccaccacattatataaaatctaccaaaagggggtc

SEQ ID NO: 6747 - DNA, 2300 bp, Homo sapien
tgggagggtattgtctttgagctgattccagagtggcccgtggtccagcggtggggctgggcagtgctgtaatacgtccaggctagcaccttcttggttttcagagtctgattatagagacctcttgtttgtccttctctttcttggctggtgttcttgccttggcatccctgatagaagatagacaaaaacatttagaagaaatgaaactctgatccacatactagttatctgttcccctccgcagaaaagggcttagtttagcaaagagaggtaaaggtagagatcatacttctaaattcaaagcaatatatgtcgagcttattgacagcactcaataaatgttgcttttattaatattacaggtaaaccaatacgagggtggcctgggcatagggtaggcaggacctaactcttctcttatccccagactttagtatttcagtatttttgatgagaatctgattaatgatctgaaagttcctcaaagtctcctgtgatttaagcagatagcttttatccttggggaaccaatataattagtattagaactaggttcatgaatcttaagattatggagttcatctttgtccagcccatctcactatgctttgtagagaataacttagcagaaacagccccctgctaggcatcttggtaattgcttcctaataactgttaatttttggtttcacaactaaaatattagggagtctggtgaatttaagaaatagtgttgaagtgatggcaattgagattttaaaagttgcctgtatgacaaatgaaacagatttaaggtgggggagaaggttacccatgaacggggtggtattgaaaatatttaacagccagtccagaagggcattggcacagtagaaactacactgcaggccccttgatttgccggacacctatccttgttgaatagtgaggagaccttgggacactacgaaggggacagagcattcactggggctttggagcactgactctttacacgctgttatggaagtatttcagtattttaaacaaccagtatagttgtaccagtcgggtactggaggtggtgtgggagagtgtctgaaactggcaggtgttcagaggtgttgatagattcttcacttgtcatctttaattcattgctgagaaaactttagttgcgctaggccagattatccccaaaggcgtttggacagtgtcacattagaatttagggctatttagaaagcactgagacatgtcctttttttcagaaaatactgtgtatacagtgtgagaggcgcacagcctctgtcttcatgaggtccccagtctatcggtggccttgaaatttttctgctctttgactgtaggctaggaatctgtccttgagaaatgattacaaggatgtttgctacaacagtgaaaagttgggcaaaatctaaatgtccaagcatgagaaaagagctaaataatagcatatccaccccccagaatattatgtacctcttaaaaatcacagacacagagaagttttcaggactcaggaactatttctgactgtgaaatgttaggtgggcaataaaaacctaaagctgtaaggaataattagtgtaagaaaggacatcaaaatgcatgggtagcactgattattatttgatggtggaatatgggtaaagttaattttctttgtggatgtttctatatgttccacttttggtcatctatgggtattaacttttataactagaggtgttccagaaatatttttaaaaacccgattaaaaatttaaaaattattgtataattagtgagtgggtgaacatgttggatttaaacttggagaagcacatttggaggttgtatttatctcttgtaaagaaagctgctgactcggtgggataaaaataagaggcctaggtcagcctcctcgcgttgaggcacctggctcccccaggcttccagactgcacgggttctgagaggccctaatgggcttgttgaaaggttctacttggcttcttattaatgtccctccctgagctgtgctctgctctgctggctaaccttgtcggaaggttacctgtggctctccagggctcggctaattttaaacctggtcagggagtgtggtggcattgctctgcagagacatgaacagctccctgggagacactgctggggaaagatgagtcgagtctacggttttttctcatcctcctgtaagtgaccaggcacgctgaacaagcaaagagagctgggataataatgagagcttttatggtaaaaaccaggattattaaagatcttttagcagtgtca

SEQ ID NO: 6748 - DNA, 2300 bp, Homo sapien
cctgactgagcactgggcataactactatttatcttaaagtgtggctcctcggagtaaattcatactgctgtgaactgcccagagctcaaggactggcctgtggttttgtgcatgtgtgttgttttggtttgtttttgtctttttttgttgttgtttggtgggtatggtggagaggaagaaggtgggctagccactgctcaaagaattcattcttattctcataatttatctaataaactactttggagcgagaacagactctagagtatagttcagtttgaatttcataagactcttagatcgtaacgaaaaagataatagtttgaattcaaaaggcccacaccgcaggcatagtcaagttcatctggaggtcagtcacaaaatgctttcttgtggcgtaatttataccttcacatttggcaattttgaaagtcctgtgtaaatgtacatatgttggtaagaggtagtaaatattttgctgacaagttctttgaatgatggctcagtagcagcatttaaaggcagacaatcagagggttttttgtgtattttttttttaaatccaggtgctgccaagtctacaaagctggaagggaagaagccaaaagtgcccactagttatagttataccattaattatataatattcatgtgcctcagagtttctgcacctggcatctgttgatatacacaggtgggggaggacaggggcacaggatacagttgggagagagcagggaggaagacagggtgcttgctgtcaggtaacggccctggaatatggagcagtccctggtgccaggtgtggccaccagcacctgcttccctcctgggtgtccgtgttgtaatactgcctggatttgatggggtgagaaggggaggaactgtggccacatgaaaccctccctactcaggcccttggcctcctcttttcgatcaatcctttctctctcatttttgggaggcctttgaattaatgatcctataccttttcaacaaaggaatattgatatgttagtgtgccagacagcagggagtactggattagatcattttcacattgacgttatgccagtttgacatttgtttggaaagcttatccttttatgaccataggttatatacataatttaaggggaataaatctttcagagattttttttggttctgtgatcttcagtgctacagaaaaagaaatgaaatactcccccacagttttcatgtgatcaggaattcagcataggctataagacggagtgctccatgtcaatagagaatatttccacaggtgtgctaggcacttgtggtagatgttgcagggaagtcaggactggggacagcttggtccctacttcaaggttacagtctaggagctgagagtggcaaagtgacctgattctacagggtaaaagccccagagataaatgacataggtccaggtcagccagcattgctgtctcagtagaatgagtatgtgtgataccaaaataatcttcctccttccctccttgatcctgccaccatcttgcatcttgatgatctcatattgggatagtgacactaacagagtttccgagttatgatgccacttgccatggtgaagtggacattttaaaaaactttattttcttataaattacttgttctgctttggagatttgatgatcatttagcaaagtgcccctggtagatagtaggcactcagtaaatggttttcgtatgaatcactgcaaacttgcaactccgagtgagtaccattcttccatataaatttcctctcgtctgtgaagattatccagcttctgcccaccattgcatttctgtgtgggtgcttaatatgatacttagataataaagccacttggatctcaaaattccatattctccagtaggagttatccaagcaaagctggtgactgaaccaaaatcaccactaaagaacttaaccgtgtaacccaaaaccatgtgtatccccaaaaagactgaaataataaaatgaaatgaaaaaagctggtgactgaagaacttgcactagagctagcaagagcattatgtttgtggttaccacatccttatactgtttttggttttctcttctaggtttattttcttgaaaaggctccaggcttcggcttggaaaatcccaccgccaaaattgagcccagcagctggagcggcagtgagagccctgccgaaaacatggaaaggatgagtgactctgcagataagccaattgacaatgatgcagaaggggtctggagccccgacatcgagcaaagctttcaggaggccctggcta

SEQ ID NO: 6749 - DNA, 2300 bp, Homo sapien
ttgagacagagtcttgctctgtcaccaggttggagtgcagtggcgcaatctcggctcactgcaagctccacctcccaggttcacgccattctcctgcctcagcctcccaagtagctgggaccacaggcgcccaccaccacgcccggctaatttttttgtatttttagtagagacagggtttcaccgtgttagctaggatggtctcgatctcctgacctcgtgatccgcctgccttggcctcccaaagtgctgggattataggcgtgagccaccgcgccgggccaaaagtctaatcttttttccacttccttgctattggagtttgagaaagaaaaaaacaaaaaaacaaacaaacaaaaaaacaggactccttgtcccagccttgggaaccaattcagactcagggagtcagacagatggagattaaaatatcacctgcattacagaacagactactctggaggacagagcttggcaatgatgagcatgctaaaatgcactccccagttccaccaggagagatccacgcaaatgagagtgtgggccgactgctgtcacccactagttagctaactcagcacacttccatcgggaggattaaggagcagagcaagacgccaggaggatttagagaaaaagccctctgtgtggaaaccagagcagtggggggccagtgtccccccgatattattcaggggctaactaggaagatagacaccactccaagtagttacaacaaagggaatctgatgcagggaattggtggaggtgctgggaagagaaatcccaagattctcaggaatacaaagtcactgccattcttaggatgaaggagtgaaggggtaaggtgctgttcccagatcccccagccagatcactggcaggagccagaacctgtgagggtccctctggcaggagctggagctatgaaggaaaaagagccactgctggatatgccacctgagatggagagagacgggatgagaccctaacttctcccttcttcccaccctgtttcctaccagaaccttccactggccactcagcgaaaggcagctgattcagcacctggagaagaccggcaacagggctgagtttccttgcactgcagaggaggggagaggcaaggagtggacatgagcacggaggatccagggcactcccttgatggtgatgccctcgaagggctgccccgtgcccattgtacagaatgtggattccaccccacgccatgagagctctcgcgcaggcccagaccactttataagccatatttcccaccaattcctgtttctggatctgtcaggttatttcatatttctaggcccttagctttgcttcctcttccctgaacgccctttgcccacatcatcccagctctccttctcctcctgccttctgtcttctcttcctctcatttcttgtcacccaggctggagtccagtggcgtgatcacggctcactacagccttgaactcccgggctcaggtgatcctcccacctgagcctcccgagtagctgggactacagatgcacaccaccatgccagctaatttttaaaactgtttttagggatggggtcatcttcctgtgttgcccaggcttgtctcaaactcctgggctcaagtgatcctctcacctcagccttccaaagtgctgggattacaggcatgagccacaacatccagccccttttctcttttcttacccttctttcctattttcttttccattttctttccctcccttcttctttctttcctaactattaaggagtagattgaattcaaggtctttatgtgtgtcagtttttgttttccaacaaatatttcttaaaaaccaaccattgaaacgtaatggtaaccactggcccctgtctccacctccacacctaagaagccccaaatccagatgtgtccattaaaatcagtccagatcttctttaccaagccactagatgtcatattaatttcacagcagaatagggaagcccatgccggagctgaaaacctgcaacaacaaaaaagcatctaaatactgcaaaaaaaaaaaaaaaaaagagggagagaggcatcttaatatttgtccttaacacatcataccagacttctgcttccaggaatgactggatgtggtttttctaggtggacataatacaaaatgcagctacctgaaaacaatggaaagtggacagagcaggcagattctggtgggaagtccacgcaataaagaaaagatgttacaggaagtgagcgcccatttttgctgtttttagcttggaggcaggtgcagccattgtg

SEQ ID NO: 6750 - DNA, 2300 bp, Homo sapien
atcatgtgactgttgttagaatagctgagtgcttatgtttgcaaagatatatatgttattattgccaattttattgtgtaaattggcctctgaagtgctctgtcagtttttatatggttctcaaataaatctcccttaaaaatgtaaataaatgttttaaagataatttcttcttattttttccagaattatatttttgggattttgatctttcaggatttcaatatttgggatgggtctttcaggattatgatcaaccccctatgtggaaccatactggggaaactatgaacaagaataaaatctcagaagcctgggattttgacattggaggcaaaggaaaatcacatcagagagccctgctcagtgcaaagagcgctaggccgggtgctggaagtgctgactttcactcatgactgcagctgccccactgtgatcctggggaagtgaccactgtgatcactgtgggtctgagtactgtcatctgttcacttccatgtccttccacttctgtgactctgtgaggctaactctgtttctatttttttttttttttttgagacgaagtctcattctgtcgcctaggctggagtgcagcggtgcaatctcggctcactgcaaccgccgcttcccgggttcaagcgattctcctgcctcagcctcctgagtagctggaactacaggtacacaccaccacacccggctaatttttatatttttagtagagacagggtttcacgatgttggccaggctagtcttgaactcctgacctcaagtgatccacacccgcccccccccggtttggccccccacagtgctgggattacaggcgtgagccaccacaccccgtcgcctaactctatttctaaaagctctgccagttggagatttctctagcccactagagtttctggctttgggggacagggagggaagggaggggaagctgtgttataagaagaaagtttaaaaagtaagcataaattatttgagcttttaagagacattaacaagctaccatactgagggtattaagaacactaaaatttgtttggctttggatagggaagctactgaaattgaagaagaaaagatgggactgaatgagcactccttgggttggagaaaaaccaacatgatcattatctaatcatcatcataataatgataatggacatttgtatagcacttggcagtttacaagttactttcttataataataattaccactatatggtacattacagtaacaaatactttttagggctttaccccgttccactgtaaaagttggtattagtggaggatgtaaatagacttatctacatgattaaggaactaggaggagtggaggttcaacaccagcagttggacagcaaacatcttagaagaccaggcacatcttcagccacacccttgggttcaacttggtggtctcctggttggggtcaggagcagaagtggggccatggcctccacttcccttcctgggcaatgtgcctttctttcatcaccatggagtccttgcctttgttttgtttctccttgtcatttatttccattaacatgcagtggtttttgtcctttctcttcccgattgtcactttcctcacctagatagagaagaaccagccctcacctagctcactagtctgtatcaggctcaaatgaggtgatgtatgtaaaaaggttttgagacgttaaaaagcacagtccagaaatacctgaaagcatgtaaactcttacgatttgggggcttagcaggaccaggaatttgatctcattgcctccaggtcatatcatgaccctctaggatccctcctccctgtcacacatccctctatgggcacattgattccaggatttccagagtacatcagggctgagccgacctcatggccctcgtggattgtctctgatatggtttggctctgcgtccctacccaaatgttatcttgaattataatccccacatgttagggagggacctggtgggaggtgactcaatcgtggtgcggtttgccccatgctgttctcgtgatgatgagtgagttctcacgagatctgacggcttaaaagtgtggcacttcctacctcactctctctctctctcctgctgcattgtgaagaaactgcttgcttccctctcaccctctgcagtttcctgaggcctccccagccatgcggaacggtgagttaattaaacctcctttctttataaactactccgtctcgggtagttctttttttttttttttttttttggagacggagtctcatctgtttcccaggctggag

SEQ ID NO: 6751 - DNA, 2300 bp, Homo sapien
tacccctgttagagtcagcccactgctccaatattgtatgtggtttgtgtaacagcgtctcttcccctcctggctttgtgtcatctggacatgtgatgcgaatcttctggattttccttcagaacactgataaaagttctgatgtctggacctgggagagaggcttctgtcattctgagggtaactggtgtggtatagaggctttgaaataaaaagaaaaagtctagtttgaatcacggctctgccacctactgtgtgacctttggccagctagctaaattctgagtttcagtttccccatctgtaaaatggggcaataaaagcttcctcacagtgtggttataaagattaagggagaacatgaggggaaagtacttagcacagtgtctggtacgtagtaggtgctgctggaatgctgactccctgcaatcttcttttcggtcaacgtcgactcatcaatcagcatctttaggttatggttacttaaccagttattagtccaattaatgatactagcatccagcccatatttcttcatcttgtctatgatatcttgtcaagtgcttcgcttaagtcccacttacctagagtgatctcctcatgaaatgggggcagagacaaaggagcaataagattccacctgcgtgtaaacttcggaaaaatagcaagctaccgacggaattgcttgacctcgaaaacagtcagcattcagaccacaagcacatattgggcactccgtgcctgtcaatgagctggggatgggcaatggtgttacagagattaaaaaacgcagtgtctgtgttcaaggaacttaccaggctagaagtctagagtcacgggggccagtctgggtaacagaattaggccaatttatttaattccatttgttcatgtatccagccaacagatatttatggtgcacttgttgggtgccagccccgcccccaccactccaccctaccccagcaggcgctaaaggagagctgacatgatggataacgaaaaagaagacgctgtccttctattcagggagtttaacatctggaagagccgggagttctttgtgctaaaggccctctacaaagtgcctgagatgcaaaaataagtcactttctctgtcctctcagcaaccgagtcgcatgtcgttatcaaatttttattttctgtaactgtttccttccgtcttgctccgtagacagctttttgcagcagagagcgctgccgcggggctggtgtctactcttcagtaagtggtcaaaacctggctactggaaggaaatgcaatggaatcgctccgcgctcgagtattctctttggaactacgggaatgacagctccagtgggacacttggaggtcatgatgaacgcaaagaacgtgagaacacttgcagtcctcggggtggaaatgccttctagaaatactaagtatccgttctctcgttgagactttggcaaaccagggattttaggaagggtctggcactcaacgttcctaaaattggtttcctagatggagccggagggagagagggagtcaggaactgctgcttttcgtcggaatgcccggaggggagaagaagaaggaggaggggtgagggcgggcggccaaacgccagccggcaggggacccagagaagagggacatcccgggcgaccccgaggagcgcggcttgggcaccgcagtggccgcggctagtgggagacctgaggggaaagggagagggcaggggcgaggaacccagggagcgcgcgcggattggtcctctcctcggggcgtgcgctcctgtgcgccaaatgattggtggcaggaaagtagcaggtaaaccggctcccgccgcctcgccattggtcagcggcctctctagccgccacacaactggccagcgggctgccgagccgcgcgcggattggctgggggcggccgccgggaccggctcccttcgggcgttcggattggctggcgggaagaggcaggtatccgggcgctgcggctcctccattggtgggcggggaaggggggttgggcacagcgattggtgggcggggggccgggcctgggccggcggggagcggattggtcggaaagtaggttagtggtgcgacatttagggaaggcagaaagtaggtcagggacggaggtgcctgtttacccgcgccggactcaccgccgccgccgccgcgggatccgagtgcgggcgcgggcgcgggcgctcccggcgagccacggtgagtgtcaggccggcggcggccagcgacgcgatcccgcgcaccccgtcgggggccgttagcaccctcgcggg

SEQ ID NO: 6752 - DNA, 2300 bp, Homo sapien
ggtgctgaagaacactaaaacctttgcctgagaggagtctgggaagtagcctgcgaactggaatgaccccaggcttcctgtcacggtcatagcccatggagttggcagacttgatcactctatattgtgtgcccccaggtaatggcattagtcatcgatactgtcttttttttttttttttctttgagagagagagtctcagtctgtcgcccaggctggagtgcagtggcgtgatctcagctcattgcagcctctgcctgctgggttcaagtgattctcctgcctcagtctcccaagtagctgggattacaggtacatgccaccacacccagctaatttttggatttttagtagagacggggttttgccatgttggccaggctggtctcgaactcctgacctcgggtgatctgctcacctcggcctcccaaagtgctgggattacaggcgtgatccactgcgcccggccaatactgtctttaaatcgtccagagtaagaaaatgttgatagcttgttgtcacagccctgtcattttacacattccctgaattattgtctggcaccagcaggtgttccagaaacacttttggttctttgagccattactggtcattcctgtcaccactgccaccaccagatgtggttctgagagcattaagtaaaagttttgaaggttgtgtatgttaagactggtgcaaagtccatcctccttccttcgggctgatcagccacaccctggctatcagcacttatttactcattttcaaagtgacagaatggtccagtgggcaggggcataaggggtcacttcctctaaccacccgccagtgcaggaggatcccatctgcgcagtggctgcccatgacaggcagttccctagccccagtcggacatctccgcaccaggcatcctgctcctgctttatggacatctttggctcttaaaaatcctcctttattctgaccgcagatctgccttttggcagtgtttccttagtgacctagttctgctttttgtggcaacacagaacaaaggtcggtaggcatggcacaattccagcttagaagtttgaaggtagtgctcatggacccacatcctttccctctccacccactctatctccctccacaaggtttatgttctccagtgccttcagccattctttctatggcatggcagtcagtattaatcccagtaaaggtaacatgtatccagagagtgcttgccatgggccaggcactgttctaagctccgtacgtgaattgtcttatttatgactcaaaatcaccatatgaggtgagccctgtcatcatcctcattttaccaatgaggcaactaaggaacgagggctcacatcttgtcccgagccatgcagtcaagcagcagagcagagatttggggctaggcagtgtgactccagagcccgtgctcttagttgtggtgcaagactatcttacagcctttcctgcatagtgccaaaaataagcccatggtgcactagacttgggctggccctgctttaacttattttgcaagaaatcattagacaggagccttagttgaaccattttctgtgaaaccttcagagtttgttttgacagaacagactgcagggcagaggcatctgcactgtccccaacaaatgggttcatcctgtagctctgccaggccccacagggttcataaaatggtagctttagatcaaggtgacaaatacagggctcttgatgttttttttttttttcctgaacatggtgcctgagcaataggtttcttgtttaaagtgcttagtcatggttttatggccagaaagtagaaggagagaggtacctaagaattgcaaaactgggtcatctcttcaagtgcctaatccaatattcagtctcagagaacaactccagcagttacgggggtggaaggatgtgatgaccacctaccatccaaaactgggatgtaggtgccaaatacacattctcctgaaatgatccctggtgcctctagccaggctcttccaggagtctagagaaagatggcccatgacttcatccagagtctttgcttcctgtgctctgggatgcctgggcttttctggccacagccatacactgacagggccagaagggctgagatgctgggattgaaccatctttctctttgtgagttgctttccagatagcacgcattccggtcactattttccagagatttaagcagcaaagtgagggaccctcgggcatcgactcagagacctggaggggagcagcttgaagcaatgtaaaaagcactggataaaatctgg

SEQ ID NO: 6753 - DNA, 2300 bp, Homo sapien
aaatggccaggggaatgaaggattgctgggcggcatgcaggcctctaaggggtatgtttctccagccatgtcctgttacacaggtgaacacggggtaggaggccattgtggtagaaaaacaggacatgagcagacacaacgtaagacagagaaacgcctgtaaagagaaaaagcaacatcagtaatagctgaagaatacaagtaaaaacaatgaggttttctttttttctctttagactggcaagagctcttgttggggatagaaattattgtcgcttttctggagcacagtgttacagtatgttccagaatacaacgtgtgtcccgttttgacctgtcagtcccacctttagaaatttattctaagaaataattgctcaaatgcaaggaaatatatgcacaaagatgttcaccccagcagtgcttatcaaagtgaaaaaatggcagtcatctaaacaggaggcagctggttcacttatctgtcggcctaacagtgatagtgggaaacagtagctcacactcaccctcctgttttgcagatgagggaagttgggtccagagaggggtagtgacagctccagtcctactccacggagctcagaccccctggctgtaggcaggcaccctgcccaacctcttcaactgggcttggagtcagagtcccttgcaaggcacttgtcaagcccttttcaagggccggtttgcttaatgcttttaaaatacgagttctcaaaatgttttgcaaatttgtttacaatgtcttcatttcatctcatggctttccttgcaaaggatgctgacagtggggggaaaacaggccgactgcctggccgtgatagaggggaccatattttcctgattcccaagtaagacttacagtggaagaaaggatattttctgctttcttacagtgtttacaaaagtcataacaggatgtgaggactatctggctgcaacatctgtcaccccattggtcgccagagttgattgggctgatctggctggttaggcaggtgtcccattcctccctcaccactccatgtgcgtccctcccaaagctgtatgctcagaaaggatgaccatccccgatagaggaggactggtctttggtcaagggtatatgagtagctgcaatcttctgctagggacccccaaacaagctctcaaaagtcataacaggagtacaaagataataaggaacttgcatttatttgtttccttgatcatatgtttattgattagaagaaaataaaattagcagccagccgtggtggctcacacttgaaatctcagcactttgggaggctgagacgggcagatctcttgaggtccagagttcaagaccagcctggccaacatggtgaaaccccatctctactaaaaatacaaatattagccaggtgtggtggtgtatgcctttagtcccagcttcccagcgttttggatggctgaggcacgagagtcacttgaacctgggaggtggaggtggtagtgagctgagattgcaccactgcactccagcctgggtgacagagtgagactttgtctcaaaacaaataaaaaataaaaataaaataaaattagctttgtgtgtggagaaaagggaggaaaaataattagcattgtcagagaacatctgggttatttggtcccctccgtgggaactgccctgggttttcacttctagagtttctggttctggtttaatttttccacgccacagcacagggaccgagaagctgctcagcttctctaggcttttatgtcttcaccagaaaaatgagcgggtgggcttaaatttcctacaaaaactcttaaaataaatatgatgctctttccattctatcacatgcctgttctgggtccgggggtgtgagagatgcattagtgctgctgtaaaccagccccgggtctccccccccggccccccaccaccaaacccccaagcaccaacctgggttctccaccacttttgagagctcatcgaaataaacacacctttgtgcctcttgtaacaattccagatcatccaatggcagaccagagaatggacatttcttcaaccatcagtgatttcatgtccccgggccccaccgacctgctttccagctctcttggtaccagtggtgtggattgcaaccgcaaacggaaaggcagctccactgactaccagtaaggcctttggggcatgtcttcctcttgttaaacttggtgtcagttctcgggcatggaacatctagcagccagctactgtttcatcctggaaaaggggatgggaataaaaaacccaactctaggtg

SEQ ID NO: 6754 - DNA, 2300 bp, Homo sapien
ttactgtagccttgacctcccgggctcaagcagtcctcccacctcagcctcccaggtagctgtgaccataggcatgtgccaccatacccagctcattgttctgtgtttttggtaaagacagggtttcaccatgttgcccaagctaatcttgaattcctgagctcagacaatctgcccaactcggcctcccaaagtgctgggatgacaggcatgaaccaccatgcccgactggttgcaatttttaaagccccctcagatttgatttcttgtgataatagtccctttacaaaggctttgctctgtttccctctatttttatagccttgattaaattcagatgcctgaaaaaaagagagaaagatccacacagtgagccctctgaaaatccatccagctcttttgcctgcagctttgaccttgctctcataggctgtagcagggtttatccattgcaaagttgcaattaatcatctgaatggctttttcttctttaaatattcctttattcccttttagggcaacagctattttggcatatttaccacaagaacttctaggcacatcgtgttatgaatattttcaccaagatgacataggacatcttgcagaatgtcataggcaaggtaagctaggatgtatgaaagatcttaagttgaaagtgtccccttgcttctagactagtcaacatgaccttccagggaaatctgtccactgaggatgtagagtcagccagcctaggactcttcaggtcagaacatctgtgtgaagaggaagctgatacctgcaggcactgtttatcccccttgtagttgccctgtgctgactgcatggcagtttctgaaagacatctcttgttcagagggttttcccagaccctgtaaagatttagtatggcccagactgatctgattctcttttccattcaagcctgcactacctcctgtgttttctgtcttgactaatgctgtggcttcatgtgcaggctcctgagagagaccaacattgaccccttctttcactgtgtctccaccagatcctgttcattcacctcagacatgcatttccaaaagtctactttttaccacctctgccatcaccctggttcaggccctcgtgcctacttagagacctgtgatagacttctcagggtttctctgatccctctcacccccagttcatcttccatagttatcctatttatccccagatagattgagcctggtaacatcagcctgcttaaaaacctcctgctttagactcaagcccaaatgcttttgacaggcaatcaaatgtgagaccttccaccttctggccccagcccacctcctcagtttcagtccccatccctgcctgcagaggcctgtgctccaggcacactgacctcactggcctctccccaaccagaccctgctgctcctcaggcactgctgggttcttccctccctccttctcttggcaaactcgtgttcatccctcaaggctctgatctcttctccctgtatagccttccctcactactcttcttgagggcaggagtcatagcctgtctcctcttgtatctccagtgcctggcacatgagaagggctcattacatgttacatgaaagaatgaggttgaataggtgagtagcctctgttgatttggatgttcttagaaatgagataagttctatattgcccttgggctttgtgattgagataaagcatgacattttggacagtgccttctcatttgctggtggtcatgttagagctgattccagttagatgtataacatgcagtcagtaattccctagagcctcaattttacagactatggaaaatcatgacagcttcacaaatgaattgaaaggctctgagttagaccctcagaaacaacctatttcctgagtgttgaccactgcagtttccttggcttactaaagagcgatgtcgttggagctcaagtacctttaatattttgtattggatgtcctgtttaatactttggtctgagaaaacaacaatgtccatgttttctttacattttcagttttacagacgagagaaaaaattacaactaattgctataaatttaaaatcaaagatggttcttttatcacactacggagtcgatggttcagtttcatgaacccttggaccaaggaagtagaatatattgtctcaactaacactgttgttttgtaagtacttttcctatatctgaagctccccttgcttcaaacagatgcctagggttcctcatctgggaaatggggtgcaggcaacatccagtatcacatcctttaatgccatcttg

SEQ ID NO: 6755 - DNA, 2300 bp, Homo sapien
cgtaacattctataaaagtacaaagtgtgattaaatatagtggtcaagaaagaaactgagtaaataaactttgttatatatgtctaaaaaaaaaaagaaggggcagggggctccttgcttctagtgagcaaaggccttgagcttccacagccctttgtatttactggggagaaggagcagggaggaggtgctgttggtcagctgcttgatttgtcacaggttcacatgattgctaacaggcttcagttgtgcctgtagataatcacaagaaacactgcgcctggggcatgactgccctcagcattcgttttaggcggcagatgcagtttgtcagtttgccaacaatctgctttcatgagaacagtttgctgtttgctcatatagcctccagtggtatactgagttggtcaccaccctcattcttttggcctccaacacttgggaggctgaggtgggaagatcttttgagccaggaggcgaaggttgcagtgagctgagatcacaccattgcactccagcctaggtaacaaagtgagaccctgtgtcagaaaaaaaaaaaaaaaaaaaaaaggtttgattgatagtttgtgaccgtttgtgccacagcctgaaaataccattttcttaaatagtttgagggaagggaggatgctgtgatggaagacagatagggaaaatagttgatcttgatcaggtgagtattcatacaagtaccagaagatgtttcacttccattgatgcagcaaccttagaaattgtgttactggttactttggttcggaacctcaggaaaacttgagacaggtcttttctttttttttttttttttttttcgtttgagatggaggctcgctccgtcgcccaggctggagtggagtggtgtgatctcggctcactgcaacctctgcctcctgagttcaagtgattctcctgccttagcctcttgagtagctaggattacaggtgtgcaccaccacgcctggctaatttttgtattcttttttttttttattatttttattttgagatggagtcttgctctgtcgcccaggctggagtgcagtggcgcgatctcggctcactgcaagctccgcctcccaggttcatgccattctcctgcctcagcctcccgagtagctgggactacaggtgcctgccaccacacccggctaatttttttgtattcttagtagagaaggtttcaccgtgttagccaggctggtcttgaacttctgacctcaggtgatctgtctacctcggcctcccaaagttctgagattataggcgtgagtcatggtacctggctgagccaggtcttaattttggggaaaaagtgtttttttagctgtccatatttccccttgtggaattgaaaagaatttttatcactcatctctgaagtaacttatctgtgattctggggttgtcctttaacaacttactaagtggattttggaaataattaatattgcttgtcataatatggaatcaccaaagggtagtattaaaagaagaatatctaatggtatgtcttattttacatattttaatacttgaatatgactataattctgtactaaaaacctcacattttgttaaattatctaggtagtatttaagataacatatcattcaatttccttactttttaaaaaaatgtttaaaactttatgatggtttcgtagaaatataacttgtagaaggaaaatacatatgcattggtgtgatgtcataaagaagacatgaattaggtaacagggagccctatattcaaatcttacctttgcttttaaataattttatgacaggctaagtcggtgaattcatttggacctgaattttccttataggtaaaatgaaaaagtagttaggtgaacggaggtctcatctaagtttaaacttccacatttcagagatgtcagagttctctactgtttctgaaaatgttaccagcccttccttaataataagttttggctaccttatgctccagatattttatgctttctttacttttctttttccaggattactataaaacaggaataatccgttgtcctgatggcatatctattcctgaactgagagaagcatgtgactatctttgtatctcttttgaatatagcactattaaatgtagagatctcagtaagtatgatgttttgtgtgtaagtggtttgtagaattagaatatattggaacaaaaagcctgaaattagtgctatttacctagttagacttaaagtatttaattcaattataaagcattctagtaccacaaagattattaatgaaagctt

SEQ ID NO: 6756 - DNA, 2300 bp, Homo sapien
aattacttgtcccaagttaatacagcttagaaagtgatagagtaagagcttgaacttggttttatttctagtgttctttgcagtaccagtagaaatagcaaatatattagttattgaagtcaggatactaaaatatctttacagattgagactgtaaattgaatccaaccaggtgaatttagcaatgataatatgtttcctgcacttgggttcccattcaatcacaaaatataaacaatcagcattgtttaaaggcggaaaaaaaacccaataggtagtttagctgtaaagtcagcatgaattgtcagttcgatgtagatacttttaaaaaaaaaaaaaaaaaaaaggaatgtcaacaagtagttagcaaaatgaaggagataattgtcatcttctgatttgtgctggtccagagtaatagatcaatttaaagtttgcagttatgggaaccacagtctaagaaggatatagacaatatagacttgatttttcaccatgtccaaactgtaccttttaattgcaaaatcagtatctttgttcacactactatcaaatgaaagggcatgggcatgaaatagaagtttacatgagataaaaacttgtactttactagattgcatatgtaatgtgtgtatgtgtgatttatcattgtctcaatacagaataaatgctgccattgtgatattgcatacatttttgagtaaatattttccttcaacattgacactatgctttatatcatgaaaaaaaatctttgaactataggcttttttgtatttttagtattataggggaggattatcgacagaaatcaggaatatgacttgacagtgttaatgatactttatatttttacataatatatagaaacaataaaaaagtagatatttgaaattttggctgttatgttttcttaaaaaaacgttttaaagtgttcatattgatgtgaaaagaatagctttccccttttgtaaaaagtttaaatgatgacatttgattcctgaaagagtatcttctttttctcctttttcaattagcaaagccttctttttatgccgattgactaaagtgtgtctttggggatgaaaattaatattcatgggaactgtaaaaagcagctggcatttttttttggaaactttgaaagaaaaagctttgttgttcatagttttctgtgttacaacaaaagagaaaactatttgaattaggaaactactgagtagaaaacttagttcaaccgtaccataggatctagaggttcacctttctttaatcatgatttttaaattttctggagagtactagaatacattttttattgtttaggacatattttggaaattgtgtcttttctaaacagccactgttgaagggccaacaacatgacttgaaaaaatcataaagtcatttgtattttcttacataagagctttttaaatttattttcttaaacttgcccttgtcttatttcttcattcctgtctatcccagcatttgattgcttgtctttcagttctaggatgcaagtctaataattttgagtaggatttgttacatttatagttaagattgtgaaatgtaaaacaacctgacttgtcctgtatcatatcactttgtctcagtttagcttgctattatgtgctgcattatggcattaactgtacaatgaaaatagcagttttaaggaaaaagcacagataacctggtttccctttttttttcttcctggtaaaattggtattaaaaactcatctttttccctagactaattggttggtgttgttttctgagaaggggtaggaaagctctttagcttctgaattttgtcgtttattttattgttgcttacaggaaatctatactagtgttccctaccatcaaaaagaaaatgtttttaatattctttcttttatgatgtttgccagaataaattaatgataaaaattcttgaactaaatttaatgatataattccttttttcttttgtacatgaaatctattttcccttttgaaggaagtattctattgacgtatttctcaattatttactatcataggatgtttggatctggccgagaacataactttacacgacccaatgagaaaggagagtatgaggtggcagagggaattggttccactgtgtttcgagcgattctggtgagtgtttcttatgagtattgacttaatcataagacgccttcttggaggtacttggattagacgcagaattctatttgaatatctctctggagttattccagggtattgtttttccttaaataccatttaattcatct

SEQ ID NO: 6757 - DNA, 2300 bp, Homo sapien
tcccattctcttttgtttttgaagaacagcagaatgaaatgagctccaggacccatccaagtaggatatgatggtttgaacagattccagcatggaacaaagtttccatattttgcctgaagtctttcattcatatgattcttctaatgcttcctggaaaattccaagaacttgatgtgaaattatgcttaacagaacacccaattggcctatggcaggtgcattagtccattcttgcactgctataaaacaaagaggtttaactggctcacggctccgcaggctgtacaggaagtccgacggcttctgctgggcttctggggaggcctcaggaagcttacaatcatggcagaaagccaaggtacagcaggcacgtcttatatggtgggaggagtggggcgggggtgggggggcgccacacacttttaaagaacagatttcaccagaactcactatcaccagaatggcaaaaacagggaaatctgcccccatgatccaacgacctccaacactggggattacaattccacatgagaggtcaggtggggacatagatccaaaccgtatcagcagggttagaataacttttttgttttcctcctaagtgttgggcttattcgtagggagagtatggtaagccaaataaaactatagtatacatagtatttttcatatagtatacatatttttatatgtaatatgaaaataatgtgtccaaaggaaggtgagtggaaactacagcaaaataccagagtctttctttagaaaaggacagcttctattttgatgtaagagtatggctcctcattagccctaacttggactacagaatgacttcttctgagcagagcttataggagaaaattttgataataaatcaggactgatgacgtttttgttttttgcctgagaattttctcagagtttctctgagaaactgtatcacaaaattcctattagattgctcttatgtagacaacttgaaattattggcaatttccaatttagcaaaatgttggctataataacttagtgaattacgacaataacccgtttctcttaggtttctgatatttaagtgtccttacaggagaaagatgaagttatcttataattgtccagctcaactgctcatcttcttagcataaacactgatttggaaaatactttgcgtatcacacgtaggagcctgggaatgttctcatccgaactaaacagtggttaaaggtttttcaacaaagttcttgctgcaatatctgttttcatacccaattactcaaaccaggtcctcttcctctttgcttcctctccttgcaatgcccttccctctcttccctaaactggagaacttacttatgcttaagattcagcgcaattgtcactcccaggtgaaggctttctcaacaaggcctccccgtctgctcccagagctcatggcaagcagctcggcttttatcagagaataatgggattatctattttcctgtaggtcttgccccgggggtgtaagcttcgaaggcggagactgtgtcttttacattttttcccgtttttattgcccagccagcccatgtaggtgactctcggtgtttcctaggcggccaaactgaaggagtttcagctggcacaggggttcccgccaaccgagcgtttaaaaataagcagcgggggacgttagggaacagagggtgtccctcacgacgaccgactctcatcaggtccacgccggcagaagcgattttgcagtttgctttgatgaggaaaacgctctccctgaagagtccctgcactatttctccaactctgtgaccgagacgctgtccacttttctctaacggtgacaggaagtcaaggggaaaacgtgggattcaaaggtttgaaggtaacagccctcagccactcgggctcgaggcccgcggttgacccgagctgatgtctgtgaggagaggtcgcgcggcgccttcctctccacgcgcctgagatcccacccgtggccgccgcgccctcaactgccttctccttcggtgccccgcccacccctgggcggagagcaccgttctcgcgagaacgctgctggcctcgcctcttcgcattgtgagctctcgcggtaagaggctgaggagccggcctgcaacctgccggggcggctccgctacgcgcagccgcctcagtggcttcctccacagccacctccggagggatctggctgaggaggaagtggaggtgtcactggccccggcctttgccccaatcttgtgtgggcactgaagggggactacaggttcgagagtgagtggact

SEQ ID NO: 6758 - DNA, 2300 bp, Homo sapien
cactttgggagcgagaggtgggaggactgcttgagccaaggacagcctgggcaatttagctacactctgcctccacaaaaatttaaaaattagctggttgtggtgctgtgtgcctatagcccccactactcagaaggctgaggtggaaggactgcttgagccccgaaagttgaggctgccatgtccataccactgcaccactccagtctgagtgacagagtgagatcctatctcaaagaaaaaagaaaaaccatctgtatttccaattcttcttctcaacagagtatagcagaaaaatgacacacaaacatcacatgtagagtttgcatcagaagaggtctttaaaaagatcaagacaacagatttttacagttaaaagagacctcttggttatctagttcaactttcttctatgtatgaatctctatagtatgcctgataaatgctcatctaccttctacttgaatattctcagtgatggagaaatcactatttgagaaggtacttgattccttattttgacaattataatgtccaagttaaacccaatgaacccagcccttccttcttaaaccacagagaatactccttcttccttatggtaaccctataaataattaaacacagctataaagtcatcccgtctttttttcctcagacttttctagtttcattcaactacttctcatgttatagttttcaacattttcaccaaactgattgatatcctcagtgtatgttcccatttgtttctactgcttctaaaatggagcctggagcaacactctaagtgaggttaacccagagtggagaatctcctaggacaggactagtatatatctctcattataaactccatacggttactattcaaatttgtactggctcttacctaaggtagagtcaaaccttgacaatggctagtaggaaaaaggatgacatgaagccaggatgggaccagagctgagagaactgatcccactctggcaccggatctttggtgggaaggcaaagctgtctaaaggagtcctagatatatcaaagacattcagggtgttttgacaggtggaccaggaaaatattgctggaggaatatttgaagtcagacatgtggcagcatcatgcctccaataggttttggagcaggctctcatcatcccttagggaacatgagaataaagacctaacccctaggggaaaatgttgcaaagagcttttgctgtgttttcagatgactttgcaaattaaagtcaagaagactggagttcaaagaagggctgtatttctaggcagaaactgaggtagtaagaatctggtgtcataaagacctttgttgaattccatcttttctgctttccaagcctaagtttcctcatgtaaaaatggggataagcacttaactttagtactttaagtactaactttaaaggactgctgtgaagatctagtgggataatatatgtagttaggcatgcagttagtgcttatcaaatgttattattatagattaagatgcacaaataaaatataagttaaataaattttaaaataatttcacttttgaagcttttaaagtaattatgtactaagagcattttctcaaattattcttaacacttcctttaagaaaagggctatatctgttttttgaaagatgaccagaagtgacatggattggttgaaaatggcttgtaaagtaagcctaacatttatgatttattaccataaaaactgtaccaacagtacggttataacaaatacacttatttttgggttttattttcaagtaagataatgactttatcataaacctttgaaatcagtctttttacagtataaattcagattcattaatccacatagaatttttctcgatggtataattctgtatttgttaaaagtctttgcataagccccttgtcaagccaaatgctgttttccttttagtatccaattatctgaaacttaagaagagtgtgcaccgcccaatgggtgtgtgtatgtgctgctttgaacctatagttgagatccagagaattgggagtgacatcatctgtaacaataaaagagcctctcttggtaagcagaagacctatatataaaagtcaccatttaaggggtctgcagtccaattcatcagttgtctttagtttactcagcatcagctactaacatacctgaacgaagatcttgttctaagacattgtatggtaagtaaacttaaaaattcacttctgaatctcatgagattttgataatcaagttattatttaatgtgtaccatttctacaaataccatg

SEQ ID NO: 6759 - DNA, 2300 bp, Homo sapien
gtgggggtctgccggaggcacacatttcatacacattgacttgaatcaaatgagatccctttgtgctctcaagtgtacggctatttttgagaatcatttattaagtgattacttaataattacatcatattttcctcagaactaagcattactttgcttttgtacttatatcaatttttaaaattaagacatatgcacaaacaacaaaaagtttatgaagtattttctggaaatagtgtctatttcctatagtgatattaccctatcagtatactgataaaccttagcagtggttaacttagctacacatgttctaacatgctcctgaatcccccatgctgggttacatcctctttctaggtattccctcatcctgtattacactggcattgtttatgtctgtctctccattaaaccctatgttctgtggaatactgtcatatccaagtttatatgcctagtgtagtgacaagcactttaaataaaggcatttacctgatttaaacaacttaatgactaaattaataaatatgaatactgtaatctttgttttgttgcttgtgttcttttacagattagaatttggtccatagttcttacgtttgttttgggagaatattttgacccacttctaagaagtgtttcacctgatcctggctatttatgactatggctattggactggatgggttccaggcatacactgtcttgcctaaagtagcggaatgcgacatccctgagggtaagcaagtgtgttagctttgtgttctgtgccctcctccagaaatgacagtacttgctgcaagactgtgagctcatcgaggcagaagccatggcattcaaattagtttcctgagccagaacttaacatctgccacaaagtaggcagttcagtgagcttttgtagtttccaactggatgcagcactatgactgcttttagctactaacagggccaggcactgaaacaagctctaaatccccacagaaaaatcactctgagccatccatccctaaataccaacctgtgcatgctattcaccgtgccaagagcgttcactcatttttgcttctcacaaatctttttttttcttcctatggcttgcatgttttgaatgacagctaaatcctaatgcggactgtttatacaatggagtcccacggagcccaaagattgtggtaatattattacagaattctcatgatccttttattattttttaaaaatgagccgtatgaatgtggtaatactattaagtgtccggctcgatgaattcctccatgtgtacacagcccggaacgaccaccaggatcaagacgcaatgtttccagctttccataggttccctcgtgccccacccctcagaagtaaacgttattctaactcctatcactaccggtaagttttgtagggaattattttggaggaagtggaaggtggaatgaatgggcccacagtcccctgggactgggcgagacccgtggaggctccaggggtccgtagagctcttcgctctcaccgacccgggccacacccgccaagctggtagttctccgaacggatccctcacgcccagcaatggccggagggcccccgggccccaccataatagcgctaagcacgccacaatggcagccccgctgtctcccgcgcgggcctcgctgcgtgctcccaaccttgggagttggcgcccctcccgcgcgacggacagccgggcgtggccctgggcgcgacccgacaggacgccagcagccggcgggggcgctccaggactcgagatgtggggcgcgggcccattggctgagcattcccccgcgagcctcccggccgcagggcccacctcccggccctctctccgcgcccccattggccgttcgcgttccgcgggcgtccgctcccgccccactcccgcccggagggaaaccgggttgggggtgagaggctaaagcagggaggaggatgactggtcctgcggataagggtgtgcgcgagagccaatcaaaagcggatgtcgaaaagaggcgccgctccagccagtcacgtcgcgaggtgcggtcggggccggctgacgcgactgcgggcctcagccaatgggcgtgccactgcccgtccgctcttcagcagccggtcgcgggcggtggaaaagcgagtgaagagagcgcgacggcggcggcggcggcggcgcagctattgctggacggccagtgggagagcgaggcctgagcctctgcgtctaggtgagaagggggtgcgccagcgggagcggccgggctgcgggctcctcctcgcctggctcggga

SEQ ID NO: 6760 - DNA, 2300 bp, Homo sapien
actgtttcttaaagaattcctggctgacattttacatttcctccaaattccactcaaatagttcatttttttaagatcatctttgtcctcttttgccctctttcagcaaatttctgctagatcattgagtttattagtacactttctatattccatataaccagaggtgacagtttgttgtcctcacttcaagccctcaccaacagctttcttaaaaccctttaaggcttccattaataatgttttcctggtcctttcacatttcactactgatcacctcacaggccttagagattttgtttaccacttgaccctgaagccaataccacatgttttaggtttttattatagcagcccctcccagtgttgagatctgtgttgagatttgttaatctgttttacataacaagtcacctcaaacttagtgtcttaaagcaatcattttatttgtgtgtcacaatatctgtgggtcaggaattctagaagggttagcttgatggtaatggctcaggatctttcaaatgattgtagtcagacagggactggaggaactttgctgtggagggagtggtaaaggggggaaggggacagagtagctggggtggctgggcatctctctctctccagtagtgtcataccctctccatgtggcctctccatatggactagtttgagcttcctcgcagtatggcagcctcagggggagttggacagcatacacagtgactgaaggcttcaagggtgagtattcagtgagcaagacagaaagctctacacctttctgacctagcctcggaagtcacatcatgtcacttccacctcattctgttggttctaagttattttcaactctcattgagaagacagtcaaggtgacattgtattgtaggtgggcatgtaggatggagataatatcataggcacctttggaaattaatatctttcctaaataggaaacgttaaggaaacagtcttcttaactgaggtttgtgctgtgtgaggctttctaagtatcaaagcaggacagatccttgacctccgggagcttataatctgaatgcaacaaggaatataaaggtttttttacttagacaattttgtaaatgttaaatacaaagtcttataatttataatatttcatttgttcagaaatttattgagcacagtaatagactttacaccttatattggggccttactatgatgcctaattctacattaaactgatgtcagtcatgtcattcatttcatccagtttacttgtttacataataattctgaatgtgagctagataagcatctgacctgacattttttaaaaaatggctccatgatcttatgttttggttaactagcataactttatctagcttaacttctctaaaccaggtatctatttttaatctgtgtacttctcagctggagacatttgacaacatttgcaggtatttttagttatcacaacagggggagggctgctaccagcacctagaggccagggatggtgacaagcatcttatagcatgcaagatagccctccacacgaaagaatgatcagacccacaatatttatagtgccaaggttgagaaaccctggactagataatcattaagatcttgccttactctaaaggattgtgattatttttttaagttgccataataaagaataaatacatattcagaacatacctggcaatgtagtcataaacatctgttctaaggtatgtttaaccaaggagtgatggtgcaaagttttacatttcttattccccaatagttttcaatccagtatttttgttgcatgataaatattctataaatttcacacacaaatatatggcctttcaaatttcttccccctccccgattttttattgcaattattttttgaatggctgaattactgattgatgttagggtgattgtgtcacttgaatgaatctgaagataagattaggtgagagaattatcagtgaacaagagttaagaaaaactttttaataaggtatatataggaaaaccgtgttagctgtgtgtgtgtgtgagatttaagtatgctaaactggcgtgatagtatatattgatgtagtgacaaacttgttgtatctttttgtttagaaaaaaataatcacctaatcttttctaagagcagcatgtgtttttcccccagatgctttttatctacagaactatccctgtccagaaattgccttagatgcttgataattcgttttgtgtttgagattttattttgaagttactttattggatgaaatatagtttttttttacatagtt

SEQ ID NO: 6761 - DNA, 2300 bp, Homo sapien
tatttagggacatagagaagatttacagatatgttgattttggtaaatgattagtgctgactttcattgagtgctcttagcttgtcacattttttaaatctcacctaatcccttcagctatcctatgaggtgtgcctgtggcggggtggggggggtactttttaaaaaatattattattattctattttgcagatgaaaacaataaggcacagagaagttaagtaacttgcccagggtctcgcaccttgtgtaagagatggagcttagatttaaactccatctgattccagagccactttcttaattattatcatattctgactcttcagtaaattgacatgccataaactggttccagccaaccaggtgactgcattctacctggggtttggaaaaaaacaagctatggggcaggaggctgtaaaacaggctgatgtgctcaagctgattaaattcctgtagtccaggctgggtgcggtggctcaagcctgtaatcccagcactttgggaggccagggcgggcggatcacttgaggccaggagttcgagaccagtctagccaacatggcaaaaccctgtctctactaaaaatataaaaaccttgattttactcttgatgcttcttctttaagagttgaatatgttagaatgttgaaacaagatattattacacaaaataatatcattttgtttgtttaaataagtattatcatttcctttactttatccatgtgcgctgggtgtctttgtatgcaaagcagtgtccttagccagccacgtgctattcccccacctggtataccctgccctcagcctactcctcactactttgctaacacctattcaaatataacttagaatattagcttaaaatatcactttccagagaagcttttcctgaactccccttctctcacccttttaaaatatattctcgtatccttttacattttcctttcatagcctcttcctagcttgtaagcaaatgtgtgattagctattcaactgttgtctcccctgctaagatacaagttccatgaggtcagggcttgggcctagcctatcttgttcattaccatttctcctgtgtttagcagaggatttgttatgcttaatgtttgaacagtgaatgaacaaatgaaggagacatcagttttggtgtcatgttgcttacattttaggagtgttgtataaaagcatgtatctacaggataggaaacaggtttagaaggagaaggagctcatcagagaaggggcttatcaaggccataacatttgagctggcccttggagggtgggccaacaattcagagggagacctcaagggtgaagcacacagccaggcaagcagagccagctgagtaaattgctgcagtgtattatatttatttaggaaataaaataagaaaagagtaaaacagcaaatgcttttttttttttttgtgcagaagcacttagatataggttatcttttgggacccaaagccaaatggaattgcttagctttaagatagctgtcttcatgcattgatgaaaattataaaagctgagatagcaaatataagctgtgcctttgacacatagaccattcctcactgggaagaaaggaaaagagccatgaatttctgagaatagatgggtaagatgttttctttgttcttctgccttatgctgtttttctattcccaatgagaaggatgaggtggcagaatttcttagcttagtcatgaagtctttaaaacctagtccttcacttttgaagctcaaaatcaatagaagaaatcacacgaagatcaataggttcaactccataaaaattaaaattatgtcaaaacccctcacaacccaaattaaaggtgaacaataagccagaaaaatattcaccacaactctgatggccaaatccagttcagttcagttcaacatgtaccacttgtgcattcctaggttcctagaaccatgaggtcctgagagctgtaatgttcagtaagacatcatgtctgttcttagagctctgctgacagggcagcatgtaaaagctgaccattctgatgcaatgctgtaagtgggagagttgtgatatatgcgcaaggagaaaagaggaaggaagggcatctgatctagcctggggctcagagaaggatccctgaagagaggccttggactaataaaagttgtgtaggagttatccaaggcaacaaggagtagaggaggagggtatttaagacaatgagaaaaatgaataaagacatggaaatgcaaaacatcttggtatgtatgtgcatattggggtggttac

SEQ ID NO: 6762 - DNA, 2300 bp, Homo sapien
tacttcatgcccacccatctccaacttagatttgaaccttttgtagatgaatagaggttcaagagcacagatttgagctttcagacataaaataagctttgtgaagacaggggtcacaatttattcatttctgtagtttcctgccctctgagataagatcaggtacactttcaagaaccacttattttagtttgtagcatacatcacaattataattttaaaagattcatataattatgtatttaatatttgcctttgccacaggcctgtaaaatcctcaaaggcaagtaacatatctgtgttttgtatccaagcactgagcacgtggagggtctttgtcatgaatgaatggatggatagaaggatgcatggatggatggatggatgaatttttgttccgtcttctacctaccggtcagcacagagtctagctccaaatctacacttaatgaaagtttgctggatgaatgggaccgtgcaacttggagtgcagcatgagctctgagccagtcgagtgaagatgcagacaattccctcagcactcagacatggatctgagcctcacctcaaaaaggagggccgatcagctggatcaggtgctgctagggtcaagaagggctagggatgagagaagagcataattggcttcagcaaggggttactttcaggtgacctctgagagaaggcgtccagttaatagtggcagtgggaattccagcacaagcactaaggagtaagtgggcaggcagggaggaatggagatctcccatgcacctagcgccctgggcctgtttgtagcattatgaaagagaaaaccctgacctggaaagcaaaggagattgcttgctaattgtaggcacttgaggtgtgtcgaaggccctgggcaaagagaagacgaggaaaccaaagcttctgagggcacctggggagggatgtttgtgtgcactgagaggcagggggcttatggtatccccaagcgggtgagggagcaggcgccactagagaccaactagagtgttttatatgggtcatatcatttacttctagcatatcaccccactacctctaagaaggatgtactggcacccacccccacttccttgttctccagagcaggaaacaagcttggagagtgcgataactagcccaagcttcacaatgggtgagtggcaggactgaggtttgattcgggtctcttcccagagagacactgggagagattcttgccccaggtcttttcccttcaggccctcaggctcagcacctctctgaacatctgtccctggggagtgagaatctgaactaaaatgtaagccaagaaaacacaggctcttcattgaatctttggaaactcctttcctgggctgtaggaggaccttcctgagccttaggcacttttgcctttgctggctctttcctccaagtcaagcatattttatgactgtggaggtataaatacaaatatattaacattatatagtaaaacattttgtttgacataaattttttcttctgatttttacagaaaacattttcatagatctccaaaagtatcgtgggccctaagcgctgtagctaagtcgtttctcctttctcagcctccagtctgacatgttccactatggccttgggaagagcaatgggcccggagtcgccgcatctaaccctgctgtaactggtcgcaagtcacagtttgctcatctataaagtgagcgaaagtaatgtaatctttattgggagtagggaacatgaaggcgagtcgatacagtaagtaagccgccaagcatattgctaggcacagagcaggtgtgcaacaaaagttatttctcaggctttccctcctctgagcgccgtcctccagagggtccggagtgtagctgggggttggagcagcagcctcctaggcgatgggacagagcccacagggtccggtatgccacggtttcttcgtcagaccctgggaatccaacgtcgcaaaataaacacggccgcgccgctaatcgccagttcggaggaaacaaaacagcgctgcgctgggggatctgggcaaaatcagccctccctcctcccgctccttcgccgcggccctcccctcctcgcgctgctctcgttcgcttggctcagctcagctcagctcagcgcagctccgcggccgccaagccgaggcgggcacggtctccgagtcgcggacgccagctccgagctccctctctccgccgcgcctccgccaggtcgcgccttcgtcgggaccacttcgggcaggagtcgcgtggcgaaggcctgcggccgcggcacaaagt

SEQ ID NO: 6763 - DNA, 2300 bp, Homo sapien
cagctgccagctggactgaacagaacagttggtctctggccaaggattccccatgattagcagccttggggtgcagagtcaggccaagctgccttcaagcctcagccccctcctagctgtgtctattagttcattaaccacttattcactttcatggcctctctatgagacaggataataattctaaccccacaggattgtcatgaggggaaaatgaaataatatgggactgccacccgctgtgtgctttgcgaatgtgactctttcctttccagccactctgagtggttgctgccatgtatctcacatggtcccagccactcctgagaatctgtgtgacacaaagagagaggttgaagagcggcctctgatagcttagactcaggatgttattcccagcaactgggggtgtcggccaaaggtctctgactctacagctggtccctgcttcccagctgtgagctgatgggtacagtctggcgctggacagtgcctgctattggcagccttctgagggcaatagaaacaggaagctgggggagatgacccctctgatgggaggttgaggtgcaaggatcacttgagcccagaagtttgaggcaacagtgagccatgatcacaccactgcactccagcctgggtgacagagcaagactctgtctctgaaagaaaaacaaaaagagaaactggatagggtggtagtatatggttctctccacatttgttcaatggatgggctcaggacagagaagggtataaacccacagtggccaaaggcagaattcagtgggagaccacgaatgtggatactctctgtccctctcattcttcataatccaggcagatttccctcagagtgaggaccaacccccagaactctaatataatggtctctgtatttcgtttccaggagagcagcaccttcagctgaattttccgtggacagaacgcgccatttaatgtccttcctgaccatgatgggccctagtcccgactggaacgtaggcttatctgcagaagatctgtgcaccaaggaatgtggctgggtccagaaggtggtgcaagacctgattccctgggacgctggcaccgacagcggggtgacctatgaggtgtgtgtgtgtgcctggagtggtgagtggctccttgcctacccgcttcctgagtgtcctggacacagaggggatctgtcccaggctctgtcctaggtgaactttcagtctggctggggaggctggcatggtcgcatcatcacatatggtgtaatttgggctctgggaactgtctgtgcagtggccaggagagcacggagagggaactgctaaagagcagttcccaggtgagcaggggacagcattccaaagccatgactgcaagagcgaaggtttctggacagctgggctaaggagtttgcattctgtcctgaatgtcatatttctctgatatgatctattgcattgaaatctggagccatcagaaaaccaatgggagaacaatctagaacagacatctgcaaactatggtttggaagacaaatctgccctacaatgtgatttgtcaataaagttttcaaagccagttacactcctccaagtacatattatctgcggctgttttctcactaccacagctgagttgaatattagcaacagacacaatatggttcacaaagcctaaaatatttagcatctggccctttactaaaaaagttttccaatgccgggtctattagaaagagtttgggattcaggccaacctggctcagccgtttcctagctgggatggcctctctgaaacttggcttcttcatcttagcacaatcctaccatggacatggaagaattttaaaatatagttctagaaatttctcagcacagtatgtggcatgaacacaattccataaatataaatagtagttatgcttgttaaattcctatcaaggactttgctctgatccatataacaaatggcttttgtgggttttcccaattttatttcttactctctacctctgtatgttttcttgcagtcacccaacaaacccaccattccccaggagaaaatccggcccctgaccagcctggaccatcctcagagtcctttctatgacccagagggtgggtccatcactcaagtagccagagttgtcatcgagagaatcgcacggaaggtactgggttagaacccactctggcatcgacctttcccggtaggagtgccagggagattgtacacccttctgctctagaatcatagagtcactggcagaaagcacctcaggatatggaattcctgggcct

SEQ ID NO: 6764 - DNA, 2300 bp, Homo sapien
atgacaactgtgtatgggatcattgggaagatgaagccatggcatgtaaataagccttgagcttttcaaaattacctacaatgagcctgcatgtgtctggaaacaatgccaagatgagggactgaaaatgagaagacgttcatgtgttgagaggaagggataataagaatcattctgcttatttagattagatatttattagcaagatgttaaactattatctttaaagggaagtggatggctgcttccatcccaggagcacccaggctcactgaagtcagtctggcagcatggcttttcttgtccccagataagctggtatggggagagggccagtggcagctcccataggttcccagggaaaacatgtcaaacactctttccagatgacacccctgaaacctgcatctactccaactggtccccatggtccgcctgcagctcctccacctgtgacaaaggcaagaggatgcgacagcgcatgctgaaagcacagctggacctcagcgtcccctgccctgacacccaggacttccagccctgcatgggccctggctgcagtgacgaaggtgaggagacaacccagaccagccaggggctggcaggagttcaggaagggagggtctgcctagcagtcagacagtgtccctggtgagggcacaaggaccctgacagtagatgtcagtggggtccaccttgggcaaactcctatctgcaacagtgtcttgagggctctgaacacagaatctctcttatatcaaaggaattcttgagattgaccaccccctccttcttttactgaagagctaacaaacatagatacaacttatgacaagttacagataacacatagcctgcttctgggccttaactccaatctcttcttaaggagcctgttaacagtcagcccagattgaatctagatccattgccctaattctgtcatttacagcccctcatctgtgttccacctcagcgtgagtcagagcactctcacttctttgtgtcaggacctttgggctgattgcagaaattctcagtctatttgcaacagtgcaaaggtcagcctttaagtataatcttgcaacacctatatcatgatggctcaagcttcaagattgcactaagctgattgctgtgcaaaggtcagctatctgcttcccaagccatgacccctttctctgcctgatagatctacgctattctgccctgatcttataggatgccataaggcaatgggaaggcactgtataggctggactggtgtatggcagggaaaaaaaccacttccaagccgaggataaagaaagcaagcttatcccatgcaggtcattaattccttggctctgcctagagggaggctcttaaacacctctcccagtgttgcactttcacgatggtttattgctagctcattttgcccacaataagcactttggaggggagtaaaccctccccgtagactaagtcattcctacaaacaggcgggaggaaagctgggactggcctgtcaacattgaagcctctttcttggggctgggactggggagctaagctgaggagctgaggtccttaacctccccttccacagggaaggattgttcctcatacaaatggattatgatttatcttaaattatatgtagattaaattatatcttatcttagatatatgcgtgtacattttttaaacaccatcctttccatacaagcatctttcgaatgtattttcatgagataaagagtaattctgagtgtcccatgcacctggaaaagaggcatttcctcttagagaactttgccagtttaaggatttagacctcttaggtgtgcagacaacctcaactgcctgactcctcttgattcccgctggcgggaagttcccaccgcgcagcctggcaggcgcccctgccaccgtgcactgctgcagcgttcactcggtgtgttgcagacggctccacctgcaccatgtccgagtggatcacctggtcgccctgcagcatctcctgcggcatgggcatgaggtcccgggagaggtatgtgaagcagttcccggaggacggctccgtgtgcacgctgcccactgaggaaacggagaagtgcacggtcaacgaggagtgctgtgagtgggggccccgggcgggcaggcgggcaagtaggtcggggaggcagcaggtgcgactccaatgccgctggcctccccagctcccagcagctgcctgatgaccgagtggggcgagtgggacgagtgcagcgccacctgcggcatgggcatgaagaagcggcaccgcatgatcaaga

SEQ ID NO: 6765 - DNA, 2300 bp, Homo sapien
gttgaggaacctctaggaagtacttacttttgtaactttcagttttcttttgatttctaacttccacagtgctatggctctgttccggtatgttgtcctttttgtcttttattgtttgctttggtgatggcaatgctatttctacttagttaaaagtatgctgtgtcagctcacaagcatgtggttagagatttcttcaccagaaatgtatgtataaatttgttggctttgtttcctggaagacagtgatgtgaaaccatgctttaaaaacaaataaatggctgggcatggtggcaaacacctgtgatcccagcactttgggaggccaaggcaggcagatcccttgagcccagaagttcaagaccagcctggacaacgtggcaggaccctgcctctactaaaaataaaaaaaaattaggcatggtggcacgtgcctgtagtcccaactactcaagaggctgatgtgggaaggtcacctgagactgggaggttgagtcttcagtgagctgtggccatgccactgcactccaacctgggtgacagagtgagaccctgtcccaaaaccaaactaaacaaaacaaaaacaagtgaagcacataaccctagcagcaggattgttttatcatgtagaccatgaattaattaacatttcgtttttttcttcttctttttttttttttttttttgagacagagtcttgctctgtcaaccaggctagagtacagtggcgcaatcttggctcagtgcaacctccacctcccgggttcaagcaattctcctgcctcagcctcccgagtagctgggattacaggcccgtgccatcacacccggctactttttgtatttttaggagagatagggtttcaccatgttggccaggcgtgtcttgagctcccgaccttaggtgatccacccacctcggcctcccaaagtgtttggattacaggcatgagccaccatgcctggcctaactttttttaccctatataaggataggtgagttgctattcctgtttatgtgaattacattatgcatgatgggtaggacaaggtatctttttgaggaataatggagcaggaaagctactggaaaaattctaataagtacgtgtatttccttcccccaatcatatttaccccaacaaagtaagtagtttattgagatttcttttactttttgtgtatatatatatattttaacttaaggatgtacctatttggttagttgtacaccatttacttaacatgtgtttacttttttagctgctaagcatgcttctaagctttggatgtacaaagacaaacctgtcttaacttcctagcctcagaggacatgatgacgtggtgaaagaataagaaaacacaacgaaaaattttactgtggtattgttagagacttgtcagtggtaaccagatggtgtgatgggagctctgagaaggtgcttccaaaacagcaccaacacttagggggaagtttcattgctcagggcttgaaaggttagtgaggaagaatttgagagtgtagagttgagagagaagggatgacatcccaggaagaagaaacagaatttgtgacggcataggggtattttatatgaaggaatttcacatgtcaaattttcctaaaacagaaattgtcctgtctaaaattggtggttctgtgaagctttctgtgtttactcggcttccttccttatcgttaattgttcgggtaacttgatcagtttatatttcaaatgcatagccttgtggcacatacgttattttgaagagagacaaggtaaatttaaaagttagataaacttagatataccagtgctatgtagaacctgcccgttatcctgttggaatgccacagggcacaaacagttatgaagtagttgttggatatatgtatattggtgtactaaactaatgatactgtattgaggctgctaaatttttggaatagaatattaaactgggagaacaaattacctaaaacgtttagaaggaacaataccttgagctcaaacagggctaggaataattcatattctaatcaatcaaagtagaaaaccttatatttcttggagtattggatagtataactcagaagggttttgtcccagtagtggggcaaaattagccacactaaatgctgttctggtaccctgtaacaaaacctagagcatgacctgaaaggataatgtatttccaaataactgcatcctagaagaaagctcaggaatgtgtttaggaatacaaaatatctgatacctgatacgtaaaagtcccagccttctactcagaaattccca

SEQ ID NO: 6766 - DNA, 2300 bp, Homo sapien
gcagtggtgtgatctcgtgatctcacgatcttggctcactgtaacttccgcttccagcgttcaagcaattctcccacctcagcctccggagtggctgggactataggcgtgtaccacgcccagctaatttttgtaattttttgtagagacgggttttggcatgttggccaggctggtctggaactcctgggctcaagcgagcaatccgcctccctcggcctcccgaagtgttgggattacaggcgtgagccactacaattttattttgctcatgattttgtgggtcaaatattcaagaagggccgggagtgatggttcatgcctgtaatcccagcactttttttttttttttttgagcccgcattgtcgcccaggcgtgggtgcagtggcgtgaacttggctcactgtcacttccgcgtcccaggctcaagtgatcctcccacctcagcctccggagtagcggagagtacaagtgcacgccaccactccggactaatttttgtatttttagtagagatgcgtttagccatgttggccaggttggtctggaactcctgggctcaagcgatccgcccgccttggccttccaaagtgctgggattacaggcatgagccattgcgcccagccatcccagcactttgggagttcgagactagcctgggtaacatagagagaccttgtctcttaaaaaaaaaaaaattacctgatcttgatggcatgtgcctgtagtcccagctgctagggaggctgaggtggaaggatcacttgagtccagaagttggaggttgcagtgggccatgattgtgccactacacttcagcctgggtgacagagggatcttgtctcaaaaaagaaaaaaaaaagatttttaaaaaaggaattcaggatgggctggcctggatgggtatttttgcttggggtctctcacgcagttgcattcagatgctaacaggggatgccgtcattggaaggctcgattaggctgagtgtccaagatgtctcacttagatggctggcaggtgatgctggtgatctggtgggagctcagtgggactttttttttttttttttaaatggcatgttgctcctggccatcaatcagacttcgactggcatgcctacatgtagcctctttagcatggcagtcttatgatagtcaaacttctgactttgttcctcccggagtgagaataccaagagaacagctgcatggcctcttctgatctagcctgggaaattaggcagcatctcttctgctgcattctactggttccaaatgagttaccaagtgaagtccaagaacttgcagtcatgttccaagattgctgtaaatgcttcctgtgtagcagcactgttttatgtgctcatttaattcttattaaaaaccccatgaggccgggtgcagtgactcacacctgtaattccagcactttgggaggccgaggcgggaggattgcttgaggccaggagttcaacccctcgcactcacactcctcatatccaattactgcacatttgtcacacataaacatagccactatgacactgtactgacacatacaaaatctgtcacattccgtcttgcccatgcaagctcaatcactgacttattctccatgctcagccactgtcccattcttcacactgtcacaaccaccagcccatcacacactcaattactgtgacacagctctaatcctcaatcactgtcacatactgtttttcacacaaatatggtcaccatctgtactcttaaagcagggtatgtactctcctataaaattgagttaatatgccaacagccctatttttcgcacacgccgtcacatattgtatttttcatccacacaatcccttacatagacaattagggtgacacactctttctgccttcgtcccactcccaactgacacccactcccacactctcacgcactcgctcactggctagggattagagcggtgtgtccgtgggggtctgaagcccgggttacctcccgaacctcagccccaagcggcgcggccccgcccctccccgccccctcatgcatatgcagcacctcagcctggcagcccggcccccagacggccatttgtggcggcgctggaggctgcgttcggcaggcgctgcggagacgcgtagaggagcgcgccccccggccgctgccgcccctggcccgtgccgtcaccccgcttctccgcgcctcgggcggtacccagccagtccccagcgccgcgctaccgcgctgaccggccctccagacgcctcccggtacccgggaccccagcccggccgctc

SEQ ID NO: 6767 - DNA, 2300 bp, Homo sapien
tgcattgatcaagttcaaacatttggagacattctgcagctggttattgttgaactgatttataaggtaagaatgataatctatgatgagtaaaataaactcagcagtttaagacagggttaaatactttctttctgggataattattgctaggataatatattttaatagtataaatattttatagcatagcctattaaagcctttgtttcttttacttttggtttattgtattttccaagtagaatacttgcttatatcctttctaaacctccataaagattttgataaaaattcatggcttgagccagtgtagctgcacataaatcattgtgaacttcccagtcactgaatagattataattaggctttaaaataaaattcaagattttcttgagcatacatcagactaaaatcaaacaaaaaagccttaaatactttttatgttccctgtttgtaaaagagaatagaaaaactttaaatgcattaatatgacattgtaggccattgacaggaaatctaaaaccagctaagaattttggatttttaaatcaaatactatattggcaacactttactatgatatatcctttgaaagagttggttacatcttaatgttctgataaaaggtacaagaagatccaactttgctattgataccattagaggccaacaaaacataggtccagatggctttattaaatatgatagtatggtcaaaacaccggtagacattactaactgattatagctgtcttgcttctgtaagaaaggggctcctcttaacacaaggtaccagtagtttggaatgggaatttaagatgaaaccaagacttactgtacagtttttttttgttttttttttgttgttttttgttttttttgggcagagtctcactctattgcccaggctggagtgcagtggtgcgatcgcggctcactgctgcctctacctcctgggctcaagcgattctcctgcctcagcctcctgagtagctgggattacaggtgcacgccaccgtatccagctaatttttgtatttttagtagagacggggtttcaccatgttggccaggctggtcccaaactcctgacctcgtgatctgcccaccttggcctcccaaagcgctgagattacaggcgtgagccaccatgtccagcctatagttctttttaattcatgtgtatagtttaggataccactgaggttctcaaaattagcggttccctgctatctaatgacttaagtagggtccatgttatagtaaaaggaaataacttttaagtcatgtccatgtaatagagttttgactatatatattttaggaaaatctactacaaatactgacttcaaaagagaaaaaataagggatatttactatacaagtaaaggtatcaggatacatttagaatgggatagaaatttttagttttctctccaatgttgaatatagtctcaaataataagtagtagtacttgggaaaaatgtgttatctttcttgcttgaaaaactggtattttccttttattagctattgagatttatatcatccgtcatgtttccctttggcatccagaataaacatttaggaccaaatttaatatcctgtgacagtacccatattagtgtactgggttaatgtgtccttacttttgttactttacattttctttttctctttcacttgtgtatagcatacacattttaagtcatcagaaaaccttttacgaaacagtaaaaatataaattatgatgggatgaataaataagtgcacagctgtaaaaattattttgttcacaccatcctatctagtaaagccatttcttatctatgtttttgttggcctctaacttgcttctttctgaaattactgatgttgtgtcatagtgtctcatcccattttgtctgatattttcatgtcctcataagactgttcttagctttcatattgagaaaactagcatcccataagctgacattcatgaaaaaactccatttgaaaacaagcgttcctgaaatcggttgaaatgttaatgttttcttctccaggtctgtcatgctaatccatcagaaagagctcgttttattcgctgcatctataacttattacagtcatccagccctgctgtaaaatatgaagctgctgggacattagtgacactctctagtgcaccaactgcaatcaaggtactgtgtatttcttttggggccagattagatgatagattttctgtcttagcactcatgatttagtgacatttcaattcactatgtggttacatggcacagagagaat

SEQ ID NO: 6768 - DNA, 2300 bp, Homo sapien
atttggggcaagtccctattctctaggccttgactttttagataccacaatttctatggtccttgataaaatgacaaggtctttgctctgcatttataatttaaaggcattcaaaattatataattacatcttagagtaaaacagcccaaacaaagtgtattttacaacagatcaggaagagttaatgaggttaatattaaggtccttatacccattcaaaaagctttgtacttaagaatatggaaaaatatatgcactgccaatgacaattgtaggttcagatctaactaaagtaatatgtaaaacattacattttcttgccttttcatatttagaacttaatgacttggggtcatgagaaacctcaaagttattctgtaacagaatgaacctctggggcaaatgaagtctgtacggtttaagtcctacaccatgatggccctaaactgagctttcttactgtaaatctagtttttataccttttttggcctcatttcttgctgacagattgtcactttttggtaagttaagtgggcttggaaaccagataactgcatttgtaaaacttccatgttaaaaacgaatacacagaaaaggaacaaactgttgtacacacacccgggattgatctcaggggaattatgctcagtaaaaaaatccaatctcaaaagattacattgtataattccatttatataacattgagatgataaaaatcatagagaattattagtggttgccacaggttagtgtgggaggtggctatggctatcaaaggacagcatgagaatccttgtgatagaactgttctgtctcgactgtgttggtgattacacacatataagcatgataaaattgtctacaagtgaatataaaaacgagtacatgtaaaactagtgaagtctgaacaaggctgggtgaattatgtctgtcaatttcctgaaattgatattgtactataactatgcaagatgttaccattgggagaaactaggtaaagagtatatgggatctctgtattcatgtcactctaccattaagattaaatattaaaaaaaatgaatgcacagaatcagagaggcactcttaaagtgctgtcaacacatggcctttgaatacaattttgggtgctcaaagaatttgtagattgcttgatggttctaaaaagagaaagctcaaaagagctagatcctacataaatgaggtactattggtgttccatcttcctgagatgaacctgttaactagggcagttgccgtcagatctgtttttattcgcagtattttgcttaagctttaagatattttgttattaataattggccataaaacccttttgtgggcagagggaggtgtaggggcggggcgtgctatggaacttcaaatgggcaaaaccgaaagtactatggctgattgcagctgtaacaggtctttggagatacgtaaaatcctttaaaacagtgactgtctccctttatgcataaaaattttttctaatctactgggtgctcagaaaggatcacggaaagaggccattattaaataaaaagcagaaattataccaatgtgactttggattttcaaataactccagccctacctgcagagaggcagattcaaactactagcgatgttaagaactgaaatggattttaatctagtgataattaataaaataactgaattaccttcccaatagtattagttactttcccagtttattagggtgtggacaagaaaaaggattactgggtttccactttctagtccagagctctttttcacgggaacagagccctgtaaaagtttccctctctccaagcactttctccccttgactgttcctgaagaaggaacgatttccagttagcgtttaaattagcatagtgcttaactcagagcttggcttgcagggaaaactagaaaatacgtggtttcattgctctgcggcctaatcaaaccctggacaagagaagaggaagaaaataggatatacttgcagcgcgcaagcgctgcacaaagaaagcatgtcctctctgagtcgccgtaggtgctaggtggctgtggcttcggtcgttaccccacccccttccacgtcagccaaggactctggagccgccgccgccgctgctgcggttcatagccggagtagacggagccgcagtagacggatccgcggctgcaccaaaccactgcccctcggagcctggtagtgggccacaagcccccagtcccagaggcgtggtgggtcgggcagagtcggaagaactggctttctagctggaagatgcggaaggg

SEQ ID NO: 6769 - DNA, 2300 bp, Homo sapien
aaactgactctcaggcagcgtagaatattaaatggatataactttttttgcaactcagccatatttatcataactgtaaatgtaagttccctttgaccccacaattctacttctatgaattcttcatcaggtaaggtaattatgcacacaataggtgtgtatgtacaagaatattcattatagtatttttatgataccaataacttggaaacaattgaattgcacactaataattaagcaaattattatatttccatacaataaaatactatgcgactattgaaaataatatagaccattacttatggacatatgatagctataactttttaagtgtattaataaaaacagtatcatcttatttttaaaaattgtatatttattacacatctgtgtgaggcatgtgactagagagatatatatggaaagaattttcaaaatgtttatgtagtatatgacaatttttaaatgagcatttatttaatcagttagcactatttataaacacttaatatgtgctacgcattgtgctaggtcctggagaaacgaaagagaacaatctattaatttaatctgttaatttagtccaccaaatcaacagtgtttttcagaaatacgacaataaccagtgttgatgaattagagaaggtaacctcatatactactgttgagagtatatgttggtaaaacatttctggagaacaatttagtactttgttttttgtttttttttttttgagatggagtcgcactctgtcgcccaggctggagtgcagtggcacgatctcagctcactgcaacctccgcctcccgggttcaagcgattctcctgcctcagcctcctgaggcacgccaccacgcccggctaatttttgtatttttagtagagacggggttttaccatgttggccaggatggtccgatctcctgacctcgtgatccacccgcctctgccttccaaagtgttgggattacaagcgtgagccaccgcgcccggctttttttttttttgaaacagaatctctattgcccaggcgggctggagtgcaacggcgcgaccatggctcactgcaacctcgatctccctggctcaagagatcctcccacatcagcttcccgagtggctgggaccacaggcccatgccaacatgcccagccttttttttttattattcttattcttattcttattcttattattattgtagcgacgaggtcccactgtattaaaataatatagtgatctcaaactcctgggttcaagcgatcctccgccctcggcctccaatagcgctgggattacaggcgtgagccaccacacccagtctcttttttacaaagaatataaatagccggtggatgtcagactatttcgttatggaaagatgctctcaaaagacgaaatagataaatcgaaagaaagtgtccattttttctcagtggcctaatctgtcaggtaccatgcttggttttgggggcatagaaagacattagcgccctcatggagttcaaagtctggtggaagaaatcaatcataataacaatgaggggttaacgacaacagacccttgaaagataacatctccagggaataaggaagagcattccaaagtattttgccaaatggcaaaaaccgcagttacttttgcaccaaccttaatgcaaataaaagcatgtacacaaacaagatactcgaggaagaatacagctgacacacagaaacggatcgttatcttgtggctttcctgcagcctcgttcctttcagtcacataacaccccaaatctgtggacggttaatgagagctagtatcacccagagtcacggctgttgactcggacgactttagatgcagcccgccagcgggagaaactggagggaatccgccatacacaggaacctagaagggctacgtgacaggggctgccccgcagctctcagccgccggcactcccagccaggttttcccgccagtctcagttcctagatcttccgaggctccgcccgccgccgagcggtcggaaagttttaaggagggggaagtgttgcaagcctatcgatatctctggaatagactgcgctaccctgcgccgccgccgtcaaactcccgcagacttctctgtagatcgctgagcgatactttcggcagcacctccttgattctcagttttgctggaggccgcaaccaggcccgcgccgccaccatggtacgttgaatcccgatctctggaaggtttagggcagagctctggtgactgggggatgacgagccacctctcctgtcatccttagcgtcgcccg

SEQ ID NO: 6770 - DNA, 2300 bp, Homo sapien
ttatttttcagaaaacagtcatttgacacaatccctttatttttacttgtcaacactgagactttggtttagtttggtagtataaataatataaaaggttgctcttggctcttgctcttattatattattggcaacctgaaaggtgagtcttaaggatgcctatgtatttttggcatacagaaatcagagctttttaagactagaaaggatttcaaaggttatctaaattaattgcttcatttcacatttgagaagaacaaggccagtaaaagttataggattgcttaatggcagagtatgaatggctaggcccagacaaaaactcacaaaactggatttctactccctaccgtttccatgatcacgtgccaatcctactttagatgataacttcagattaaatgcccacacacatacacgcacatgcacacacacacacctgttaatctgaatttgttctaattttcaaatcaatttattatttcctatggaatttataacgggaatttcaataatgctggtgctagttttgtcacgcccttctgtacaaactcaaaatgtatccattttttactttaatcttcaactggtggtaatgagttctatgcacatcatataaaaaatacatttgctgagttttgctgaaatgagcattttttttcttgtcatggggataaaatgaccttttgaatttttatcttttaggacaagcatttgggtaatacattagaaaaggaaaagcaaaggaaagggaattctggaactttttcattttggttaaattcttgtgctaatttcttagtgccttttgctatgcatgtgaactatgaccatatacgaaaatggtctgttttaggtcatgactgtgggcagagattaattggtgaaaaatgggcctgtttgtgggatttaccacacagtaaggtttctcatctgcctggaaaaatgtggaattagctctttgagaaatgcagtccggtcatgaggttgaagcgagagcttagggagggaaacacagttcactctctaaggcagttatgattggttagattccagagcagtccctttggtgtagtaaagttcttttcttctcgctttcaggtctgtgtttcctaatgttgctagtttcaccagtacttcacagatagcatcttattcggcttccttcaaggcctgctgatccaaactggggagtggtcttggagaggattcctagttctctccgctcccccatctagaaagtgctgttacagtgaaaaagccttcaatttgcaaagaccaattgcgacagcaaatctgtgctgtgtggaaggggatacaagttgtgaaccggcggatatgtatgacaagggtacaaaatggaaggcgagacgttagttcttcgcctgtgaagatggttcttgagcaacactcaagaacgtgcacgtggagtgctactagagtgcactccacgtgcacgttcctccctaagagccactgcaaggatcctgggcctgctgcgtggcccaagaatccacgttgcttctgaggctagatctagccacagcgattagggtttcttcgccatggccttggtggtggctggccctaaactggtcacagtctgaagacccaccctgaaagggactaaggttagagacagcgcccctcccctcccacccttagctcagcatccccactaagcacaccccttggggaccacaaacgccctctttcccgaagaccccagtagtgacctgtgggattctggctgggtgtccgtgacttaccctcaaagagaacctgcacgcctggggtcccaggatggctggcttgcccctcccgtccgaagatgacctcgtccttctctttcagtcccggtgggtcttcggactgccgccgccgcgctttcctcggcctgggcacgctgggtcggcgtggtcccggctcgcgtccctgttgggcggccgcggcgcgggtggcggcgggacaagtcgtgagcgcgcgctgggcgcgcgcccggccggggcagtcgcgggggaggagcgcccgcccgccgctcgcgcgcccaacggaccaggctggggccgtgaggtaactgttgcagccagcggaggtgggaggcgacactgagtctccagtcccgagaggtgcccgagggaaaaggaggcggcagctaaactggtcctggagagaagccccttccgcccctctcctcagccagcatgtcccggactccgccgctcctcagtccgcgcggtggggaccccgggccgtggcggccggcgcagccctgacgggttgcgaaccagggggcgcc

SEQ ID NO: 6771 - DNA, 2300 bp, Homo sapien
aattaccaagtttaaagtttaaactgttaaaacagtctcctaattatgcaacaaatacaaagaacattgaattaatctgtaaaatattatattcacctatactgctgtcttttcatctaaattactctcatttgcaaagctcatgtcttgtaacgataaaatctcagatttttcctctcgattttcaataacgaaaccacactgattaaaactcatagatgtatcctctcattctaaaggctgtatgttatttttgggtaggcatcattataacagcaaacagataaatggcaccaaaaagacacatatcagaggatgccaaaagcgggagtagtcaatctattcaaccacaaatgattcacctcattcttctgcgaactcatctattgcatatacagtccttaaaaagtgccatgtgattagcgggctatttgatttctattcaatgacaaaagctacttgcttctgcatttttaaaaggcttcctgtattttaagaatcctttccagaataaaacattatttcctccccccccccccccgcaacacaccctttttccattctgaaagttaacatgctttgaaataagcgaattcaactcggaaactgcagcggtaaacccgaacccgctcgcgtcccagacctcgccttccagctaacatacctgttctctggaaatacaaggcaacgacggtctcctgaatattttgcaactgccatagtaactggctgcagtttctcctaacgacacgcagctggacctcctccggggtcggatcacaggcactttttcttcggcggcactggacagtcgaggatgaagaggcgcttccctgatttgaaagaagtgatccaaccccagggccagcaggcagccagcgccccccaccaggccggagagcagcggcctgagggcggagggcagcgacccgaggctggtgaaggagacccaccagacgaagctggccaggagcagcaccagaacgcagtgccggagccgcagcgggtgcgcgagcgtcagcagcagccctacgcagctcagcaccagcagcaacctgcccgctgccgcctccgggggcgtgtgcggggccgcggaccctgcgtcgccatccccccaaggccaagaccaccactgccacaccaagaagtcccccaggtaacagcaggcgggcagcgccagcagccaccaggagccgcagctccggcccgggccgggtccccgcttggtccgggtgaggaagcaggtgaggaagaagaaggcacaggcgatgctgaagagggggctcaagctgtgcgaacacacgctcagcagcgtccgcagccaggcggccccggcagcccagctctcgggttccgcgcccagcagcagggcgaggacaaaggcagccagggcgcccagcgagaggcgcgcccggcagaagggggagcagcgccgcggctgctggggagaggccggcggcggccgcagctccacgttgcagaagcggcagaggtggaagaagaagccgcgcggagggtcctgccgcaaggggctcacgcagctcttcacgtagccgttcctcagactctcggggggcgagccggccccatccggcggctgcagggaccgcatggctttggcgtctcgctcgtccctcctcatggctggggccgggggtggccacgggactcagcacaccccgctcgtaccgtagcggccgctcgcgctcccagaccccaacccccgcgttcggggcgccccctggttcgcaacccgtcagggctgcgccggccgccacggcccggggtccccaccgcgcggactgaggagcggcggagtccgggacatgctggctgaggagaggggcggaaggggcttctctccaggaccagtttagctgccgcctccttttccctcgggcacctctcgggactggagactcagtgtcgcctcccacctccgctggctgcaacagttacctcacggccccagcctggtccgttgggcgcgcgagcggcgggcgggcgctcctcccccgcgactgccccggccgggcgcgcgcccagcgcgcgctcacgacttgtcccgccgccacccgcgccgcggccgcccaacagggacgcgagccgggaccacgccgacccagcgtgcccaggccgaggaaagcgcggcggcggcagtccgaagacccaccgggactgaaagagaaggacgaggtcatcttcggacgggaggggcaagccagccatcctgggaccccaggcgtgcaggttctctttgagggtaagtcacggacacccagccagaatcccacaggtca

SEQ ID NO: 6772 - DNA, 2300 bp, Homo sapien
tctaggctacagcggcatttgatctttatcctggtatgaaacatctctaaagatctcccattatcttagagatattttccaattctgacaaagtctcaaagttggcataaattgttaaaatactatacctttttttggaggttgaagaatattgttccctcctgtgcttccaaaaagttctggaaagttgtacctaggacttaaataaaatcttagttttccactgtcttttaaatttgagatgtatgctcacagaaaaaaaaaaaaaaacaactggactttaaaattgcttaggacagtcacttcaagtgacacccgcctttgtgttagtctgtgaattcaattctgctttgtgattcttgaaagttaaacagccagtcctcaggacttatatattcattttaaaggcaatcttaaatagaagtgtatcacactgaaaattaccatttccttggagattgattctgaatgtttaaatttctgcagtaactttaatcttagtctagatttcaagaggcattccctggctaggaaagccaatacaagtggctttatcgattattttcaggtaatggacttcaggacaataaaataattccattaaagcaagtagaattgacagcgtattaatttatttttacagcatttattgagaactttatgcacagcactgaatgagattctgtgtaaggattcaaagatgaaaaagatgaaatcactgctcctaaggagtttgtaatttagcatgcaggcagaagacaagaatatgaatgtttctggttcaagatagtgttaaataagtgccatgggagcttctaagctcccatgtgtggttcaaagcagagagaaaaagagtgccccaagaaaggcatcatggaggatggtccctaaagacttggtatggttagggtagtatggcagtcaaaggaagccttccaaatgaggaaacaaaccaagcaaaggttgaaaagtgtggcagtcacttaatggttttcatcaacagcactttgcacatttgtctgttattagcatttagcccatgatgttataataatatgtttaaatgtatgtctctatgactattcattaattcaacatatatttctattgtcatatgctgtgcactgtcctaggtgctagagatatagcagtgaccaaaacagattcctgcccttatgtagcttatattctagttgggggaagacagacaatataaacacaagtaaattatataatatattcaaagagtacagagtaggaagtaaactaaattagggtaagggaatggagaatgttagtgggtcagattttaaattgcttaatcagaacaggtctcaccacaaagatagcatctgaacaaagacaaaggaaatgaaggagcaagctataggaatatcaaaaggaagaacattctagactaagaaaagagcaagaacaaaggccataaagcaagagaatgccacgttgagaattacctgtaaaaagacaaggatgaaattagggaggccagttaggaggttgttgttataagggagaaatgcaggtgacttagaccggtcacctgcaggttataataaattgtctgattctgtttatattctgaaggtagaaacagcataactgctgagcagttggatgtggagtttggaagaagataatgagtcagtgtgggtgactgcaaagtcctgggcctcaaccacttgaaggatgtatggagtggtcattaactgggagagtgaaaaattatgagtagggctggtttgggtgagggaaagagacttgaagatcatggagtgatctagaaggcaaggaaaatgttttgtgtattcctgtttacatctctgccagcattataattagcccataattggcactaaaattattgaataaatcaaagaatatataagctaatcttgtacccttccatagatcaaagcagtttaaggataagttttcacaatttgagtcacacacctttaccaaaagtccttgaaaactgtatacaggaatacatactagttcaagtaaaaatttctccagttctaccctcaaatagaggactatttcagattcttgagtaaaggtggattgtgtaacaactttctcaagccatggctcctccttgctttttatgatccctggtgtccacaatttgaagctctaccctgaagctctatcctgaaatacatttgccctctgttctgccttcatagtgacacaactttaagttcatggctcttttactatccttgtggaatggcatctttttattgtctctgctaaagttcccttctgcgaag

SEQ ID NO: 6773 - DNA, 2300 bp, Homo sapien
ataatcacaacgatccttataagtggaagaaggaagtagaagagagataatcagagagacagcgatgttggaaggattcaaactgacattaatggccttgaagaggaaggaatggggacgaaagccaaggaatgtgggcagcctctagaagctgaaaaagacaaggaaatagaatctctcctacagtctctagaaagaatgaagccccactaacacctctctgtcagccctggaagactcattttggacttctcacctcaagaattgtaagaaaataaatttgtgtggttttaagccatcagattggtggtaatttattacaacagtagtaggaaacaaatacacttctttagcagttgatctcagctccaatgtcatcttcctaataagactttccttgacagcccttgcctgctaaagtatctccccaaccaccaggcgttttctataacgcactttttgtttgcttctgattattgaaaattattgtatttccatgtcattgctcttccctctcataagaatgtaagttatagaaaggactttgttgctcttattcacctatgtatctccattgcttaggacatgggaacatagtagacattcaataaatatttgttgtgtgaatgagtcgtaagctaatgaggaccataaaactcatgccactgctaaatcacaattagagggcagctgttagaagagtcccaaacccagtaagtcctgtattgcaaggaactgcccaatagaaaacaggaataaaaacaattagcaagaataatatgaaatcagttgcttaattccaggcagtggaggcagaaatcttgaatagtaaatactctccgtgaacaagtgcagacaagagtcccgtgattgccaataagtaatcagtttggaaagaccagagaggggtcaaatataggtaaactgagttaatcacataaactgctcaatcatcacaattattaaaagatcacacacaaaaatacattaacaggagaaaaatagtaaaacaggacaaaacagtaaaattactttcttttactactgatgggtcaattttctactggaaattctgaaaagtatcaggttcagctaaagactgcagtgttgatcatctctccagttttcctagtgtgaaatgaaataagcagacctggtacttaaaaagacactttaagaaaggtctggccccagagaggcaggatccgcctagcccagtgagtgaggccgtcctgacacctcgtcaatgcccttgtgtcaacattctagaaaacggactcctggctcattgctccgcctagagccgcgccacctccaaagggtagcaccggccacccgctccgcaaagtccactctcagccgcgcaaaactagaaggtagttgtcccgaaggggcctgagcgctcactcagtcagccaatggccacggagctagggcgggacctgagggtatcctgccaatgggagtatggcagggctggagggagtgcctgggtctcagggctgctgtggagttcgcacctccagctcgggccgatgtggaagctttggagagctgaagagggcgcggcggcgctcggcggcgcgctcttcctgctgctcttcgcgctaggggtccgccagctgctgaagcagaggcggccgatgggcttccccccggggccgccggggctgccatttatcggcaacatctattccctggcagcctcatccgagcttccccatgtctacatgagaaagcagagccaggtgtacggagaggtacagccccgacgggccccgggcagggagggccgccaggctggcccgggctggccagggccttcctggttggacttatggccgcccctgggccgactagtcgggacctctccgtgtgccggctgccctttgagggacacccgcttcccgggtctggaagggagaagtcctcgacgccgtgcccccttgcagggggagccccgcccctgccggtgacccactccgggccgaggctccgaggcgatccagtcctgattttcccgctaccgctcgagctcttgctcctgcgcctgcgccgtttggctcgccagccgcgccgccacttcaggtccagggtggacgcatgccctcaggtgcgggcgtcttgcgagtcggcctcgcagctctgtggaagctgcacgcggcttgtcggaaaatcaaggcgttctgagttctagatggttaatagcaggttcttcggtgtctgcagtcgacgaacgactggtgtaggcgtttgctgtgagaatggagaatgcaggggaacgcccctgactgagaagc

SEQ ID NO: 6774 - DNA, 2300 bp, Homo sapien
gtgtcatctccactggcctttggtaagaaactagagaccaaatttagtaatgatctctcacaattattttttcattttattagattattgattaataagaattttaaggtatctcttaataggcatttgtaataggcagtaggtagatattctgtggctgcagatactgtgacacatacctgtgggggtaacttcagcccctggggatagtcacaagccagttaaacagaaaaactcaaagacctgactaacttgctgacttccgcagtgtccttgcgtgggagatggagagaaattggaaacactctcagaggacaaggtttgcttagtatatgaagcctttgcccttgatatttcctctgtttggaatattttcccccatatctgcctcaaatttctcttctatagtaggcagaataatgctcccctcccccaataggtccacatactaatccctagaactgtgaatatgttaggtttcatggcaagaagaattaaggttgcagatggaattaaagggctaatcagctgatctttgagttgggattatccaggtgggcccaatataatcacaacgatccttataagtggaagaaggaagtagaagagagataatcagagagacagcgatgttggaaggattcaaactgacattaatggccttgaagaggaaggaatggggacgaaagccaaggaatgtgggcagcctctagaagctgaaaaagacaaggaaatagaatctctcctacagtctctagaaagaatgaagccccactaacacctctctgtcagccctggaagactcattttggacttctcacctcaagaattgtaagaaaataaatttgtgtggttttaagccatcagattggtggtaatttattacaacagtagtaggaaacaaatacacttctttagcagttgatctcagctccaatgtcatcttcctaataagactttccttgacagcccttgcctgctaaagtatctccccaaccaccaggcgttttctataacgcactttttgtttgcttctgattattgaaaattattgtatttccatgtcattgctcttccctctcataagaatgtaagttatagaaaggactttgttgctcttattcacctatgtatctccattgcttaggacatgggaacatagtagacattcaataaatatttgttgtgtgaatgagtcgtaagctaatgaggaccataaaactcatgccactgctaaatcacaattagagggcagctgttagaagagtcccaaacccagtaagtcctgtattgcaaggaactgcccaatagaaaacaggaataaaaacaattagcaagaataatatgaaatcagttgcttaattccaggcagtggaggcagaaatcttgaatagtaaatactctccgtgaacaagtgcagacaagagtcccgtgattgccaataagtaatcagtttggaaagaccagagaggggtcaaatataggtaaactgagttaatcacataaactgctcaatcatcacaattattaaaagatcacacacaaaaatacattaacaggagaaaaatagtaaaacaggacaaaacagtaaaattactttcttttactactgatgggtcaattttctactggaaattctgaaaagtatcaggttcagctaaagactgcagtgttgatcatctctccagttttcctagtgtgaaatgaaataagcagacctggtacttaaaaagacactttaagaaaggtctggccccagagaggcaggatccgcctagcccagtgagtgaggccgtcctgacacctcgtcaatgcccttgtgtcaacattctagaaaacggactcctggctcattgctccgcctagagccgcgccacctccaaagggtagcaccggccacccgctccgcaaagtccactctcagccgcgcaaaactagaaggtagttgtcccgaaggggcctgagcgctcactcagtcagccaatggccacggagctagggcgggacctgagggtatcctgccaatgggagtatggcagggctggagggagtgcctgggtctcagggctgctgtggagttcgcacctccagctcgggccgatgtggaagctttggagagctgaagagggcgcggcggcgctcggcggcgcgctcttcctgctgctcttcgcgctaggggtccgccagctgctgaagcagaggcggccgatgggcttccccccggggccgccggggctgccatttatcggcaacatctattccctggcagcctcatccgagcttccccatgtctacatgag

SEQ ID NO: 6775 - DNA, 2300 bp, Homo sapien
tgatcaacgtctagatccttcctgggaaaaattctcattgaatgcatgattgagggcagggccagctacataatttgcaaagtccaatgaaaaatgaaaatatgggtcctcttactccaaaattaccaggaacttcatgacagtaatagcagagcattaaactaagcatggagcccttgtgagtataggggccctgtgtgattgcatagatcatatgccaataaagctggccctattccagtgaggcataaagggtcaggcttcttgcctgaagctggaacaactctgaagtcttagcccagctctagagctccctgtgagacaggtctttcctgtacagttcaacttttctttctgcccattcctactttcttcactcccttataggtgttgataccagggattcctcccaactaccttttggcacacaaatctccaactaagagtttgcttcccctggaatcttacataacatctattgttaatgcaaaataaatgagcataaaatacaggaagaaaatacagtaattgtataagaataatttctttctcttctgaattttagtgtatatgcttacatgacatttaaaataaaaataagttccagtttaaaaaatgatacttttaagaaaatacacaaaagaattgaaagcatagatgcaaatagataattgtacaccaatttcatagcagcattatcaacaatagccaaaaggtgaaaaccacgtaaatattcatcaacatataaaataatgaaccaaatgtcatatatacatatgcaatggtatattatttagccttaaaaaggaataaaatcctgtcacatgctacaacatgatgaatactgaggacattatgctaagtgaaagccagacacaaaaggacaaatattgtaggattttacttatatgaggcacccagaataggcaaactcatacagacagaaggtataatagaaattaccaggggctggtagaaggaatagtggggattattgtcaaatacagtttccatttgggatgacgaacaaattctggaaatggataatgatgatgatttgcacaacattgggaatataattattgccactgaactgcatgattaaaagtgtcagaatggtgttaaaaggattctgttcctgcttacaatttcgaaagcaacagtagcatatcactcccaccctaacaatgagaaaaacctgaataatctataaaatcataattttttggacccaccagaaagctgaagtcacaaggcaaactgagtcacaaagtatactgattcaaaagggtaacaagctcctccaagaagaaatggatcacatgaattgcttcaactttggaagaagaggtggcacttgtaaaagctggtaagcaggactggatttgagcaaatgcgtgtgtgggcatcatccaattggttgagagattgatagaacaaaaagattgggaaaggttggattcctagccctgtcagatcctatttcaagtttagatatgttctttgtcctggatgtttttgcactcgtttttatcattaaagacattacgttaaaatattactctggattcctgagatttttggcacccctttacattttgcaatggaaacaagtgcctcactcatctcaccccagttcgggccttccagggcacctttatagagaaactgattttgttcaccaaataaaacgaagctagtctttgccccagcagtttgctttcctaggtaaggagagatcagatataaaatgtagatgtgctctggatttattcttgattgaggattgcaccaggcagcagcaacaaaacgattttgatttgctgagtctgaatctaattgatccacacaggtttccctttgctcgctatgcttaggtctggcctggcccactggcttctgacagggtggcttttattttggaagtgtgaggacgcactggacggtcgccacatggggatttctggttgaacagttttcagagaatgaaatcagttccttcgtggttttcctgggagcatttcctgagcgctagaaaagttcgcctttctaggcccagatcgcacaaggggcaagcaaagcgtcaaaacagcgccccctgtcggccgcgaaggcgtggcggcccgcggaccggcggaccccgggtcataccagctgtccgggtgcacaggcccaggggccccacgaccgcgggtgtcgggaccgtgggctccactgaggagcccaccgaatccttcggcctggccaggcggggggtcttcttcccagtccgcggaagccaggtccgggagacggcgggg

SEQ ID NO: 6776 - DNA, 2300 bp, Homo sapien
ggggctcattgtgcccaagatccgccatccaagccctgctctgcgcgcagcttgcctgtttcacgctctgcgcctgacacgcgccggtgtcctcccgggccagttccagtcccgggtcctgtggccgccctgccggcggaccctgcggagagcgagtcttagatacccagtccccagccccgagttgttattccctcgctgtagttaagaaggaggagatcaattaagggcatcttagaagttaggcgttcccgctgcctcctttgagcacggaggccaccaaccccctagggggaagagatgtagcgcgaggcaggggtgtcgtgctaagaaatttcgacgcttctggggactgaggacaaaggtgcggacacgaccccggggtacctggagttccgtgactcgcgccacggacggcacacctaggggctaatttctgctctgcctcaaagaacctcaagctagagtccttgcctccgcccacagccccgggatgccgctgctgcgctcaccgcacaggcagcgcccggaccggctgcagcagatcgcgcgctgcgcgttccaccgggagatggtggagacgctgaaaagcttctttcttgccactctggacgctgtgggcggcaagcgccttagtccctacctctgctgagctgaacgctcaggcacagtggaactgaaacccggttctgcgggatgtgagagctgttgaggtcacgcgtaattgggtgtgatggagggcgcctgttcgtgatgtgtgcaggtttgatgcaagcaggtcatcgtcgtgcgagtgtgtggatgcgaccgcccgagagactcggaggcaggcttgggacacgtttgagtgaacacctcaggatactcttctggccagtatctgttttttagtgtctgtgattcagagtgggcacatgttgggagacagtaatgggtttgggtgtgtgtaaatgagtgtgaccggaagcgagtgtgagcttgatctaggcagggaccacacagcactgtcacacctgcctgctctttagtagaggactgaagtgcgggggtgggggtacggggccggaatagaatgtctctgggacatcttggcaaacagcagccggaagcaaaggggcagctgtgcaaacggctcaggcaggtgatggatggcagggtaggaagggggaggtccagaggtctggatggaggcttccgcatctgtaccttgcaactcacccctcaggcccagcaggtcatcggccccctcctcacacatgtaatggatctgaagagtaccccgggacagtccggggagatggagattcggaaagtatccatggagatcttacagaatcccctgtgcggaccaggaaactcttgtagatccctgcctatctgaggcccaggcgctgggctgtttctcacaatattccttcaagatgagattgtggtccccatttcaaagatgagtacactgagcctctgtgaagttacttgcccatgatcacacaaccaggaattgggccaactgtaattgaactcctgtctaacaaagttcttgctcccagctccgtctcttgtttcccacgagccctggccctctgtgggtaataccagctactggagtcagatttcttgggcccagaacccacccttaggggcattaacctttaaaatctcacttgggcaggggtctgggatcagagttggaagagtccctacaatcctggaccctttccgccaaatcgtgaaaccaggggtggagtggggcgagggttcaaaaccaggccggactgagaggtgaaattcaccatgacgtcaaactgccctcaaattcccgctcactttaagggcgttacttgttggtgcccccaccatcccccaccatttccatcaatgacctcaatgcaaatacaagtgggacggtcctgctggatcctccaggttctggaagcatgagggtgacgcaacccaggggcaaaggacccctccgcccattggttgctgtgcactggcggaactttcccgacccacagcggcgggaataagagcagtcgctggcgctgggaggcatcagagacactgcccagcccaagtgtcgccgccgcttccacagggctctggctggacgccgccgccgccgctgccaccgcctctgatccaagccacctcccgccaggtgagccccgagatcctggctcaggtatatgtctctccctccctctccctccattcgtcattttctcactccctttcctcctctccctctctctccgttagtctcttcatcagatagtctctgttagtccgcgatttat

SEQ ID NO: 6777 - DNA, 2300 bp, Homo sapien
aacaaagcagaaccaaaaacacaaaagcgcatccaacagtctagacgtagagaaccttcgcatacatagaaatactccttagagagctgcagttcctggtgtggtactacaaaggtcctggaagtcctcctgccttacttcgagtccgccacaggccggagctacttctagaacagttctgactgccttcccaggggagggggcgactgcaggtcaccctgcctcagtgcacgctgcgcatctgagttgcaggccgggcggcagtcacccgagtcagcggtcccgattcttcgtgggtgttacctggagtttccattgcacgggtgctggaggccaacccgccctagtcccaccagctgggtcctgccacaagaaaaggacccagagggcctagacagatatcccctgaacttttttctgacccgcagaaacagtgagcatcacctgcaggggttccgccagcctctggctttgcttcctgcccggcagcctccagcaagttttcccgaatgctctccaggagtgcagtgggcgccggcggacttatttagggtcgctgctgccaagcgtcagagagcgaaccggaggcccggggctgggggctgtggtgagaggcgcccctttctttcttgccatcgcccctacccccagctccttcctagcctattctgccaaagctgggatcttctcctggaacccgggagcaagaagagctggcagtgccgactcccagaacccggctttccttcagaaaagatggataggccgagtttgtgtgcgtggacgtgcatgtgtcggtgtgcatgtttaggggacagtatgtacccccaattgcataaaacacgcctgtttttggaaacagaaacacacggggttgctttcgggtatgggtgtggttagtttgggttcctgcgcacgctcccttttcggagcagctggtgagggcgcatctgttccagtgagtgctggctgtctgatggactgtctgtgaatgcagaaggcagagcgtgtggtgggggtcctgccatgtgagtgatgatgcgcgcactggctggtctgtagtcgcgagtggaacttgtgtgaaaattctcaggctgactctcgcgctgcagcacctgctcccctccgtgggtggcagctggaccccagcgcgctcagctctcaggcgcttcagcgaagtggggtaggggtgtggaacgagagagatagagacccgggcatagaccatctccgccaggcagcttggcaaacaggtggcagagttgcagggcagctgtgtaagccaacttcggcgcagcagtggagggtcctggcttggcgtgggggatgctggacccgcggtcgaggatttggggatataggggaagagggaggaggtggatgctgagccttgtatgcaggctatgtcagtttagccctctccccaacctctcttcggctcctgcccgtcccagaggagtgaggtggagaagggctggctgccagactggcaccaaaacagccttctttgggtgcccaggttgccagggctcgaggggtcggaggatatccagggaagcaccccaggtggtccaaaaagatcaaattttgaggacccctccctccccttttccctccccccccctccttccctgccgtgggctctttcagctgtggtccctttagaacccaggactactactgctcaacctcgctgggggttcgggtggctggattcgggtccctcactggcgtgacaggagggagtgcgaggcaggaatttaggagccaaggaggtgagagcagctctggcccctcactgtaggtgacgccaaactctcctcgacttgccccgactcttagttgaaaaatctctgtcctctcccaggctctccagcttcccaagcaatgacctcaatgaaaaaaatgacagcggggcggactgcccccgctccagagtaccagtgccggcagtgcgagctatgacgcaatcggagctcggtcggtcctttgattggctagtcctggccactttggattggccgcgcgggctggtggggaccccccccctccagctatctctgtaataagagcggggtctccgcggggaaggcgcccacagcaggtgtggtgttcatcccgggtcgaccggccgctcgcgctgccctgaaactctagtcgccaggtgaggaacttcccattccccattccgctcactcgaataacctgcttcttcgactagttcatccagtttgctccatctgcctgtctgcctctccgccgccatctggtcctaccttacagcggtggtcctagctctc

SEQ ID NO: 6778 - DNA, 2300 bp, Homo sapien
agcagaaagatatcacgcacaaagctgtgattggagaaagaagcactggttgatcaaggaaaagattaaaaagagctttagtgttttgtccatttgcataattctagatgccacagagtttcaggttgaaaagaaaacttacaaaagagtttaaaacatttcattcttacagatttaaaataacgggatttaccaatgaaattctaatcatcccatttatcacattaaacattccacagcaaggagcagaacggcttggggtgtgtcttttaaaccttttatgcaatattgtcttgtatctctgaaaacatacctgtcaaattttcatgtgtttcttcttattttaggtaaagttgatggtgaaacctggttgtgggcatacaatgtgatttatttttcctttttaaagtatcttgcaacttttagtttagttttgcttttttaaaaaatggctttctattgataacatgttaagaatttaggtgcttaattggttgttaacaataaaagtatatttaataaatgcttatgaaatgaatattgttacattgatacacagaaactcttcttagcagtagtgttgcagaattcccgtggtgagggctttcttaatataccggccattatttgatgtaatgaaaagagaaagtgtgcaacagtgagattgttaattaatttagcctaacaagatgaagataaatgaagcaaagcacagtttgaatgaagcaagaggtcttatttacaatttaatacatttttatataatgcagatttcacttggtaaaaaacaaacagaccctcaccccaaatacccactaacagcaaaagtacgtcccttccccacaattcaacactaaaatcttggtttgactttacagaaaacatgtactgtggccccatatggaagacacttttacagtgtgtaaacagtgcttttctacagctaagaatcctacactagttaacctttaacttcagtattttgttattctcaatatagactggggatgaccataagaataattatctagaaacctttgggtttcttgttctccaggttatcctgagacatcttgctttagttatttaataataattttattttaattcttttttttttaaccaaagaagttcaaaagtgggaaaggaaaaaacaagctgtgtgcctttttacatgtgcttgaatctttagcaattgtacagaattcttaaattagcattattttttaaagtctccctttcagtgattaatgagctttatccagtatttgaccttttatcattcttgttttctgctcagaagtacttccttccttcctactgtagttagaaaagactgtctcttatcttatgttactgtaggcagtggtaacagggctctctacaaatggtgttattatggtcactatgtttttatctcaggggtcacgaacaaatccatgcaactgcttctaaggatttcaataaataggactttttatccagacaatcgccttttatgttacttttaaacaaaactactagtccatcaagagtttcaaaagaaaacaattctacagagtgccggtatggccgcacagaccaatcatcatggcacccattctccagtcctttatttttcaagtccacaacaataggttgttgattcaatggacaagaccagaacaattaagttctctgtttagcagcagtgcagcattttaatgcccttctctaataatggtctcattattgttattctaagactgggcctcaggaggaggaatatttgctggaggtacgtcattattttgcaaatttcgattagctcatcatgttgtctgtagtgtgaaaatcgtagctaattagggcagccagttagactaccagcttttgagcttatgagttaaaaggtagcatacttgataggccagtgatgtgaaaaaggtggtaaaaaggaggattagagcagttgccttagtaactccaacttccatctgtgagggaacaatggacttgtgtttctcccccaccttggtgtaaaaattggttttgttttgaaaggacagggttctttttatgacaatctggaattcagcccaactgagtgtagttttagttgttaggagagaccattggggataggaaagatgaaaggtcatggtgagcttcaaggacatgaaaggttgttgtctcatgtaacaatagtagattgttttttttcctaatatttctagccagcccctaagtcaggtgatggaacaaatacctacagtttagtcaggtgaaacaggagtgggtggaggaaggaaagaagaaaa

SEQ ID NO: 6779 - DNA, 2300 bp, Homo sapien
cactcactatctcccctaccctaagttgttcataggatagtatcacatagtagtcatatgcacccttattattatttttggttaaaagttatgttaaaacaataagaaaaaagataaaacctctcatacacttccacagtatatcatctgttttcatttttacctgcttatttccagtccttgttcatacttgttcatatcttttttttttttttttttttggagaccggttcttgctctgttgcccaggctagagtgcagtggcatgatcatgactcactgcagtctcgacctcccaggcccaagtgattctccaatctcagctccctcaagtagctgggattagaggcgcacaccaccatgcctggctaattttgtttgttttttgtagagatgaggtttcacttcattacacaggctagtgtcgaactcctgggctcaagcaatcttcccaccttggtctcccaaagtgctggtgttataggcgtgagccatcatgcctggccccttgctcatatcttttaaaaacgaatttaatgtaactgcaattagatcatagatgtcattgcgtgttctttgtttcttacttaatgttaaataataaatatttcccaccacaaagagcctgtcatgacctacacaaacacttagggaagccctggtgtgtcttatgtcttttgggtcagaactgctatttggacattactttattttattattttatttttaaaaactcatttaagatttagaaacttttaaaatttctttatttagtttttgggtaaattataattatatgtatttatgggatacactgggatatgatatatgtatgcatgtgaaatgtatacatgtggaatggtagaatcaaactaacatatccatcaccttaaatacttaccatgtgttcctcctgcctaattgcaactttgtaccctttaaccaacatctccctattcctccccatccccacccaacctctggtaaccacctactgctctccgcttctattgagttcagttgttttagattccacatataagggagaacatgtggtttttggttttctatatatttgggccttattttagatagtcttcctcttggccttgagttattctattgaaaattagcctgaagcttttttttttaaaccgaggaaagacattgtttctgtctgtgatggcaatgcatcctaaattttaccaataactatatagtttttggtaggttttgtcttctatccattgcatctgttgggatgcttatagagttattcttctttaatctgtgaatatggtattattggtagattttctgaaccatttaggataaccgtgacaaaacttatttgttctcagtggattttcatttacactatagaattagttaaaatttaaaggatatttgtaactgtgttcatgattagtcagtgattttctcttcttctagtgtgtctattttattttggaatcaaggatagatattctagccttataaaatgcattcagagtcatatatatcttagtgtggaaggaactcatgatattacctctcctagaggcatttgcaatcaatttatgttaaagctgttaactgggaggaaaaatatttttatctttaaagaattttgaaacataaacccaacatagctgttttcccccaatcctctgcctgttttttttttttttggaggggggttaggggactgcaagaggaaagttagggatagagaaaatgttggtaaagaatggaggttgtcgccataaggctctgtcatagcaatgaaattattttggtgattatctttcactactttttggcaggcctatggtttaatccattggaattcagaagatagcaggttgatggcattggttagggaagatattgatcatcagagaaggtgttaaatgaacagagaaaaagcctcttgcaccaaagttgaaggtgatctgaggtctaaatactttagtctgtttatgtaccacatgtcctttataaaggcaaaagggtagaacttctccttcaggtcccacaattaccccattggttacattgagccatttatgacatcattcttcttgtgagtctttccttggggttagttttagtcatatttttatctctataaaacatcaggctgggaggtggtgtgtgcctgtagtctcaactgctagggagcctgaggcaggaagactccttgagcacaggagttcaaggccagcctgtgcaacatagtgagaccctatcactctggaaaaaaaaaaaaaatctgcggaggtaggtgtggcttcaca

SEQ ID NO: 6780 - DNA, 2300 bp, Homo sapien
ttatttgttctaaatgtctggaatctgacttgttccaaaattaaaaatatttctagagttagagatcttaattcaagatagttcattgattaaaaaattaaatctatgctaaccacaatattttctggtcacattttcttttagctccccattctttatgtggaagtgaaggaataggatgtatcatgtatcttgcataattccaattaatgcttttaaaaaagtagttgccagaaaaacaaggtgtggtattttaaaatgtataagtactaaaaactctttcggattcttctagaatttagacttttggatatacagcattttgctataaaatttattttgtgggtaacttctttataaggaaattataatttataactcagcgggggatagcacgtgaggatggtttgaatcagaaccagtactctttgatggttttggataatacacacagtgtgtccaggtaggcttgtctggtgtcccagataaaattactctcccagatccctaaacagcagaggcaatgaggaagaaaagggtataataccaacaattaatgacagagctagccagactgtcctgtacttcttgcactgtggaagtaggcgttagagttgctggaaactggtgaaactggagaagccctgaggcaccatttcctacaaggacaagaaggtctagtgaagaagtctaatgggtatgttagctgttgatgcttaaagctgtccaaatgcccacacctttatcatctatcaatctttaaaaagatttaaaaaaaaactttttttagagattttttagagatgttgcctaggctggtcttgaactcctggactcaagcaatccactcgcctcagcctcccaaactgttgggattacaggcgtgagccactgcacctggctctattatctataaatcttgactagaaaatagaataaattacctggatcatttaggtaaaagcatattttaggggttgaagagggctgagttagatatttatttcatattcatcttaatttcagatgcctatacctaatctattaaggtcatttgtgctataattgcaagttgggtgcagtggttcctacaaatgatgttgatcaagatccattgtttttcagaaggattttatttaaatctagttagctgtaactaacctagatatttgctggctatatttaaaaactgcagattgaatcaagccagtccccagagcctaggaaagtttctgacctaatttaggaacccaagctctattattatttttagttgactactactcacagccatgctcacatttttgaaagaatacagcctctgtaacaaagtttctttgttttaatggaactaaaaatatgctgtatttagaccaaacaataaaaataaactaccaaaccaccttaatgcatgggggtcctggatagagaaaatcataggcatgtagaggcataaaatgactctttgtatgttaaaaatttgtataaggctagctctgtgtgtttgagttgcatctgttacctcttcagccagaactaaagtatatgtgagcaaaacaattttggattgaattatggcttatacagaatgcattgtatatagcctaagcatcttatgggttccacgccttaggtagaacaaacactgcattctttcttattaattctacctacaaggtattcctgtcaggcacatttaagatattctctgtgaagctaattcatttcaacttgcagacataaattaaatgtttttcaaatataaattataagcctgtttctttctttctcttaaaaattttttcccttttgttcttacttatttgtatttttatcacctactttattaccgatttttttaaaagagcaatattggatggaaatgtggcattcttagatgtagaaccatgaaataattgtttcttttggcattatcattttggaaaaagttgttaaagtagatggggacaactgcatgagttaaaaattgtatgatttgtagccagaaagtatacttctttaataaagcatataaatgcaatttacttatccttttttatttcattttctattaaattttcaggtcactttcatgaattcaaaggcaatttaccagtgatttctgggtgctggggctgatattttttgtgcatatttgtaagtattggtttatctttacttttctcattgtgtaatgaaacagttacagtttgtaaacaagttcttaactcctagtgcgtgtgaatttttattagtttttttgcaattgttttgtaattattattttttgataagtgttt

SEQ ID NO: 6781 - DNA, 2300 bp, Homo sapien
gtacttgtccccattctcctctgaccccgactttctctcttctttgtctccttccagttctcccctagtagttgcttcaccgtctctttccaggcgctttccccagttccaacctctggtctcgccgatgtctctgccctcctctctctttgcggctctctcttgcctttgcctcccgctctcccctccttcttcccccggcccgccctcctccctcccagcttctctgcctggctcgctgcctccctcgcctcttgtctcatcttgcctgtgttgtctgggaggggagcccagcctcctctccctcgctcagatcaatgccctggccactcactttctgatgttgcacgacgggaaatgctttgaatacttacgacatggccgctcacactgattgccaagattgacagcactaaccatcgccttcacttgttccagggtgaagcccctagtcaccccgctccgcgcgcacctcctggaaccccggcggcaaacttctgccgctctgcgctgcccccacccggggcgggacacccccgcagacttgagttaacgggctacgccggccgcggcgctggggggttctgttcccttgctccccggactgtgacaattgacctagcaccgactccccttccttttaattttttttatttgtatctttccctttttctttaatgccatttactcctgcggcgcagcgcacaaggagccctcccgcgcggtaccatcctggagcccgcccaggtaaccgggacggagcgagcgatctcgagagcgagggaggcagagccagggcgcgcggcccgctgtgagctacctgttggggcgccggagggggcagggggcaggagcccagggccgggccgccgtcccccggcgtcttccgctcctgcccttccgggcactccagggttagtttctgtgagctgggaccgaggggctggggcaggacaggcagagggacgagagccgagcgagcggagccccgagagggcgcgggtggccgggagccgcggctgccgggccggggcgggtttgcgtacttggctggggaggggaaaggaggaggaggagcgggaggagggcgctccgaggggccgacgcggagggggagtggagggagagaaaggggcccgggcgcccgccgctcgctggtggacgcgctgatcccgaggatgcgtccccctcttggagagttgcgccttgttccggagtgacagatctgcgtggcgggggtctgtttttctccccttcacctcccctccaaaaaatccaccctgagaaaacacatgttgtagccgtagataactgtgcgtaggacattaaggcaaaagggcagggacagggacacaacgcaacctttgacaacagaaagctgttatcgccatcctaagtattcgtccggaaatctgtctgccctctcggcccacctcactcctccacctccgcctccccgcattggtattctaatctatataattgggaatgatgtgaaaaagaagtcaggtggcttagagaatgaatttgtaagtctccgtgaagttcgaggtaggtatttcattgaagttcgctcaagtgtgtgatagaggaagcttttgtggctgcgtgtgtagtcatccctcctcgttctgtgaaagcaaatgcgtgtcggctttgaaggttcagatgggaccgctaggcggtaatgccctccgtgcccacaagagggcaacatcccgagggctttgtgagcgctgtatctcttgttaccgccgcaggcttgggtttagagaaagttacactgaaacttttaaaaaactgataccacctcttatttcgcgatactaaaaaaagaaagatataaaggaaaaaaaaaaaagaaaaaagagggaagtaaagagagaagagagaaagagaaaggcaggcagctagcctaccccgggagagccctagtcacaccgagactagggggagggctgttttaattgtgggtttggccgactgacgactggagtgccctcctcggctgtcttagttgtagccggaggtcatgtaaatcgaccttaaaagaatgcataagccataaattaaaataaaccctcatccaagggctgatccatacgtagacaatatccaacctggacaaaacgggcttcccttgcgagccgacctaaaccgcatcccccaaagaatagagactaaatgcaaagtaagtttcctagcaaatattttgttttcttgaaaagtgttgggttgattcgctgtgtgactgagacgccacagtgttcggagcgcttcagtgtcacccaggctctggg

SEQ ID NO: 6782 - DNA, 2300 bp, Homo sapien
tacaaagttgaggtaatatacatatatcatccactcaatcccatacaatgaagacttatccatataacagtataacaattgtggaattgttttatttattgccgtgaaagtgtaataattttttggtgatttgtacatgtcctgttatttataataatttgaatccataaactatataatccatatggcctccagaacactgccacctacatatgttaggaatctcctgtgtgaattgctttttcttttttttttttcaacgcctcctcctccatcgtttaaaatgtttctcttcccccatttgctgagatcctactaagtggtgtgttttcatcatctctgcttccttcatctctttcttttctctcttttgactacttctttttttcgttttccttcatccttcttattgttcatcctaatatccacccttcttgtcttctccctggcctgcctgtccttccccttctccgtttgtctcgtgactcgcttttgtggtccagttctatctcttagtacttctcaacattcagcccatgcctccttctgtcacctaacttttccaaagcacaagctaccattcatacattttcctttaccatttgacttcctcactttctccagtttgctccttttttttctccccgagttgcctaccttttccacgctacagtttgcctttctcctgactcctcctcccagcagccctagccccaatagagctcttttggtcgttttcccctcagcctgcctctcccccacctagtacttgtccccattctcctctgaccccgactttctctcttctttgtctccttccagttctcccctagtagttgcttcaccgtctctttccaggcgctttccccagttccaacctctggtctcgccgatgtctctgccctcctctctctttgcggctctctcttgcctttgcctcccgctctcccctccttcttcccccggcccgccctcctccctcccagcttctctgcctggctcgctgcctccctcgcctcttgtctcatcttgcctgtgttgtctgggaggggagcccagcctcctctccctcgctcagatcaatgccctggccactcactttctgatgttgcacgacgggaaatgctttgaatacttacgacatggccgctcacactgattgccaagattgacagcactaaccatcgccttcacttgttccagggtgaagcccctagtcaccccgctccgcgcgcacctcctggaaccccggcggcaaacttctgccgctctgcgctgcccccacccggggcgggacacccccgcagacttgagttaacgggctacgccggccgcggcgctggggggttctgttcccttgctccccggactgtgacaattgacctagcaccgactccccttccttttaattttttttatttgtatctttccctttttctttaatgccatttactcctgcggcgcagcgcacaaggagccctcccgcgcggtaccatcctggagcccgcccaggtaaccgggacggagcgagcgatctcgagagcgagggaggcagagccagggcgcgcggcccgctgtgagctacctgttggggcgccggagggggcagggggcaggagcccagggccgggccgccgtcccccggcgtcttccgctcctgcccttccgggcactccagggttagtttctgtgagctgggaccgaggggctggggcaggacaggcagagggacgagagccgagcgagcggagccccgagagggcgcgggtggccgggagccgcggctgccgggccggggcgggtttgcgtacttggctggggaggggaaaggaggaggaggagcgggaggagggcgctccgaggggccgacgcggagggggagtggagggagagaaaggggcccgggcgcccgccgctcgctggtggacgcgctgatcccgaggatgcgtccccctcttggagagttgcgccttgttccggagtgacagatctgcgtggcgggggtctgtttttctccccttcacctcccctccaaaaaatccaccctgagaaaacacatgttgtagccgtagataactgtgcgtaggacattaaggcaaaagggcagggacagggacacaacgcaacctttgacaacagaaagctgttatcgccatcctaagtattcgtccggaaatctgtctgccctctcggcccacctcactcctccacctccgcctccccgcattggtattctaatctatataattgggaatgatgtgaaaaagaagtcaggtggcttagagaatgaatttgtaagt

SEQ ID NO: 6783 - DNA, 2300 bp, Homo sapien
ttatatagtaactactattcttattgacaatcctttcttatttcagaaatcttttagcagtctaaagtacctattcagccatcttatttgttttggtaatatagctaatagttctaaatcaccatttgtcaaacccattagaggtgaactgtagtcgaaactgcaaaactctgtaacttaaatgtaatttcattgtaactaatagaacctaagtagaattatgtagtagtgaaaatattttaattctagcaaaaagcaatcaaccacttcctaaaacaatgtttcttttttttctcttgggtttactctcctcctcctttatgatttattcttaccacagaaccattaagatgttctttgtttggttatacttataaaatgtaaccctgacatctctttttctattatagtacttactattatgctatttttctgcttccaaaataagggagaatttgaatctatgactgcataaatttaaaaactaccttccactggtcacagttcagtgaggatctgaaatctaggtaagtaatatttgtacacaggcagtgaaactagagcaattgctgagttcaaaagctaatagctaagcattgtttcacagactgctctcagttctgaaacagcagatatgtattatccataccacttattatttatttatttatttatttagagaccgagtctcgttctgtcacccaggctggagtgcagtggcgccatcttgggtcgctgaaacctccgcctcccgggttcaagcgattctcctgcctcagcctcccgagtagctgggattagaggcatgtgccatcatgccaggctaatttttgtatttttagtagagacgtggtttcaccatgttgatcaggctggtctcgaactcctgacctcgtgatccacccgcctcagcctcccaaaatgctggggattacaggcctgagccatggcgccaggcctaatttttgcttaaaaaaaaaaaaaatcacatttgtattcaaggtgagaaagcttcagaattattaaggacaaggattctgacagaaagttaagttcagacctggttacaaattcagacaccttaataaagtaggagatagtcttcagtatctgaacaataaatagctttaaatgcagggctttttgagtagaggagtgatcacttgaatctggagagagggcgagaaatggggagggattgctaacgggcattggggttccttttggagtggtgaaacttcttggaatcagaggtgacagctgcacacgattgtgaatgtactaagtgacagtggattgtacactttttaaaaaatggttaattttatatgtgaatttaacctcaataattactttttttaaaaaagaaaaaaaatagaggcttttgtggcagggatggactttgcttggtgaaggcccctactgtaacggtgcccagacatccacagcgaggtcagtgaggagcactcccacctcacacaaagccatatgaaaacttaacagatttccctcagctaaatccccgttttcaacaaccgccaattagccaacatttaacaacatactgaactcatttctgtatgggaaaacagcgaaatattcatgaaaacatttagaaagcagcatcaccgaccacctagaaatcccctgcgcgcaatagagaacaccagggtggaaatggtagaagccatttttggttaaggtttttgtcctgggtggagggtattcgtgaggattcagtcagcctcaaacattacatttaaacataggtgcctagctacgatgatacatttgccagtagggcagcgttgcacggtgaaaggcaaaaacccctctaagcctcctcctgtggcgacaaagctctcggccaacgctcaccgccatacacatccgcgggaacgcttcctccaccagccgaaggcggggcctctgagggcactcccgccacacagcgcgaattgagcctcggggcttcctgggaattgtagttttagtcacggacacatcttttttattcgggccagtatgcaatgaatcagaaaactacaactcccaaagtgccccggggcggcgaggggccgcaacggtgacgactgtggcagagaaggcccggaggggctctgcgttctgtagtggcgctgcttgggcccttggcggattgtaagctgctggttttgcggctgggaagagcggcgagagggttcggcatttttcgtcgggatccccgcaaggatgagtgctgccagagagtctcacccgcatggggtgaagcgttcagcctccccagacgacgatgtaaa

SEQ ID NO: 6784 - DNA, 2300 bp, Homo sapien
aaaaattttttttttaagtactggctgggcgaggtggctcacacctgtaattccagcactttgggaggccgaggtgggcagatcgcttgggtctagtagttggagaccagcctgggcaatgtggcaaaatctggtctctactaaaaatacaaaaaattagtcgggtgtaatggtgcacacctgtagtccgagctactgtagtggtggtgggggaagagggggttgaagcaggaggatcacctgagccagggaggtggaggctgcagggagcactgatcgatcgtgccactgcactccagcctgggcgacagagaccctgtctcacctgtctcaaaacaaaaacaaaacccaggtacttaaagatacgcttatatgattgggaaaggtcttcaaggtcgtctagtttaaaccgacctcttccgaagctgtaaacttaatgacttaatccctttaactttgttaaatttcatatcacctggagttttctgtcacgctaaaagatatttccaaacaggtgtctgatatcctagcaatcaagtcacatttaaagatcaggaggaaaacaatgtaacagctttttaagtggcagccaggttactcaaaagtgtggatcaattcctgacaaaacctgaattaccatattaacaagatctaaaatccagtagcagaaataacagagagcaagaataaacttctctaggtgcccattcatccccaaatctttactgattgctaatctttctgcagagctgaagtcgattcctttaaagatccttaatattccggtcctcgccccacctcccatcagaggggtaggtcttaacattatctcatttgctacaaagtagtattcagtgggcttttaaaattttatgaagagcgttgaaatgcactatcgaaaaatttaaagctctatgtattcagaaattgacagtactttaaacaaaaccgaaaaaaaacctagatatcccttcatcttccttaaagatgacctctccgcgctctctccaacaattttccccatcaacgttgccaagacacttatccattgtatgaaggacctagttttacgtttactggttacctaccgtttccatgacactgggctaggagctaggacaaatatacaaaaaggcctaaaataagcatcatatttctctccgaattcccaacacccggcagtgcagtaaatatttaacgggttactttaagggataaaccgtttgctattaaaacctatgaggtgagggctgaggaagggaacggcatttgatggggagacgaggtaagaagaacgaggtattaatatccgacatcaaaatgggcttctaggtctcaacgtcttagacctcaccaccagagccagtaccaaattacacccgtggcacaattttcggctcaatactgttctcggtttacccttactagtgcagctaaagttaactctcaacagcacattgtaaaaatcatccaggcaggaaaaatctgtacaaacgtgcacgaacatttcgacattgtcacgggaacatttagaacccaaaacagggagagtcttgccgtctctatactgagtacaaaggcccgagaaagcactctcatcggccccccaaaacgcacgtacgaaatcccttgactaagctctttcactcctcgaccctctcagaatttccttcctcaatcccccttcctacgcaggtctccggctctcagcgtgtgggcctcttcaaaccttctgaccctcataaagattaagggaggcatttcccactcattcttctggtttcttccctgggctctcccgctgcaggccacctcaggcgcgtcctcctccaaccacccttcccggcctactccaggctttagtaggcctcaaccctcagccactccgccattattatttacatcgtcgtctggggaggctgaacgcttcaccccatgcgggtgagactctctggcagcactcatccttgcggggatcccgacgaaaaatgccgaaccctctcgccgctcttcccagccgcaaaaccagcagcttacaatccgccaagggcccaagcagcgccactacagaacgcagagcccctccgggccttctctgccacagtcgtcaccgttgcggcccctcgccgccccggggcactttgggagttgtagttttctgattcattgcatactggcccgaataaaaaagatgtgtccgtgactaaaactacaattcccaggaagccccgaggctcaattcgcgctgtgtggcgggagtgccctcagaggccccgccttcggctggtggaggaagcgtt

SEQ ID NO: 6785 - DNA, 2300 bp, Homo sapien
ggatctagcaattgggaggcagcagacttgggtaatgaagagagaaaacaaaagttcttgagacttatgggtgcaggaaaggtaagcatcagatggtgtgcatttttaccttttctgtgaaaatattgccatttttatgtatgctaagtaagaaggactgaatatacttggattccattttcctgttctgtgtgatttcttttggctttgggaaatacatgtggcctaaccaagcacataaaatttatattatttttgagccacttctaggattctctgtccgtatagtttgaagactgtacagagaaaaatttggttcaaggaggctgtataggagaaaagagatgtcaaagtttatgatttgccatatgttggcccagtggtttgatagaatatatttcttctgggtaggttatcttgtgggaacctctggccaaagtgaaaaggctgtcatattttatagctccctccagcccttgaagtagtaaccagaggaatatcctttatcaaaaacttaattttaagactacactttcagagattatttctatagtttgttactagatagagaagtttctctgaatgtgtagaacaccagggggaaagaaaaccttaattttaaaaatgttcaagatactttgaaatgcctgtcagtttggttaacgttaatagaaggtacagttgacccttgagcaatgtgggggttaggggtgctggttctgcaggcagtcagaagtttgcatataacttttgactccccaacaacttaactactaatagcctactgttgactggaagtcttactgataacataattatcagttaacacatattttgggtgttaaatgtattatatcctgtattcttacaataaagaaaaggaaatgttatcaagaaaattataaggaagagaaaataattgactcttcattaattggaagtggattatcataaaggtcttcatcttcatagttttcatgttgagtgggctgaaaaggagggattgtcttactgtctgggagtggcagaggcagaagtatattcaagtataagtggatccacacagtttaatcctgtgttcagggtcaactatataaaacaagtgccaggaaaatatctattgtaaaaacctttctttatcctagcagtttatacagggatctctagatacttagtttttgtaagcaagtaaatttattttcctaacattgtcctaacagacttcctacaaactaaattgaaaagaaataggaaagctttttttctctttttttaagcacattaaaatgaaattctgctctttgttttgttatgcacatgggaatacattcattcattttcccaacaattacagactacctactactgtgctggatcctgggtggtcatatagatcaataatacatgtttgaagctattatgtaatggaggaaaccagataatagcaatacagaattgtaattgctgtgagaaagccatgcacatagtgctgtggaatcacagagggcagctaactctggtttagcagtgcaagaaagcttccccaaaatagaattgatctgaatctcaaaggatgagaaggagttagccagactacaacagtaggtttggggataggaagaggtcatgtaaaacactgagacctatttaaataaagcatttgtataatatctcattaatcgagatttcccaatttgtaatttgtcatagaaaatagtctgcaatttctcttgtttcatgcaaatatattaagtcctcacttaacatcccttgtggttcttggaaactaacctttggcaaactgacaataaagttgtttcactgtaacactgataaggaggaaaattgttttcattataggttgtttcaactaaaatcagttaaaatcgaagtttccaagaacctatcattgaaaattaagtgaggacttaaaagatttgttaaggatatgtaaggtaagtgttagtttaggggccatattcaacttagtagaatgaaacttattcaagtacttaggaagaacatcctaatataaaatatatggaagttgactaactagtaaataggttgttcagcatagattaaattctcttttttttgttgttgttgttttgagacagtctcactgcaacctctgcctcccgggttcaagcagttctctgcctcagcctcccaagtagctgggattacaggcacctgccaccatgactggctaatttttgtatttttagtagagtcagggcttcaccgtttgaactcctgacctcgtgatccaccctcctttgcctcccaaagtgctg

SEQ ID NO: 6786 - DNA, 2300 bp, Homo sapien
aaaaaaaattagcctggtgtggtggctcacacctgtaatcccagctgcttgggaggctgaggcacgataattgcctgaaccagagaggcggaggttgcagtgagccaagatagcaccattgcactccagcctgagtgacagagtgcaactctgtctccaaaaaaaaaaattagaaatgtataataggtaaacatgttacatatataaagtatcaattatcatgtactttgatttttaaaagatgagagagtatatgtcattatgatattctaaccaagaaactaacctttttctgtctccatttttactgattcagaacatatattttaattgtagtgaggttttatgcctcaacttgttaactctggtatgtacagaatttttgttctttgtatattagcatataatgtcatagttggcatttggttttgtgtattcactaaattttgttttaaaatctttgaagaatataaactagttgcagggcctaaagaaataagcttttaaaataattttagggaagaacatttttaaataaaaactgaaaatgaatttgggtatttggtgtgctgaaaagtgaaatttttgcctatttaaaactgaccctaatcttggacattagtaataaaaggcacatattaataaaagacacattgacctagattatgtttaacaaaactttaagttatttaaattatgctaacacagcatatgtagcacattttagaaattcatagatcttttatttttctagtgttaaacaattacttcaaattgatttgtattgctacataaggcaaaaaacaattcctgaactttgcagaatggaaaaatatttcaactgccacatttactcttttaaaactgagagctttaaagcaggagctcccaatccccggtacccatccctggcctgttagaaactggaccacatagcaggaggtgagtggcacgcaagccagagaagctttatcagtatttacagctgctcccaatggcttgtatggccacctgagctccgcatcctatcagatcattggcagcattaaattctcataggagcatgaaccctattgtgaactgtgcaagccagggatctaggttgtgcctccttatgagaatctaatgcctgatgatctgaattggagctgaggtggtaatggggagtggctgcaaaaacagattaacattagcagagaggcttgactgcacagagaccgtaatcaatcaactgcttgcagactcatatcaaaaccctctcagtgagtggcaagtaacaagctgcatctagtggcaggttttaagtcagaatctgacatttaatctgcatgtggcctgcccattacttatttaccacttccatccatgtctctttcctgcactgtgcatttgtctcagtcacagttttggtaagcccacaagctaaccctagccaaaatgagtaaaaaaacaaacgtccttggagagcttctttgaaaagggggaaagacccaatgatgagacagcagaagactctaatactgccaacaaagagaaagtggcatttaaaagaaaatatcaagagtcctacttaaattgtaggttcattgcaataggtgattcacattctccaaacctgctttgtctaatatgtgatgaccagctatccagaaaagccatgaaacctttaaaagtgcttcaccacatggagaccaaacaccctgcattaaaagacaagcctttggagtttttcaaaagaaaaaatcgtgaacgcaaagaacagaagtaattattgaaggccaccacttcatcaaatgtgtctgcagtgagagcatcattcttagtggctaatcacattgctaaagctaagaaggcctttactactggtgaagagttgatcctgcctgctgctaaggacatctgttgtgaactcttaggagagcctgcagttcaaaaggtggcacatgttcctcttctggctagcaccatagctagatgaattaatagaggatatgaggcacagttgttagaattaatgagtcactgtggtacccaatccaggttaatgagtctaccagtgttgacagcaaggcaacaatgcttgtttttgtgtgatacatttttcaggaggatgtgcatgaggatatattatgtgcacttttgctttcaaccaacaccacagctgcagaactattcaagtctttaaatacatatcaggaaaactgaattggtcattttgtatcgatatatgcagggatggagcagctgccatgactggacggctttctgttttcactactcaggtcaaagagcttgcttct

SEQ ID NO: 6787 - DNA, 2300 bp, Homo sapien
cggtacccatccctggcctgttagaaactggaccacatagcaggaggtgagtggcacgcaagccagagaagctttatcagtatttacagctgctcccaatggcttgtatggccacctgagctccgcatcctatcagatcattggcagcattaaattctcataggagcatgaaccctattgtgaactgtgcaagccagggatctaggttgtgcctccttatgagaatctaatgcctgatgatctgaattggagctgaggtggtaatggggagtggctgcaaaaacagattaacattagcagagaggcttgactgcacagagaccgtaatcaatcaactgcttgcagactcatatcaaaaccctctcagtgagtggcaagtaacaagctgcatctagtggcaggttttaagtcagaatctgacatttaatctgcatgtggcctgcccattacttatttaccacttccatccatgtctctttcctgcactgtgcatttgtctcagtcacagttttggtaagcccacaagctaaccctagccaaaatgagtaaaaaaacaaacgtccttggagagcttctttgaaaagggggaaagacccaatgatgagacagcagaagactctaatactgccaacaaagagaaagtggcatttaaaagaaaatatcaagagtcctacttaaattgtaggttcattgcaataggtgattcacattctccaaacctgctttgtctaatatgtgatgaccagctatccagaaaagccatgaaacctttaaaagtgcttcaccacatggagaccaaacaccctgcattaaaagacaagcctttggagtttttcaaaagaaaaaatcgtgaacgcaaagaacagaagtaattattgaaggccaccacttcatcaaatgtgtctgcagtgagagcatcattcttagtggctaatcacattgctaaagctaagaaggcctttactactggtgaagagttgatcctgcctgctgctaaggacatctgttgtgaactcttaggagagcctgcagttcaaaaggtggcacatgttcctcttctggctagcaccatagctagatgaattaatagaggatatgaggcacagttgttagaattaatgagtcactgtggtacccaatccaggttaatgagtctaccagtgttgacagcaaggcaacaatgcttgtttttgtgtgatacatttttcaggaggatgtgcatgaggatatattatgtgcacttttgctttcaaccaacaccacagctgcagaactattcaagtctttaaatacatatcaggaaaactgaattggtcattttgtatcgatatatgcagggatggagcagctgccatgactggacggctttctgttttcactactcaggtcaaagagcttgcttctgaatgtgagtctgtgtactgtgtcatctgtagagatgctggctagttggaaaatgccacctgaacttaccattttgtaggatgtgcttaaaattttcaaccacattaaagtacatgcccttaattcacatctgttcatgtagctctgtgagaagatagacacagagcacacgtcttctcttatacacagaagagagacggcttcctaaaggtagatcactggccactgtttttcagttacaatagctgctccagagatttcattttagaaaaagtcaccactggcagcacatttcgttgacacagaattgggtcacaaaattgcttacttggccaggcatggtgggtcacgcctgtaattacagcacttttgggaggccaaggcaggcagatcactcaaggccaggagtttgagaccagtctggccaaaggggagaaacctcgtctttactaaaaaatacaaaaattagctaggcatggtggcacatgcctataatcccggctactcgggaggctgaggcacgagaatcacttgagcctggaaggcagaggttgcaatgagccgagatcatgccactgcactccagcctgggcaagagagcgagactccctcgaaaaaaaaaaaaaaacttgcttacttgtgtgacatattcaatctgtcacctcaggggagaacaaaactgtgttcaagttggcagatagagtggctgcattcaaagccagactagtattatgggggccacaagtgaacattgggattttttgacatgtttcaaacattagcagagattttaaaagagactgagccaggaccttttttctcccagctggcacatgatcacctatctcagccttcaaagagtttgagtattattttccagccacgaaagagccccg

SEQ ID NO: 6788 - DNA, 2300 bp, Homo sapien
cgaggcctcccagcgtagcaagcaggtggcaggtaaggccatggcccagcccccaaggcctggatcctgccccactgcacctgtgggcttgggcccagcatggcctgttccagagccagtggaaaaccaggtgtcaaggatggtagttgagggtcagtggtgtgttcccctgaccactcggcatcctgtcccatgagcacagcaggacttggaagggaaggtggagcaggccacacagtggaggagaccaagggggcccagaagctcagaagtgtctggggaaaaaggtcccaggaggagtggtgctgctaccccacttcctctgagactatgagctaagaacaggtttttcaaggtgctgagccaaggggccaaggtttctgacctcatgaagaagggggcaggaaagtggttgatgcttggatttcttgctggggcaaggcagaagggggcccctcctgccttccctggccccctgccttcgtctctaaactaaagccagtgttcacctcatcacagtgtactgtgccagaaagtacaggacttggaaagtgggactttgcagtccaattggaaaaaaataacaccatgggatgagaacgtgtgtgtgtgggtgtgtgtgtgtccgtgtgtctcaatgtgtgtctatgtgtgtgtgtatgtgtgtctgtgtgtctgtgtgtgtgtgactgtgtgtatgtgtgtgtgtctgtgtataaaagggctgctctttctctcagccaggaaggagaccgcaggctcctccttccactcacagctcacctgcttgtgtgtgccttgtgccttcacaattcacccagtaccatttctcccccagtgcagaggccactgtgtgtctgggtggtgctcctggccaggtgtgcttcttctggggagggaacagccatagagcctgaagtggtgtcatggcccctaccaattctccaaccctggccaaagtgtctagaagtagccaaggatgtggccggcagggtcctcagatgcctgggcctggggagtcttgtctggagatcagagctttgctgtggccccagagggccatgagagtgactggcaacaaggggaggggccatagtcttagtcaaaacctgttctctgtcccccacagcctgatcctgcacagagtccttgaaatcttggctgtcctctgtcccttcgagcacatgctgaatgggctgagaggtggccggtgtggtgttctgggattagggatgcaggagatggctcatccagacctctccttctcatgacccaggggttcatcttagcagcttttgagcttctcctggggagggttcgagcaggggcggctcccccaccataccatgccctcctctcgccttgcttgctctaaccctgagggggtctgccatcctcggcctccttattgccagcagatgagcgctcccagccctaacatgctgcggccagttcccagggcctttcttcctccctactcagggatgatctttgctgcggcctttcctcactcttgatgcctctctccatctcagaaacatatccaggaactgcagcctgacccatccggttccccaccaggccccgtggatctgtccctcaccctcaagcccaggcccttcgtggtgggcagcagggcccatgccaccccagcctgccaaatggggcatctggtgctgcaggagctgatgaggagtctaacacaccgcttaattcctgtgtgccccatctagcacagcagctggccctcctcccgcctaaaggccccctgtcttccaggacggtgccaccttaccccccttttaccaacggactccactacacctttgtctaacaccttccaagtaagagcccctgtctggtgtgcttctgcctgcttcctgcacctccctagcgctgagcccctcacctccctgctgtgctgaggtgattgcagtgccacctgctgatgcctccttccactggcaaagcggccgctggcgggactgttctgactggtaggcaggtgggaaagtgatgctttttaggaactcaatcctcagtggctctaatacgatagggactgagcaatccaccctgctgcctccatgaaatctctagaaccggaactgtgcccccatcccctgctctcctcagtagggcaccctgatgcccgagaaccagtgcagaccacactgccagccttggggggctggaaaggaagagttagatcttggcctttcagggctttggccaaagaaattgaagaactgtaagattgggaaaagtccagttctacagatgaggaaactgaggcccag

SEQ ID NO: 6789 - DNA, 2300 bp, Homo sapien
cctggcatagaaaggggccaagctcttggcagagtctgggaatgcaggagactttaaagaaataggagatgtggtcaggtcccaagagagctcacgcctccagggccaggccagccttggctggagaacacaatgaggctggtcccagtgcagggaagccatagaagagtggacctcggaatggggccctccagatttttgccaacaaaggcttggaggagacttacctgggcattgtgtgtgcctggacctctgatgaggtcagtgcacagtgctgggtaaaacacatgagttctgctgccctggtcttcaccatctacctgcttccagccatagtccagggcccagagctggacccaggatatggcccagcacccagccagagagtcactgtggatttcagcatcttgagatctccttcccaatcccagatccaagaggtggactggagctctagccctaaaacaggagagggaaaattccaaaacaaacagcaggaatgtctggggcagatggctgccaacatagggcagaatgctgccagctgggacagggcgtaggggaaaaaggcactggcataggagctgggacacccagattccgggactgattctctcactgtgtcctcaggcaagtccgtcccttccctgagcctcctcattttcccttttgtagatggtcacagaggctcctcctcagcttggtcatctgtggctctcaggcagggctttctcagcttgggtgagcatcaggatcaccaggagaggtcctctctcctaggaatatatgtgtgtttgccagttttaccatttgttttattacttacttgtttttaacacttataagatgggcgtggtgctgcttgcctgtcgtcccagctactgggaaggctaaggcaggaggatcatttgagcccaggagtttgaggctgcagtgacctgtgattacacaactgcactccagcctgggcaatacagcaagaccctgtctcaaaacaaaataaaacccatttatatttgtgaaacaataatatccatcctgaaaatgacataaaacaggattatataatttaacaaataacaataaagagaccacctgttttataccaacagctagactaagaaatagaacactgccagcaaccagaagcctgtgggttctttcccaggccaagctgcttcctgtctgccagaagtaaccacaatcttgactttttggataataatccccttgcctttttttttttttttaattttagtacctgtgttgactcctaaacactgtgattatgctggtatataattctatatactattttgtgtcttgcatcttttcttcaacattatgtttgtgagatttatatacattgttgcatgtggctatagttcttttatttttatttgacttattttcttgagtttaatgtctttttaaaaataaattagataatattctcaaaagatacaaaagcaaaagatataaaaaagtacataataacatgtctccttcccaccctctgcctccagacattccattcaatcaaaggcaatcaatgttttatgtttatctttctggggagctttttagaaattggtgattcggatatcttgtcaggattggaaactgtggatcctcagagaaccagtgcgtatcttaggcagatggcttaactttcacacatcagtgaagattgttgataaacctttgctttggagtgctctttcctgaactttccaagagcttggagtgccctttcctgaactctgcaaaattcttaaaaacaaaaccaaattagaccgagaaagagggaatttaggaggtggaaggcatgatggtcgttagtcctgcgagtgggtgttcatggcaaccaggggccggtctgttgatatgtagaggaaccacagccctcacagaacactgtggacagggagtttcaaggaaaatgttgcattcatcacattctagggaatgaactgcatggtaggcagtgagtcactcatcctgaccgcctgttctgtctgagtcaggaaggaggaaatattttgtaaccatgcacatttctgatagaaaggccaggaggatgtagactctgtccttgttcaggtccccaccttgctgaaggcgccagagctcgtgtagggccaatgagccggctcaggctgagcactgctgagtgggtagatgttactctccaggtaggtggtgctgtgataagcatggaagtcagggcagggttagcagcctgcctgcgatgtgcactccagatgagcggagggagcagttcagcacagcaccgaggg

SEQ ID NO: 6790 - DNA, 2300 bp, Homo sapien
taaaggaaagaggtttaattgactcacagttccacatggctggggaggcctcaagaaacttacaatcatggtggaagggaaagcaaacatgtccttctttgcatgatggcaggaaggagaagtgccaagcaaaaagagaaaagacgcttctaaaaccgtcagatctcatgagaacgcacccactgtcaggagaacagcatgagggtaacctacctcatgattcaatttcctcccaccaggtccttcccacgacacatggggattatgggaactacagttcaagatgagatttgggtggggacacagccaaaccatatcactctgcctaagttaaaggcaacagacccacacacagtgagaagcagatcccatgtggagggttgtattttcacgttatgttggcattgtaactagctctcagggtgagttgcttctgcgctgaatctgtgttgtttattgatagctgaggttctgaagttgttgcaaagacacctggggtgtggccaccgaaatgtaaatgcagtagcatttctattatgtactctcatgttgagatgaaaacgcctctggcttggccattttgagtgatggatcttaaggctaggacctttttttttttttttttaaccatggagtatagctaaaccagctgccccatctaagtaaacgtctttgttattttttctagtccatctgagctgagctggagcaagttctcttgcctccctaatctaaattctgcaaagcttgtggagccactattgtatccctggtgccaggtgatcaggatgcagacaactaggaccctgccccaaggaggcagagagaagggcagcttacagagggagatggaccatgaaagaggagccctccaccatgtaccaaagctcctcctgtagcctcagttcacaccctgacctatcacccctccccattctcctttatagcttccaggtttgcacagacacatgtggagaggcagtagagcaaagcctaacacacatgggctctggagtctacctgggtttaagcccaggctccactctgttccagctgtttgatcttgagcaaataatcgatcttctctgtgagtcagtttccttattgctaaaatctgactaataatacttcacagaattgttgtagatagtcattgagagttgtttctgtttgaactgttccctgataagatagaaacaggttgctattcacatacagtggttgctgtgcctgttctctattcgccatctttgaagagtgttaattatgctatcatttgtactttgggctgtgttagacaccagtgggagggatcctgagctcaggagccttccatttaagccccaaatggacaaattgcaaaaggaaaaggcaagatcagtagcacagagtagaataggagcacaggagtggtcttcatgggaatgtcacatgtataatttattcattctctcttgcagtagtagttacggagtgcctattccataccagtcactgtgtagaagttctgggcttatgatgatcagccaggtgggccactggccgaaaataactcatagtttatttgggagctagatgagtaaacaaagttatggttcagtgcgattagtgtgacagtggggtcagcataagatcctattctaaattggaagtgtatgtcagggtggcttcctggaggaggtggtgttaagccagatccccaaaggagcagaagttaggcaggcagagtgaggacatgagcatgaaaggcgttctgagcagagggaatagcctgtgcaaaggcctgcaggtgattgagtgtacagtgcatttcatcatggagtcttggctgtggagcaaactgaatgtgctgctgtcattgcagggatatggagaaggtggagcggcaggctgtcccccaggccaaccacacagagtcctgtcacgaatgtggccgggtgggacccggacatacgagagattgtcctcatcgtggccatgatgacattgtcaacttcgagaggcaggagcaggagggagagcagtaccgttcccagagggacccactggagggcaagcgggaccggagcaaggccaggtctccgtactcgccagccgaggaggatgccttgtttatggatttacccactggcccaagaggccagcaggcacagccccaacgggcagagaagaatggaatgctgcctgcctcatatggcccaggagaacagaatgggactggtgggtaccagcgggcctttcctcccaggaccaaccctgaaaaacacagccaaaggaagagcaatctggcccaggtggag

SEQ ID NO: 6791 - DNA, 2300 bp, Homo sapien
ccaatctgacatctaaaaaaatagtatttcaccgtaagttgcagttcttctattatgaagtggctcagtatcttttcatttgcttaaaagttatctgtattacttttctattaactgtgggttcataccctttgcccatttaatgtattatttaaaatcaatgtttagctagcaaaacaccgctttcctattttcatttgctcaacaacctcctcagaggcaggaggttccttcagacaggtgtcccccgtcctctgcaaccagttacctcttctaactcataaatgcctccttccccaacaccactgtctgttcccaaggaagggcccctttatggtctcatcaacatctcacagccctcccaaaattatgtgcatgctctcccatccctcccctctggagtgctcttttcccagtcaaacctaaccagtccttcagggtccagcctaattccacctgtttgggcacctttctgaataactagtgctcacattgcatacagtctcactttcaggcgcgcctcctcccatcaatcagagcctatgtcccgagaaggctgggcctgacaacagctggagcccagctgctgctctgtctttgctcagtgtgtgtgtgtgtgtgtgtgtgtgtgtgtggccgggagtctgagtgtggagtatgtttcattcactcatcctgcagtttttttttttagactgagtctcgctgttgcacaggttgcagggcagcggcgcgatctcggctcactgcaacctctgcctccctggttcaagcgattttcccgcctcagcctcctgagtagctgggattacaggcgcccgccaccacgcccggctagcttttgtatttttttggtagagacggggtttcaccatgttggccaggctggaatagaactcctgacctcaagtgattcacccgcctcggcctccaagagtgctgggattacaggcctgagccaccgtgccccaccccatcctacagttattgaatgcgtaatgcatacatgagtcaggtgctgttccaggcattggagaccaggcagtgtatgaggtagatcaaagccccttctctcatccagctgacatgttggaactaatatacaacaaacaagacaaacacaaatatcaattaaatgtaaacaagtaatgaaatagcgagggaaggaggggaaggattttctttgcagagggctcagggagggctccccgaggagataagataggagtaaagacccgaatatgagagggtgccgccactgcaaagagctttgcagggccccctagaggccccgcctggccaccgctcttccagagatggacgtgctgccgagccctcaaaaccccttttttctgttacttgacagaaactgaaggcaagagcttgcgatccctgcaacctcagtggtgtgtggcggtaaccctgctccctcctgtttcacatcccagctgaaaacttgggaaaatgaaatcgcgctcggcctgccgttgatagagcacctactacatgccatggtccggttaagcactttatgcgattgttacttcatttaatctacacaacaatcccgtgtggactcgattaaccttacaggggaagagaaggaggctgggaatatggcaggaacctgagtgttaacttggttcacacacaagcggagttcccgggtcgggaagttctgtggtgcgggtcggctggggtttactgagcgttcgggcgctcgccgttttcggagttggtcgggtccaaccgcgcgccccgaagctgcccaggcgcgcccgccagcggcccccgccagcggccccccgcgccgcccgggtctcccggcctcgggggcaaaggggagcgccggtgccagcaggctgggggcggggaaggctcggggacaaaggccgcgggcactgcgctgggttggccggagcggctgcgaactccgggcgccaggacccggccgggcggtcgctccctcaggagcccgcgcctggatggagcgcctcgcggcgccgccgggccacgcgcaggccgagcccccgccaccgcccccgcctccgcccctgcccgcgcccccgccccctcccccccaccccgcggcggctccgcgctcggcgaacatggcggcggcgacggtcgggcgggacactttacctgagcattggtcctacggggtgtgccgggatggccgcgtcttcttcatcaagtgcggcgcgaggacccggggacgcggggacgcgggtgggggcgcgggggcgggggccgggcgggcacccggcgggctgtggcggcgctaacaggtgcacctc

SEQ ID NO: 6792 - DNA, 2300 bp, Homo sapien
taaatttgagatacctattccatatctgaactaaaaatgtaaaattggctaatgataaactttgctagaaaaaaacattacccaaatagggtacccgatttgactaaaattcctaatgctttgggaaaagttattaatcaaatagtgacagattatggcttttttgggggggaggggtgttgttttcttggagaactgacccgtttgttgttataaagggttctctctttatccctgatactttttttttgagacggagtctcgctctgccacctaggctggagtgcagtggtgcgatcgtggcttactgcaagctccgcctcccgggttcacgccattctcctgcctcagcctcctgagtagctgggactacaggcgcccgccaccacgcccgtctaatttttttgtatttttagtagagacggggtttcaccgtgttagccaggatggtctcgatctcttgatctcgtgatccgcccgcctcagcctcccaaagtgctgggattacaggcgtgagccaccgcgcccggctatccctgataactttatttcaaatagtgacaggttaaaagttaagagcggatgtttcagtatctagtttcccagcgtcttgccagttactttaagcttgtcgacaggagtttgatttcactgacctccctccttcctagagctatgcttactttttaaaattttaagaagctgcttcatttgcccattctttcaacgcattgttgtgtaccggcactgagtcagtctttttctttctttccttttttttttttttttttaagacagagtcttgctctgttgcccaggctggcgcgcagtggtgctatctcggctcaccgcaatgtccttcccggctccagagattctccacctcagcctccttcgtagctggaaccaaaggcacgagcgagcacgcccggctaattctttgtatttatagagagggggtttcgccatgttgcccaggctaggtctgtcttaaaagagcttcttccggccaggcgcggtggctcacgcctgtaatcccagcactttgggaggccgaggcgggcggatcacctgaggtcgggaatttaagaccagcctgaccaacatggaaaaacccgtctctactaaaaatacaaaattagctggaagtggtggcgcatgcctgtgatcccagctattcaggaggctgaggcaggagaatcgcttgaagccgggaggcggagggtgcggcaagccgagatcgcgccattgcactccagcctgcgaatcaagagcgaaactccgtctcaaaaaaaaaaaaaagcttcttccttgacggttcccttttcccatgaaattcaaatgcttcattttatccctcatcctcttggcctttgcagtcttgctcccaaggctcttccctgcccgccaactctctcacttgggaacatagctccgtaagcctctgcccaacccttctccccggcgagcccagcgccccagagccctgcgcaggggaattcgagtgcggagggcggcaggcatccgtggggacctggttcaactccttagaccggttcttcaccgtcagcgactctcccctgacagattagggtaggatttagaaatgagaaatggaagcgctggctgggcggtagccgctgccatggcttcccgtgtggtcctcatcacatgctattgtatctgttaatttattaggcgcagggccgactctgagggatctagtgccaggacaaagccaggcactggtgaatgagcaaacacctgtgtatggctgcttcttccagccctacctgctccatacccacccccagcgcagcattcgaatctttgtgatctcggcgtccacagggaatttcgacgcaagctggcgtcagcctcaaattcccgctctggcaacaaggctgaccaaagaccgatgcatgccgggatgaggctggattgacgatctcttgcgacgctgaaatgcatttcgggagatgtagtcacacagacgggcggtggctgcgcagcgtagctccgcctcctgcgtgagaggaagcggggacgtgtgaggtcacttcctgcgtgttgggtggcttcctgcggcgtttccactctcgctctcctttcgttgcctgatcgccgccatcatgggtcgcatgcatgctcccgggtgagctcggggcatcaagccggattgctgggcggggggtgggaggaagacagggagtgtgggcagcgggccgaggggatgatgttctgggctgctctggcactagccgccacctcacctcgagactgcttctctccccaggaag

SEQ ID NO: 6793 - DNA, 2300 bp, Homo sapien
gccaggagttcaagaccagcctgggtaacataatgagacctcccccatctctaaacgacaagaacaacaaagtaaattgtagacattagtactttcctctaagtgctttgtgcatatgtagcaagagttccatatttacagctttttcttttgatataaagtttacatacagtaaagtgtgtatattttaaatatacattgtgcccatgctttgtagtctaccacagaagggaaaatagttgtatgaaggaattgcaaaataatacactaagaacattccaaggacattctttgaattcctctttcttcatgacctccttagtaaaaatttttttttttgtttagtattacctcaacacttaggattttcatttgtattatactaatttgaatttattttgggtttttccctacctccttgtctcacgtatatattgagcatatacggtagacaagcattgtgtttgctagaaagaaagaccatagaatgtaaacaggagctctcttgctttctaggtatttaaactggatgtatcacaaaccagattagattaataatacgtaccatttatttaatgcttatgcccaaggccaatgagaggcacttttatgtgtattatttcatttagtttgtgtactaatttagattgatacttttttattttaaaaattaggaaactaagacatacagaaaagttttcatttgcccaaggtcatataccttctttttattttttttgagacggagtctctctctgtcgcccaggctggaatgcagtgacgtgatctcggctcactgcaagctccgcctcccgggttcatgccattctcctgcctcagcctcctgagtagctgggactacaggtgcccgccaccatgcccggctaattttttgtatatttagtagagacggggtttcactgtgttagccaggatggtctcgatctcctgaccttgtgatctgcccacctcggcctcccaaagtgctgagattacaggtgtgagccaccgagcccggccagtcatataccttcttaaactaaggtgatgtgactccagaatccatatttaacccttttatcatattgattagaagcaggaaatgtgctcggtgttacagagtagctaagcaacctttcagttggtcgtattgcttcacagggtaatcttggtctgaattaagtgtttgtcttaaatagaggagtataaatttttataagctaaactatgacaaagtttaaaaattatcttctcatcttttcgtgaagaataaaaatatttaaggattttgaaaaggagaaattttggtattataactattgatttaactgcagagaatcagaatagaaatgtaattaaaactatatggccaattcagctataatttaatctttgagtgaaatattgcctcagaacttctaataagccttaacactttgtcttattattcaaatccatgttacattatacatttttaatatttctggaagattattaaacctttatcagttttgcacatagtattttgataaaataatagtttcctgttttattgactaggtattggatgtttttattgctaattggcttttgagcaatttaacaaatagcaaaagatcaaaaaccattttgacttgctatttctgcatattggtaaaccctgtctgaactgttgaaaatatgtgactagcacttaagtcatttcatgctaagaattctgccagaagtaccactggttaatggcagccattttgactgctaaaatgaaagcgtctaaagttcatttactgtgccagctttccagttgtgtcaggaaatggggttaaagtaatgtgtatctgaacatcttctgtaacccaacagtgtataaggtgttaagtgttccttcacccagattttatctgttttattttgtttattttgtagtatatttttctaagtggcttaaagtccaaagtcatatggggtaggttgcaaacaaaatatatttatgtttagaaatctaattgagtgttatgtttatttttatgtataggccttgctattttggaagctacaagaaaaaaatagaggaaggaaggtttggtctttttagtggacatggctcagatatctagcaacagcggatttaaagaatgtccatcttcacatccggaaccaacaagagcaaaagatgtggacaaagaagaagcattacagatggaagcagaggctttagcaaaactgcaaaaggatagacaagtgactgacaatcagagaggctttgagttgtcaagcagcaccagaaaaaaagcacaggt

SEQ ID NO: 6794 - DNA, 2300 bp, Homo sapien
agtttgtactgtctcccagaagtctgtgttcctactgtttacacatgcatcttcacaagccattgctgacagatgagatatgctgagagagggttacctgttcagattcttgacacctggcaacttgtgaaagctaatttttttggaatctggaaaactatcaaactccttttctttctcttcaccttattgggaaccttttggttgatcagagcctaccatgtatcagtcattcaaaagctataataaaataatgaattcagaactgcaacaaggaagtgactcaaggaccagggccctctgctgctgagactcaggggaaatacgtttcattaaaaaaaaaaattagaagaaaaaatccagtctgtctcgctggatcaaaaaaaaagaaaggaagaaagagagagagggagagaggaataaagaaagagaaagaaaaagaaagaaagaaaaagaaagaaagaaagaaagaaagaaagaaagaaagaaaacaaaagaaaaaaaaaagacagacaaatagttactctttcctgaagactcagtgttctcccaaggcctcttccttctttcctgaaggcacactcagatctggagcagaagctaggaagctaccctgagataaatcactttccccaccctttttaatcttgtgaaagagctgctgccaattttagaaattcctcctttgatcagaagataaagcagaacaatgctgcggaactaagttgatttctaagggacattcttctagagtgtgtagcctgcctggaagtgtgtgtgcatagaggaggggcggggttgggggaaagataggagttggaaggggggggggtgtacaacagccagtagctacagccgtaagaaataatcacatttgtttctagaattccccatagaatagaaactccatccaattttaccatccctgcggaggtgcaggcatgtttattacagcgctatgagggattcatccactccacattccccattgccctagccccctttcgccaacccccgtccctgccaaatcaggccaatttctttctttccagttatttgctgaaagttcaacttctcttagagccttctaattatgcgtatatcatataggctgataatttttagtttaggctgagaaatgcagcctaaatcagtctgccacatcagattgtgaacgtctggatggtgtggacccccttctcctactgcttaaaagacaatcttgttgtaaaacgctatggaatcgttcctctccccttaacatctttgtgccccagaagccccatctgtaaatggggataattttcctatatcttcccatggttacgtaatttttagatctaacacgtgaggaccaaacgctttacaagcataatctcattaaattctcaataagaatatattattatggaggttgcatgtgaaaatactttgtaatgtagaaagagccgtctggctgtgagttattatcagggggttatcttccttacctggctgttgtgaggatgaaacgagacgccgacctgaaagcgttttacgtgctatcaagcattttacagaaaccacgtgataggctactaattacccaccgtataccacctgacccaccgtgaggcctcggtaaatactggttggagtggacgagtttaagtcttgcctgttcctttcagtcttccaatcacaaagtaatctcggcgccgccaggggccaagacacaaatctgggaacctcagcctagatggaggagggtgcggggtcccgggagaggggatgagaacaatagggtacttcagtgcccgggccctgtttagcgggtcttcggactcagggcccgaggggcggccagctggggtgtccggagagctcccctccccaggtctggggtgtgcacggagaggcgtccagagcctgctcagcattcctcgggagagagccagaccctggtcccccgggcccgtgcgccccagcgccccagctcccttgctcacgccaccccggcagcgtccaagccccgcccgccagctcaggtaggccgtccgcgccagccaattcgcaacaagtccgggcggggaaggcggtgcttccctgtccggaagtgacgtgctgcgcttggctggctgtggagtcggccgaagctttcggcggcggctgagccagctgaggggaaaaatggctcggactgtggcggcttcggcggctcaggttgtggtagaggcggaggctcaggcagcttgaggtgaggagcggtcggtgcggctggggacgatattcggggtcctgctctgcaagggtggagaggg

SEQ ID NO: 6795 - DNA, 2300 bp, Homo sapien
atggatcttttgaagatatggtttataccacttggggagtaataagatttcttctaaacctgacccaaggatatttgacaccagggatttgtgtgggttttttgtactttttacgtatttattttttctgtagagttgaggtctcactatgctgccaaggctggtcttgaactactggcctcaagccatcctcctgctttggcctctcaaattgttgggattacaggtgtgattcaccatgtccagccaacaccaaggatatttaacaacaaacatataataagaattatgtcaatatcagtgaattttcttggaaagtattttatgagtcaaattttattgattcagtttaattccatgattaatgcatgcactataaagctcttgaatacactgtggggcagcaaaactctacctccgtcctcttagggtcctggctgagcctgggaatcacattgacataagacaaattaacaggagaaaagcatagaaatacaagttttacatggcaccagagtcctcacaaagaaatgaagatacaaaggagcagtgagagtcacttatatactgaattggactttggacaaagagtagtaactgtgaaaatgtgataaggcaaaagagcttggactagggtagctcattggatagagaagtgactaggaagataagggttagttttaaaaggtttgtttgtacagaattttcttcctgtccttgataataagaatgtttgttggtttatagggagggcatctttcacataggaacttcatctcttgcttttaagaaacaaaatgaaggtcagagtgatcttcttgtatttgctgttttctttttttaatctttaattcaggccaggtgcggcggctcatgcccgtaatcccagcactttcggaggccgaggcagatggatcatgaggtcaggagtttgagaccagcctggccaacatagtgaaaccccgtctgtactaaaaatacaaaaagttagctggggatggttgtgggtgcctgtaatcccagctgcttgggaggctgaggcaggagaatcgtttgaacctgggaggtggagattgcagtgagccgagatctcaccactgcactctagccccagcaacagtgcgagattctgtctcaaaaagaaaaagaaaaaaaaaaaaaatatatatatatatatatatatatatataattcaaaatagtcaatatgccagaacagcatactttggggtggcatattcttcatgctttcaatacaatgggggcaaaatactcccagaagtcaagggtggcaggatcggaatattcttggggttaaaacagcagtgtatcaatattccactgcttccatccttgtcacaatgaatttcctaaggtctacatagcttctcatgtcatagattaccttcccctcctacaacatatttcccaacattacctcacctctttgttatatggaattccccaaaccagtgtcacaaacttgaatgcccacaagtgctaggtggataatatgagtaaaactaactaaatgaggactgtggtaaactaagagtacctgtctcatccaaaaaaagaaagctgttagtgtgctccagccagctgttgccaggtaggaatgcagaccaaaggttgtcagaactccaacatttttaaaaagaagccagaaatcctgatttttattatagaaattccaaatttggcaactaactggggaagaaacacacaaaatcctgtgtgcaggccaacaaaacatgtctatgggccagatcccacccctgggcagcagtcttgtgatctttgtcctaaaactttcaaacttttctatgttatcatgcttgaaggaatgaatgactgctccattcccttatgacatcatgatcactgacttcccaaatatgggcccaacccttttcctgttgtgcacctcccactggtgatttcagagtttgaccatccctttaagatgtcaagtttttgtaatgtcctgagccctgtctttgtgatgtcataaactatatgaacagtcttcccctccacttttgagggttgcttggccacaccccctatgacatcatgaattgctctaacaccttggaataacaacttattcctccatattattgcaagcctttgcacatctctttgtatcatccccctatgacatcatgtgttaatctcatctcaggactgcaacccaagattgcagtgagtgggaagatacaatttttacagcatcaccaaaaaggataaggttatttgggtaagttcatgatgtcataagagaatgtctgcatcagt

SEQ ID NO: 6796 - DNA, 2300 bp, Homo sapien
tttggcctctcaaattgttgggattacaggtgtgattcaccatgtccagccaacaccaaggatatttaacaacaaacatataataagaattatgtcaatatcagtgaattttcttggaaagtattttatgagtcaaattttattgattcagtttaattccatgattaatgcatgcactataaagctcttgaatacactgtggggcagcaaaactctacctccgtcctcttagggtcctggctgagcctgggaatcacattgacataagacaaattaacaggagaaaagcatagaaatacaagttttacatggcaccagagtcctcacaaagaaatgaagatacaaaggagcagtgagagtcacttatatactgaattggactttggacaaagagtagtaactgtgaaaatgtgataaggcaaaagagcttggactagggtagctcattggatagagaagtgactaggaagataagggttagttttaaaaggtttgtttgtacagaattttcttcctgtccttgataataagaatgtttgttggtttatagggagggcatctttcacataggaacttcatctcttgcttttaagaaacaaaatgaaggtcagagtgatcttcttgtatttgctgttttctttttttaatctttaattcaggccaggtgcggcggctcatgcccgtaatcccagcactttcggaggccgaggcagatggatcatgaggtcaggagtttgagaccagcctggccaacatagtgaaaccccgtctgtactaaaaatacaaaaagttagctggggatggttgtgggtgcctgtaatcccagctgcttgggaggctgaggcaggagaatcgtttgaacctgggaggtggagattgcagtgagccgagatctcaccactgcactctagccccagcaacagtgcgagattctgtctcaaaaagaaaaagaaaaaaaaaaaaaatatatatatatatatatatatatatataattcaaaatagtcaatatgccagaacagcatactttggggtggcatattcttcatgctttcaatacaatgggggcaaaatactcccagaagtcaagggtggcaggatcggaatattcttggggttaaaacagcagtgtatcaatattccactgcttccatccttgtcacaatgaatttcctaaggtctacatagcttctcatgtcatagattaccttcccctcctacaacatatttcccaacattacctcacctctttgttatatggaattccccaaaccagtgtcacaaacttgaatgcccacaagtgctaggtggataatatgagtaaaactaactaaatgaggactgtggtaaactaagagtacctgtctcatccaaaaaaagaaagctgttagtgtgctccagccagctgttgccaggtaggaatgcagaccaaaggttgtcagaactccaacatttttaaaaagaagccagaaatcctgatttttattatagaaattccaaatttggcaactaactggggaagaaacacacaaaatcctgtgtgcaggccaacaaaacatgtctatgggccagatcccacccctgggcagcagtcttgtgatctttgtcctaaaactttcaaacttttctatgttatcatgcttgaaggaatgaatgactgctccattcccttatgacatcatgatcactgacttcccaaatatgggcccaacccttttcctgttgtgcacctcccactggtgatttcagagtttgaccatccctttaagatgtcaagtttttgtaatgtcctgagccctgtctttgtgatgtcataaactatatgaacagtcttcccctccacttttgagggttgcttggccacaccccctatgacatcatgaattgctctaacaccttggaataacaacttattcctccatattattgcaagcctttgcacatctctttgtatcatccccctatgacatcatgtgttaatctcatctcaggactgcaacccaagattgcagtgagtgggaagatacaatttttacagcatcaccaaaaaggataaggttatttgggtaagttcatgatgtcataagagaatgtctgcatcagtagagctttcaaaaagaatcacagctgggcatggtagtgtgtgcccttagtcccagctacttggaaggctgaggcaggaggatcccttgatcctagaagtttgaggctatagtgcacaataatcacatctgtgaattgccattgtattccaacctgggcaatatagtgagactctctctctcaaaaaaagaaaaaaaa

SEQ ID NO: 6797 - DNA, 2300 bp, Homo sapien
gcaaggagcagtagctctgctgctgccgggtactgcggcttcaataaaagttgctgtttaacaccaccagctcacgcttgaattctttactgggtgaagccaagaatcctcaattttggcgctttcctgtcctgcatcagtctcctgctcctaggagttcacccttgtttgtttgttcgttttgaggcggagtttcgctcttgtcgcccaggctggagggtcctcttctcctgaacctcaaaaaggagcctaaccttgaggtactgatctatgtatgtggatgagaagtgttagtaaagataattgaggccaggtgtggtggttcacgcttctaatctttgagaagctgaggaaggcagagcgcttgagtccaggacttcgagaccagcctggataacatggcaaaaatccgtctctacaaaaaaatgccaaaaaattagccaggcgtggtggtgtgtgcttgtagtcccagctacttgggaggctgaggtgggaggattgcctgagcctgcgaggttgaggctgcagtgagctgagattgcgccactacacttcagcctgggcaacagaaggagactctatctctaaataaataaataaatacgattgggttgaaatctagagacctaagttatagtcccagctcagccactaatctgagaatggttaacatttatttaaaatttcctatgtgccagtcactttttaaattaatttgctatgctgtaagtaggagggtactgttattatgttcattttacagacaaggacatggaggcagagagcacttaaataactggcaaattacacggttaggggcacacagagtccagttgtgcaacagaggcaatctggctggtagtacttcctgataacagaagctttcattgctaacatactatgtggcagattctgtactgtgtgtttttgtttgtttgtttttttgagacagggtctcactctgtggcacaatgatcatggttcactgcagcctcggccttctgagctcaagtgatcctcccgcctctgcctccgcctcctgagtagctgggactacagatgtgcgacacagcacctggcaaatttttaagtattttcttcagactgaaacatcattgtgttaaagataaaaaagtaaaaaatattcttgtagagataggatctcactgttgtccagattggtctcaaatttttgagctcaagccatcctcctgccttggcctcccaaagtgctggcattacagggtgagtcaccatgcctagtctgtactgttttcctggcaatgttatctcattcaatcttcgtgaataaccctaaggtagatatgataccaatttttcaggtgaaaaaaactaatcggcaggatgaaacttcgtaaacagcctgtggctccaaaagcttctggaaggctcaagctacccatgtgcatctttgagcctcagtttccccatctttaaaatgaggggtttggaatagatgtctgttctctggggcaggatgcagaggaaagagctgtctgcgaatgggcaagagagaaggtgggtaaatacagttaaaccacagtgaccgagggcccagcacaacgggggtgggtgcggttacaaatgccgttaagattcccgccaaggcggaggacgggggtgtcagagccgagcgaggcctgtgggcgagaataggcctgacagccattctccgacctgcgtgggcgctgcaggcgcaggccagaggccaagggagaggcgatccctggggctctgcccgggtctcaggacggcacctcacccgcccgagtcctgctccacaggattctccgggtaagctagggaaggaagaggcgcggcctcctgagcccgcatctcagagcgccacgtccctcctggctcagcctcccaccaggctccacagcttcggccctcctcaccgcccgcctccaggctccccggcgcggccttgtccctgctcccgccaatcggcgtcgtcagcaatcgcgaaccggaccaatcagcggccgcagagtgtgggaactgtcgccatggcagccaggaggcgggcgcgcgcggcgggaggaggggcagagcggagcggtgggccgggggctggaggacaggtttgtgcgctggacgcaagcaccaggcgcagcctcgctcgccgagacccggccaggtaaggccggtggccgcgcggtaggtgcggagcagcgcggcgggagattaggggtgggggagtccggagataaggctccggtcttcgcctgccttgccagagcagagaggatggtgggggccgtgctgtgggcggg

SEQ ID NO: 6798 - DNA, 2300 bp, Homo sapien
ctgtttttccttttgttcaaatgagtacataaatatatattacttatttccccttccttcttacctccaaaggcgtaatcctatagatactcttttatactttgctaaccatagaattttaaagctaaatcagactttattgttgtagttttgagattattctttcctcattttttttcttttagacattagatcagcaacagttcttcacagaggaagaactaaaagaatatgaaaatattattgctttacaagaaaatgaacttaagaagaaggcagatgagcttcagaaacaaaaagaagagctacaacgtcagcatgatcaactggaggctcagaagctggaatatcatcaggtggcattttgtcaaaagattatggcattaaaaagattttaggtgctttgttaaaagcctgtgtttttgtaacatatttcattgtactatatagtacactgctatagctatactatagtattttaaattttaatactttaaaactgttttgtggaatattaatctaaattttattttatttcattttattttattttgagacagcctgtctcccaggctggagtatagtgctgtgatcatagctcactgcagcctcaaactcctgggctcaagtgatcctcccacctcagcctccccagtagctaggactacaggtgcatgccagtgttcctggctaatgttaatattttttgtagagaccaggtctcattgtgttgccgaggctggtctcgaactcctggccttaagtgatcttcccacctgggcctctgaaattgttgggactataggcgtgagccactgcacctagtcaaatctaaatcttatagtttgaatatctttgttttagaaaacaattttcatttactttgttgtgctttgtcaaaggtcacacatatgatagaaaatcaagttatacttttaactttcattttccattcaccaggtcatacagcagatggaacaaaaaaaattacaacaaggaattcctccatcagggccagctggagaattgaagtttgagccacgtgtgtaattttgtttgattatttatttaggaaaataaattattttatcaattgaaatccacatttattacaaatataatttcaaatcattaagatgttatgttattttttgtgtattttttgtggtattagagcaatttagattatagaaaaatgaaaatgcctccaaaagttttatgtagcagcaaattttaagtgctgtatcatttgtataatttgataaccatatttatggtaaaatgatttatttcaactttatttgtaattctttctaattatattaatcttaccagagaatatgttttttaaaattgtgatctatgattagctaagcatattttttaaaacaagtatatttgtatatgaaggaacatttagaataaaggaagatacttttaaaataagaacttttttcttttttccaacagacatttaaagtctgaagtccaccagaacttggaagaaagctgttaactcaacatctatttcatctttttagctcccttcctttttctctgctcaataaatattttaaaagcatatttgaaataaagggagatactttttaaatgaaaacactttttttgggacacagatattaaaggattgaagtttatcagaaccaggaagaaaacaaactcactgtctgctctctgctctcacattcacacggctcttttatttatttttttgttctcctttaatgatttaattaagtggctttatgccataatttagtgaaactattaggaactatttaagtgagaaaactctgcctcttgcttttaaattagattgctctcacttactcgtaaacataggtattcttttatgggtgcttatcattccttctttcaataaatgtctgtttgatattaacaattctggaaaggccacagtatttccctgtgtttcctggtaacgtttttctagttttggcaacctcaactgctagaaattcttcacctgaatcacttttgctaccacttcaggtcatttttcattcttttttattttgctctatactttatcatttaagattaggttatgttacatataacagaaaaaacaaagataacagtggtttaaactaaataggagtttttcttcttacataagtctagaagtaggtggtgtccaggttcctatctttctgctctgctatcctcagtgcatgatttttatcctcagattacctcactctcactgttcaagtttgctcctggaggcagtggggaaggcaagaaaactggacttt

SEQ ID NO: 6799 - DNA, 2300 bp, Homo sapien
cctgtgcccaggaaaatattggaggcctttttcaaggaaaaaggggaaaacagatattggttgacaaatagcagtctctgccatactgtccctggatacatgtctttgagtgaatgtcccttatttaccattctgattacttgttggatattttcaatatgtgttacaatatggttccaaaattgtatgtgatattccaacagcaagttggatgcaatgtgtcataaaaatgacctcagtgtcaaccagcatttgaataccgtgtctcaatgctgtgcaccaataaagaacacagaaagtcagagttttccataaataattcctgagaatatatgcttattttgtttgagaagcatcgtgaggtatctgctgtgtgctttagggttgaatggaaagttggcaaaagtattaaaagacatgttcaggccgggtgtggtggctcacgcctgtgatcccagcactttgggaggccgaggtgggcggatcacttgaggtcaggagttcaagaccagcctggccaacatggtgaaactctgtctctactaaaaatacaaaaattagctgggtgtggtggcaggcacctgcaatcccagctacttgggaggatgaagctgaggcacaataatctcttgaacctgggaggcagaggttgcagtgagctgagatcacgccactgcactccagcctgggcaacagaacgagactctgtctcaccaaaaaaaaaaaaaaaaaaaaaaaaaaaaaaaagatgttcaaatagacatgatattggtaaaaacgaaaacacaggtaatgacttttcattctaatgaaatataaatagagaaacctgccggttttaccctttagagtaaaaagggtacaaaaaaattaccaaaacagtaaaaattaccaaaagagtaatttgataatttctacagggtgatgtgtatgtgtcacaactttgtgaatcactattctgggcatgtataagaagtcgtcatatacctccattgggaatgttatttaatgatgtcactaataccagacaaggatgtctcctcaggtaaggctccttggaggaggcagaggttgagaagaggtgtaatttaggttttaaaaattcaatagctggacttaaccttgcatatctctacctgttataacggtggtccggaaggctgcgatctgaaggcccctcagctagttgctgccactgtgggcactctgcgcatctttcacttctgagctctttctgtatgcactctgttctgcagataagtgagaatgtgactatttgcttagtcagtgacagtgtctctaaccctggaaaggaagcttttactctctcagttttagagacatgtgaacaggctggggatatgaggtcacttacccactgtcttataatcagcagatggcatggttggcattggagtttaggtctgtctgtgcttttctgtacattacatcctttttaatgatgcgaaggaaaaatgcagtagggtcaatgagacaaatggaatgcaggttgctggggaaagaatgcaggttctgcgttataaatgcacacacatttactgtgccacttgggttctgaactttgcggttaaattgatttaaaaactggtgtagaggtggtaaaacttaatcaccgaatgagaatatttgggtttgcttcaggaggtcgcaagccacttcttgattagtagaaatgggaaattaagggccaccttcaggcgtttaactgaattgtcctggggatttaatttgcctttcgacttaatgctaaatttttgttgtttttggtttttaaagtaatgtaagtttatcgcgccaacggtaagatgtcgctctggacgcgtgcacctgctctcgcaatcaccgactgcggtcagcatcttccttagagcagcgccccgggccacttggatcccggtctcaatttactaagcgaacccagaggatgccccgagtcctggaccgcagagccgctcgcgagaggcaccggggctgtaaccgcgcaacctcgtgccgcgggcggaggcgagggaggattccccggccggtgcccgcccccgggctaaagtgcggcgcgggtggggctggtcacgcgcctggcttcctgcagtgcgaacctgggaaatccaggcgacttcgcagttgccgaagggatctgaagaagtgggatgtgcaaaagcgccggctggaaatcccggctgtgtctccgtcaactctttacgcaacagaggtctccccctgcccttggtttctaccgggccgcctgctcccactcggcgaaaaaaattacacaacagcag

SEQ ID NO: 6800 - DNA, 2300 bp, Homo sapien
actgcaggcacagagaagagaacttgtacagggaggcttgccttagacatgtccacagctgcctaggtaagaaagactacacaggagacttgcccagagatgcccacaatggaaaattccattccctgagacatgcgcagtaaggggaacaaagccatatggagtaactcaagctaagggcctgcatgcacactgggaggatagggtagaactaccagaaattcatgctttatgcaaatgagatgcccagcactcatcaatttcttacaaaagcctctgtattcaactgtgaaatggcgacactcttttgggccccctcttggcagtggggagctttcttttttcactttttaaatttttgctccaacctcacctttggggtccatgctccttaattttcttggttatgagacaaagaacttcaggtgataccttgggcaatgagagactgctacattgtggtgcattggtgagactgtaaaactatcagtttattgctgataaccccaacatcagcaatgatgcttatggaaaaagaaaacaaaccctttatgatcagctggatcctttagttgtttgcaaagatgactccaatcctacacccttccctgaatccatgtccattgctgtgtaactttgtagtgcctctaactgtgtgacctctttcagccaacttaagaagacagcagtgaaggcgtgccagttccaagtgtaagccccaagaggtcttgtgtgtcttcatttgcttcctcgtgtgcttctaatggtgctgggagaagaacaggtcgagactagcctgctggaggatgagagatgctggctaccacatccttgttgctccagtggaggccaggctagattagatgacagccacctgactccatgtgagcaaatctgagatcagcagagctggcagagccaactctcaaatacttggaaaatacttttaatatgtaaaacattttaaatattacattaatatttaaaatgttttttaaagccactgttttatactggctttgttacacagcataagctaagtgctacaactcctcaggaagctgagctttgaccaaaagaagtgtggtagccacagagatgtgtctgagacccccttcgagagagagcctgtgtgaggagtgcagtcagctgatgggctccagctacagatctcagggatctgcatcagtgttccagctggtgccatgctctccccagactgcttctgccactgactgagcaaggcaggagctccgtgttgggagctgatgctggaatactgaactatatcccgagatctccagctgctgatctcggggatctggggtggccaagactttctcagagtgtatattaggtgctagaataacatcattttatttgatgtcattttgttatcacattgatgaaaaaaaattcagttcccaacctgagccactgtctgtgtggagtttgcatgttctgcatgggttttcatcaggtactctggtttcctcccacatcgcaaaaatgagcacttccagtaaattggggtgtctagatggtgccacagtgagtgagggtgtgggtgtgagcatgccctacagccagataccatcctctccagggttgatgcccacttagtgctctgagccactgggataggctctggccacccacaactctgaactggaatcattgggtgagtaattattatttgtttttagtaatttttttttttttgagacaaagtctcactctgtcacccaggccagagtgcagtggcacaatcttggcttactgcaacctccacctcctgggctcaagcgatactcccacctcagtttcctgagtagctgggactacaggcgcatgtcaccatgcctgtctaattttttgttgttgttgttgttgcgataaggtctcgctgtattgtccaggctggtctcaaactcctgagctcaagctatcctcctgccttgggctcccaaagtgctaggattacaggcatgagccactgtgcctggcctagtattggtcattagtattagtaatcattcctaaatgtatatgtaaacatttatttcagtgttaaatattgaagtgtttggtctttatttagaagtttgatgttgtgttttatgaccagaaatatgctgtgaacttaattctttcttatagcagttagcctatgggaaaattggttttgttctacattattttatttaaagtcataatttccaagatcctatcaactccattaagtgaggacttactgtactgtagcctgaggctcatcttagtcttccctcatcccccct

SEQ ID NO: 6801 - DNA, 2300 bp, Homo sapien
taaatattgtgggggatagggattggttaggcagaaagtcagagaaagggttggggtggcaggtagggacagcaggagctaaggagtgatggtggaagtgtgttaagagtgttggttgatcagggaggtgggagagagattacagcagtggggagggcatcatatcagagagccctgaatgccagagcaaggagtgtgggctatgcccatggacaaaaagggagaagggttttgagcaagaaagcgacttgacaagttcagtatttggtggagatgactataagcaagtgcaggatggagcaaaaggggaggctgagcctttcaggtgggagactcagcctctcagaagggtgagcagcagggagggaggtaaggcctcaaggctgcaccaggaggcagaacccagcctttccagctctgagatttccccaggggcccagcagcttcctccactgtgagatctcccaagagcagagccggggaactgaaagaggactccacaagcctaccactgctccaaagccaccccacctcaacagattgaagggaagtagcaggggcagggctgggcccacagtgaggtgttgcagggatgcccaaggtcatcctggcccaaaatccctgtataacatccctcatggcccaccgacttgatttgggtaccccacagatgtggctcatctctggttattgttattagaactgactcttgcatatgtgaaaccaaagcctgcctctgttccacttagtgtcctggttctaccctttgggccacaaaaaactactagttcatcctccttcaaggccaggtgtttctgcaatagtgcccaaatccctgggggactttccttttctgatggctggacagttgtagttgcctcagagatttccccatgtaaccctgtctccttgagcttcccactctgctcatctcattttaccctccccttcctagacactgcatctttgttaatatagcccatgatcacacccatcctttgtagcggtgttcgctctgcctgcaggtgggtagggagagaaaggaaaatccaatataaaatgcatatcttgcccccactgtggcccacagccacactgccttttccagaccctgtctcaagcccccactccaacaaaatggccgcagatggtcaggggttcttccataaggatctgagccacagacagcggtaaagccgttactgttccaacaacagagatctagcaggctttccctcccagctgagaacccgggtccatgccacagggcagcctcaggctgatgcctgaacagaaacaccaccatgccgggaccaagagcctgggtcccccagtgcccgaggcagccctaacacactgttcaggcctaaataccacccatgacctaacgtggaagaagtcaggtgacaggtgtgagaaagtgtaaagcaagtggcctcggctcaaaccttctttaaagtagggccggaatggctgagaagatggagccgcccaggctgccccacagcagtagcaggtgttaaactgtgctcctttcctgccgaggccttttttttttttttttttttttttttttttaatgagagggagtctgagcttccatcagattgtcaaaggattcaagactaagattaagagcatcccccaaagagaagcagctgcaggttgagaagtcctcggaccgcctaatttccgccagccctgggattggtggcgccgcctctcagcgcctcctttcccggggaacctgcaaacctggcgcggccgagaggcggattactgacccaaatacggatggggatattgggggaggggagccagggcgacagggcggcggccccagactgggagggcgggtcacagatccctcccagccccccactttcgtagagcgtgggcaggaggaacctctgggttccgcggatcagaaaaactccaaaggccgggttgtgagtcccgggaggggaggtggagggcgggggcggggaggggcgcgggaggggcgggggcttgctccggccccgccccctgcgctccggtgcaggtcgggctccccctggcggtccccggccccgttcctctcctcgtgcgcccccctcccgccgtcctagacccctgcctagcccaggtcggtctccgcggacccacggacggacagacagacgggaggacggccagccgcgagcgcccgggcggcgggagggggcggggaggcgacggccgtggcgtgaggagcaggagcaggtgcagcggcggcggcgggcggggccgggacccggcgcggagcgggagccgcggcg

SEQ ID NO: 6802 - DNA, 2300 bp, Homo sapien
ggtttctgagaatggacaaaggccctgaggccatgaggcaggaggattttctggcagaggcagccatgagcaaagtatggaggtgggttggaggtgggacccaggatggtgtttcttgggaccacaaggagcctgggctcatactaggagcatgggaaaggagaagcgagtgcttaggaagggtggcggggcaggaaatcagagagggggaaggacctggggagccagaggaggatgttgatttccagaaggaaaggattaaagagggagaggacttgctggggattctaggtaggaagaaagaaaacaggggccccagggttgggtgcatctgtctgtctgtctttctgggtaatggttgttcagactcccccggccccactcacatctgccaccctccctccctgcaggccagctgactatgatcgtggggcaggtgggctgcggcaagtcctcgctccttctagccgcactgggggagatgcagaaggtctcaggggctgtcttctggagcaggtaatacatgtatcctcagggcccagtggaggggaaatctccttttaaccatcctcctcagttgaggatgcacacacatttattggagggcccactctgtgttcagtgaggactcaataaatgctgctaatggatattctcatcatcatcactagtacgtattcacctcttactatgcgcaggttctttgctaagtcctttgcatgcattatttcatttaatttttatgataactaacaaggtccatactgttctcaattctcatttatagaggaaggttaaactatttgtcctaattcacacagctaataagtggcagagctggaattgaaactcagttctgtcagactctgaatcccatggttactcagatgcacggcagtaatttcccagtgtgggaaattgcaacaccaacattggtttccagcttggtcctgagctgcactgacctacacaccataagtgggtgttctgaagatccagatgtaaccaataaatgttggtttctgggcaaagatcactgtcttaattaaagagccagaaccccaggctcagtcaatcacgaatctgttatttatacccacctacttccaagaagcacttgaaactagttgatgaaagattcatgtaaaaatcaaaaccacaatgagataccatctcacacccgttagaatggtgatcgttaaaaagtcaggaaacaacaaatgctggagaggatgtggagaaataggaacgcttttacactgttggtgggagtgtaaattagttcaaccattgtggaagacagtgcggtgattcctcaaggatctagaaccagaaataccatttgacccagcaattccattactgggtatatacccaaaggattataaatcattctactataaagacacatgcagacgtatgtttattgcagcactattcacaatagcaaagacttggaaacaacccaaatgcccatcaatgatagactggataaagaaaatgtggcacatatacaccatggaatactatgcagacataaaaaaggttgagttcgtgtcctttgcagggacatggatgaagctggaaactatcattctcagcaaactcacacaggaacagaaaagcaaataccacatgttctcactcataagtgggagttgaacaatgagaacacatggacacagggaggggaacatcacacactggggcctgtctgggggtggggggcaaggggagggatagcattaggagaaatacttaatgtagatgaagggttgatgggtgcagcaaaccaccatggcatgtgtatacctatgtaacaaacctgcacgttctgcacgtatatcccagaacttgaagtataataaaaaaagatgcatgtaaaataaaaccctttaaaaaggtaagaaaataggaactgagaaatgaagagggtaaaaagatgttcagcaacctgggcagaggacaactacagccatcaacataaaacctggctctgtgccctctggtagccaagggaaaaagggatctctgggctttggagtattcatttaggaataaaagttgcagccaatcagcagaagggcaagctttccctaccaatcatttctaggggaaaattattgaaggtgtcaggtttttcataagcatgagtacagaactgagcagggagaaagactttgggcccaatgtctgaatatcaacatgcacccccgtttcctgcatttccaagatgtccctgaatggtgtatccaaaagatggcaaatttccctcctcagtggggtcgtgggctagcaga

SEQ ID NO: 6803 - DNA, 2300 bp, Homo sapien
ggagagaccattaaataaccctgattgatcaaggggctgccgtgtgtagtcacccatgggatgaagtagcttggactatctccccaacttgcaaagcacattcatacccatgatctcatcttaatcttctgggttccatattattatcttttccatttagaaataaggaaactgaagtgcagaatggtaacctgcccccaaatcacacaactagtagtagtagagccaggactaggagccctgttctttaaaagtaaatatattattactgctaaaaagaaagatagcattgctgaaagtgtgaaaaaactgaaattgtaactacaaaagaaaataacaacattgcagaaaatatgaaaaaaaaaaaccttgaaagcaagaaaaacaaactaaaagaaaaaatcttactgggtgaccatggacctgtcatctcatctctctgaacctcagttgtctcatttttaaagaaagggaatgaggataagcacagcgacggcagccagtacatactgagcaccgccttaccaaatttccaagtctgacctttccctgcaggcttcatgcaagtatacatatttcgtacggctataatcatgggaagcacaattttgtttgccgtttttcacctgacactatcttgtaaagtttttctattgactacacagactcagctagcaccgtcccagcagttgcatttttcaaggttgattaacccctgtccctggtgctggatatttcttgccaccaagttttcactattttggctgatgctgcaagaaacatcttttggcttctgagaaattctccaaagtcagagactgaggcattcagaccctgaactcctgctttcccaaggcttttcacccaaccccatctgccctctgcctcagggcctgggcagagcctcggccttgctgacagcgtgctggagaggctcaccaggctcagcagcctcagggcaggctcagtgaagcttgtaggcaaaggggctgaaggggtctttcttttgtgttcccctgactgttcctaagaacatgtgcatttatgcttcataccctaactaggaaagttctccttaaatctaacccccaaatcccatcttctgttctttctacatacaatataaacttctttgggccacagtcttgtgagaatctctccaaaacgtataggaagacataatgttgtctttacaattgcacggtgtcctccaactgttaagcctgtcccaggtgaggttaagaatttcagtccctctccactgcctcacatccatctggccagatgcgtttcttaaactcctctttatcagcctggggctgtcacccattctacccattggtctgccagtcgctgtaaggttgtcatgtaccagaggcatgagtacaaatgatgggggtggggacgggggacctgaggagctgggttcaagctatgcttccctgcttgctggcactgagaccttgggggaagtcatgttactggcctcccttcagctccctcgcagcttgggtttccccatcagaaaattggaagcgattagaacctgtacttagcaagagttctgggacatcccttgtgtgaaagtgccagatacgctgtaaagcagtacctaggagtgccccacctgggaccacttttgaaaatgtccaagccccaccccaccaccaccaccaccacaaggtaacgttctgccccacttttctcatccatgttgggtggagacttgcgccatccctcggctctctacatccatccgcaccacgcccaggtgaactcacactcgggaccctgaacccgcccactccaggccttgcgggcccttctctcctcttctgcacgccccaccctcctttcccacccagactccagtgtgcccacaccccactccccatcttagcctgcctttcccctctcccccagcgcacgcgtgcatcagggcactcacgaagccaccccggcaacatctgggagcacgcgcctccacatctggaaggtgggcgcaagcgtagcagggccggtcgggttcctcgccgccccccggccccgcaggtggtggagcagggcggggtgagggagggggaggccagcggggctgggcggggcccggggggcgggggcctgacggccgggccgggcggcggagctgcaagggacagaggcgcggcaggcgcgcggagccagcggagccagctgagcccgagcccagcccgcgcccgcgccgccatgcccctggccttctgcggcagcgagaaccactcggccgcctaccgggtggaccagggggtcctcaacaacgg

SEQ ID NO: 6804 - DNA, 2300 bp, Homo sapien
gtggtggtcgtggtggtattggccccagtagacttctaggcaagggtatagatttgagatgcattcattcattcattcattcattcattcactcaacaaatttgtttggcattgattccatgccatgcactgttctaggcatatagtggtaaataaagcaaacacagctatcttcacacaggaggaagctgggggcacagataggaagatgaagaggaaagagctaaggatggagccttaaggaatgctggttaaggaacaggcaaagactgattgtctccaaggaagcttgaaacaaaaattcatgagagaggagaaccaggtctcaatgctattctcaaaacaaagcagggggcattttaaggtggagggagtctgtgggggtaatggccaatgtaaaataaggattggtgtggcaggtgaacagcattcccctggataaggacattcattcacctctgccaggattctaaatacaaaataaacagccatatgacattcttttccaatgtagagaatcaatgaagtaagtcggaggggaatgcattttgtgtggccttttctggaccattcaaaaatcccacaagtctttccattttatcgctgacttaatagttaatgctaaggtgagaaaacagatcatattttaaggttcttctccaagagggatttacatcttaaactaggcaacaaaaatagtgtgcttgtaaaacttcagctattggggagagggacgcagaggggtgtttaggtgccccagagttacaattgtaagtggttacctgatgtaagctgctgtccatctccttgcccctgcccttgacagggcacaaagggctcaggtgcctccctgggttaagttcaggcacaagccccatacttagcctctgatttacacatttttatcacccctctcctagcccctctttcctttcatctctttccaggcctggttcatcattgtctttgatgaatctttcctttcattcctttccaggcctggttcatcattgtctttgcaccaagcactagacctaggagttaagcaaatgctgaccaaattgaattaaatgaaccagagggtctgggccctgggtgaaggtcagccatagatcaaaatgtcactgccaggctctgccaggcttcgatggatatgtgagtgtgttgggtttgggttttgttttgtcttgttttgttgggggtggaggtgttagggaaggtgggaggggaaatcagttgaggggggcactctcacacacactgattcagacccctgcggcccacagtaaaacccagccctgtccccaaggaattcacagaacaaggattgatttctccctggtggaaaagtgcaggaggaagccaggactgaaggtacgctggaggtgagggcgtagcaagggctgacagtccaggagggccatgaacctcgacaagagtatccagagaaggccgggcgcggtggcccgcgcctgtaatcccagcactttgggaggccgaggtgggcagatcacgaggtcaggagatcgagaccttcctggcgaacacggtgaaaccccgtctctactaaaaatacaaaaaaaaaaaattagccgggcgtggtggcgggcgcctgtagtcccagctactcgggaggctgaggcaggagaatggcgtgaacccgggaggcggagcttgcagtgagccaagatcatgccactgcactgtagcctgggcgacagagcgagactccgtctcgggggggaaaaaaaaagaatatccagagaaaacggactagattgccccgccccccgcccgtgtaaatagtttccgtatctctctattccggtccccacaaaaaagtcccaaacctcctccctacgtctccacgatcttcttcctcaaacgcatgtgttcaggtaccacttccagagaaataccagcttgaagcccagctactgccacctcaggcccataggcacactggggcccatttgctcccaggcttcagtgggaggcgacgactcagcaccttcgactccagcctcgcagcggccccgccccacagaggcctggccccgcccctccgcgctcaggccccgcccccagctccgagggcggctggcccggtcgcggtcgcggctctttccagctcctggcagccgggcacccgaaggaacgggtcgtgcaacgacgcagctggacctggcccagccatggaccgaaaagtggcccgagaattccggcataaggtcagagctgcagggcgccccaggcttctgggactccggagtcctgggcgcggtgggtagggggtggac

SEQ ID NO: 6805 - DNA, 2300 bp, Homo sapien
gagtgaccaggacacctgtgtcaggatgcagcaccagctgaatatctgccctgttcctgacatggcatgggctcaggagctgtgctcctgttcttactgcccctcccttccccggtccaaatgaggctggctgcaggagtgtgtggagaccagtgactccttgtctaagcttggtgcatggccctgaatctgggacccagccgtgacctctatccctggtgtcaggctggcttttctgctcactggagatgtgtcacatgtcactgtagataccattacttttccctgtgtccttatgcacctggttggctgagggtggggtccctgtccttggcagtctctgccctagctcctgagcctgctcacctttctttgctcccatttttttataggaaccagtgctcctgccacttccagggagtggactatccccccggagacagtgacatcccatccctgggccactggtgagctccgtaggtagcagccttcttgtcctctctttaaagggaggctgctgactgaagacagtgcagctgatggaactttctgtgaagggacacccagccctgctctgtgcagggagggggaagtgagtgagggtgtctttctgaactctgcagtgacccgagtgcagcaacatggggtgtctgggtcctgcagtgactgggtcggctaaccccagggcccgtctctctctgcagccactgcaaagatggagtcatgagctgtgatagcagagccccaggtaagggtgggtggaggggtggagcccttctgggggctccacatggtaaaggagagtggggagtggagcactgatcaggctgtggcaagcccactccaggttttgccctacattgggccttccgtattccttgccctcttggcaaagactccagcttggagggtggcacctgaagccctgtcccagcctcagccccaccctagtggctgtctctgctgcctgcagaggagaggctgagactttgtcttccttcagggcaatgatctggggcaaccacgttgggtgtctgggcagtttcctgacttcctttgggtcctgatgttttctgtctgagctgtcatgtatctactgaggcggactctgcccaggacaatgctaggtgtggggtcacagaggtaggcaggacagcctgggcttttgagaccctcctaggcaacagagatagggatggggtggaacagtggtcgtgggatgggggtcaacctttgagaggctgtgaggtggagtagggcctgggggctggagcattcagggagggcttcctggggtggaggaagggattggagaataatcatacagtaggtggttaggagcagggcctgcagaatcatccagcctgggttcaaatcttccctggcactcactagctgtgcagccctgggcaacccactttacctctctgggccttcatttcctctttggcatataacctagtttcctgcatcctccccatgttttgtgtataatcctggaagcgcttttcctttggtcacttctggctttggatttctggctctttgggacttttatctcacctcctgtgcctatgcctttctctctggttcatcccagcctgggcatggaactcagctcctttttattaattttcctaaaaaagatcactcacgcagtgtgaatgtgcggggcagaccttatggaaggctgagggagagggggtgcattcatgtcacagaaatagtggtaacaggaccgtgactctccttgtcattcagagtcctctggccccctgccacactgattggtcatcctctttctagccctgctcctggtccctctggggcacttctcactttatggtgactttggggaggaggagaagtggcttcactccattatttgggaaaatgggggacaataatacttcctagagttgttgcaggattcaatatgatgatgcaggggaagcacctggagtagtctggtatggaggacgtgcagagatgggtcctggtggccgcagtcttattgtgtgacagacagcacacatctacccctccctctgtgaggcgtatctgggaaaccaagcaatgcccaggagcgaccagggagggaggagacttccgagcccgtctctccctccatcctccagctgctgcccctgtagcccaggagcccatactgaggccccagggcctccgctcccatcttcttctcttccagctgctgcctgcccagcaggccaggtcttcgtgaactgcagcgacctgcacacggacctggagctgagcagggagaggacgtgtgagcagca

SEQ ID NO: 6806 - DNA, 2300 bp, Homo sapien
ccttgctttttcttcataaggcttctaacctcctggcatcacatacttccttgcttatttgttcattgtctatcaccctgcttacattgacaatgtaagtgccatgtaagcagagtcttggttttgttcattgctctagccccacacttggactggtacctgccacataatggatacctaacaatatgtggatttccgggtgaccccctgcagcttgggtggggtgaggccaggactttgctgcctctgccaggatttagagttactgtcactgctgctccatgatgtagactttactgaatgaacaaatacaggtgggccctatggagtaaagcgaggtgagtacttcatgaagggagaccttcagcaccactaccagcagcagagaagtgaagaagttaggaccccaacagagccctctgagttttgtgggaagggaggacttcttagggcccagaacggccagctagaatgccttccagaagttagtgggaaaggcacaaagatcactcctgcttaaatttctggtttccaggaggggagatccaggcagggatgtatggccaacggagattcctagccagagtgctgagaggactgtgtgaactgcagattcaggaagaggctgagagacccccatgggggtggccggtatgctgaggcttgtatgggagccagatatcccacatcccatggggtggttgcctcctcctgtttccagcctttccagtgaggctgcaggaaagagacacagctaaggcctggagactcgtggcactccgtcagggcatggtaccacagatgagttgtaagcctgcgggacacagcatccaactctgaaagccccttgctcgaataaccctacatcaccgcctgagggcttccatatccttggtctcttcagactgtcatccccaccacaattactccaagaaattactgtcatccccaaatctataactggaaactgaggctcaggaaggagacatgacttccacaaaatcacacagttgggaaactctggagtctgcactcaactggtctgcaaaccgcactctcggagacttcaggtgagatgaggtcaggttctcaggccaggtcctgaagtttgacaccttggcgaaatgcactttccttgactcagcaccgcgagtgaggcggagccaagccccgagcagaagggttttcttcccagctgaagaggcagctcagcctagaccccaggcatggcactggacacccctgctgtggaaacgtgcagatttagatggaggggattcctaacctgggcaggatccgagtttggagagattggcgcgaagctttagcagcaatctccgattcctgtacaaccatagctgggtttctaagcgtctagggaagaaggactgggcccacgacctgctgagcaactcccaggtcggggactggcggaatatcagagcctctacgacccgtttgtctcgggctcgcccacttcaactctcggggtctctccgcctgttgttgcactcgtgcgtttctctgcccctgacgctctaagctttctgctttctgcgtgtctctcagcctctttcggtccctctttcacggtctcactcctcagctctgtgcccccaatgccttgcctctctccaaatctctcacgacctgatttctacagccgctctacccatgggtcccccacaaatcaggggacagaggagtattgaaagtcagctcagaggtgagcgcgcgcagccagcgtttcccgcggatacagcagtcgggtgttggagaggtttggaaagggcgtgccggagagccaagtgcagccgcctagggctgccggtcgctccctccctccctgcccggtaggggacctagcgcgcacgccagtgtggaggggcgggctggctggccagtctgcgggcccctgcggccaccccggggacccccccaagccccgccccgcagtgttcctattggcctcggactccccctcccccagctgcccgcctgggctccggggcgtttaggctactacggataaatagcccagggcgcctggcgagaagctaggggtgaggaagccctggggcgctgccgccgctttccttaaccacaaatcaggccggacaggagagggaggggtgggggacagtgggtgggcattcagactgccagcactttgctatctacagccggggctcccgagcggcagaaagttccggccactctctgccgcttgggttgggcgaagccaggaccgtgccgcgccaccgccaggatatggagctactgtcgccaccgctccgcga

SEQ ID NO: 6807 - DNA, 2300 bp, Homo sapien
cacccccaggaccaactgtgaagatggaggaatcacagcaagcagcagctcccacccagctcccagacataacaccagcttatcacccagggcagttgaagccctaggaagtgcggggtgggggtgtcagtgctcagggaaactacgagcagttgctgcttctgacctctgagggcagaaggtccttttcataaggggtctccacctagggatccagggttagtgtgggagagtccgtgagcttggatggatgtggcactcatgggagactccctctgtctgaagctataaagggcccagggtcagtaaggagtccaaaggggttaataggggtccaggattgattgttagtggagggcgtagaggataacgtggtgtgtgtgtgtgtgtgtgtgtgttggggttcatgcaagacattacccatggaaggaacatggggcctccaggttccgcgagaagggtcggtattaaaggattccttggagcggtcagcactggtccgggccagggtgtctctgatgacaaaactccgggagagctttgtctcaccagggatcagatggtccctggtttggaaggcaaggggagggtgccaacgcccttctcacctcagtctgacccgggggcgcgggcccagacgtctctcggagcccccgcccctggagtggcgttccccgagggcggaccgtgggcgggtcccccgggagcagcaggagccgcgcggggcgggcgcccccagcgccgaggttgagggaggccgggctcggtgcggggctgggaggggggcgcggaatcagggctttttaggacccagcgcggcgccttcctccgggggcgagtgcggctgcgcgcgccgtgtgcccgtgtccggagagcggcgggctggacgcggaccgcgcgaacgagcaggcgacgggcgagcagcaagcggagcagcagcccgggcggcagcagcgtcgcggcggcggcggcagcggccgctccgcgcctcgcctcaccggcctcgctggcctcacctcgccgcgcccggacccgccacccccgcctccccgcccgacctccgcagcccccgtctcggccggcagcgcccaccgcctgcccgaagcgaggagcggagtgcggggcgcagaggcaccggagccagtgcccgccggccccgcaaatcaaacccagccaggagaacccccgcctggccccgtgcagctccgcgaccgccgggagctgtcccttcagcaccgccgcgggagcccaagtccgagcgcagcccagcggaaccccagctcgagcccgggctcacggagagcagcgctcggcgttagccgcacgagcaacaccccgggtgcccctgcccagggggcccgccatctcctccaggaggcggggagaaggaacgaggagggcgggcgggcaggcgggcccgccgccggggggagcaggcagccaagcaaggagagagggagggggccggagcccgccctgcgtcccgagctgcagcccggccacgcagggaggaaggcaggcggcatccatctcccccgcgccgagagcgcgccgcggcgaccacctcacagaggagcgcgaatttcccggccctgtctcctcccctccccctcctgggggctggcctctagtccggccccgggagcggctgacctttcccccaaaagctttgtgccgatttctccattttcccgcggagatggggacgggagcccggccccccaacccattttccccacctcccggggctcgctgctgagcccgcccccctccctctttccccctcactccctccctccctccctttctccctccctttctccctcccttctttcctcctctgcctcctccgctgccggaccagctccctcccacatctggctcctagagacccctgggatcccgcgcacattcccctggaccggcacccgacaaagcgcccggagaggcttggctcgctcgttggggtggccagagccgcaggcctctgttccccccgacggctggggggaggggggaagagggcgcgcgcccccctccccggcgccaactccccctggcggccgctcccatgggtgtcgctgggccgcgccatgcctaagggggcgccgcgatgggccaaggggacgagagcgagcgcatcgtgatcaacgtgggcggcacgcgccaccagacgtaccgctcgaccctgcgcacgctgcccggcacgcggctcgcctggctggcggagcccgacgcccacagccacttcgactatgacccgcgtgctgacgagttcttcttcgaccgccaccccggcg

SEQ ID NO: 6808 - DNA, 2300 bp, Homo sapien
tgggctatggagacatgtacccgcagacgtggtccggcatgctggtgggggctctgtgtgcgctggcgggcgtgctcaccatcgccatgcccgtgcccgtcatcgtgaacaatttcgggatgtattactccttagccatggctaagcagaaactaccaaagaaaaaaaagaagcatattccgcggccaccgcagctgggatctcccaattattgtaaatctgtcgtaaactctccacaccacagtactcagagtgacacatgtccgctggcccaggaagaaattttagaaattaacagagcaggtaggaaacctcttagaggcatgtcgatctgacctttcacctctgccccctgtagcgatgattccagatccagtcagactgcttccttagttccgtgggtgaccccggaccccgcactcagtctggaggtgtggagcctgggggcccagggagatgctgggcggccaaattcagcaggcaagagcctgctagaggaacctcactggtgcccctgggtaaggaggttgacgcggttggtctcgtgatgttctgaagagacaacgcggcccgccaggttgctgaggactaacttagcaggagccaggggggctctgcttggtggggcaggagtccggtgtgagtctctgactcaggctactgacccggtgttgggacagagtgggggcgggtgtgatttggaaacgctagacagcctttgatctggtccttaccatggctcccttcaggctgtgtagatggcagagatggtgcatgggatctgggcaggagggtcccttgcaaaggcaggtgcaagggttctcacccccggcagagcctgtctccatagctgagtagaattcctgccctgatttcgggctgcccagctcgaggtccttcccaggagacgcctgtagccctccgtgacaagcttacttaccccatagcatgctgaaccaactcatcttctaccaccactctagagtttagcctttatctttaggaacctgttgaagtgactctagctttcacgttgtctgtttgggttgatggtcgagtgggagtttccggtgacccgatggaagcggctgccgagcaaaagactagagggggccaccaccctgggcagcttagatgaaagcgctacagaccagcaacagcctcccaccgagggttctccccgtttccagcggtagggactgcagcagcaatatagacatcccaaccagtgtacaaccactttcccgtgaattcactgggggccgggaggggggaggggggcatgaaacaatactagtcaccgtgggatatattctaatattccatggctagtggtttgttatgggactatctcagttttatgagaacctgcacatagcacataaagttgatcatggggctctggtccgaagatataaagcccatagtctacctctacccatggaataccatcgacttattctgtggacacagggatttcaaaggaacagatgacccagagaagaatgacagcactgagtaagaaggagtgccaggtgagcaggaggttgacgtgacaggtggcatttagtctatgaaggacctccccatgcccaggtctggcaggaggctgctggctagctcagccccaggtggggaagtttccccctggtttgggtggcctcccccagtggatgattgattttcttccctgctatcgcgctctctgacccaccaccccatcccaatcctcttctggctttaccccacagctatgctggcccgagcactaccctcaaggcccatttctttgcccatgggggtttcccggtcctttcaccctgccgcatacccttcccttcctgggatttctgtaggtgcctgagaggaacatggccaggggtctccgaggctgaaacagctccgagctctctgctttggattagctagttacttgatttcaggagctaccaacagggctctgggcctctaggaggaacgcgtgggctggcccaggccccagcttccatgtgggcctggcaagaagagctcagcctgagtggcatcactgtggcactacctggcccttcccctgcatcctccccgacactggatctttcaggagtgttgccccaagcacaggtgccctgggccagccagtcaagaatccccagtgctctccaggcaggcccagattcctctgtactcttggacaatgacagtattatcctgtgcggagtccccctgccccccagggagtgcagatgtgtttgttcagacatgcacaccagctaatcccaggacacaaaacctgtaaaacc

SEQ ID NO: 6809 - DNA, 2300 bp, Homo sapien
ttccttgtcccctgcccaaaaccatcccgaactttgggccctttagtgattgtgagagctgggagcccccagggcctgggggcttgtggacagaaccagtgggcgggggcccagcattcagagccagagaagggtctcaggcggcaccatctccacagaggcagaggcagagagaaggcacccccctctgacccacccctccccaggcaagaactgcaggctgtggacacctcccctggcagaggatggccaacagagactcagcaagtcctcactcccctcccagaaggagacgctgcctgggaggacccactgttctccccttgaggaaaatccatgcagggtgctatgggcctcaacccccacatcgtcatccgcgtcctctccatactgtttccctcccctctcccaacaccctcctccctcagcccggagacccttggatggaagactgggccagccagagtgggaggcaggaccagcgtgtctgcgagcacacgtgtgtgcctgcagacatgccccaagaccccagagacgccccggccccagtcacatggtgtcagagttaccttggcaactggcctttttggttcagagtaaattgggaagtgaagcccctgggatttgtcgagaaacgcactgtacgtgaaatgctttgccatcttgtacgaaagactttttttttaagttccaaaattatgatgggatttttttggatttgctttacgaataaatctgattggtccatttctcttttgactgactgcctctttgtagtgacatgatgtgtacacgggcggtaatcccacccacgtgcacgcccagcgtgtgcacgtggggaaggatcacttctgcgtgtagttacatgatgtgaacaggatcacgggagagtgttcaatcgggtggacattgtctccagccttttccccccactctactctttcagagagcctcccctgacgtggtcgtgcccaagttggtttccctcttccacaaaagggcttgtgcttgaggctgtcaccctagatgaagtattggagttggctccaccctggccaggaagattctgctttgagggcagagagtttggggcaggttcggtcctcaagagtgatgggatgggggcaaaggccagtcagggctacctctgtcagctccagaggcttccacggctctgctccgagatcgcagagagacagagctccttgctctggccaaagtttgccccccaccaaatgtgctcccagacctcctcccaggcttcttctcaggctgccacagaggccagaactccagtttcccccacccaagtccatcagccgctgttgtcttctacacattcatctgccttgctttgccggggacactgaccagaggggacagaggaatgggagcccctcccaaatccatgtcctgctgccacagcctcatgcatacatccttgttgtgcctgtgcaagctgaccaggcctgctggggacagcatggagtggaagacactggcttgatatgtgtggggaccagagcagactgagtgatcagcttgggtccgtccatgtgggggacggagcagatggagtggtcaaattgggtctgcatgggcaaagaggagactgtgtgaccaggactggtctgtatggggggtcggggcatagagtgactggaccaggtctgtgtgggaacagagtagactgtgtgaccgggcctagcctgtatggggaacagggcatacagagtgacccgcttgggtctttatgaggttggggtcgggggggtacgggcgcaggctgagtgattagatggggggtgggggtggtgtgaaccaggtgatcagatgagatccaaatgggagatggggtagagtagatgagatggtctgtatggagctagggaagcccgagcaactggctggctgtggacgggaggcagccgggctctggtcagcagcagaggggtccggaaaggcccctctctggactggagtgtttctgcgtgtctgtctgtcttctccctgagctctgtgtctggctctcccccatgactgcatccacaccatcctgtttcatcggccctgcttggggcccggggccggcccccagcaccacacctgctggatccatcaccaactcatctttttgcaaactttgagcaaacccaggagtccccactcccagcactgtgggcagcccgaaggctgcctgaatgagctgaaccccccaccaagccccctgccttgtgccctcctcgctccacagcctgcccgcttttccgtcctcagggacgctcaagctgccctctgcc

SEQ ID NO: 6810 - DNA, 2300 bp, Homo sapien
ggagaaaagttctttttggtctgatactgttgtgaattgtcatcagtgctttctgtactttgtaaatattacatgctgacattttcttgtgggcattttggaagaccttcccaccttcttatttcttgggatttcttgatgtaggtaaatgtatctctctgggctgttaaattcatttccctcaccctcaaggaatctagtgatcgactgtcctgtgggtgtcacttcacccttccagaaattctcttggacaaggtctaagaccatcccccagccagtttgctcaggtatgggaaatactcacatgggaaatggacagtttttattttgaaaaactgtgggtgtgaaagacctccccaaagcatcagtttgtctttgctcagctattagagcagatatccagccacaagcccttgtatttctcagaacggattggacagaagcctgtctgggtcctaaatctagagggatgcataccaagctctctcagggacccaggtaaagtaactttccttagacctgagatgggttgagacccacaccacattgataattgtggccacatatcctactagaattctctctggcctctcaacctttttcgtagactgaaagtcatacactggtttctagacagttgctttgcaagacctgctttggtggtcttgaaccttactttatgatataggagtaactggcacttgttgctcagccaaaactgagcggtgaaggatcccatttttacatcctgttacacatgcttcaaagaaatggtcagcacaaaaaagcccactcataagacagtcagtaagcatggtatagctcctgcacattcagatccctagagaatgaagagctgttttatctctccaaagtttgcttttttcttggtatggtcatcgacgttctccagatgccacaggttggagagataaaggtgaggggctgccctcaagtggtcttacaggcagaaactcctaaaagtggatggagtgaaagaacaggaaaggacagtgtaagagctcattggagacacttcccagaagcccaggggtgaagggcagtgagtgctggaggcccgtgtcagcagaggggccaagtgctaccgaatgtgaatgtggatgatcatctttaatgtgaccctatgtgttctgtattcccggtacgcggtgccatattttccttcagataaattgaacttaattaactcccatcagcaacacgacgctgtctgagaaaagccattttatatggaaatgttcgttgggtgacgattatccagtattattaatagaatgagctcagggccgtgcccggagcgccgaggctgccccggcaggagtcgacgctaaccagcctcccccattcagcgtcgcgaggcgcgggttcccgctccgtgccaggtgcagagggcgacaccggcgacgtgccactccactcgcctcccaaggcgccccctcagatgtttgcgaacgcacaccaaagcgggctcaagacaattgcgcctgagacgccgggcaggaccctgccctacccctcaggctccatttcctgttcccgcaaatggtgatgccatcgctgccctgtcagcccctctgggctgtcgtgggcctccaaggagacaaaaacgcgaaggagctttgtgaactgtggcgcgcagtgcacctgcatgaaacatgaaattatgactaaaaataaagagtacgagggggtaggagcgagaggctgagaggcccagcgagacaggaggctgcgggcggagacgctgcgagcgccgccggggcgggctgactgggaggcggctccggggctgtcgtccggccccgcccaccactgatccccagtggcccgagggcccggccgcaccctctctcccggcctgcgggccgcttcccaccacagaccccgccccgcgccctacccatcacgcgtccccggtccggctccggcgctcacctacccccggcaggcgccgcccccgtgccgtccctcccggaagcgccggcggagcgtcctcgcatggagcgcgagcccagcgcctcggaggccgcccccgcggcggccgcgctcttcgcctgggtacgtgactccgcccccgggccggtgcaggccctgaggggcgccgagatgtgggagctgctggccgcggcgtgggcagttcaggggctgggcggctgaggtccgagccgggctctgggttgaaggatcctgggctgggagcggagggggagcggaggaggagcgggcgggcggggaaggaagggtcttcgcggtcgacttaggggcctgccggctggcgg

SEQ ID NO: 6811 - DNA, 2300 bp, Homo sapien
tctctctctctttctcatttcaatatttaaaaaggctagtcctgtggaaaaactttgataaaacaaactttaaggttgaagcttttttcctcctccagaactgagaaaggagtgggtgtgcttagtttcttaatttccttgtctcttgttactcagtggatgcctgggactcctccagggttggggagatgtagaggggaggagaggtaaggaggagaaaagttctttttggtctgatactgttgtgaattgtcatcagtgctttctgtactttgtaaatattacatgctgacattttcttgtgggcattttggaagaccttcccaccttcttatttcttgggatttcttgatgtaggtaaatgtatctctctgggctgttaaattcatttccctcaccctcaaggaatctagtgatcgactgtcctgtgggtgtcacttcacccttccagaaattctcttggacaaggtctaagaccatcccccagccagtttgctcaggtatgggaaatactcacatgggaaatggacagtttttattttgaaaaactgtgggtgtgaaagacctccccaaagcatcagtttgtctttgctcagctattagagcagatatccagccacaagcccttgtatttctcagaacggattggacagaagcctgtctgggtcctaaatctagagggatgcataccaagctctctcagggacccaggtaaagtaactttccttagacctgagatgggttgagacccacaccacattgataattgtggccacatatcctactagaattctctctggcctctcaacctttttcgtagactgaaagtcatacactggtttctagacagttgctttgcaagacctgctttggtggtcttgaaccttactttatgatataggagtaactggcacttgttgctcagccaaaactgagcggtgaaggatcccatttttacatcctgttacacatgcttcaaagaaatggtcagcacaaaaaagcccactcataagacagtcagtaagcatggtatagctcctgcacattcagatccctagagaatgaagagctgttttatctctccaaagtttgcttttttcttggtatggtcatcgacgttctccagatgccacaggttggagagataaaggtgaggggctgccctcaagtggtcttacaggcagaaactcctaaaagtggatggagtgaaagaacaggaaaggacagtgtaagagctcattggagacacttcccagaagcccaggggtgaagggcagtgagtgctggaggcccgtgtcagcagaggggccaagtgctaccgaatgtgaatgtggatgatcatctttaatgtgaccctatgtgttctgtattcccggtacgcggtgccatattttccttcagataaattgaacttaattaactcccatcagcaacacgacgctgtctgagaaaagccattttatatggaaatgttcgttgggtgacgattatccagtattattaatagaatgagctcagggccgtgcccggagcgccgaggctgccccggcaggagtcgacgctaaccagcctcccccattcagcgtcgcgaggcgcgggttcccgctccgtgccaggtgcagagggcgacaccggcgacgtgccactccactcgcctcccaaggcgccccctcagatgtttgcgaacgcacaccaaagcgggctcaagacaattgcgcctgagacgccgggcaggaccctgccctacccctcaggctccatttcctgttcccgcaaatggtgatgccatcgctgccctgtcagcccctctgggctgtcgtgggcctccaaggagacaaaaacgcgaaggagctttgtgaactgtggcgcgcagtgcacctgcatgaaacatgaaattatgactaaaaataaagagtacgagggggtaggagcgagaggctgagaggcccagcgagacaggaggctgcgggcggagacgctgcgagcgccgccggggcgggctgactgggaggcggctccggggctgtcgtccggccccgcccaccactgatccccagtggcccgagggcccggccgcaccctctctcccggcctgcgggccgcttcccaccacagaccccgccccgcgccctacccatcacgcgtccccggtccggctccggcgctcacctacccccggcaggcgccgcccccgtgccgtccctcccggaagcgccggcggagcgtcctcgcatggagcgcgagcccagcgcctcggaggccgcccccgcggcggccgcgctcttcgcctgggtacgtga

SEQ ID NO: 6812 - DNA, 2300 bp, Homo sapien
tgtttgctattgtaagaaatatgttaaccatcttgtaaaatgcctaattcctagggcaagaaaaattcttagccagaggtatttagaatgtctatttcattacttgaacattttctctttttttgaaaactggaaaatttgggacatattccccattacttgagataatacttattgagtacttagtgtaggttagcaactgttctaagagttttatgtaaattataactatttaattctcataagtttatatatgtttaatcctccttataatcatgagagtggtgttaattatcctccctccaagtttgcaaataaagaggttgatacatataaagattataacttgcctagatggatttgcagaaagatttattactagcaatttgttatattattttgcatctcttttattgtttacattttcacgctttaggacaacgtcgcccatactctgtgtttgataagaaaagtcaatctttgagtggtaattgaatgggtaagaaacgtttctgaaagttttcacatccctaaaaacattttgagaatgcttatctgaggccatccctgaatttttagccccagagccaccaatttggaattttctgtgtatacttaagtttaccttaagaaatggtcacttcctttgaagtggaaaatctcttaagatctcctgcttctcatccataaatcctttctcagcagagactcatggatgggctagaagctatattcagtcatctttagaagcacatgggatattgatcaaaggggtggggtggtgggaaggtgaggggtggttgagtgtactccttgggtgtcatggctgggatctcagtgtcccttcttttctgcttatttgtacttattgagaagtctgtcttccattttctccttccccatgaacaagtgtgtgaattatttggaggcaagttgtcttgtttttaaatttttactgccctaactttgactgtggtgcttcacacatgtgaatgcgcttgggttgaaattttattcgttttaccattagtaattatttgaatcaaagaaaaatccacataattattcagtttaactggccatttagttttatagcatttgaaatagaaattgtttttagttctagagactaatttggcataatttaaaaatcttggtagttttggaaacttgaacccaatgaattcataaatgttagttaaattttgaattatgtatctctaactcttcttggtacctgaaatatcctagtttcttccgtgaggaaaatctcagaatagcacgccatgttatgatgttttaaaacgagtgagaattttggatgttatgagttctggtagctgtttggtaacttagttttatattagaaaggttaagtagcatgcccgaggtcatacactgataaacatgaggccaatgattagatatgtctgacttcacattccacatatttccttacactgttttgcagtgtaaataggtggttaagaagataccaaagtagatctctggttcatcttctgagaagcagaactagaattctcctggctagcagttatccatctagtgcatatgtatctagagctggccaggcctttagtttacaaaataaatagaaagccttgtccccactctggaggagcttgctgccttgttagaaggtgagatatgttcgaatagaacatttggggaaaccatttgagacctggtataatgaagtgctaagattgtgggcaaggtggggaggaggtaggccttcctgactagtttaggctacaatagttgggaagactgcaagaagccagcaggcttcagtcatgccctaaaagagcgattggtttagaaaaaaaacaaaagggaactactaacatgtattctattctaggcaggtgtcaggcaaagttgtatcttattttggtctcactagattcttgcaaagcttatctgcatatccaggttttataaaaggttaagaaactgaagctcctagaagtaaatgagcccttagttatcaaatattgtctgcattgtgcaacttcttttttagcccgtagtctttgttttcatactttagttttagagaattactccaaattcatcatgattgaagacaataaggagaacaaagaccattccttagaaaggggaagagcaagtctcattttttccttaaagaatgaagttggaggacttataaaagccctgaaaatctttcaggtaagcattttctgtatttttgcacagaattcttctagaaatgaatctctaaaactatatttaaaatatagggcaacatagca

SEQ ID NO: 6813 - DNA, 2300 bp, Homo sapien
agtatcacagtaattctaggcaaacattggacaccttcattatgttttctaatatagttatgactgagtatttaaaatattcatgtggacattttattttaaataatttcggccgggcgcggtggcccgcgcctgtaatcccagcactttggtaggccgaggcgggcggatcacgaggtcaggagatcgagaccatcctggctaacacggtgaaaccccgtccctactaaaaatacaaaaaaaaaattagccgggcgaggtggcgggagcctgtagtcccagctactctgaaggctgaggcaggagaatgacgggaaccccaaggggcggagcctgcagtgagccgagatcgcgccactgcactccagcctgggcgacagcgagactccgtctcaaaataaataaaataaataaataaataaataatttcatgtctccattcctgtttggtcattatattgatatttttgaaatttcatgtggaagtagcttatatcatctataaatttaattccattaaatcaaagtgggtacttgtaaatcaattccatcataggtaatttttttagtttaatgtttacgattcttatggagaaagaagtgtttttcatttacctttgcatgggtgcttaaaatacacatttctatttcaagatgacactgaaaaattcttctaatataacagcagcaaaaatgtaattctgcaattacaaaagtgctaaactgaaatccataattaaggttttctcatgtttacaattgtggttctttaatcaatactaatactatgcaggtctgttgtaaggtttctagattcggtttaaacacacgcacacaatactgtcagttgtaggaggctttacaagttatatttcatgcacttttttttaaagagttctaaaagagccaaccagtccacaagacagacagaaaaaaagttaaattaactggagtaaattggactcttaacattcgaaacatgcaagattctgcagcaaactgggagtacttcaggattggcctgctatcttccttagtattaatttcatcttaacagtttaagaagttggacattttaacaccatcaagcgcatttaggtgacgtgtttcttgtgtgttaacttggctccccggaatgatctagttagtgaactagtcactaataatttggtcaccaggcaaatcaagcctacacgaaaggaagcgactattcaaaataccgtagtatcatctgaacctacccaaataatttatgttcaacataaacatgtaacttcaataatgagatgactcattaatgagtcaagctcctccaacaagacaaagacaacatctcttcttctaaggtttaagttttgcatagaaatccggatacatggaatagcccataccaacagtcattgctcctacaacaaagctggactgccacacgcatgtggatcaggtgacgtgatattttagtatttcccctgcttttcaatttgtataatccgtatgcagcaactactgcaaaacctgccattccaatggggacaaatggtgcctctttagtttttcgaatcactttggatccctggaatccctcacaagccatccagcttcccctacggatatttttaggaatggcaacagtggccagagatcagaggattatattattagggttatacaacttttatataaaaaaagtggcttctgaccaggcgcggtggctcacgtttgtaatcccaacactttgggaggccgaggcagaaggattgcttgagccagaagttcgagaccagcctgggcaacatagatcagaaggcgaatagaataagtccgctagctttgagattcacatctgttcctgaggcttcctcactgctccccacccttccttcttcaatcagtctaagagctcctggagaaatggaacacctgattcagtgagggtgacaaataattatgagtatgttcgtgccagggtcctcgataggatggggtgggggaggtcaagccgccttggcagctggccaggctccgaacagcagatggcgctgtagggggagtcccaccgggtacgccgggcgctctggcactagggcgccggtcgtctcctccgcagcttccggcacggccttcaagcgcgggacgcgacaaagtcatggaccgcaacccctcgccgccgccgccgggtcgcgacaaggaggaggaggaggaggtggccggtggagactgcatagggagcacggtctacagcaaacactggctcttcggcgtcctcagcggactcatccaggtgtggaaactcgcgccac

SEQ ID NO: 6814 - DNA, 2300 bp, Homo sapien
tataaagttcttcccgctggtcttctaagactggggcttaggtctgagatgtcattcttagtcatgatacctgtggacttttgggcttttctgatttttgtttttctaattcctaatagaattaagccttagtattctcctcttctacttaaattaattgtaacttaaaagaatggaggtgtcttgggcctctcaatcagcctggtcacacaaggttatcagagtagtgctaccatctgatttactgttcaatccaggccattgtagacaatgaaaagatgtgccactattaagcttggacaatagacactgatctcatgcaaaccagcacacgtagtcacttgtaagagactgttggaaaatccctttaaggcctggggactctgatatcatgacaggaaatctttctttttcaggagaaacaagtgaaaagaactgactgccgttattgtctattattctcagcttggcaccataagaaactgcgtgtaccttcccggaaggcagaatacattaagtaacaaaggaagaaaacaggcaaggcttgtcaaagtccctgtgaggagttcctcttggtatctagaaatcatactcgctttcttgctctttttcctgtgagtcagtgtgtcactttgtcacccaggctagagtgcagtggtgtgattatggctcaccatagcctccaactcctgggctcaagcagtcctcctgcctcagcctcctgagtagctgggaccacaggtgcatactaccacaccccgctaatttaaaaaatatatatacagatatatagtggagatggggtcttgctatgtttcccaggttggtcttgagttcctggcctcgagtgatccttctgcctcagcctcccaaagtgctggtattataagcatgagccagtgtctccacgccacttgctttctaatacttctgtattagtccgttctcatactgccataaagaaatgactgaaactgggtactttataaagaaaagaggttatattggttcatggttctttagtctgtacaggaagcatagtggcttctgcttctggggaagcctcaggaaactttcaatatggcaaaggcagagcgggagtgaggcatctcatatggtgggagcaaggacaaaagagagtgaggggggaggtactgcacacttttaaataaccagatctcaaaagaattcactcactatcacgacgacagtaccaagggggatgctgttaaacctttcatgagaaacagccttcctgattcaatcaccgccctctaggctccactcccaacattgggaattacaattgaacatgaaatttgggtggggacacagatccaaaccatatcaacttctatcaaagaagagaatgacttgaataaaacgagaaagtagatttccagcattgaatggttccaaagggagtaaaataattgtgacaggatgtgatcattggccctcaatttctgcctgaagaagagtaggaaaaaggaggtctggacatcacatgccctgctttatgaagcagctcctccaagtacaccatgaccagtggctgtggatggttgacaactcccctcctcttccccctcttctactgtctactcctgggaccaagtgagccacgccagctcagatactacactgaccacagggaatcccaccttttccaaggaatggaagttgtgtagggaatattcaaatgttgcttagcattgccttagataagaaccaaagggacagggaaatcctctgacagctatctgccttataactttcattttactgtgcctaaaatatgctcagaacccagaaagaggcataattcctaattttggcaggctctaatctaaaataatgattctcaaacatggtgtgacttttgtctatttgctttatcctgggtcactgctcctcttctgtcagatactgggattccaatgagacaaatggaaatggagacgtagaccctctgaccttctatcttttatctatacacatacacctgtgtgtgtgtgtgtgtgtgtgtgtgtgcgtgtgtaaaaccgagtgggtttttttcttggaatgaaagaatggactaacattacaaaaaataaaaacttgaaacagaatgtgtattatccttggttgtgtttccttggccctgcagcaggatgaagctctccactggcatcattttctgctccctggtcctgggtgtcagcagccaaggatggttaacattcctcaaggcagctggccaaggtgaggtccacaggatagggggcaggaggctgcttctggctgcccccaggatg

SEQ ID NO: 6815 - DNA, 2300 bp, Homo sapien
ggctcacgcctgtaatcccagcaattttgaaggcccaggtgggtggatcacgaggtcaggagttcgagagcagcctgggcaaaatggtgaaaccccatctctactaaaaatacaaaaagcaaaattagctgagtgtggtggcacgcgcttgtagtccgagctacttgggaggctgaagcaggagaattgcttgaatccaggaggtggaggttgcagtgagccgtgattgtgccactgcactccagcgtgggtgacagagtgagactccatctcaaaaaaaaaaaaaaagataataatattgattcttgcaaaatatagtaattaagaaaacagggctgggtgcgggggctcacgcctgtaatcccagcacttcgggaggccaaggcggtggatcacctgaggtcaggaattcaagaccaacctgcccaacatggcaaaaccctgtctttactaaaaatacaaaaattagctgtgcgtggtggtgggcacctgtaatcccagctacttgggaggctgaggcaggagaatcgcttgaacttggtgggcagaggttgcagcgagctgagattgtgccacttcactacagcctaggcaacaaagcaagactttgtctcaaaaaaaaaaaaaaaagaaagaaagaaagaaaagaaaaagaaaaagaaaagaagaaatctgttatcacaaacccttgtagcagaacacatctccccatgtatacaagcaattgtgcctagggtggacacgttccttttctgactttcaggaacgttctactctgtctatggagtagctgtccttttgtcactttactttcttaataaatgtgcttttactttgcactgtggactcgccctgaattctttcttgtgcaagatccaagaaccctctcttgggggtctggatcctgagccctgtcctgtaacaataggacataaaatcatctttgaagtctgggtgaaagacttgaaagaaaaatctttcggtaatctcacgagtcagctagggaaaaggtgctgaggctgaactccatcagacacacacgctgggtggtcagtggtatggaatttctgggttcttgccctacctctctgcttctagccagtgatgtgattttgggaaggtctctccatctccaaaaggctcagttttctgagccttttagatctattaaatcactggagtagactacagtatataatgtttttagtccctatttcttctaccgttttctctctctctttctttctttctttcttttttttcttttcctttttctttctttctttttttttttttttgagacagggttttgctatgttgcccaggctggtctcaaacccctgggcacaaagtgatcctcctaccttggctttccaaagcgctgcaattacaggcatgagccaccatgcctggcctttttctaattttttttttaattgaggtgaaattcaccaaatataaaattaattattttaaagtttacaattcggggtatttagttaattcataatgttatacccacctctatctagttccaaaacattttcatcaccacaaaagaaaatcctggacttccctctccctctccctctccctctccctcctctccctctccctcctctccctctccccacggtctccctctaatgccgagccgaagctggactgtactgccgccatctcggctcactgcaacctccctgcctgattctcctgcctcagcctgccgagtgcctgcgattgcaggcgcacgccgccacgcctgactggttttcgtatttttttggtggagacggggtttcgctgtgttggccgggctggcctccagctcctaaccgcgagtgatccgccagcctcggcctccggaggtgccgggattgcagacggtgtctggttcactcagtgctcaatggtgcccaggctggagtgcagtggcgtgatctcggctcggtacaaccttccacctccccagccgctgccttggcctcccaaagtgccgagattgcagcctctgcccggccgccaccccttctaggaagtgaggagcgtctctgcctggccgcccatcgtctgggatgttaggagcccctctgcctggctgcccagtctggaaagtgaggagcgtctttgcccggccgccatcccatctaggaagtgaggagcgcctcttcccggccgccatcccatctaggaagtgaggagcgtctctgcccggccgcccatcgtctgagatgtggggagtgcctttgccccgccgccccgtctgggatgtgaggagcgcctctgcccggtcgcgaccc

SEQ ID NO: 6816 - DNA, 2300 bp, Homo sapien
ggggctcccagtccctagagagttgccctcatctttgtgatcttgcatggtttccagctacatcagcattccagccttatggaaaaggacgaggggaaggagaggctttactccttctattgatcctgtgagcaaggaattgcttacatcactttgtgattcttccacttaacagcacctggtcatacaatgtcatccagcatcaaggaaaactgggatgtgggtctttgtgctgcttttatactctcagaattgttatgtgaccgaagaggaaaatgaatattggggcaatctagcagtctcttcagccctgattgtctctgactctgtgctcacatcaagatttttcaggaactcctcagaaataatgaatgatggggcagagaacagaactggagcctcatgcagggttccagggaccaggggctggtattagacttgctcttcgtgttgtgaactcaggaaaaccctttaattctctatgccttggcttcatcttatgttatatgaggataataccatagatggtctttaaggaacacaggctaaatgttggtgatactacagggaaaatgacaggtatgacttagtccttatggagctttggttttcatgaggaagacaaacatatcataccataaatatagatagagaaactctttagtgccctgagtgtggataacagaggctctccttttcctcccatttcctttctgggccaatcagggctgtggcaccttgcccctctaagagagctcatgatggatgcattcactcctgatgcttctctgtactcccagcaaagggtgcatcttctgtccaccaggaggcctcctgcccctgtgcatcctcaggattccagagcaaatgtgacctctgataggcaaaaaggaactcctgaatttattcctaaatggcattcactcacctctattttgttccctctttgatttgcctctccttctctatgtggagtttgcttaggtcagtttttttttcaatccacaattttggctgccaacttggatttaacttgagaatcactcctctgctttactccctgtaacatatataatcgacacagggtggtgctgggtataaagggctgctccaagactggattgtgagtcagacctgccggactcaaattcatactatgtaatacataacccctgggacaaataattccctttcgttgtgctccaattgcattatctgccatatgggaataataccaattcttacctcctaggctcttcgggtgattaaaagagacaataccttacaaactctcaatcagctgctgttattctcccagattagacctaatcctcattctccagttgaaatctgcatgaatctctctctttacactccaagccctacacatcgcctatttcccctcatggacgcctctcatacaaatgtttgcatcaacaaagaaatgctaccaaagatctcctgaaagagagaaccaaaaagtttacattgtgtatacccagcagaacacttagtagtcccccatagatatttccacacttcaattacctccgtcagttacactcagacctcatcttcacttactctttcctctgttctattgctgagtaattcagctcagacccacaccctacccaaacactgtgtacaaaaatgcttctaggtgttcagcaaagccacactgagtcttcatttcaaaggcacatcagtggtcaatttcaagttttgggcacacatcaagaattcttctcaacacagatacagctttccacaaatagaattctgatgaattaaattttcttcatccagttatacgtgtgtgttctaataccttacattgtgctttcatctttattttccatttcatccaaatctaccagtaccattagtctcatgcatgcattcattcattgaatgaatgtatatgaaaagcacagtgtgctgctcatggaaataggcactgggagtataaaatgtaaaatgtagtcctgtctgcaatgactgacacactgagttatttctcacccaccaggcccagccattttcacacttatcctagcaaaggtcacattttcctctagttcataatgcatggtcttccttcctgtccatggatgaccagtcctagtcacgagtgtgtcacaaccacctctttgtgtatctgaattcctccacctgaaagaaaatttcagacccaggatagattaatcatcgggtccaaagccctggccggatgagtgggggtgttttgatcctaatgttattcccatgtcagcacagaacttgtgtggcagtagaga

SEQ ID NO: 6817 - DNA, 2300 bp, Homo sapien
gtgaaagttgatgactaagccaggcttatcaagttgctggacatcttgtgatttcctgcacaagaactacagaaaaattagagaccagaggcatttgaggcaggatttctcactgagatgtttcttagcctctaccccatttccataacacattagcctctctcattccatcctttctggttcacctccctgtaagtaattgctgttctggacccttaattgccaactgcaagcctaggtagtaccatcaagcaatgagagcttgcattgtggagctttataactaaagaataaagtggatcatagggtcattcaatacttacaatggcctgattctactttttttggtatgttttcttttttttttttttgtgattccaaaatagagatttatttattaaggattatttagtttctgcataaaaatctccagttgctcctcattgggttttttcttttaaaacacacatcaactcttttggggttgctttgtttgccccagcactttaaaaaatacagctctttttagcgccaggaagaacagttaaggttaaggcagtgaggcattttcttggatcttagcagctgaagggttcatctctccccatcaagagaatacacacagtaggtagtttcttaggttggaaaatctgtccctgaaggaaataattctgcagaagaatgcaaacagagtcttctatggtcaattgtttgtgccctatagctttgaaagaaatgcctcttggtcatcaaagacttgctggttggtttcagctgtaaaacaataataacaaaaacaaccagaaaaacgaaaacaaacaaaaaaccctgtttagcgagacagaaagagcagggtttataatattgctgtgaggctgggctgtgcaaaacacatgagaatacacaccagtttgctttttaaaaaaatcccacataggggccctgcataatttcaaatcaagctctttatagtccttaaaataaccaaaatagcaatacagcgagagtctcataaggtcacgtgcttttttttttgagccggagtttcgctcttgttgcccaggctgggatgcagtggcgcgatctcggctactgtaacctccacctcccgggttttagtgattctcctgcctcagcctcccaagaagatgggattacaggcatgcgctaccgtgcctggctaattttttatttttagtggagacagggtttcaccatgttggtcagcctgatctcaaaccctgacctcaagtgatccacctgccgctttttttttttttttgagacggagttttgctcttgttgcccaggctggagtgcaatggtgccatctcagctcactgcaacctccaccccccgggttcaagcgattctcctgcctcagcctcctgagtagctggaactaccggtgcgcaccaccacgcctggctaattttttatatttttagtagagatggggtttcaccatgttagccagtctggcctaaaactcccgacctcaggtggtccgcccacctcggcctcccagagtgctgggattacaggcgtgagccacggcgcccggccatcatgtgcttatttttaaagcgaggtggatgacaccattcacccagagccgtgttcctttttggcgacaaaacaaaaccaaaaaagcctaggacttgactcattagaagtgttaatcgatttttaccacgctgaaatgaaggtataaagtcagtctgtgctgtcgtgaaattccaaggagatttggaagtaagatcattatttactggtcctttagaatagaccccaccccccaaaaaaagacttaaaaaacgagggctgtcccctgcagactctggcaggaccctgggctgctctgggcgatgcagaccaggggcagctcaccgacttgattcacagtgattctggtttgccgtttctctgtgtggccacgagtcgggggcgtgtccagcggtgggcatacttacaccttgtagttaagctcagcgttcatctgggtatacgtctcgtagatgacatcgatggtcgccatgtagttgactaggaagaggcggatcttttccaggcactcctcctccgtcacattctgccccttggagagcgctttcaggaagtcggacttacaggaggctgcgtacagtgctgcctggaagatctgcacgatccagccgtggtacttcatgagggccatttcgtaggccttggtggcgttgacgcggatgaggttgaggtggttctcgtccggctcctcgttgcagatgctctggaggaagacctggatgaagcggaggcct

SEQ ID NO: 6818 - DNA, 2300 bp, Homo sapien
gggaattgtgggagttacaattcaagatgagatttgggtagggacacagccaacccatatcattccacccctggcccctcccaaatctcatgtcctcacatttcaaaaccaatcatgccttcccaacagtccccaaaagacttaactcatttcagcattaactcaaaagtccacagtccaatgtctcatctgagacaaggcaagtccctttcacctatgagcctgtaaaatcaaaagcaagttagttacttactagatacaatgggggtacaggcactgggtaaatacagccatttcagatgtgaggaattggccaaaacaaaggggcttacaggccccatgcaagtctgaaatccagcagggcagtcaaatcttaacactccaaaatgatctcctttgactccgtgtctcaaatccaggtcacactgatgcaagaggtgggttcccatggtcttggcagctctgcccctgtggccttgcagggtacagcctccctcccagctgctttcatggactggagttgagtgtctgcagcttttccagacacacggtgcaaactgtcagtggatctaccattctggggcctggaggacggtgtcccgcttctcacagctccactaggcagtgccccaataggtactctgtgtcggggctctgacccacatttcccttctgcactgctccatcagaggttctccatgacagccccacccctacagcaaaattctgtctggacatccaggcattatcatacatcccctgaaatctaggaggaggttcccaaacaccaattcttgactactgtgcactagcaggctcaacaccatgtggaagctgccaaggcttgaggcttgcaccctctgaagccatggctcaagctctatgttggctcctttcagccatggctggagtggctggtacataaggtaccatgtccctagggtacacacagcacagggaccctgggcccagcccacaaaactattttctcctaggcctctgggcctgtgatgggaagggctgctgtgaagacctctgacatgccctagagacactttcttcattgtcttgaggattaacattgggctcctcgttacttatgcaaatttctgcaactggcttgaattttttctcagaaaatgggtttttcttttccatcacattgtcaggctgcaaattttccaaactcttatgctctgcttcccttataaaactgaatgcctttaacagcacccaagtcacctcttgaatgctttgctgcttagaaatttcttcttccagatatgctaaatcatctctctcaagttcaaagtttcacaagtctctagggcaggggcaaaatgccaccagtctctttgctaaaacataacaagagtcaccttcgctccagtttccaacaagttcctcatctccatctgtgaccatctcagcctggatcttattgtccatattgttatcaggcttttggtcaaagccattcaacaagtctctaggaaattccaaacatttccacattttcctgtcttcttctgagccctccaaactgttccaacctctgcctgtaacccagttccaaagctgcttccacattttcaggtatcttttcagcaacaccccactttactggtaccaatttactgtattagtccattttcatgctgctgataaagacatgcccgagactgggtaacttgcagaaggaagaggtgtaattggattcacagctccacatggctggggaggcctcatgatcatggcagaaggcaaggagtagcaagtcacatcttacgtggatggcagcaggcaaagagagaacttgtgcaggcaaactcccattttttaaagccatcagatctcatgaggcttattcactatcacaagaacagcatgggaaagacccaccccaaaattcaatcacctcccaccaggttcctgccatgatatgtgggaattgtgggagttacaattcaagatgagatttgggtgagggcacagccaaaccatatcactgctataaacatttgtgtgcaaatttcttaagtgaacatagttccattctctaggataaatgcccagtatggattgttagttaagaatggtgtatatagatacctttttaggtaaatatgaaagagtttcccaaagtagttatactattttactttcttactggcaatgtatgaaaaatcgagtttctccaaacctctgccaacattcgaaactatgaactttttttagccattctaagaggtgtatagtgatatctcatagtggcttcttctgaggcctctttccttggc

SEQ ID NO: 6819 - DNA, 2300 bp, Homo sapien
attaagaaggaaatttttaataatcttgaagcaaatgaaaatcaagacacaacataccaaaacctatgggatacaggaaaagtaatgctaagaggaaagtccatagcaataaacatctacatcaaaaaaattgagagatttccaacaaacaatctaatgatacacctcaagtaactaaaaaagtgagaacaaacaaagcccaaaattagtagaaagaagaaagataagagcagaagtaaacaaaatagaaacaaaaaatatatacaaaggttcaatgaaacaaaaagtggttttttggaaagataaactcagtctgggcaaggtggctcacactcgtaatcccagcacttcaggaggctgaggtgggtggatcacgacctcaggagttcaagaccagcctgggcaacatagtgaaaccctgtctctacaaaaaaaaaaaaaatgcacaaattagccgggcacagtggtgcatgcctgtagtcccagctacttcggaggctgaggtgggaggatctcttgagcccgggaggtggaggttgtagtgagccaagatcgcaccactgactccagcctgggtgacagaaataaaactttatctcaaaaagaaaaaaaaaagataaaatcaataaactactagctataccaaccaaacaaagagaggtcccaaataaaatcagaaatgaaaaagagatattacaactgataacatctaaataaaaagatcatcagactagtatgaacaactgcacactgacaaactggaaagcctagaggaaatggataattttctaaacacatacaacttaccaaggttgaatcaggaagaaataaaaaacctcaacaggccaataatgagtaagtaacaagattcaatgagtgataaaaagtctctcaacaaagaaaagccccaaggctgaatggtttcactgccgaattctaccaaacttacaatgaagaactaacaccaattcttctcaaattatttcaaaaaatgaaaaaggggaggcagggcaaaatggcagaatagaaggctccacccatcattccccccacaaggacaccaatttaacaaccatctacacacacacatacacacacacacaaaaccttcttaagaaccgtaaattaggtgagccctcatagtgcctggtattaacttggtatcactgaaaggctctgaagaggtagaaaaaacagtcttgaattgctgacaccccctctctcccacagcccagcagcagctgcatggtttgtggactatcgggtgctgggggagggagaacacagcaattatgagccattgaactcagtaccgtcctgttagagcagaaaggaaaaccagaccaaactgagatgatgctcacccacagagagattttaaaccaggaccagccacagaggaatcacaggcccaatggttggaacttgagttcctgcaaatcttgccacctacactgctctgtttctttaagtaaatatgaaaggcagtcaaggccataaggactgtgtgatggttaacactgagtgtcaacttgattggatagaaggatgcaaagtattgatcctgggtgtgtctgtgagggtgttgtcaaaggagattaacatttgagtcagtggactgggaaaggcacacccaccctcaatctgggtgggcacaatctaatgggctgccagcatggccagaataaaagcaggcagacgaacatggaaggactagactgacttagtcttctggcctacatctttctcccgtgctggatgcttcctgccctcgaacatcaggctccatgttcttcagctttgagactcttggaccttccaccacagactgaaggctacactgttggcttccctacttttgaggatttgggactcagaatggcttctttgctcctcattttgcgacgggcctgttgtgagacctcactttgtgatagtatgagtcaataatcttaagaaactcccctttatgtatacatctatcttattagtactgtccttctagaaaaccctaactaggatgggtgagtgcggggcgggcgtggggaaggaccgggctcccctcgcatatggttggagagaggtgaaacgcgcccaggcggcgcgcgcggaatcagttgagtctcttcggttcccggctctttctcctgcggtgggtatttgtccggctgctgggcgacctttcccgcgaaggaggttgtgccttcattcggtcgcgccccgggctggggaggcacctccctggtgcgcaggaaccgcaggggcgggtaggagcctggctctgcctgagctccggaggg

SEQ ID NO: 6820 - DNA, 2300 bp, Homo sapien
aaatcaaaacaattgaattcatggagatagagaatagaaggatggttaccagaggctgggaagggtagtggggagggggggagtgaggggaggtgaggatggttaatgagtaccaaaaaaatacttagaatgaataagagctagtatttgatagcacaacgggggactatagtcagtaataatttagctgtacattgtaaaataaccaaaagagtataattggattatttgtaacacaaaggataaatgcttgaggggatggatacccaattttccatgatgtgattattgcgcattgcatggctgtaccaaaatatctcatgtaccccataattatatacacctactatgtacccacaaaaaatttttaaaaaggaatgaaataaaaacatttgagtttaagaaaaccacaaaaaaacaaagtagggaaagctcttcaaatactatgaaattgagaagacaactaaagaaaatattaataaagacaagaacataaataatttctttggcagaacataagccatcataatcagaagataaataagctgggaaaaatatttgtaactcatatcctagataacatactcattttccctgtatataaaaagtttctctaatgtgataaataaaaacacaataaaccagtaaaaaatgactactttgatatgaaggtatgaattcacaattcctagaaaatagaaatagctcttaaacatgtggaaagatgtgaaaccaaaatcataataagagaaatgtaaattaaaattactttgagttttattttactcacaatttcaaagaccaaaaagtttgagagtatactgtgtgagagacaatgtggaaccaagttctttcactcatttctggtgggagtagagattgatacagccctcatggaaggcaatttgcaacatataaaaatttataaaatctagggccagggacgttggctcatgcctgtaatcctagcactttgggaagccgaggtgggcagatcatttgaggtaagtgggtcgagactagcctggccaacatggcgaaatcccgtctctcttaaaaatagaaaaattagcctgatgtggtggcatgtgcctataatcccagctactcaagaggccgaggcaggggaatctcttgaaccccggaggtggaggttgcagtgagctgagatcatgccactgcactccagcctgggggacagagtgagactctgtctcaaacaaacaaacaaaaaatttataaaatctgatactttttcaccatggagtttcttctgtaggaatttatcctagagatatatttgtacatgtgcaagagacatatgtacaaggttaataaatgcaccattatttgtaatatcaaaaggttaataactgtcaaaacagccattaatattgtataaattatggtccatccatgcaatggaatactgtgtagctgtaaaaaaaaaaaaaaaaaaagcaacaagcccgacatggaaagacttccaataaatagtaagtttaaaagaaagtgcagaataatacatatttatatgaaaaaagagtttttatgcctcaaaggccttcacccttgatcttctggtgttattcctgtccttgtattctcccagaatcattacctcatcccatgaatggtacagtcaagtcttgcttgttctgtgtccttacattctttagagagaagtcacaagagacaagcaaacatctcttttgctaataatattgatcacttcctacagcataatatctatgtgcaattttttgggaagacctcctactaaacagttaagaatggaaagacacaaagagaagaaagtggagaaagacctctgtcttcccacactggattttgcaaatacaactcttctgtgatacaggaaactaaaaagagggaaaagtggcaattaagaaaaactgccagaaaataaataccttgatgacccaatttggaaaactacttctagataaggaaacactattacccaatatgttaatttttaaaatacccaaagaattgagcaaaaaggactttggcaaggcaggttgttggatttaaaaccgttctcccattaatgccaaagccagcagaggtaccaactatagctccacggccagaagataccagcagctctgcctttactgaaatttcatctggagaaaggtccacaggtgaggtttcttccaaggagtaatttctcttatttgactcttttgagatccttttctcacataattgtcaaatttcaattggagagaaactgtgttttctacctcattacggggtcagtgctgaggaga

SEQ ID NO: 6821 - DNA, 2300 bp, Homo sapien
gctggattttcctatctgattcatcatccaacctgttttaatatgttatttaggttggagtatatgaagaaaattcagcctcacacagatatatagttgaaatgggggagtgtattttaatggtatttttagataattgtggctattctatattataccaaactcaacaagtggtagcttctgaaaagtcagttaccatgtggaaatccacactcatatcaactaacttgtcatattgtgtgtactcatgagaaaatgagactgaaacatgaaaatagtgtgttagcactattctaaaaataattttgagatcaaagcctccctaaggagggattcttagggttccctggaaaacagtttgagaactgttgctataacatattggtatttatcctttctcaagtcagaaatggtctctttattttgttatacattttccttatcatcagtagatgttgacaattatgaaattcattttctgcatctagtaaaataaatgtacaatccttttctttgattactggtatagtgaattacaaagatagatttttctgatatgaaactcttcttgactccctggaataagccctggttaatcacgatgtgctattattttcacctgatctgtgctgtaccatgtacagcatgatgtactattactgctacccagttggaaacattcagcctctctctgtgagctctttttccctggggatgtcaactaccctgcctaaaatatgtgtgactgtgtgtgtggacccattccagcaggtaccactctcagtggttttaaggtggcaagatgtagtgggggaggtggaggtgtcaatgcataggtctcagaacagagtctataatatcattgttcacattggagccacgcatttgctgcttatggagtatttggccatcctttacttcctggccctacccatttctcagagattaaaaaaaattttttaagataatcttgctgtgttgcccaggctggcctcaaatttctgggttcaagcaggcctcctgccttggcctcccaagtagctgggactataggcacatgccaccatgcctggcccatttctaaattgcttgtttgtttgttattacaaatgcctagccctcagggtatgaacatggactggagaagaagaaaccagagttgctgctatgtccaccagcctctctgcatgtcctggcctcagcccccctgggctctggtactgacccatctctggccaccatgctcctccataagcctctgcagagctaatctgaccctgttgatgttctcatgagagagtgatctgcatgccccctgcacccctccgtgataatacagcagaccaagagctctcccacccttccctgcctggatgctgggcacgtccccagctgggctgcctatttaacgcaccacactctcattctcccaaggtggggctccaggactaggctggggcagcagaaagtccccctctctacattgtccttggctcaggagccaacttagaaaaagcatttccaaattggctaagccagcggagcagagattttctgtgctgagaaatatcaggacatccagaggggtggaaggaggcttccagggcacacatgagatgtggcaggggtaggctgtccgttttaaagcttaaagctttagacatgaactcacagggatttcagtcagggtcatctgccatgtggcccagcagggcccatcctgaggaaatgaccggtatagtcaggagctggctgaagagctgccctcactccacaccttccagcagcccaggtgccgccatcacggggctcccactggcatctctgcagctgcacttcccccaatgctgaggagcagagctgatctagcaccctgtccattgccaaggcacagcaaacctctcttgttcccataggttacacaactgggataaatgacccgggatgaagaaaccaccggcatccaggaacttgtcttagaccagtttgtaggggaaatgacctgcagggactttccccagggaccacatccagcttttcttccctcccaagagaccagcaaggctcactataaatagcagccacctctccctggcagacagggacccgcagctcagctacagcacagatcaggtgaggagcacaccaaggagtgatttttaaaacttactctgttttctctttcccaacaagattatcatttcctttaaaaaaaatagttatcctggggcatacagccataccattctgaaggtgtcttatctcctctgatctagagaggtaagcagggtcgggcctgg

SEQ ID NO: 6822 - DNA, 2300 bp, Homo sapien
aatttgccacttgctaaaagtctgaaccttggcagctgaatgtgatcagaaaaaaagcacgactgctatgactagtctcactttaaattcatggtcgttgaccaagagctaccatacaatccactacctttctcaagttcagtcacattcttcctttcctagatgtctgctttctacttctcttctcttctgaaacttcccacaactcctcgttcattctcttctcagttgacaactttgcttcctatttcactgaaaaatagaagcaatcagatatgaacttctggctgggcatggtagctcatgcctataatctcagcactttgggaggccaaggcaggaggactgcaggttaggaatttgagaccagcctgggcaacatggtgaaactcccactgtactaaaaattttaaaaattactcaaacatattggcaaacaactgcagtcccagctacttgggaggttgagatgcaaggatcacttaaacctgggaggctgaggctgcagtgagccatgattgcaccactgcactccagctcaggcaacagagcaagaccctgtcttgagaggagaggagaagagaggaggggaggggagggcaggggaggggaggggaggggaagggagaggggaggggagaggggaggagagaggggaggggaggggaggggaggggaggggaggagaggaggatcaggtgaggagtatgccaaggagtgtttttaagacttactgttttctctttcccaacaagattgtcatttcctttaaaaagtagttatcctgaggcctatattcatagcattctgaaagaaagaaaagaaaagaggaaagaaagagagaggaaggaaggaaggagaaagagagaggaaggaaggagaaagagagaggaaggaagggaggaagagaagaagggaggaagaaaagaaggaaggaaggagggagggagggaagggagggagggaaagaggaagaaaggagggaaagaaggaaggaagagagagaggaaggaaggaggaagagagaagaaggaaggaggaagacagagagggagtaaggaaggaaggaaggagaaagagagaggaaggaagaaatgaaggaaggaaggaaagaaagaaaaaataaaagagtgaaaacggactggagaagaagaaaccacagttgctgctatatccaccagcctctctgcatgtcctggcctcagccctgctgggctctggtactgaccacttccttccttcctaatttcctaattgactaggccagctgagcagggcttttctgtgctgaggaggtaaatctctggatatctagactgaggggtggaaggagccttccagggcacacatgagacatggcaggggtaggctgctagttttattttgttttcttttagacacagggtcttgctctgttaaccaggctggagtgcagtggcgtgattatagctcactgcagccttgacctcctgggtctcccacaatccttccgcttcagcctcttgagtagctgggactgcaggtgcacactaccacacccggtccatttatttttatatttcgtagagacaagatcttacagttttgcacagagtgatcttaaactcttgaccccaagtgatcctcctgccttggcctccaaaagcattgggattataggagtgagccactgtgctggacctagtctgtcagctttgaagctttagatatgaactcagagggacttcatttcagaggcatctgccatgtggcccagcagagcccatcctgaggaaatgactggtagagtcaggagctggcttcaaagctgccctcacttcacaccttccagcagcccaggtgccgccatcacggggctcccactctcaactccgcagcctcagccccctcaatgctgaggagcagagctggtctcctgccctgacagctgccaggcacatcttgttccctcaggttgcacaactgggataaatgacccgggatgaagaaaccactggcatccaggaacttgtcttagaccgttttgtaggggaaatgacctgcagggactttccccagggaccacatccagcttttcttcgctcccaagaaaccagcagggaaggctcagtataaatagcagccaccgctccctggcaggcagggacccgcagctcagctacagcacagatcaggtgaggagcacaccaaggagtgatttttaaaacttactctgttttctctttcccaacaagattatcatttcctttaaaaaaaatagttatcctggggcatacagccataccattctgaaggtgtct

SEQ ID NO: 6823 - DNA, 2300 bp, Homo sapien
tacccaggaattaagagagaaacccatgggaccagtgcatctggacagtcagatgaaataaaagatttgtaatcctcagaataacttagtgaatccatatgtttatagaaaaaatacagattttttgacatggcatttaatgcagccttctatctgaccttagctacctttctagccacatccttctaagtgctataaatttcactcctatcggagaactaagtgtgtacactgacacttcactacctttcttcatgctatgtcttctatccagagtattctcccgccattttttgtgagacaaataatacctccttaggaatatgtccctttccctactcagaaaaattatttcttcttctctgctttcatatcacaatgctgttttaaagagctgctctttggtgttcaacttactctttttttaaattatacttagttgtttgcatgcctttctttctaatgagagcttactggagcttatcaccttgaggccaaggaccaccttttctattcatctatttgtcttatgtaacatgagtataatacttgccgttagtaagcatgagaaatatttgtccaagggtcaggtgcggtggctcacgcactttaggaggccgaggcaggtggatcacgaggtcaggagatcgggaccattctgactaacatgatgaaaccccatctctactaaaaatacaaaaacaaaattagccaggcatgatgctgggtgcctgtagtcccagctattcgggaggctgaggcgggagaatggtgtgaacctgggaggtggagcttgcagtgagcggagatcatgccactgcactccagcctaggcaacagagcgtgactctgtctcaaaaaaaaaagaaaaaagaaatatttgtctaagaaagctctgaggctgaggcagggagaattgcttgaacccgggaggcggaggttgcaatgaaccgagatcacgtcactgcactgcagcctgggtgacagagtgagaccctgtctcaaaaaaagctctgatcccctctaactcttgtgaatgttattgttattttgcacacttttttagggaggaaaaagaggtaactagtccacctccagaagaagacaggttccaggagcttaaagtagcaacagcagaagcaatgtgagtataatgagaaacttttatagtgacgtctcaaggcagtttagtaaacgaagtgaatcattatattgtaagttttttatgggccttgtatgaaatatatagttgattagagaagttgctataaatggtctttccttttattaagtccaagttgccttcctaggactaataggaaaaacccaggcactgaagttttcattcttggcagcaataagattttcttcatgttaattttttggtatttgacttccagtattcctagctttgtgtgtaaaactactgagaagattggcagccttcacacaagcccagaatgggaatgactttctgagtccatcagtagtggtcctgagacagtttggggcagagatagcctcatttggaattgaaattgaagaagtaggctgggcgtggtggctcatgactgtaatcccagcattttgaaaggctgaggtgggcggatcgcttgagcttagaagtttgagaccatccagggcaacatgatgaaaccccaaataccaaaagtagctgtgtgtagtgggtgtagtggcatgtacctgtattcccagctactcaggaggctgaggtgggaggatcacttgagcctgcagtgagctatgtttgtgccattgcactccagcctgggtgacaaaacaagaccctatctcaaaaaaaaaaaaaaaaaagtaaaacactacaaagtttatgttctctgttttgtcatcttgttgagatagtttttatttaaagagttgaaaagtaacgtttattccagatgagtatgttacattggttaggttaatttattagcatgaattaatttgttttaagaaaaacacatgacacatgaatttcatacttgtctgtcttgtataggaccaagctacaggaccctctggttttatttgaatccgagtctctgagaatggttttacaggagtggctttcacatttagaaaaaacatttgccatgaaggacttttcaggtgtttcagatactgacaactcatccatgaaattgaaccaggatgtgctattagttaatgaatcaaaaaagggaatattagatgaagataatgaaaaagaaaaaagggactctttaggcaatgaagaatctgttgataaaacagcatgtgaatgtgtaaggagtcca

SEQ ID NO: 6824 - DNA, 2300 bp, Homo sapien
aaccaacttcaactttatactttatgtttactctccctgaaatgactgcttcccttccagattttcttatccaaacatacccagctttcaagatcgcacatgagccctacttcctagaattctcaagatggaaaaagattcataggtaattcagtgaacatgtccacctaattcagaaattagttttgccctagatccctgaacattttcagccatggaaagaaagcactcactctcatgaagctgccaattccagtcctccaaagggctcactattataaggttctttttaatactatgctgaagcctgatcacttagagctctaccattattcctaattgtatgtagcttctacagctgaagggaacaagctgtctctttccaaaacaatccttctgtatttgaaaagcattatcaggtcttctaaaaatttaacattcccagtttcttcatcactcctgacatgacattttccaaccctctgttccagtcaaccttctacagaggcactgtagtttgcctaaaaatgaggtgcctagaactgagcataatactccttaagtagttagatgagcccagaatagagtagaaacactaacttcctggatctagacactaagtttctatattacaacctaaaaacagtattagttgtgtttaagtggccatgttacacattgattcaacagagcaagtggtcaactaaaacccaaagaaattgtttacataaataaaatcttcttagccagtagctacatacagtagaactgagctcaaattgaaagctgctattaatcaaatgcaacaatggatataaaaagtacctagaaatgtacaaacagtataaagaggaacagcagaatgctgataattgttcaagttgcgttaagtgtacatgagggttcaatttattatcctacttttgtctgcgtttgaaattttccacaataaaatttaaaaaatatatacataatattgtacaagccttcaacagctctatttcttgaaaatctgttatctcctccctgcttctttttccagccttatttcccatcttaacctctctattctccaactacattggactcgactctttttttctttttcattccataaacttgctgtgcctccatggtttaatatatgatgtttatggaatcttcccccatttaccaaaaccctacctttctgcaaagctgagtttaaatgttacttctgtgaaggcactctaccaaaaactaagaacatagaagttggcgacaaatgcttaaccaaagtaaatgaaacaacttttgggagactggcttgcccaaggatcacagagttcataaatggtagagctgagattagaatacgcgtctcctgaatccaaatctcatctttccattatcgtaaaatagttcagtgtttgttgctcacacatcaaatgcaaacatgtttctcttttgccccagtaggtgcgtggaggaagaggagaaagaagtaagaaagatagcaaaaattgaagaaatgagaaggggaagttgcagactgcctcattttcacaatgggatctttctatccaagaagaaatgatcagaaaacaactctctgcctcagacaaatggcgactgactcatttatacattcattcattcaacattctgagtgcctactatgttccaggacctgaacacaccgctagagacacagggatgaacaaaacacaatccctacccacaaaaagctccttgcctagtggaactactacctttttaacagcagtaactttaatatcttgagatttcttgagaggagacccagtaaccaattttcaaagccaggctcacagaccagcagcccggaggtcccagcccagctccaccacatccagggcagtacctcgcagctctcagtagatcggatcttgtctcccggcttagcgccggggaactcaccgcgcactaagagcggaacgtgaacttcagtctcccctcgcgttcctccccttccttgctgacgtcatccaggagagccgcagactggaaacaacgctactaacggcacttcctcatcacgtgacgagtcacgcccctccttccgcgtggtccctccccctcaggccgcggtcgcgattacgctctctacggcctgcgaccgcagggccgttgcgggctggagacacggcgccgactggaaccggaggagctctaggccaaatggttgggccagccaggatcccaggacccttcgccgctcgagaccggagagaggaaacgaaacaggcgggaacccgtgggggagggagggaactagcgga

SEQ ID NO: 6825 - DNA, 2300 bp, Homo sapien
caagtcggctgaatggcctggtcaacatggtgaaaccccgtctctaccaaaaatacaaaaattagccaggcatggtggcgtgcgcctgtgatcccagccgctggggaggctgaggcaggagaagcccttgaacccggtagatggaggttgcagtgagcagagatcgcgccattgcactccagcctgggcaacaagagcaaaactccgtctcaaaaaaaaaaaaaaatgtcggctgagtgaggatagcagaccatctcttttttctcctttctgaatgagggacttaagcctgctaacaggtacaaagttctctccagagtttagtccttctctaagtccaaggcctgctactagaggttaccttccctgcggttgtgacctctccatctcaactgctctggttttgtcttttaaaaaatcttaaggttggcaactttggcttaattacctaagtccagttcagtggttttcaaactgtgttccaaggagtggcctctaggatagaagttaagtggggtggtggggcctggcccttttaaatttagttccaccagagcatgctgctttatatattgggttccagataaaaattcatggggagaaattgttccactcctttaaaatgtttgaaaatcacaagtctggatattggtttgtatggagtcaatactcactgcaaagcacatttcattcaaaccactcagttttttttttgtttttgtttttaagactgggtcttcaaatggacaaagggtgtatttttcatatcttctttccccatccccattttactgatgctaaaattggagtttaggagtcatttggggccaggcactgtagcataattctggcgctttgggaggtctaggcaggagaatcgcttgagcccaggaattcgaggttacagtgagctattatcacgccactgcattccagccaggacgacagaacaagactctgtctcttaaaaaaaaataagaaaagtcacctccttatttaatttggcctttgagaacactgggggatttacaaaataattacatatatccaggtactcatggtctatttttcatcattacacgacaatcaaatgaccaaaactaggagtgtgtggactggcacgtgttaaggtttttaagagaggtaagattgacaggtggaagcaaaaggtgtgcagacaacaaggtgacagcttttctcttacagaatcccagactcaacagcacatttcctgacgggaagggcttctctgtctgggagaggcctccacttcattctcataagccaaatctgatcctggctttgggtaaacctgctctcaatttaagagcaggtttcctttagacaagtagattaggggtcgcctcttcctcgcctcgggataagggcaaacaagacgccaggcttgggcgttgggaggacggcgacagcgacgctgggaacaggggtagaatccacgccgtccagcggcccccaggcctgtcagctcctcacccgcccacccacccgcccgcctgcattcttcggtctaaacttaccaggtggaagctacaactctagacaggaagtaactaactgggttggatccggtcgagttccgctgcgcttcttagagccgctgctgggaagaggccgaaacccagtggccgcagcagtagccaccgcctctgttactagggggtctcgcctccatcgctggctgcgaggagtctgagggcacgtgaccggaagtagcaaggcgggccctgggcacgtgactcaagagcgcggccgccatgacaccttccgctagttccctccctcccccacgggttcccgcctgtttcgtttcctctctccggtctcgagcggcgaagggtcctgggatcctggctggcccaaccatttggcctagagctcctccggttccagtcggcgccgtgtctccagcccgcaacggccctgcggtcgcaggccgtagagagcgtaatcgcgaccgcggcctgagggggagggaccacgcggaaggaggggcgtgactcgtcacgtgatgaggaagtgccgttagtagcgttgtttccagtctgcggctctcctggatgacgtcagcaaggaaggggaggaacgcgaggggagactgaagttcacgttccgctcttagtgcgcggtgagttccccggcgctaagccgggagacaagatccgatctactgagagctgcgaggtactgccctggatgtggtggagctgggctgggacctccgggctgctggtctgtgagcctggctttgaaaattggttactgggtctcctctcaagaaa

SEQ ID NO: 6826 - DNA, 2300 bp, Homo sapien
aattaggggaatgaagactctacctagtttatcttcacaggtcatctcagagtgccccaacccaagcctttcaggtgaaaattcttcgtctccccagccaacttcagctctctgccttctgcacacctcttcccagcagcagtggtcacatttggtaggcaggcaggggcccagccctgactgagaacactgttgcaaagactgagaaaccggaaaacactgtggcaatctgccctgccctgaggtactctgaagaatcagtggcccacccctaaactttccagctgtgtgtttgaggtgagagccccatttcagaacctagagtgatcttagaatctagagtgatgggaaaactgttagaacatgcaagcatgccctgctattttttttttttttttgagacagggtctcactatgctgcccaggctagtctcgaactcctggcctcaagcagtcctcccacctcaaccacattggtgctgggattacaggcatgagtcactgcacctggccccttgtgctattttggagctgaggttagagttttccgtcaaaaccaagaaactcagttatggatctatctcaaagctgcactgggctgctgctgtaggttcagggagtaagtaaagccatccacccctttgggctgaaagttccagccctctaattccctaatcatttggtctttcccatgactggctccttcctgaggctatctaagactcctcattcattaacattaagtcagggaaaaaggctctttataaataacaaaagacattcctatcagaaaattcaggaaattttggcatactcaagggcttaccaaatatatttcataatataccccacagtggggaagtattggtacaaattaaagaagagatggaggagggcgggctaggcaatggaatcagcaagaatacaggcccagaggtaagtatgataagaaaacaaaaaattgagctgggcacggtggctcacgcctgtaatcccagctctttgtgaggccgaggcggccagatcacttgaggccaggagtttgagatcagcctgaccaacatggtgaaaccccgtctctactaaaaattacaaaaattagccgggcgtggtggcgcctggctgtaatcccatcttctcaggaggctgaggcaggagattcgcttgaacccgggaggcggaggttgcagtgagccgagatcagcccactgcactccagcctgggcgacagagcgactccgtttcaaaaaaaaaaaaattaataattaaaaaaaaaatcgcagggcaagtgggcgcgcttgtagtcccagtcacttcggggagccgaggtgggaggatcgcttgagccagaaggtcgaggctgcaggaagccatgatcacgccactgccctccagcctgggtgacagagtgagaccctgtctcgaaaaataccaaaaaacaaataaacaaacaaaaaaccaaaaccaaaaaaacaagccactgacagttcttgggtatggttgagactcgagatgagatgccagtggggtgggcagtagaaagtgcagaataaaatgtacatttgaactgagtcaccctgcaaggcctgagaggccaaggcttcactgtgagtgggagctggtaggcttagcagcagagggaaaagcagcgtcgagttttggaggtcactcgacttaggtaagaacagactgactgactgctaggcattttcttcctttcgttcaacaaatatttgtggagtgcctattacgtgccagaagctgttctggacactgagaaacagggatgaagaagaaacagatccaagccttcctgagagtaacctccccaggtttcatggatgaggaaactgaaggtcgtcctgactcaggctcatggctccgaccccggcttctgtggttggagggcagcaccttacttagactcccagcgcacgtggagcagtctgccggtcggttgtctggctgcgcgcgccacccgggcctctccagtgccccgcctggctcggcatccacccccagcccgactcacacgtgggttcccgcacgtccgccggccccccccgctgacgtcagcatagctgttccacttaaggcccctcccgcgcccagctcagagtgctgcagccgctgccgccgattccggatctcattgccacgcgcccccgacgaccgcccgacgtgcattcccggtacggtagggccctgcgcgcacggcgccagagggatgggcgggtagagccaactgcctctggttctgctggcctccgctgctcgcgaagggattcctgctcccggga

SEQ ID NO: 6827 - DNA, 2300 bp, Homo sapien
attattttattttattttgtttttatttttgggggtagagatgggggtctccctatgttgccagactggtcttgaactcctgggctgaagcctcggcctcccaaagtgctgggattgcaggagtgagccaccatgtctggcccaaaaattctttagtgagtacctactatgctttggtaaatgttgcaatgtacaagaataaataaagacaaattttggttctaaagttactgcaatcaagtaagcaaaatgttaagtaagtttggagtatttgggcaggcatggatgaagagccagttctagtcatctagcatcagtttggccactaccaagctgataccttccttggccgccaggggcctgaggcaggtgtagagcttaaatttccagtccatccaggccagcaatctccctctcagcccggggataaatgaggttgctgtggaggtataggaccaagtggttgctgctcctgtctgctataggaggcctctagcttcaggctagttgctggttgagaaaagtgccataagagagagatatacaggaaatgatggtagttgacatttgtcaaggaaagccagagtatgtatgtgcaaagctgaaaatgaggaattaaccttgagaagggctggggaaagagctttcttggtttaaagaacagcaaaaagtcctgatccaaaaaagctgtccaaagcctagttggaaggaagtgtattgagtgtcctgagatgatatgggaagtgggggtaggaggccaaatcttgaagatctaggttgtggtaaaagtgggttactctacctgtaatggaaagccacggaagagtttaaagcagggttattgcataatctgaaccatattgaaaacaaatactgactgggtgcggtggttcacgcctgtaatcccagcactttgggaggccgaggtgggtggatcacttgaggtcaagagttcgagaccagcctggccagcaaggtgaaatacaaaaaaatacaaaaaaatttgcccggcggctgggcacggtggctcagcacggtggctcacgcctgtaatcccaacactttgggagggcggatcactaggtcaggagttggagaccattctgaccaacatggtgaaaccccatctctactaaaaatacaaaaattagccgggcgtggtggcgcacgcctgtagtcccagttacttgggaggctgaggcaggagaattgcttgaacccaggcggcggaggttgcagtgaactgagattgtgccactgcactccagcctgggcgacagagtgagactctgtctcaaaaacaacaacaataacaacactacaggctattataagaaaaataaattatattttggattttgaaaaaggttcaaatgcaaatactctacaaaagatggagtaggttgtgtccccttctgtgagatatatatctctctcacaaaaaaaaaaatatatatgtaaattttttttgagatggagtttctctcttgttgcccagtctggagtgcagtggcgcgatcttggctcactgcaacctccgcctcctgggttcaagcgattctcctgcctcagcctcccaagtagctgggactacaggcatgcaccaccatgcccgactaattttatatttttagtagagacggggtttcgccatgttggccaggctgttctcaaactcctgacctcaggtgatccacctgcctcggactcccaaagtgctgggattacaggtgtgagccaccgcgtccggccatgagttataaatattaacaatttcttgctgtaaattgaaagcatccttcgcgtctttgcgtttcattaccaccctctgttctctcaagagaaattctaactttatttcagcactcagtcctgaagttacagaagttaataattttttaaaatcctgcaaacaatgcatggatatccccgtcttgcacactctttgggccagtctagaattcttcccatcagcatttcggtgatctggaccgccgccacccacactgcgctccagggcagaaaagacgccccatgcccgcgcctgggccggcggggggcggagcttgcgtgctgacgcataagagccgagcgggggaacgtgcgtgtctcgagtcgcacggagggcaaccgtcgacgggcttagcgcctcaactgtcgttggtgtatttttctggtgtcacttctgtgccttccttcaaaggtggtgctttgtccctgtgggtcatctgtactgattgcgccaagcaaagcatttgtgagcgtgtggtgctggggtgaaagtggtggctgggggcagg

SEQ ID NO: 6828 - DNA, 2300 bp, Homo sapien
actcactgcaacctccacctcccaggttcaagcaattctcctgcctcagcctcctgagtagctgggactacaggtgcctgctaccacgcccggctaattcctttcctttttttttttttttttttgagacggagtctcgctctgtggcccaggctggagtgcagtggcacgatctcggctcactgcaagctccgcctccccggttcgcgccattctcctgcctcagcctcccgagtagctgacgcctggctaatttcttttatattagtagagacgggctttcaccgttttgcccaggctggtctcgaactcctaagatcaggcaatccgcccgcctcggcctcccaaagtgctagggttacagccgtgagccaccgcgcccggccaactccttaatatttaatttcatgatgggggtgcaaaacaattagggggaacatatctacaaagactcttgagggagtgataatgaaaaaagattgagaaacactgctctacattttataaaaatttgtcaatatgtattactgtattagggttctctagagggacagaacgaataggatagctatatatataaaggggagtttattgaggagtattgactcacacaatcacaaggtgaggtcccacaacaataggccgtctgcaagctgagaagcaagaaagtcagtcggagttccaaagctgaagaactaggagtccaatgtttgagggcaggaagcatccagcacaggagaaagatgaaggctggaagacttagccagtctagtccctccacgttcctctgcctgcttttatcctagacgtgctggcagctgactagatggtgctcacccggatagagggtgggtttgcgtcttctagcctactgactcaaatgttaatttcctgtggcaacaccctcacagacacacccaggttcaacactttgcatccttcaatccaatcaagttgacactcagtattaaccatcaaaattacgtattatgattcacaaatgagaaaacaattaggtaaaatgtggtgggagaagtagaaaccttggtttattccagactgattttcaattctacatttttgttttttatttttgagacggagtctcactctgtcacccaggctggagggcagtggcatgatctcggctcaccaaaacctccgcctcccgggttcaaacgattctcctgccccagcctcctgagtagctgggattacaggtgcgtgccaccacacccggctaatttttgtatttttagtagagacggggtttcgccatgttggccaggctggtctcgaactcctgacctcagctaatccacccgcctcggcctcccaaagtgtggattctacatttaaccacttaataatgaattgagctttcccttcatcttgtaaaaatggttatcaattggcactgcattcatcaaattcttcaggtttcatatcttatttccaaattccttttgcatacagagttttgttgttgttttgagacagggtctcactccgtcacccaggctggagtgcagtggcacaatttcggcttactgcaacctccgcctcccaggttcacaaacaattcttgtgcttcagcctcccaggtagctgggattacaggggtgcaccaccacgtccagctaatttttgtatttttagtagaaacgtggtttcacgatgttggccaggctgatttcgaacccctgacctcaggtgatccgcccgccttggccttccagagtgctgggattacaggcgtgagccaccacgctcggcccagagttttaaaattttactttttctactttagctcacatttgaggtggtaaaagttaatcttgaggtccctttctcctacagggctgggggaaaattttcacgtgagagtcaaacagtccttttcagatacatccagacaaggtttggttagaaataaaattacttgggctctctggtggatgggttctaggcaaacaactccgcccaacagcagaggccctgcactgcgttgtgcctgcagcacctcgtgcgccttctgcagccggccaaccacctacaccgcagcccgcccacccgcacgcgggggcggggcgggcaggcagaggcgcaggcgcggtgcttcgcagcccgcttccggcctcacacctgccaagcatcacacctgccaagcatcacacctgccaagcatcacacctgccaagcatcacacctgcgatgcctgcacgagctgggtgcggtccgcgcagctgcagtaagggggcgacccggcgtctgttagtcggcggttcatctccttcgtg

SEQ ID NO: 6829 - DNA, 2300 bp, Homo sapien
tgttgaccctaaaagattgcaaaagactgatagtaaacatgcagcaagaaagcttttttaaacaatatattgctgggcacagtgactcacacctgtaatcccagcactttgggaggctaaggtgggaggatcacctgagcccaggagttctgaggccagcctgggcaacaaagtaagacctcatctttacaaagaaattaaaaattagctgggcatggtggcacacgcatgtggtcccaatatacatgggaggctgaggcaggaggatcacttgagccagggaggtcgaggctgcagtgggccatgttcacatcactgcaccatgacctgggcaacaaaaatatataaatgggctgggcgcagtggcttacgcctgtaatcccaacattctggcaggctgaggcgggtggatcacctgaggtcaagagttccagaccagcctggccaacatagtgaaatcctgtctctactaaaaatacaaaaaattagctgggtgtggtggtgggcacctgtaatcccagctactcgggaggcttaggcaggagaatcgcttgaacccgggaggcagaggttgcagtgagccaagatcacactatcgcactccagcctgggaagcaagagcaaaactctgtctcaaaaaaaaaaaaaaaaaaaaaaaaaaaaaatatatatatatatatatatatatatatatatatatgtaaaatttattttaatatttataaatgttgcatttataaaatatataaataatatatattacctggcattcctccaactcacaaaggtacagttgctctaattaaagggactcctggttaagccgtggctttaagaacagtttgaaaaccttcttgcttttaaaagacataaaacagcaagtaaaatggaaggacagacagacctctagtttggtttgactggagctgtatgcttaactaaggagctgaaaaacagaggcggaggttgcagtgagccgagatggtgctactgcactccagcctgggcgatggagtgagagtgactcaaaaaaaaaaaaaaaagaaaaagaaaaagaaaaacaatacctattaatagcctttatttgtgcgtgttagcaacagtttataatgatgcttccacatgctttcagttaggccctccttgtgaatgtgaccttcacttagacgccaactttgaagggaatcaatactacggccttgttctcattagggctgtactaaaataattgaaactgtcacacatcatcaaactcaaaattttacaataccttgaatgacactgtgcttacaaaactgacggtgatgtgtaatgatgactaatgtaagtcaccatgaagaatttttatgggaagtaaaaattcaattaagatggaagtacctacccttgcattgtgcaaggcaatgaagatctgaaggaagcctgccttcaagggcttggattttgacagcggacaggtacacaaatacagcaccaggtaaaatacggcctgtattatcatttatgggtgggtacagaggagaaattctgacttacggaatgatttcctggagaagaaattactatctggcttcttgtgaaacaaaggctctacactttacccttgccaacgtatagtatgaaggtctttaagcttaaaaaaaatcattaattagaggaccactgggcatcatctaaggcaagtgtatgactttagagtcgggagaaatttgcgcctgagctagaaatgcactagcctaccattatcacaagagcaagtcagtgacagaacagttctctgaccgccagtgcagtgccctcccacttgatcaatcagtcattaaggctcactggcaagcccttcgtacttcttccctctccggcactagcttccttaagtcgactctgtgaaatacctgctaatcttatcctgaaccagagtttcgaccctcggaacagtcttgcccacatctttgggacccgattcgtcctgctgattccggcactcgaggggcgggttggttggaacccaccccaccaggcccctctcaatcccacacggtgtccacccttgcccgcaggacggcggcccggaagtgacgtagtggaagcggaagtggtgtagtggtgccgacttcctgttgtttgaggccgggttgggggtgtgcgattgtgtgggacggtctggggcagcccagcagcggctgaccctctgcctgcggggaagggagtcgccaggcggccgtcatggcggtgtcggagagccagctcaagaaaatggtgtccaaggtgaggctgcgacgcgctcgcctcccagggcg

SEQ ID NO: 6830 - DNA, 2300 bp, Homo sapien
ctggcacagtggctcacaccagtaatcccaacactgggagtctgaggcgggcggatcacctgaggtcaggagttccagaccatcctgaccaacatggtgaaaccccgtctctaccaaaaatacaaaagttagccaggcatggtggcgggtgcctgtaatcccggctacttggaaggctgaggtgggagaattgcttgaaccccggagatggtggttgcagtgaggccaagatggtgtcactgaaccccagtctggccgacagagtgagactctctcaaaaaaaaaaaacaaaaacaaaataaaaaacaaaacaaaaaaagcctttaaattataaagagatggctagaatattcagcaaaattgcctatataataaacagtgtaatattctggcaaccagttacttgttatgactaacattatctagaaggttccagcatacaattttttaatgaaatatgatattatgttctaggttctaagccataccttcctcagtgagaagatgtttaaactcccaagagaaaaatgcaatgacttatatgcatgatattttgttaattctgaagtatcaaaaatgttagcatgccagagtgcatttttaacattttgtattttgcaggttgttttggaactgtcgtactcaaaaatagaaatattttcaaagagttagtttgtactgggctcaaattggtgaacagattttttttaaatgttcccaatgtagaggtattgtatgcatttcagttgtttttttgtagtaatttgttgagggacattgatctctttaattctcgacatgcttttggaatgtaagaaaaaagtagttgtgttttcattcataatgcgacactgaatcatggtggcatatgaatcagtattttaatttaaagatagaaattcagtttaagatagatagatgtaaaagaaaactcgatcaataagaagaaattattttttagttttttgtaccagtttttatcctcacttaactgttctaggaattatctattttctacccctgacaatttatatttaacaataaaatttgaccaggcacggtggctcacgcctgtaatcacagcactttgggaggccgaggcaggtggatcacctgaggtcaggagtttgagaccagcctggccaacatggtgaaaccctgcctctattaaaaatacaaaaaatagccaagtgtggtggtgcacacctgtaatcccagctactagggagactaaggtaggagaatcccttgaacctgggaggcagaggttgcagtgagcccaggtcatgccactgcactccagcctgggggacagagcaagactccatctcaaaaaacaaacaaacaaacaaacaaaacacagtaaaatgtatcttgttgaaaccttgttagtgtttctaatgtacattaaaaatatgttatgggctgggcgcggtggctcacacctgtaatcccagcactttgggaggccgaggcaagtggatcatgaggtcaagagatcgagaccatcctggccaacatggtgaaaccccgtctctaccaaaaatacaaaaattaactgggcatggtggcaggtgcctatagtcccagctactcgggaggctgaggcaggagaattgctggaacccgggaggcagaggttgcagtgagccgagatcgtgccactgcactccagcctgggcgatagagcgacactccatctcaaaaaaaaaaaaaaaatatagatatagatatagatatagatatagatagatatacacacacatatatacacgtatatatacatacgtgtatatatatgtgtgtatgtatgtgtgtattatatgtgtatatatatagtatatatatgtatatatgtgtgtgtgtatatatatacatataatgcctcagtgcattgaggacctaatatacttattaaaataataaatatttgtgagctaggctagaagtatatattttttaacctttacattttttaccttgtatgcaatatttagtggaaatcatgacctatgtaacatggaaactgagtacatttcctgcaaatcgagtgatcggaattggatgtaatctggattcacagagattacagtatattattacaaatgttttgaaggcacagacttcaggcaaagaagtatgggttattggcgagcaaggagaagacaaaggtaagaagtacgtttttaggctgggtgtggtggctcatgcctgtaattccaacactttgggaggccaaggcaggattgcttgaagccaggacttcaagaccagcctgggcaacatagcaagaccccatc

SEQ ID NO: 6831 - DNA, 2300 bp, Homo sapien
tctgcctcccgggttcaagtgattctcctgcctcagcctcctgagtagctgggattacaggtgcatgccagcatgcctggctaatttttgtatttttagttgagacgggatttcaccatgttggcctgtctgttctcgaactcctgacctcaagtgatttgcctgccttggcctcccaatgtgctgggattacaggcgtgagccaccatgcctggcttaactactaattttctatactgttctagactctaggctgaaatgtagattcagcttctccagaggcctttctctaacttagatgttctttgtgtcaatttgtagtttcctgcctgtacttactattgtatacatattttgtttattatctcacttttacatatgttaattgtaagaccttcatacacacctgttgaagtttgtaggcagtagagctatatcttttttttttttttttttgagactgagtctagctcttgttgcccaggctggagtgcaatggcaccatctcggcccactgcaacctccgcctcctgggtttaagcgattctcctgcctcagcctcgcaagtagctgggattatagtcgcctgccaccatgcccggctaattttgtatttttattagagatggggtttcaccatgttggtcaggctagtcttgaactcctgacctcaggtgatccacccaccttagcctcccaaagtgctgggattacaggcgtgagccaccgcgcctggcgagctgtatcttttttgcaggtgaacaacttaaggctctgagagaggaaacaggatccactagcaatcctcttccattttctcccaaactcccacaatcctaggtttccactagtctactttgtgtttctatgtatttgccagttggagatattgcatatacatggaatcataaaatatatagcctttgtgtctcatttcttttatttttaatttttcttttttttttttttctgggaagcacagtctttgtccaagaccagaggcaggcacttcctgtgtctagtttctttcacttagcatagtgtttttaaggttcatccatgttgtagcatatattagcattttattcctttttgtggttgaatatttcattttatggatatgccacattttattcattcattagttaatggacatttgaattgttttcactttttggctattatgaataatgctgctatgaacaattgcatacaagtttttgtgtaggtacccgttttcatttttcttgggtgtatacctagaagtggaattaattgctcagtcatgtagtaaccctgactctgtatttagtcttttgaagaactaccaggctgtttcccaaagcagctgcatcattttgccactggcagtggtgtatgtgtgagagttctgatttctttacatcctctccaacacttgttattttctccttttgatgataacctgtcttttgattatagtatgaatccaccagctgttttgttctttttcctgatcgttttggctattctaggtccctcgaatttccaaatgaattttagagactgtaaatctttgccaaaaaaaaaaaaaaaaaaaaaaagccagctgggattttgatagggattatgttgaatctgttgaggaaaattgccatcttaacaatacagtcttcaagtccgtgaacaagggatgctttccatttactttggtctattttatttttttcaacaatgttctgtagttttcagagtctaagtattgtaccttgttaaatttattcctaaatattttattctttttgataccattgtaaaaggaattgttgtctcaaatccattttcagaatggtaaactcttaatatacttattttctttcatttaaacctaaccactagtgtaagaggtaagtattatttatttttgcagatgagaaaataagcttaaagaatttaaatgattttgcccacaagacaaccaagtcagtatctctgagaagacatctggataaatgaagaggcagttcacacacctgactacaaaacttgcatgcttttgttttccatttgaaacccaggatgcagtgccaggaaggtgggaggggaaagtcgaggtatctcaagtgaatgagccgtgccaaaaagacggttggatcctgcatagtggtgagaggggtgatccattctgcctcatcatttaagctgtctggaggtatttggaggcagtttgatttagagattaaagactctggtcctggatttgagctcgggcttcactatttaacttgctatatgactcagcaagttactttgattctcta

SEQ ID NO: 6832 - DNA, 2300 bp, Homo sapien
atctgagagctggtctgacacagctagacttcagggttgttagaagctggcctgatgctcacagcttggcccagttattcttctgtgggacataatctcacagaacaccaacatgagacaaggtcagtcagactataaaaaagggacacaacaacaaggccatttcaaaattgtgtctaagcagagacaagagagcaaggtcactgtgcaagccatgaaataccaaacgtccttctctgctattatgagtgactgctgcttctttactaggtatagctttatcctcactctagtctgtccatcttatagacaatacttattcagatacctagtcacagaaatgtccctgctttctgacagcacccaatccagggtgaagcctggctttcttgagccctcccgcaaatcgcccaaattctataataggttctctcaccctcaccaagctgtcccaatggtcctccacaacacctgcttcctcactgcaagaactattaataatgaactcaacttgtttaagcacaggtgtgttcctgatggtctctggctggagggcagggacaggccagagtccttacaattgtctacaaagtcccacagtggttcttggacttcatcacccatcagaatcatctggaagaattgttaaaagagaattgctggtccccaaccccagagcctgtgattgaataaagctggggttgaggtcttagcatctgcatttctaacaactcccagcacctgaggctgcagatctggggctcacactagaagactcacttctctaaaccacttgttcccccgtcttatttccctgacttagcctccttgtctccactcccatcttacttcattctactccagccacactggcctccttgctgtgttgagcctccctgggcacatgccttaggctactgctttgtctgcactcggattcgtaacacttactccctcacccctcagtgagacctaccccaatctccctacccttttcagaatttattctccacaacacgtaatcaaccttctgacatgctgaataatttacttattacatttattgttttgctctctctctgctaataaaggaatgacacccttaagacatcagctatctgagtgtattttgttcacggctgtatcctgagacctggaaaaatagctggcaagtagtagatgctcaacaaaaactttctgaatgaatgttccttccagcttttcagcttcttctcctgagtcagggcagcactcccttcagatcttcctataaatacaatctctctcctatatgtccaacctcttgacaattacaatatccagctcctgggacttttcgcttcagtggctcaggccagggatacagggcaggtaagtcagccatgggccaaggagatcaaacaacgccagaaaattactgtatcctgcatctcttcttcacccaccttctccagatgaccttatccacccatctccctcctctcttgttttccaactatttgttcacctggatttctcctctctttgaccaccaacattgttatggcacccctaaaaaaaataaaaaaagcaaccactctccccgtgctaagccaccctcatgctggggctgtcctatctccgcttctccggcaaggctcctcctgactttgtttttcctttctactccctgaaattttgcttctgaagttccattaccgcctccttcctaaattcaactgcaattttcggtcttgctctttcctgatacactgtggaatttaatacatctgtctggaaactcttcaagaacaccgcgtgttgcctctacctcctttagtgcttctactccggtccttcctagtcttctcttcataagtgtccccaagtttccttccaggaagatgggtcgtggtttccttgacgccaatgcgtttctggccgtgccctcgtcacttgcccactccggggtcacgaaggagaggccccggattccgggcgcagccgcggctgagcccggggcgttgaatgcgggtggaatttccagtctgggaaggggcggggccttggaccgccgggaagtttggtcctcagcggcttccgtcctgcagcaagtccggaagaaggtccgggggctggagtcctgggacctagctcgggaccggcctggagatggagttcgactgcgagggcctgagacggctgcttggcaaggtgcgggcagtccgctgggccagtttgggtcctcagggtcttgcggggggtgcctctgcctttggccaggttgcctccgttttgcgtttcccggcttgtagtggggc

SEQ ID NO: 6833 - DNA, 2300 bp, Homo sapien
aaaacatgaaataattgttttcagatcttgtacaagagacagcacaaaactgtgtactttgagagaaaggaaaccagtgacggtgagtcctacaattgctccagccaggaggcagttttcagactgtggcacagaaaggagttacccaactgagcatttcactgagttgaagagaaagatagcaaaatacagcagaggccagaatttgcaggatggagtgctaagaagagggatctccatggagaaagctctgtagatttccacaggggcccttataagtctttggctgagttctgtctgcacatatatgggataaaactcgatgaggcctggaaaagatccacccaaaagcagtcggccaaacacttcttggagttcctgaagggcagggaattgtggaacattccacagatttggaagatctatgccgggcacagtggctcacacctgtaatcccagcactttgggagactgaggcgggcggatcacctgaggtcaggagttcgagaccagactaaccaacgtggagaaaccctgtctctactaaaaatacaaaattagccgggcgtggtggtgcatgcctgtaatcccagctactcaggaggctgaggcaggagaatcacttgaacccaggaggcggaggttgcagtgagccaagatcacgcccttgcactccagcttgggcaacaagagcaaagctctgtctccaaaaaaaaaaaaaaaaaaaaaaaaaagctctaatacaatcagcctcagagaaggtgctcagagaaaatggtcattaactcagcagtgcggatattaaccctagagtaaaggctgctcctggcctatcataaagcttcaaacaagcctcagaagaatcaaactgatcgcaagtaacttaagtgcaccttagaataaaatttaacactgttgaatacaacaaaatccagcactcggcaataaaatttaccatgttcaacatctaatcaaaagttgtaagacatttaaagaagcaggaaatatcacaacaggccaggcgcggtggctcatgcctgtaatcccaggactttgagaggctgaggcgggtggatcacctgaggtcaggagttcgagaccagcctggccaacatggtgaaacaccatctctactaaaaatacaaaaattagccaggcgtggtggcgggtgcctctaatcccagctacttgggaggctgaggcaggagaatcacttgagcccaggaggcggaggttgcagtgagctgagattgcaccactgcactccagcctgggcgacagagcaagactctgtctcaaaaaaaaaaaaattgtagagatgaaaaatacattaaatgtccatgatgttgtagcagaaaagcaaaaaatatctttggtgacctctgagagggtgtctaatagtggggtggggctagaagtcagaatgtaatgcatggaagaggcgtagattggaaaaagctttgagtatggaccacttgtttaggaagtttggtcataaaaggaaattaagaaataagacagggaaggagccacagtatcatctggaagtttttttgaggaaaggacaggggtacctgtggcttcatgatggccaagaaaagagaatcaatggagaggaactaatccaaggtgatgaagatgtggatataccatcatgctgaggatccccttgacatggggagaggaggttttgcagggacagaaatagagacatctgtctcatttacctgtaattcagtttgtttcgttcacatgtcgtacacctagcagcaaaacacctttccaaatctctgcctctagtgtaaagagcccagctgcccaagaggcagctgagtcctaagtcttggccctgatctggagcatcagctatgtgctgtagtgcgggtcacttaggctgtagtctaagccttagttttctgattagtgaaatggggttaacaataatgcctacttcatagtgttgctgtttgctgctcagctgctggtctgggggcagtgtctctggtgtgttttgagtctgggccatatggtcaatgatgtcacaatgccctactagatttcagcttctccactagggagttgtggatcctttggagccaaagactcgaacagacatgcgagacctctaccaactgaaggtttcgtgagcgcactcctttgccaagatcttggtgaatagtctttcactgtgcaattttatcttagaaattgttttacgtttgatcatgattgtgcttggctggatgttttttgttggacttgtgtgttacatgggcacgtttccagagttgatggtaagt

SEQ ID NO: 6834 - DNA, 2300 bp, Homo sapien
ttttaaatttcctagttcaactagaccattgattcttaacaagggcaattttgccctccaggggacttttggcaatcgtcacaactggggatgggggatgccactggcatctactgaatagaggacagggatgctgctgacaaacaatgcatgggatagccccctgacagcaaagaattatctggtccgaaatgtcattgagctaaggttgagaaactaagctagggagacaagccatgcatattaaaaacaaccgtagaagaacaaaagaagtgtctgtaatcaaaaactagaaagtagttgttcccagatcctgggctgttgatcaatgcctgtcttttgcaaagtttttatcagtcttttggtaaaatgacaaaaataaggataatgtagtgagtttttcctacagtcaaacttactcagtttgaacaatataattctgagagtcattcatacttcattcaactttaaatttttaaatgaaattgtgattatagtagatggtagttgctacttttggtgtcttggcaaaagttaatgattctgtggaggtttgtaaattgtatttatttttagaaattttactgattttggccgggcgcggtggcgccgcctgtaatcccagcactttgggaggccaaggcagacagatcacctgaggtcgggagttcgagaccagcctgaccaacgtggagaaaccccatctctactaaaaatacaaaattagccaggcgttgtggcacatgcctataatcccagctactcgggaggctgaggcaggagaattgcttgaacctgggaggcagaggttgcagtgagccgagatcgcaccattgcactccagcctaggcaacaagtgaaactctgtctcaaaaaaaaaaaaaagaaagaaagaaattttactgatcttataaattcagaaatattggcactactaagctagaaaatgtaacaagatatttctggtaagccctgggataaaacaggagttctgttccttctggataccatgacacagcaaggatgatggctctgcgctaagggccagcctgcttgctctggttttaaaggataccatcttaatgatgactcacaatttcagtttacatagaactgcattggaactattttaaattgtaatattcttataaataatggtttcttaggtcctcaaaggcttcccttccctactggttacaaaaggcagcgagaatatgaagaggaagatgacgatgatgatgaatacgactctgaaatggaagattttattgaagatgaaggagagcctcaggaagaaatatccaagcacattagagaaatctttggttatgaccgaaaaaagtaagactaaagaagattcagataactatgacatcctttttttattttgaataattcatgtcatggggtaataaactaatagtggaggcactgaatacaattcttaattaggaacccttgggtgattgttatttaaataaacgtactcttttagcactaaatattttatatttaattcaaaatagtttctgtagttatttgcatgaggaacaaaaaataacccttttaaattgttattcttataagatatatatttagtgagatggaagcagcttagtgtagtagaagtagattggctcttgaaaaaacaagctgtatgttcttggtcagtctgttaactcaactgcttcagtttcctctggtctaaagtctttccccacctcatgatggtcatgaagctcaaattagattattatatataaaataattttcatatatactgtgctttcaaattttaatataaattatcaagtaaatgtaggtgagtgagttgaggaagcactgtaggattggtaccttcatgaacattagcttcagaatagttgccctctgagggtaataagggcttatctaaaacttgtctttacttcagaaacctatccatcctccactcccctcactcgctgccaagcaaggaataattctaaatgtgtgcttgatttagttttaaaggagatattgattttttaaatgagaggacgtagttcctttagaaaattgaagttttctctttttatcattttgatttccttttatcagatacaaagatgaaagtgattatgccttacgttacatggaaagtagttggaaagagcagcagaaggaagaagcaaagaggtaagcataaaatttagcatacttgtgcaaaaatgtcctaaaaattcctttctgcttattgctacaattgcaccattgggaactggggctttgggccagagaattctggattccaatcctgt

SEQ ID NO: 6835 - DNA, 2300 bp, Homo sapien
ggatgttacatggaaactttgtaccccaaaatcaccatacgtaataaatagtctgaaattttatagctaagctttattatgggttatatgatctctcaattattcagaataggtttcacagttaacatttatacctcttattacctggcacagtgccttatacctaataatgtattttaaaagttgaattgcttctaacttttactgtttttgtttttagaaaaggtatagtttggcagtggggcctccaaaaaaagacccaaaagttaaaggtgtccaatcagcagctgtacaagcttttcttaaaaggaaagaagaggagctgagacgaaaaggtatgtatctatagccttattctcaattttaaagtattccatcttcaccatctagcttgtactaaaccagtggctgtctataaaaacataacaggccaacagatttgggagggtgtgtgtgtgtgtgtgtgtgtgtgtgtgtccaggttaactgactgtattcatggctttacatatgttacctcgatcatttgtataaacgttttctttttttctccccttgaagtaacagctttttgggggttagtagccatgtcttctaattggccatagtaagtccccagtaagaactccattctttctttaatcttggttctgaaagtgtttctacccattttgtattttaatttttattaacagaatgctatctaaaaggctaaaatagagataagttttaaagtctttatttcgaatagttctacttcatgcaaatacaaagaaactgattcaatatgtttaagtattcattgaatcataattaataacaactactaagtggatactaatgttctcttaacttggtaatgtatttggtttgaagtattttgtatatttaaagctgaaaaccaagtctcccacttgcttagtcatatagaaaaacccatatgtctcccactcattatgtaaagatgactcaattgatacttgttcacatgacttcctcatttgattcctagatgtcttcaaactgtaacctgaacgttgtgttttcacttgagcatactgcaatcttgagatctcgaagtaataacatattcttgttttgtcccttttagccttagaggagaaaaggagaaaagaggaactagtgaaaaagcgaattgagctcaaacatgacaagaaagcaagagctatggccaagaggacaaaggataatttccatggttacaatgggattcctattgaggaaaagtcaaagaagaggcaggcaacagaaagccataccagccaaggaaccgaccgagagtatgaaatggaagaagagaatgaattcctcgagtacaatcacgcagagtcagagcaggagtatgaggaagagcaagaacctcccaaagttgaaagcaaaccaaaggtcccccttaaaagtgccccaccacccatgaacttcactgatttactcaggctggctgagaaaaagcagtttgaaccagtggaaatcaaggtagtgaagaaatcagaagagcgacctatgaccgcagaagaacttagggagcgagaattccttgaacgaaagcataggagaaaaaaacttgagacagatggaaaactacctccaactgtgtccaaaaaggcaccctctcagaaagaaagtgtgggcacaaaacttagcaaaggttctggagacaggcatccttcttccaaaggaatgccccttcctcatgctgagaagaaatcaagacccagcatggccaatgagaaacacctcgctttgtcttcatccaaatccatgccaggagagaggatcaaggcaggatctggcaatagctcccaaccctcacttcgtgagggccacgacaaacctgtttttaatggagctggaaagcctcattccagcacctcttcaccaagtgtcccaaagacttctgctagcaggactcagaaatctgctgttgagcacaaagccaaaaaatctctgtcccatcctagccattccaggcctgggcccatggtcaccccacacaataaggctaagagtccaggtgtcaggcagccaggcagcagctctagctcagcccctgggcagcccagcacaggggttgctcgacccacagttagttctggccctgtgcctaggcgccagaatggcagctccagctcaggacctgagcgatcaatcagtgggtccaagaagccaaccaatgactcaaatccctctaggcggacagtcagtggtacatgtggccctggacaacctgcaagcagctcaggtggccctgggcgacccatcagtggttcagttagttc

SEQ ID NO: 6836 - DNA, 2300 bp, Homo sapien
aaatatagagtctggtttgggtaatctaagggttctagtcttggctctccgattgactaatggtacagtataagtctaatttcatctcttcaagcttcagcttttcatctataaaacagtaacaggaaatgccttatacaacactcatgatcaagtcagataatccatgtcaagcactaagcatatagtaatggctcaatgtatgctaagtactacaatattgaatcttgggagctttccacttatcgattcattaatttggtcaaaaaatctttgttgcaacttttatgtgcattagcagggaactgtgctggtgatggaaatagtgatgggtaaaataggcttatgcccattttcatagctctgtctatcacagatatagccaatagtttaaaaaaaaaaaagaacaaatatgtaattacaaactgtaaaatgttgcatgaagggaaatactggggggctgtaagaatttataaaaggggccctgagatagctcaggaagagcttccttgagaaatgatggttggcattaattgaaaacaccatatgccagtgtattcgtttgctagggctgccaataacaaagtaccacagactaggtggcctaaacaacagacatttattgtcttaacaattctggtggctagaattccatgatcaaggtgtggttaccttgaggtctctctccttggtttgtacatggctgtcttctccctgtgttttcacaaaacgatgtaggaaagaaaggctaatctataatcagaggaacaaacgcagctgcctgttatgtagctcaggttccataataacattcttttaaggcgcaaaataacttaaagttccaacagctttgattttgaattacgttcgcagcattaaaccatcaaagagtaagagccagcagctttgtctagcatgttttttgttttttttttttgagacggagtctcgctctgtcgcccaggctggagtgcagtggcgggatctcggctcactgcaagctccgcctcccgggttcacgccattctcctgcctcagcctcccaagtagctgggactacaggcgcccgccactacgcccggctaattttttgtatttttagtagagacggggtttcaccgttttagccgggatggtctcgatctcctgacctcgtgatccgcccgcctcggcctcccaaagtgctgggattacaggcgtgagccaccgcgctcggcctgtctagcatgttttaacagcttgacatatttacatactgtatcattctcacccgtcttaagtgtacgatttttagtacatgtatagtgcaaccatccccacaatccagtttggaggcatttccatcccaccgaaaagatcccgagtacctgtttgctatcaatcccctggcgggttcccacttgcagacccaggtttgcctaattattttcagtgtttttgctaagtcgaaatgaccttacagatccaagataactctccaaaagaagtcaggactaggatcccaatgaatatgaatatgaagcatatgttcatcagtacaccaaagttatgtcaaggctgggtctgtatgtgaaattccttaatccattgcctgagcaaaaacacaggttggctgctccacataaaacttactttctaaacggggcaaaagaagtaagcgcgtgcccccatccccggcacgcgtgcatctgagtaggaggtaagcgcacggcatgtggccgaatttgatgagtaatgggcatccaagacaggaccacggcgctgctgtgtgcgcctgcgcagcttcgcgagcgcctagacacaagtagcccaaaccccggctcgagatccgtctgttcagctgttgtggcgccgccgttttggatctaagcgcctacccgtgacacccagagaacccaggcctggcaagtaaaccctctaccccctcactttctctacccagcgctcacaaggagcaacaagatgacaagaccgcgcgcccgggccaccagggaagccgctctctcgcttagccacacccccttggttgctaaaatgcctagtccctgcccctcgggtcgacgccagcagccacgtatcacgtttgtacgtgtctcggcctaaaagcggaagttacgcagggactcgcgagcgctgtggcggccctgaaaggatataggccgtggagggaagggggcgggcagacggcataggaaggcgccggaagtggtcccgcagaggcggggtgggagtggggctcccgaggcagtgcagttggctgtagctgggcgcctcggttaggtgcgctgtcagtcctttcc

SEQ ID NO: 6837 - DNA, 2300 bp, Homo sapien
aattagtaggtcttgggtggggcaacggcatctatgtttttaaaagctttccaagtaattttgataggtaccacttgttgagaaccacggatatagtccaccttctcatttttatagagaggcaaactaaggtctagagaaatgaaaaatgccctgacttggcaaatttctgtttgagaactatccctcaggtgatgttagagggtttggctggaaaactggaatatttgcaccttctactagcccatttcctccattttattcatgagaaatctgaagctccaaagatggaatgatgtgctcaattatacaccacagtagtgagtcatggagaaggaagcactaggactaagaatggcatttctaactctcaagccagtgttctctctaggcagcacacttggtagaaatgtgtgtgtgtgtgtgtgtgagtgacaaagccctggggcagcagttatagtccttcattctggtaaggtgctctccccaaagcccctaactggaaagaaagaggagtaggcagaggtcattgacccttagaactctatgctggaggggactggaggggatggggggaagatctgggtgactcctgtcccaagccttgactctcactcttgttgtactggactctgaatctctggttgccaattctgtcaccagaagaggactatcacccctctgaatgggtgttgggactttagggaaaactgggtaggatccagaaggaaaaggaagagacccattgtgggaggggcttacaggagacttcagcctgtcggtctctgcccaaacagcacaaggctcaggaccagcacaagggcctgtgtcaccatgccaggatgtttgaaactcctttttggctgctaattagggctggtcacccctttcccatcaattcccaaagcctgacacacagctactgcccttctacagtagcttacagactacttgcccatcctttgagatacagctgaaatctccatctccaggattgctagacttaaatttcctaaaaccagcagcccttcctcttccccaacctacacatgtcagagttgggtggaaccttagaactcacccgctcatcttctaagtgaggaaatcaagaccagagaggggaagtgattcacccaatctaacagcatggaagtggcaaaactgggactagatttcagtccatctggccacctacctctccatgtaattccaatgattctgaacatgcaccgctctgaatgagcttgtgttcctttagtctacgtaaaatcaacattaaatccacttgggacgtatttttggcaaagttagctcacgcttctttgggtctgcctgtctgtcattcttggggtgctcttgtatgtgtggcagtggtctctgagttgtaagaggtgtgtgcctacggccaattatctgtgtttgtttctatattagggtcatgggtctacgagctgctgtagagtccctgtatatgtctcttttcttacatggagcatatatgtcaatttgtggttgttggttttggatctgtgtacttgttgagtgcttaagggtaattatgattctgtatgtgtgatgtatatgctacgattatgggtccatggctgctgcatacctatatacgtgccgcttttcaagtcgaaggttgtgtgtttgctgatgatttggatgtgtgtttgtacacagtgaaggttgtgagtccaattgcaatcgtatcggcgtggactgcatgtttaaaggcttaagggaatctgtctttgccttttgctcccgggttatgagaaaatgtatgtggctgtgcgtccaggacagcaatgtgtttgtctctcagccaagctcagtcctcacccaggcaccggggtcacggtcacgttcacgttccgtggacgccttggcacggcctcccaagggggcggggcctggggggtatccgccttctgacccctgggagatgcctcctttctccgagcagcagccgggggcctggccggcgccgccagccgggccccgcccccccggctcccgcccgctcattggccctggcagcggtgacgtcacggggctagctgacagaaccccggcgccgggcgctcgggaggtattgtccgtccctccgggctttgtagaatcgtcgccggcttacctggccgtgggcgcgtcctggccgctgcagcccggagcagggtgccagccgccgccgccgccgccatggtgtccccggtcactgtggtgagtgagcgagcgagcgagccagtgcccggcgcggctggagcccaccggcctggccaccggacttcggc

SEQ ID NO: 6838 - DNA, 2300 bp, Homo sapien
gccgccgccgccgccatggtgtccccggtcactgtggtgagtgagcgagcgagcgagccagtgcccggcgcggctggagcccaccggcctggccaccggacttcggcaggccgagctgccgaaggggccgaggcggggcgggggtcccgtggcggccggagtcccgcggcgggaggcgggcgctgtcaccgccccccgctcctcagactcgcggcgcccctcctcgcgcgcccccagcccgcccgcggagggaggaaaacactggccacgtgactcggaagcgtgactttgttgatctccatgtatttggcgcgggtcggcggggtcgcggcccgggagagggaggggaccgctgccggccgcagagttccgcgtaggcggaccacagggaggcgtgggggcgggggatgctgggaggataacagggacctcctgggaatgccgtcccaagtttgtttcctaaccttcctcattttgtaaacaagttggcggacgcccctgagtctaagaagcgctgataacgcgctgggggaaaagggggcattctctatgacatcccctgcttttcagactttctcaacttgaaccttttgtttcgtctccccatcctccttattctactactgggttccctataactgtcagggtctctccagctactgccagtatctccttctagaaaatatggggctgggagaggccatggagcggaggttaatgctcccaggggctggcaggtggttgctgggcattgtgggcctgggcatcccctccagccgcctcctctgaccatgcccctaccctgaccagccttaatttccatgggaagtggaagtcatctcttctcactgctcttacctctggcagaacaaggaaaggcttggaccctggaaccacccatccgcctcttcccaatcctcctcatcacagtctgatcagtccttaggtacctggtcgtctggactctgagtgtttcccaagtcctgtgctgggcagctcacctagccagagacacaatcgctttgggcagagtgtgggtgtacagggaactccagctgctccatatcaccctcaatggatctgttagcagcccaaggaaaggagtttcaaggatcacagattcagaacatcgctgcagccccctcccccagcttggactctgcctgcagtggccttgggtacaacctttctttagctgccctctgctaatccggctgagaccaagtcagctgctctaacttccccctctcagttccccatctcccagcctgtctgctggctccagatcagaagctgggaatagaacctctcccccctttcctgcctctttctggtgtggcttgagttgctcttgttctctgggaaatgaggctgactgacacacaccctcccttcccccaatccttgaaatctttggtgtttgaaggacaattttcttgctcccaactcatgggtccatttatctagccagcatccctagcatagccctccttgcccttgatgccaccttcaggctggggcaggtggagtggaggctgaggaacagactggttgaggaggagagaggctgtggtggctgaggtgattgccattgcctgctttcccacattcctggcacacacctggtgttgccagggccctaaggctgcaccctggccccatgctgaggatcacgagttggccagtcagggtgtctctgtggtttcccactgacttcactccattccagagtgaacagctgggggctgttgctggcagagaggaggggctaaaggggccctgaggagggagaaggagggggcaggaagggagaagcacactaggctgcagaagggtgcccctcctaatatactgagcctcagggcagtaatgggtttggccacaacctgctggctggtagaggcaggccaggctgggtttctctgtgtcagtcttctcaggttgggggtggaagtgaggtgggggtatggatgggagtgtctctggggtggatgcctaggctgagggtgctggctttcaacccccaagttctgagtgctgcccttgtcctgtgtcctccaggtgaagagtgaaggacccaaactggtgccgttcttcaaggccacctgcgtgtattttgtgctctggctgccctcatctagcccatcgtgggtcagcaccctcatcaagtgcctgcctatcttctgcctctggctcttccttctggcccatggcctgggattcctgctggcccaccccagcgccacccgcatctttgtggggcttgtcttctctgctgtaggtgacgccttcctcatctg

SEQ ID NO: 6839 - DNA, 2300 bp, Homo sapien
ggagggtgcccagcctgtgaggcactggcaaggtagggggcagatggggcatggagaacccagaggatctaggccctgttggggaggggaggggagctcaaggtttgggtggggactcagcccagatctacgtgagacatttttctgtgtcactgtgggaaagccttcccagaagtctcactgcgtgttgctctgcgtgtgttcccatgtccatgcgtgtgttgagagcccatcaggagggcatgcatgactctttggcaacatgtattatcttggagccacgtgtttttattgctgactttaaatatttatcccacggcagacagagacatttggtgtctttttataattcgctcgtggtcattgaatagagcaataaacggagcattttgagcaaaactaacctcctgggtctgtgtgatttgcctctcccctccactgccttccttcctgtacttgggtctttgtgcccctccccagcatgagcacagtgagcttggcccttctgctcactggagccccttgtggagactgggagtatggagcgagtccaaatttgtaaagccaaactgggaacattctgcaggattctcacacagcctcagccctggccctgacacatgctctgggccatggggagcctcaaggacaggtgtggaaggcttccagggaaggcacagtggctggcaggtcaccatttccaacagatgtgccagagaagccaaggctagggtaaggagacattcaggtcacacccaggcccctccctgttggccaaactcttatcccatgttagctccacagatcccaacagcagctgcagcccagtaatttcccttgtaaggcctgggctcagagtagctcctcccaaggggcccagggaatctgcatgtgggctgagatcctgagccatcctggacactcctgctctattcttgtcccctgcccccctgggatggagcaaaagtagccatgatgccactgctggcaggtgggggtcaccccagggcagaaggaggggtccagggcaagggtgctgaccaacaagtccttacaaggtgccagaaccttgggtgggatccagggtccaggcatgcggggtgtgctacagatgatgagaaaacaacagggtgggctggacacggtggctcacgcctgtaatcccagcacattgggaggccgaggggtggcagatcatgaggtcaggagttcgagaccagcctgaccaacatggtgaaaccccatctctactaaaaatacaaaaattagccgggcgtagcggtgcacgcctgtaatcccagatactcaggaggctgaggcaggagaatcgcttgaacctgggaggcagaggttgcagtgagccaagatcgtgccactgcatccagtctgggtgacagagactccatctcaaaaaaaagaaaagaaaagaaaacaacaggtggctgaagcagcccagatggaagtccttgagaagaggtggccatactctccagtcaccctcaagcagagacctccccacaacccccggaggatgggccctcctactcttctacccagattagggagattgggctgttgaagtgggaagaggaaggagacctaacatttccctgttcttccccagggtggccttgtaaagatactcaggctgtgtatgaaccacacataggagtgcaacatgaatgggaacccctggatttgtgtagcaacgcagcagatcccagaggccctccccagttcaccgtgtcccagtccctggaaaatacagacctgttgctttgctccctgagccctgctggactatgcatgcacctgtacctgagtgtgtgcctgtgcacacacactaccctgagcccctcagctcagagaggtcctacccagcagcagtgagagccaaaacctgtaccacaagggaacaaaaaaagtacccctggactgccaccctcagcctccttcccgcctggccttcagtgtttcccccagcctggatccagctttgcttcccgcctcccttctccaccgccctccccctccccccacaaccaagcagtgtgccatctagctgagacagctgcagagcctgactaaggaatcgcccccagggggccagacatttaaggaacagatgacactggtagcctcactgttggggcaaaggaagaaggagacgggccaccctacagtccaggcactagctgagcctccaaagccgtggacacagcattcgagtgttgggagggactggtcagtgctgaaggtaaggctcccctcctccctcaggaaggggacaaagctgacca

SEQ ID NO: 6840 - DNA, 2300 bp, Homo sapien
gtttgcagctgagatttgaacccaacactctgtagcagcaaccctgttgcccttgtgtatctctccgctggccctgaagagagtgtagagagttgtgggaagggaacaggattgtatggcagcctgatctgggcccctgcagaaatgcaccgagtattggccggaggagcaggtggcgtacgacggtgttgagatcactgtgcagaaagtcattcacacggaggattaccggctgcgactcatctccctcaaggtgaggcctggggcagggctgggtgaagctgaggatgagtgtaggggcttaactgggggctccacagagaacaggtcccccaagtccactgtaactgacataaaagccagtgtcactcccagattttctgataattacggatgagtgagaggtgaatggacttgggagccagaggtagaatcaaaccccttgcatttcccagtcctcagttacatttcatgctgttgggctctctctgtctctctactctgtcattcataatgcattctagctatgcttcaaatgtacccaaggccaggactgtctggatgaggggacttcagcagcctccagcactgtgcttataattgagggttcatcatgactttgagatcctccttagaaacatctcttcacctgggatcctgggcttctggcctgtagtgcccaatctgtccacaagagggcaggcactctttgctgctttggggttgtacagggggctgtggttacagaaaacagcaagaaaaaggaagacacacaaaatatgagcaatacaaaacagcccagaagagtgggagaaggtatcctcccaccctgaagttgtgcttcctccaggatcagcataatagaggagactgttcctttgaaatcgggattagtggattctgtttgtgagaaataagacccatgtttagggaaggctgtaattgtaataaccccaaaggctggaagaggtgaaccaggcatcaggaagctgatgccctatccaggagcagccaaggaagttcattgatgctgacagccacaggggttactgagcacaagaccggagacttggccctctgagctgttccctctcccactgaataggggccaggtagggtgtcgagagcatctcagcccccaagagcagtgcccccacaagcagctctaagatccaggtcttgttggagggcatgaagggccaggaagtgaaaagcagaagtagtggtcactgtcacagccaggtaactcaggacttgagaaaatggcttcctgagtagaaattccccagaaagacaggctgagatgaggcagggctgctcaccttctcaatgccatggagatgatgagggaagaaccagggcatcttggagtttgagggaatttacttttgtccataagacattacgagcacctggcctgagcttggttctgggttggatactgtgaacacagagcttcccaaagcttggactctttccttgagaagcattgtataagatggtaagtactgagctagagataggtatatagaatataggatatgtatatcatatgatgttatattggatgaatataggatatgtatatcatatatgtatgtatatatgatatacatatcctattatacctatatataaaatatatataatataaatatataatatataaaatatatataaaatataaatatatatataggtgtgtgtgtatatatatatgtataaaagaaggacactctgccagctgatgtgctcagggagggcttcctgtacatggtggtgctgaatggggtcttgaaggataagtaagagttgaccaggggcaaacaagtcaggagaacattcccagtgagaaaataataaaagtaaggacatggaagatggaacacttgtgtgcatgtatgtgtgcacatgtgtttgtgtgtgctgctgagattttacctacaaaccttttggagtgtgggagcattgagtacaagtacgcaggggcaggaggtgtgtctggaagggcaggccctgtagcagttgtcttcctagccaggtgaaggactgaggagagtgggtcttattctgagagcagtgagagacattgaaggatgttgtggtctgctcaggctgctataacaaaataccatagaccaggtagcttgtaagcaacaggtttatttttcacagttctggagactgggaagtccaagatcaaggcaccgtgaccctggtgaggacccacttccagggtcatgtcctcacgtggcagaaggagtgaaagctccttttgtaagagcactgatcccattcgt

SEQ ID NO: 6841 - DNA, 2300 bp, Homo sapien
cactccctaccctgcactgtgcacgtgaatctgacagaacagcattgcctgcagacaaggagaagggagacggcccatacagagcttcctgcccctctctgctgcaggtcccccaaaagcccccctcccgtttaccctgtctcctctccatccctgccaccctctacaccccctcttcacaagaactgccccaaatcacctgccaaaaccttagacattggggttgggctaaagaggcgaagcttgtgccctttacctccccaatttctcctactgggtttaggatccttctttttatcctttaacttgtggaacttgtaataatgtcaggaataacagcaactgatacttcgtgttggtcctagttactggcataaggactctagttgttaaagttaactcctttacaagataagcaaggtcattgtggaatgaccatccccagattacagataaggcacagggagataaagtaaattgtccatgttgacactgctagtaagtcagaatcaggatttgaacctagcctctctggctcagcggtgtagactcttaatgactcccctatactgcctgtgagagcctcctaatgtgcacactggaagtgcctttagtccagtcctccctattataggaaagaaactgaggcctggacaagtgagctgatgacaaaactaaaccagaacccaggaatctggggccccagccagcttcccccttaccccatacaacctcagtcttggcctctgcaggctgacagaatagtcaatgcagagaggctgtagctggaacaaaacaaaatctactccaggaagaagagcagagtgggggctgggcacagtggctcatgcctataaccccagcacattgagaggccgaggtaggaggatcacttgagccaggaattggagaccagcctagtcaacatagcaagacctcatctctaccaaaataaacaaataaaaataaaaaaataaatttagccaggtgcagtggctcatggcttagtcctgcttactcagggggttgaagcaggaggatcacttgggcccaggagtttgaggcggcagcgagccataatcgtgccactgcactccagctgagtgacagagacccttttactatgggatttgacatgtgaataaattgaaaggaaaaaaaacctttttgcatatgtggacatgaggctgagaccccacagtcttaatccagatagaggagactatcgttttcatgttaatagcctccgtcaactttctactcccgaatcttaacagccctttatatttataaagcactttacagtttacacagaactttcacatctcttttctcattcatcttcccaacagcccaagcaagtaggcatctttgcctccatttgacagataggaaaactaaggcttagaaaggccatgtgttttacaagcctacacagcaagtcaatgacagtgtgtactcaagctagctgtctcttgctgaacaagatctgtacaggaatttccctaggtaattccattgttgacttagctgtctcctctccagaagctaagatgcagtgagtatagggcaacttaagaggcacaggctaaggatagagacagaggtagagacccggggacccccctctctctccaccctcctcctcatcctgagtcctcacctacaaaatgaaccatgaatgggtcaatgttttgctgctgggcaagggaaggaagaactgctaatgtcgcagaagaagtgtgggtatgctggaataggccagagcaagtgggtcctgcaccagagggcccagtttccagccttacttgtctcccaccaccccagaccctcacagcagagtgtgtctgacctcaccagaccctgacgaccctctgagttcctacatcaatgccaactacatccgggtacgtattcccaccctgacggcctcttgctcaaggggaggcctgagtcgatgggatccatcctccagccttgtccctacaccagtctggctcctgccagctcctgtgaagagcctgagtgtggggatggggtcctgggagcactgcctctgaccctgacagcctggacttggctggccgcagggctatggtggggaggagaaggtgtacatcgccactcagggacccatcgtcagcacggtcgccgacttctggcgcatggtgtggcaggagcacacgcccatcattgtcatgatcaccaacatcgaggagatgaacgaggtagggacccccgtccccattctaagtgtctgctacattgcgccctacactaagtatcttgttctcaaatta

SEQ ID NO: 6842 - DNA, 2300 bp, Homo sapien
gaaaaagagaaggaaccactatcacagcagacagaaagtaatgagagctgagtgtccctggaaatgtggggagaaggaggtggtatttaagctggaccttaaaaattagtcaagacatgggagggatggcattccagactgaacagggacaacgtgaacaaaggcctagagacaggaaaacacagggtttgtttaaaaaacagattagtgaggtgaggctgaaggattgggatgggaggggattgagatgggagctggcaatgaagccagtgagcctcaggggcagggaacagaaataaaagtcatagctgcatggagaaaatgaggagggagggccagcaactttaaacaggatagttacagcaattatcttagaagcgacacattgagcctgggcagggtggctcacgcctgtaatcccagcactttgggaggccaagacgggcggatcatgaggtcaggagttcgagaccagcccggccaacatggcgaaaccccgtctcaactaaaaatacaaaaattagctgggcatggtggcgggcgcctgtagtcccagctactcggaaggctgagacaggagaatcgcttgaacccaggaggcaggggttgcagtgagctgagatggagccactgcactccagcctggacgacagagcaagactccgtctcgggggcgggggggtggggggagtgacactttgaagaggtaaaggagtagccgtgtgactatcagagggaagagtttccaggcagacagaccagcagtgcaaaggtcctgaggccacagggctgccacgccgatgatgcattaaaaaggccaatgtgactggagcgtgggagaagggggagggtggtagaaagagaggttaaagagctaaaaaggagccagttcctgaagggctttgcaggtcatgaggggcctttaactttcccttggatgaaatggagtgctagtgtaggatttccagtaaaggaacgacgtgctctgacttaaattttaaaggatcgccttgactgctgtgtagagaatcagctgcagggggccaagggtggaagctgggagaccagtaaagagactataatggaaatcccggggggcgggggtggatggtggctggaaccagggtggtagctacgtggtggctcgcctctgattccccgtgtaaaaaatggagtttaggatccctgccctgtgtgcagcccacagcctcaagcccccatggggatggaatgccggaaacctctggccagcgcactagcagcctggagaatacggaagattgtggcaggattgtggggcacatgggcagctccctgctcgtccgggcccctggtgcccacgagaaaaccaaaacaggtgcgtgccccgcgccgcacgtcaggagggcaagactcagtggagggaggggctgtccactcgctctagctccccagaggctgaacagggagaactgggaaaaaggacgcctcctcagcgtcctagaacgagtcctcggcacctggtattgcatgcgccctagtatggggccgctccacttgcgcaggtgttggcaacatgcggggagcgccacggcatgcccccaatgagccgactccctcccccaactctgccccctttgtctcgctggcccctactccttctgtctgcctgtctgtcccgtcccaggttcagcgcgcacggccctgccggggtccctctggcagttgccgtagccgcgcggcccgacccggggctcccaagaggagaaaaaatcatgaatgaaatggatgcgctgctcccactcctccgccctccttgtccaagcaaccttggcatgggggcgacgactgcggagactccgcgcagagttgctcgggagagggaggcacctgagatgaggtcaggggttaagggtctgtgatccggcccccttcgtgccccgggagcaggccgctctcccggtcccccgccccgccagccctgcgcaattcccggcgagcggcggaagcccgcccgggggcggggcggagccggggctggggggtgccaaacccacccggcggctgcgccagcgactctgcagctgaagcgcatttggtgaggcggtcgggcgagggagcgcgcacggagcgcgggacggagcgccaggcggacggaccgaaggacggaggcaccgaaggacggacgcccccgcacacgcagacgcacagagctcggcgcggcccccgtcgcatacacactggcacagacacaagcagggacacacgcagacacacgcacactcgcgcgcgcatcctcccgccagcctgcccgcctgctc

SEQ ID NO: 6843 - DNA, 2300 bp, Homo sapien
tcatacttcttccttcccatagccctttaagatgggcattattatccacatgtgacagctggggctgggctttgaacccagagcacacagctaggaatgtttgcgaggcaccgctagctttccgaagttgcctttacaagggcagccattagcctccaccacaggacatcagaggcagcactgacaggaacctgtgaggccccagtgcacctggagtaccatgactctgtgacccctgagctggggacatcaagaatctgggccaggctgatgccactgaagctctctaagccctactttctccccttccttccatcagcccaaagggctttcatgttaaggcatccctgcttctgtgaccacgtgctatggaactggctagatctgaatttgaaacacacacctcttaagtgaccttaagtaactcacttattccttctgcttcctctactgaaattggggatgtcaaaaggcctacctcccacagatgtcatgaagattcaatagagcagtgccttgagaaaacacaaaacactacctggcacatactaaagtgcccatgtatagtagctgctattgttcaactgatgcagcctggagaaatcagcctcatgccgaaccatggtgatgatgctctcggggggtagggagcaggtcctggcgtacaggctgaaatgtctactcacacttccacacaacccaagcagtatggcctttttacccaatatataatcctcccccaccccacaggaaactccttgagggcaacacagggacctaattgggtctaggtctctaggtcttttcctaggggaaaaaaaaaaaaaaaagaccaattgaggcccagcctagggcctcccaatcagtgccgttgatccacaaacatgtgctgatgggcccttctgtgctgggaactggggaaagggaagacaccccgccctactttccaggagttcatagtgcacctggggaaaaagagaaggaaccactatcacagcagacagaaagtaatgagagctgagtgtccctggaaatgtggggagaaggaggtggtatttaagctggaccttaaaaattagtcaagacatgggagggatggcattccagactgaacagggacaacgtgaacaaaggcctagagacaggaaaacacagggtttgtttaaaaaacagattagtgaggtgaggctgaaggattgggatgggaggggattgagatgggagctggcaatgaagccagtgagcctcaggggcagggaacagaaataaaagtcatagctgcatggagaaaatgaggagggagggccagcaactttaaacaggatagttacagcaattatcttagaagcgacacattgagcctgggcagggtggctcacgcctgtaatcccagcactttgggaggccaagacgggcggatcatgaggtcaggagttcgagaccagcccggccaacatggcgaaaccccgtctcaactaaaaatacaaaaattagctgggcatggtggcgggcgcctgtagtcccagctactcggaaggctgagacaggagaatcgcttgaacccaggaggcaggggttgcagtgagctgagatggagccactgcactccagcctggacgacagagcaagactccgtctcgggggcgggggggtggggggagtgacactttgaagaggtaaaggagtagccgtgtgactatcagagggaagagtttccaggcagacagaccagcagtgcaaaggtcctgaggccacagggctgccacgccgatgatgcattaaaaaggccaatgtgactggagcgtgggagaagggggagggtggtagaaagagaggttaaagagctaaaaaggagccagttcctgaagggctttgcaggtcatgaggggcctttaactttcccttggatgaaatggagtgctagtgtaggatttccagtaaaggaacgacgtgctctgacttaaattttaaaggatcgccttgactgctgtgtagagaatcagctgcagggggccaagggtggaagctgggagaccagtaaagagactataatggaaatcccggggggcgggggtggatggtggctggaaccagggtggtagctacgtggtggctcgcctctgattccccgtgtaaaaaatggagtttaggatccctgccctgtgtgcagcccacagcctcaagcccccatggggatggaatgccggaaacctctggccagcgcactagcagcctggagaatacggaagattgtggcaggattgtggggcacatgggcagctccctgctcgtccgggccc

SEQ ID NO: 6844 - DNA, 2300 bp, Homo sapien
agcatcaaggaaaactggaatgtaggtccttgtgccgcttttaaactctcagaatttttatgtgaccaaacaggaaaatgaacactggggcaacctagcagtctcttctgcctctgtctctgattctgtactcacatcaagatttttcaggaactcctctgaaataatgaatcatgcggcagagaaccatacagaagtctcatgcagggctccagggaccaggggctggcattgggcctgctcttcgtgttgtgaactcatgaaaacactttaattctctaggcctcggcttcatcttatgttatattaagataataccatagatgatctttaaagaacacatgctaaatgttggtgataccacagtggaaaagacaggcatgactagccgttatgaagcttcaggtttcatgaggaagacaaacacaccattaccctaaatatagagggacaatgtgtttagtgccctgcctgtggataacagaggttctccttttcctcccatttcctttttgggccaagcaaggctgtggcagcttgtctctctaagagagctcatgatggatgcactcactcctgatgctcctctgtaatcccagaggagggtgagtcttctttccacctggaggcctcctgtccctgtgcattctcgggattccagagcaaaggtggcctctgataggcaaaaaggaactcctgaatttgttactaaatggctttcactcttctctattttgttccctatttgacctgcttctctttctctatctgaagttggtttaggttagtttttttttttttcaacccacaattttgccgccaacttggatttaatcttgagaatccctcctctcctttacccgctctaacatgtataatcgacacagagtcgtgctgggtgtaaagggctgctcaaagactggatcatgagtcagccctgctgggctcaaattcatactatataagtcccagaatgaataattcactctttttgtgttccaatgcattatctgacatatgggaataatactcattcttaactcctaggctcttcagataattaaaacagacaatacctaataaactctccatcagctgctcttattctcccagattagacccagtcctcattctccagttgaaatctacatgaatatctctctttatactccaagccctacatatctcctatttcgcctcatggactcctcacatacaaatgtttgcatcaacaaagaaacgaaccaaagatctcctgaaagaaagaatgaaataggtttatattgtgtatactcagcagaatactcagtagtgccccacagatattcccacactttaattacctgctgcagtggcactcaggctcaccctcacttactctttcctctgttctattgctgagcaattcagctcagacccacaccctacccaaaacactgtgtacaaaatgcttctaggggttcggcaaagccacactgagtccttattttaaaggcacatcagtggtcaatttcaggttttgggcactcatcaatcattcttctcaacacagatagagctgtccacaaatagaattctgatgaatgaaattttctgtacctaattaaacatgggtgttctaataacttacattgtgctttcatttttgttttccatttcacccaaatctaccattaccattaggcttctcatgcatgcattcattcattgaatgaatgtatatgaaaagcacagtgtgctgcttatggaataggcactaggagtataaaatgtaaaatgtggtcctgtctgcaatgactgacatgctgagttatttctcacccaccaggcccagccattttcacacttatcctagcgaaggtcacattttcctctggttcataatgcatggtctcctttcctgtccatggatgatcagtcctggtcatgagggtgtcacaaccacctctttgcatacctgaattcctccccctgagagaaaatttcaggcccaggatagagtaatcatcgggtccacagccctggctagatgagtgggggtgttttgatcctaatgttattcccatgttagcacagaacttgtgtggcagtagagagaggtcaggcttcagagtcagcaagaactggatttcaaactggatttgaggacccccaccttttgataggtgacttattctctgtgagtctctgatctgccctctttaaatgaggaagtaaatcccacatggcagggtggtggggagaatcagagatcatacagctggtgatcacaactggtttctgtttccagggtcaccaga

SEQ ID NO: 6845 - DNA, 2300 bp, Homo sapien
aaaaaataaaatagaacttctagaaattagtaatataaaaattggatttaaacttcagtggatagattaaacagatgattagacacaatggaaagaatctagttaactggaagatacatctgaagaaattacccagaaagcagcctcagagacagagacgagacataaggaaaaggttaaagaaataaggatgatagaagaagagggctaacatatgttgaattagacttccagaaagagataatactaaaagtgataatgagagctaataattttatagtacttactatgtgctcctattgtaaatcatttatatacattaaattattaatcttcacagcaaacctatagattaataatgttatccccattttactgatgaggaaacaaacataacagagttacaaaatctggctaaggtcccataggagaaatgccaagtagcctggtcttgtgttcttcaccgttatgttaatatttaaagagattatagcattaaattgtttaaaaatgttaaatgatgataattttaaaatctaggaaactccacaaatcccaaacatgatttgaaaaagagtcaccagatacaatttggtgagaatgtatcatagcagagaaaaataaaagctcttagaggaaaaaaaggcagatcaccacaagcaaatggcaacctgactgatggccgcaacagtaaccctggcagtcagaacatggatcttcaatgtgctggaagaaagaaactatcaccctacaatgccatgcctggaaaaaccatctttagaagacgagggtgaaacaatgacattttcagatagataaaaggaggcatttaccatgcagagactctcacagaaggaactcctgaagaatgtgttttgagaaatggaagatatgagatgtaaaatgggaggatgagcaaaagcattggtgattatgtggataaatctgaataaacactgactatttaaaacaataataagtgtttcatttgttggagggaaacagaatcaaaatcaaataatagagcacagtaggttagacagtaacagaagttaaagctttctaaggtcctgctgctgctcatgaggaaagcagatttctggggacaaatgcatggtttacccactgcaccaaagtataatacaagaaaatgctgagtctcagaactcgcctcaatcaacacatgttccctgtctgaggtcacccagctgctctggaatgcaaaggggcatgatcttgtatggtgttcatcattgtgtcttcattgcctggaacggtacctgacatatcataggcaaacaataaacagtgttgaatgaatgaataaatgagtgaataatttcttctgattgtcttaaatgcttcataattgttacttataactcaatttggctgcagcataggcacatgaaaggaagtcataggagataaggctgaaaatattggttggctctagatgatctaaaaataatctagctaataaatatcatgatgtagagggagaaacgtgacagatggtgcatgtgatgtgctaagtcccctatattttataaggagactcaatatatctagttgttaacatcgataaatcaaaaatagaaatgttgttttattacgcaaagcttttttaaaaaaaagaatggaaactgtatgcagtggttgcttttggggaatgagacttcgagagactttgcatttcattttatacaccttagtgtcatttgaaataaacctgattttgaaaggtcaagtaagccagggccttgaatgccaagcagaagagggcagactattctttagctatgaaagctcacgtcgcttgattggtctgcttcctggatgctcattgtgggcaatgaaagacttcaggacggtgattccttgcagggagtggggccggagagggtaggggagaaaccaagataagtgattggagtcagggcaaatgctgagaaacatctcatgtggtttcctgtgtcatactcttattttccagcaccctctgtacaggaaatcacagggttgttgagcatcttgataagcttcactcagtcatcaggtttcactccagatcctgcaggcatctccccatcctcagctgtttgccagtcccaggaaagcacttctcaactcaccaactccagtagaaagaagggtgttaaggtaagagtttgttcaagaaccatcttctttcaaaggcagttttggtttttaccttagtccacatcctgatgaattcattaggaaaagaagacaggaagctcctttgaggaagctttggatgctggcagcttagatgc

SEQ ID NO: 6846 - DNA, 2300 bp, Homo sapien
gaagcataaaacatgagcagagggaaaccaggagcctgactaaggagtggggtgttcggatttagttgctccaaaatcttccaatgtgttaggatattagtgcagacgcattgaaacagattttaagcctccctcaagttcagcatcttctaaatcagactttgaaaatgaaagaaacaaactacttcagccaaaatgcttgcagtaagaaacctgggtttgaatactctctttactacttacttgctgagtgacttggggtttatggaatcagcctgaacctcagtttctcctcccaggagatgaggaaaataccacccatctcgtggatgagacataatgtatgaaaacactagcacagtgccaacacatagtaagtgatgaataaataaaccttttttttttttttttttttttgaaacagagtctcgctctgtcacccaggctggagtgtagtggcgcgatctcggctcactgcaagctccgcctcccgggttcacgccattctcctgtctcagcctccctagtagctgggactacaggcgcccacaaccacgcccggctattttttttttttttttgtatttttagtagaaacggggtttcaccgtgttagccaggatggtctcgatctcctgacctcgtgatccacctgcctcggcctcccaaagtgctgggattacaggtgtgagccaccacgcccggccagaaagctcttattagttaagcaaaatgaccaaacccaaacattccttcctgtatgaatcctcacccaatgcctcatcctaacttgtcggaattaattgctttttcctctggctttcggtgggagttgcttgcacttctacttgtcactccatttgtccgtgtattaatgacacgcctgtacatccatccatccatcattcattaaaattgtgctgagcattttccatgtcccagtgctgtgttagacactgggagttcagagatggatctgacatggttcctatcctcaaagggtttgggcttttgggggcaagccagggctgacgtgcccaaaggacacagacactaaagcaatagtaatacatctacgattttattgtatcatagcaatattttccatggaaaacccagcactttgttggatttctatttatttattttatgatttagtattatttttataaaataaggaagtcataatgttttcagatcgttttcaaattagcttctaaaggtcttaatctggttccacttggcaacagacacatctaaggaaccattacaaagaactgtgttaagtgctgggctagaaaaaccccagtgtttactcggggctgaagtaggagagccccactgccccactggaacgccccaagggaaggagccatccctaatgcttgcttcatagaccttcaagctggacagggcttaaatgccagctcctccagtgccctccacaaagggtcgtggaggtcaggggggaggtgcacttcaagtgggaggctctcgcccactccccctctagcctgcgccgtagaactcattttttgtttcatttgaggaaacagaacctcaggcggtagaggtgacttgcccaagatcacgcaaatggagtggaaaacatttaaatagctaacatctattgattcctttttatatgtaacgcacgggctgaggggctttacatgcgttttctcatttaatcctcctgataattccatgaagtaggtacccttattttcctcatttcacagatgagaaaattgaggtaaaataagagactttcacaaggtcatttagcaattaagtagccaagtccagatttgctctcaatagatggtggttgacgttggaataacagtctgatcctgaccctggacgcacatctggggcccgtggcacctggggcagggaggggcgctcggtcctgggctggggctgggggagcgaccggcacgggcgggccgggggtggagcctctggcgagctgttcacagcgggcttcccaggaggtgagaaagtcccgcccctagccgatggagggctgggattggttctccgggaccgattgacggctcagggcacgagcggggaccgcagcggcggaggtgagggcgccagcaggaagtgggagaagaggcgacccaaggcgggctggcgggctggcggcagtcgctacttgcctagtagcctcagccgctgtgggctcctggggagatggaggggccggggctgggctcgcaggtgagtgcggccgggcggtggctgtcctgggggccgggagagcggctgcagctgtggaggaaaggatg

SEQ ID NO: 6847 - DNA, 2300 bp, Homo sapien
tcaaatgcccatcaatgacagactggataaagaaaatgtggcacatattcaccatggaatgctatgcagccataaaaaagaatgagttcatttcttttgtagggacatggatgaagctggaaaccatcattctcagcaaagtaacacaggaacagaaaaccaaacactgcatgttctcactcataagtgggagttgaacagtgagaatatatggacacagggaggggaacattacacactgcggtctgtcagggggtggggggcaaggggagggatagcattaggaggaatacgtaatgtagatgacaggttgatgggtgcagcaaaccaccatggcacatgtatacctatgtaacaaacctgcacgttctgcacatatatcccagaacttaaagcataataaaaaaaaattaaaaagaaaaaaatattatctgggtatggtggcatgcgccggtagtctcagctacttaggaggctgaggcaggaggattgcctgagccctggaattcgaggctgcagtgagctatgatcacactgctgcactccagcgtgggcaacagaggaagaccccctcccaataaataaatacatcttttaaaaaaagtggtaggagccaagatggccgaataggaacagctctggtctacagctcccagcgcgagcgacgcagaagacgggtgatttctgcatctccatctgaggtaccgggttcatctcactagggagtgccagacagtgggcacaggtcagtgggtgcacgcacggtgtgcgagccgaagcagggcgaggcgttgcctcacttgggaagcacaaggggtcagggagttccctttcctagtcaaagaaagggatgacagatggcacctggaaaatcgggtcactcccacccgaatactgcgcttttccgacgggcttaaaaaacggcgcaccaggagattatatcccgcacctggctcggaggggcctacgcccatggagtctcgctggattgctagcacagcagtctgagatcaaactgcaaggcggcagcgaggctggggaggggcgcccgccattgcccaggcttgctgaggtaaacaaagcagccgggaagctcgaactgggtggagcccaccacagctcaaggaggcctgcctgcctctgtaggctccacctctgggggcagggcacagacaaacaaaaagacagcagtaacctctgcagagttaaatgtccctgtctgacagctttgaagagagcagtggttctcccagcatgcagctggagatctgagaacgggcagactgcctcctcaagtgggtccctgacctctgacccttgagcagcctaactgggaggcaccccccagcaggggtagactgacacctcacatggccgggtactccaacagacctgcagctgagggtcctgtctgttagaaggaaaactaacaaacagaaaggacatccacaccaaaaacccatctgtacatcaccatcatcaaagaccaaaagtagataaaaccacaaagatggggaaaaaacagagcagaaaaactggaaactctgaaaagcagagcgcctctcctcctccaaaggaacgcagttcctcaccagcaacggaacaaagctggacagagaatgactttgacgagctgagagaagaaggcttcagacgatcaaattactctgagctacgggaggaaattcaaaccaaaggcaaagaagttgaaaactttgaaaaaagtttagaagaatgtatgactagaataaccaatacagaggagtgcttaaaggagctgatggagctgaaaaccaaggctcgagaactacatgaagaatgcagaagcctcaggagccgatgcgatcaactggaagaaagggtatcagtgatggaagatgaagtgaatgaaatgaagcgagaagggaagtttagagaaaaaagaataaaaagaaacgagcaaagcctccaagaaatatgggactatgtgaaaagaccaaatctacgtctgattggtgtacctgaaagtgacggggagaatggaaccaagttggaaaacactctgcaggctattatccaggagaacttccccaatgtagcaaggccaacattcagattcaggaaatacagagaatgccacaaagatactcctcgagaagagcaactccaagacacataattgtcagattcaccaaagttgaaatgaaggaaaaaatgttaagggcagccagagagaaaggtcgggttacccacaaagggaagcccatcagactaacagcagatctctcggcagaaactctacaagccagaagatagtgggg

SEQ ID NO: 6848 - DNA, 2300 bp, Homo sapien
gggtagattgggaagttatcaagtttatcacttgcactcaagaatgattatccaggccgggtgcagtggctcatgcctgtaatcccagcactttgggaggcccaggcaggcagatcatgaggtcaggagatcgagaccatcctggctaacacaatgaaaccccatctctactaaaaatacaaaaaattaggtgggcatggtggcatgcgcctgtagtccccgctgaggcaggagaaccgcttgaacctgggaggcagatgttgcagtgagctgagatcgtgccactgcactccagcctgggtcacagagcgagactccatctcaaaaacaaaaaacaaaaaacaaaaaaaaacgagaatgattatccatatagttctaagtttgcagcatctaagttaaaaacgtttggacaatcaccattgtttcaaaaatcttactgttaggaaatattttttatatgtaaccaaaatccctcatgtcttaggaatatcagtctctccctgactttttgctttttctgcatgctacagaatggctttttgtcttctatttgcagacaaggacatttacctatggtcatattattactccagcatggtgcagaccccactcttattgatggagagggattcagcagcatccacctggcagtattgtttcaacacatgcctattatagcatatctcatctcaaagggacaggtatgttctgaaatgtgtcttatactccagtttttatcatctgaagaggttggggaaattattagtagtagtctcttctcatttttaaagtggaggttaatggatatccagatattcagatattagcctcagtacgtttagccattgaatactgcttttcagcttcattggagggaaaaggacaggtcatttagctcagtaacgtataatagatgtttctgaaacttgtaagctggtaatagtttttcttatgaacccagtaatttgcagagtttctcaaaaacatgacttcaaagcctgtatttttcttctagttgaatataaaaatggtagtcaaatcactaaattaacccatcatttgctttcattatttgagcccaaatgggaggccaatttgaatatatgtttcttattgttctctaaagtaattccatgaaaattgacttgccttgagaggcacaggttaaattataggttattgtaagtttcactgtcaattatacttgcctggaatatgttttctggtagcaaagtagtttatgtattagcagacttgcctgtaaaaggcatgaaaacgtgtttgcacaaatgctgttggaatgattgtgctccctttaaataagcactttctctcagacttagctgattgaagtagaattataacctcctaggtttcattgttggaaaaatataaatatatgaggaagagtcctgtctgcttctctttgggtgccttcccaagtcctgttcctccaaggcccataagaatcttcagaagctgaaactgtttttctttggcttagctgaaaccattgctgtataccttaaacctagacctgtcttattaaaaggactgtatcctcatggaaatatgatttcctttttttttctgtgttccagaaaatagaaaggaaattttcatattttactatttaaaacttaatatgataagtccagaaagacaagttgcctcagaagatagggagttcactatttactggaagtgtttgagtaggtactgaatgactttgtataagaaatgataatgcgaattaatgtgtcaactaaggtctcaactaggtgacttttaaggtctctaccatctcttgtatttgatggtagctatcaacattttactctttcccttaactgtgttcacatcatataacactttacattatatattcagattttctttttaaaaatattctgtggaaatccatggatttttaccctatggaagtgagcaaaacattctttttatcaaatgatatttgagccctttatgtagaaataatggtagtattgaatgtattaaagagatatttctattaagagaacaaatagacttttgagtgtatttacagttatgctaattgtcttctttttgaatagagtgtgaatatgacagatgtaaatgggcagacacctctcatgttatcagctcacaaagtaattgggtgagtttaatttagtccactcaatctcattcttggttccaactatttcttttctgtgtatgtaattttaagtatctgtgtctatgtgagatgatagtacattgaagaaaataagatttttcacacagagactgtgata

SEQ ID NO: 6849 - DNA, 2300 bp, Homo sapien
ggggataagcttatgtaggttagatctaaaagacagctactgtgcagatctaaaggatctaatgaatgaaaatcagttggttgaagttatagaaaggcaaattttagctccatattgagagacttaactgcaaaagtgttaccagcttactgggaaggctgtgtgtctataaactatagtccacatctgagtgccttagataaagcattcttaaattcagggaagggagagtatgattctctccagggaatcagaaaagattgcaaggaaggagggaaaatataagttaggttttaatcgcagttaagacttggataccctaaaagtgtggttttagaagaaaatgagaggaagtaggggacattttaggtcagtgaaccacacaggcaagagcaccaaagcaaggagtgtcttcagcttctatgtgaggtgatagggtgtaattcactttacttggagagtggtgatccaatgattcccctgccatttgttttgtaagttaatcaaaataggagccgaaaattcagtcagctcagcgtgcaggatcattgcattatgaaactgaacgtatttttgagaactgaacgtatatattttgagtcgtgtgtcgatcaggatttcataaagaaattatgatgtgattctttcacaaaggatcttgccctatgtacctttaatagtgtctttctgcaaacatgtatctaatatatagggaaatacttttatttggaatctctgaatcaagagggttgtttctttgaatgattttgttaaaatgatcaaagaatatttttctagatgctcacaggagagccacaattacaccattagagataaatttatttggtcttgagtgtcacttttcaggatgttcctcataagttgcaactattcctatcaagtatttaatatgagcttcaactaataaggaaacattaattattagccaagtgggaacaaattccagtaggattagaacataggatgggaagagatttaggggcagggacatgtgtgcataaggaaggtgagattcttaggtgccaatgatgaaatttgcttacatcataattacattatttttaaaggaagtttggtgtattccttaacttggctttaacatttagcaggagcccctttctatttcagtttcattttcagcatagtagcctttctatactttttctataagacttgggcaactgatccaggcttcactaaggcttctgaagaagaaaagaaagtggtgagatttcttcgttactgatatttttaataggagggtttgtaaactttagaaagtttatatgcacatatgcagatgtgttgctttttgttacggctgcatgacatgtggggtgatatagcaaaaattagatttccactcttacagttttttcatttatgtatatgaaagttttaacacatatttttattttctgttgaaataataccccaccaagactttttcagatgtgattccttttaggaatatgatctcctacttccttgtaataacattttcataatggtcatttagcttacatttccccactaaataaatggagagtaactagtcagtgaccagggagagtccttctgcttattggctgaggagatgcccctcctcctcctcaaatgtgaagttgtcagatgacatggcatgttttccgttgctcatgaatgtttagaagttggagaatgttgtctttgttacctaaagccagtgttcctgaaagacccagcccttggtgcttgtaactttcagttttgatgtatactggtgggtttttcttttttaatgtgtgtgtatatttgcatatttatttttctctagcagatcataactgggagatgattgccattcacagagatgaggtgataggtgggagtggtggggtggtataatttttatgcatcctaatttattagctgttggttgaaaatgcaaccttgaagagtcacatcatttcaagcacagaatgatttggtggcaagtattccaaattgcttttctaactacttcagtttggagcgagaactgtgagaatggtgtataaccatgcataatacattttccaataaaatgtggtaataggtcaaacttcatgtctttcagaatatcatcacccttgcagaaactggctctctggacttcagaacattttgtacatcatgtcttgtgagttttttcatataatttttttccgtagtgaaagcaaagtcttggtaacgttgctgatgtaagcatttgtcagatcttcatggtatatttatacacctttgtttttacccatttc

SEQ ID NO: 6850 - DNA, 2300 bp, Homo sapien
agaaagattttggctatgtcttaagaattgcattattatgtttttcagaccttggaaataggttacctaactggaaaaacctatagtgcttgtagtttatttatttggactttaactgtttattatttatttattttaaggcttttggagaattgggctctaaacacagaggcttcacttccatccaccctcttgttacattcttggtcaaatcttagactttaccagtagggtactagtttgttgcttgagctgaagtctggagtaattccgaaagacattaagaatgttattttccccttagcatcataagcccaatacacatacacatttttcctctctttctctcttctgtgtctctctgtctctttagtttaaaatttttgttagttttcgaaaggcaattctttgtacacttgccccccaggctcccagtttccctccctagaaatatcaagtattacaaattttgttttgtttggggtttcatttttagagattattaactagtatctatgtgtaatgagttattttttgccctgccataggcatggagggcttcagttaccttgtcagaccctttcctacctgacgccttgggtgtctttgatcactaggcaatgcttttgtagctaaatgtgactgtcaccattttaaataggtctaatagtcagaaggttgtaatctctgagctcagttcttgtcaaaaaggccaccagtaaccctgagcattctatttttattttaattaattttaattttatttgtttgttttttgcttatttattaatgtattttttgagacagggtctcactctgtcgcccagactggaatgcagcggcaccatcatggctcactgcagccgtagctttttgtgctcaagtgatcctcctgccttggcctcccaaatagctgagactacaggtgcctgtcaccgtgcccagttaatttttaaattttttgtagagatggcatcttcaccatgttgcccaggctggtttcaagctccaggcctcaagtgattctcctgcctcagcttcccaaagtgaagtactgcacctggccagcattcgatttttaaaacttcttagattatgtcttatggtgtaaaaagtaaaagagtttttgacagcgcttggttctattgagaaagctgcctttcaaggcctgacagtaaagcatattcctggaaaacctttgtaagttggcacatagaccaacttgtctcttggactggatcctatgggagaggagccagagtttacaccactcctgcctctcttctcttctctctcttcactaaaaatagtcacctttgtttggcatctatgaccagcataagactgtattgataaggacagaagtgattttccatcacattcagtctttccaagttagtttttttattacacatgttgattcttcccttctctttgtcttttttctctggctctgaaccaattttcatattacattttgtttcataagaacagtcccaccttatattcacttacaactgtataaactagctgagtgtattttgttacctttattccatttatattccagcaatatttctttacactgaatgagggccttgtgtcatttattattatttcacagacaaaacatgaacttgtgctccatttctctaatgaggcctcactgtcatcccacctcccttgtttaccattaatgctgtattactagagccctgctctatactctccttctcatgtgatccaatagctgctacttctgtacagcctccatccatttcatcttttgtaaggtctgtttacaaggtggatagtaagtgactccaaaagtgtcagcatcctacaagttacagaaagaaagattgtagattaccatcaggaagaactctgtaactgtcagagccatctaaagatgaaaacgtttgacctggaatgatgtgagttccctaccattagccactggccagctgataagaatgtattagcacaaattaaagtgttacattgcataagataatgtacgtgacaacttgctgttgtatctttgatattaaatctgaaaaccagtattctgaaaacttcagtgtgagatcatgctgtattatcaaaagaattcccagaagggagcagtagaaatccataaactgaaagaaaatagatattctttcccaatcaacagctgttttctccacctactgttggaaattatattcttttttgtgatatcaggtgcatgggatgcatctttctttgccatcctaatgagatgctctagagagagtgtaatttgccttaacttg

SEQ ID NO: 6851 - DNA, 2300 bp, Homo sapien
ctgagtagctaggactgactacaggagcatgccaccacaccagggtaattttttggggggtggggtagagacaggggcctcactatgttgcccaggctggtctcaaactcctgggctagtgatcctcctgccttggcctcccaaagtcctgggattgtaagtgtgagccaccatgcccagcccaatgtttccttttttaaagttcttttctaaaattttactgaattagcagaagatcctacttctgtgagaggaaggataggatgttcctggctaacctcacagtttttctaagcaggaaaagctctttgggggaatatttagatagaaacattccttctagacctagtatcaggttcagtggtctgtttgctatttactttctgtttcttagcaaaaaactgcctttgttatgagactgtgagatacaatccggaccagttgacccaggagggcttagtgttaatcgccaactattataagaaggtgactggcttcccagaagggaaagtgaaggtcacaagcagccactcagaatggctggatagtgctccatgtcatgacacactaggcttcttagaaaccagaggatcccagtgaaaatgcagctcccctgggcagctgaatttcagaagtttcatttaacatcaatggcttattttagttctgctttgaggaaactgaaaacttggattcatactaaaaacatatgcagatgaggacaattattattactattttatttatttatttattttttgagacggagtctcgctctgttgcccaggctggagtgcagtggtacaatcttggttccctgcaacctccgcctcctgggttcaagtgattctctttcctcagcctctcaagcagctgggattacaggtgcccaccaccacacctggctaatttttgtttaggccgggcacggtggctcaagcctgtaattccagcactttggaaggccaaggcgggcagatcacttgaggtcaggagtttgagaccagcctggccaacatggtgaaaccccgtctctactaaaaatacagaggacaattatttttttaaataattttctttggttaatatctcttaaatgtaatcctgtggtgaggagacaatgacagtcctggggctgtggctattagcagctccttgtagctgaatgtctccaatggtgcaggaggacatgtcagcaccatggtctggctcctgttgagcactgtgaactctgtgggaccttcctgcacatcatgtcgtttgattttctaaaggacactaaagcagcagggaaaagaataactgtataggtgggaaaacaggtataaagttaagctatgtagttcatcctgatatgaacagcaggtagagggtagccctgaaagcagaaagcaagtttccaactactgacctagtgtagtgccaatatatcttatagcctaggtgattatattcttaaaaaggaatgtatggatatgaggaataacttggaataggagattttatatattattaatatgcttttctatcagcaagataagctaagattttgctacccaaaatgtagtccactgccagcagcatcaatattgcctggagtctgttagaaatgcagaatttcctgcctctccccagatctaccaaaccagaatctgcatttagcaaggtctaaggtgatttgagaagctcttagctagacaagaagaaaataccatcttcacagatgattcccagttctgatgggataattttttaaacttgagatgaaaaaaaaaacgatctttgtatatacttttatgtacatgaaattagcctattcattccttccgggagccctgtgagatacataggaatagatgttactgaaatttaacaggagaagaaactgagttcccaagtggtaaagtgattacccaaagccatctaagtgtctgagcttatttaatgactagcacacagtagctgtttgctaaatgaatgaataaatgaaacactaaaaaaaaattgggctggatcctggtcttcagaccactgcactcttagagattggttcactcctggggccacttcaatgtagggtatttgctttatgtccccttagacttgaccttgaccagatagtcttcaagatgccaaactggggcggaggcgcaaaatgtggagcctgtgaaaagaccgtctaccatgcagaagaaatccagtgcaatggaaggagtttccacaagacgtgtttccactgcagtgagttgggtggacaccctgggggcccctcagcatccggacagcatcacaaaattcac

SEQ ID NO: 6852 - DNA, 2300 bp, Homo sapien
atcaccacactgacttccacaatggttgaactagtttacagtcccaccaacagtgtaaaagtgttcctatttctccacatcctctccagcaactgtttcctgactttttaatgatcgccattctaactggtgtgagatggtatctcatcgtggttttgatttgcatttctcagacctaaaaccataaaaaccctagaagaaaacctaggcaataccattcaggacataggcatgggcaaggacttcatgtctaaaacaccaaaagcaatggcaacaaaaccaaaattgacaaatgggatctaattaaactaaagagcttctgcacagcaaaagaaactaccatcagagtgaacaggcaacctacaaaaatgggagaaaatttttgcaatctactcatctgacaaagggctaatatccagaatctacaatgaactcaaacaaatttacaagaaaaaaaaacagacaaccccatcaacaagtgggcgaaggataggaacagacacttctcaaaagaagacatttatgcagccaaaagacacatgaaaaaatgctcatcatcactggaagctcctcttttatctgctttatatactgattttcctcttatctacagaaaaaagtattctgatgcaaacacacacacaaaaaaaattttaaagctactattggttgaccagtttcagtgactcaagcctgtaatctcagcacattgagaggccgaggtgggcagatcacttgaccccaaagtttgagaccagcctaggcaaaatggtgaaaccacatccctacaaaaaaattagccaggcgtgctggtgtgcgcctatagtcccagctactcaggaggctgagacaggaggattgcttgagcccaaaagatcgaggctgcagtgagctgtgatcatgccactgtactccagcttaggcaacagaacgggaccatttctctaaacaaacaaacaaacaaacaaacaaaagccactatcctagacgatttctaaagtcctttctagctttaactttctaaaatcctcgtgattgcctcgtctttatgatgaagatgccatttagtgaaaacacagaccacggatatctcataggaggctatgccacggccgtctttgtgaaattactgcaaccttcttgacagtgaaatattctatccttcaacaattgctttgtgggcaggtaaccaaagggctaatatctgatgtgaaggctggatcatgaacctcccggttgggttctacatgtaccttacctcaacatccgggtcaacatgagtggaaggggcttggtgcctcagtttcctcatctataacatgaagaattggtcttcacatctctgaacctcttgtcagcttttcaatgccataatttatatcagtccctggtgcttgatcaaatttaaacggtgtgaattccagacaaagaaaaattagacctccaaagaaaatatgggtctacagagacatatcaagatgttataaatataatgtgatgatgataaatatgcactgctgtatcaaattcttaaatagaaaaggataataacaaagtaaatcaaaactttttagagaaaacttcgtttcctaggatagatggagtgacaggtcccaagtgatgtgccaaccttttttctcccaagcttctttgaagagattatctaagtatcgtttcagacacccatcacccttatttttagctctgagttctcttcacgagtgtggtgacctgtggctctaagttccagaggctcccagatatggcacatgactcatttgcaggtaccctgcaatgatttccaggaaggtcagtggggtgggggcctggagaaatgatttttgatgttaaacccttagctcttgttcctgttccaaccacttgatcagaaatgacacacttcataaattgatcccttggtgccataagcaattggcagtgcaaatagaacccaagtgattcggttctccaagaggctcacagctggctggggggttgggggagacaaaactcagggctttggtcacagtctattttcagcccctgatagcagttgtgttactcacgtctcattcaccctctcccttggcctccctcctgcccttcccccagcaggccaaggctggtgacagccttcatatatttaaagaggacaagagcccctcagactcagttgagctgaacggagtccacacaggcaggtgagtggagcaaggcagacatttgagctggaggtgggttggttctgtggctggtttggactataaagggtcccatagagtaagagcacattttacgtc

SEQ ID NO: 6853 - DNA, 2300 bp, Homo sapien
aatatcatatgtgattaggaaattgcaaattagaacaacaatgagataccactacacgtgtattagaatggccaaaattcaaaacactgacaacaccaaacgctggtgaggatgcggtgcaacgagggctttcatttattgctgatggaaatgcaaaatggcacaggcacattggaagacagtttggcagtttcttagaaaactaaatttacttttatcatataatccagcaatcaaactatttggtatttacccaaatgagtaatgtctgcacaagaactatgtcctcatgaaaatctgcacacaaatgtttatggcagctttattcataattgccaaaacttggaagcaaccaagatggtcatcagtagttgaatacatagataaactgtggcacatccaggcaggggaatattattcaatgctaaaaagaaatgcactctcaagccatgaaaagacatggaagaaccttaaatgcacattggtaagtgaaagaagccaatatgagacggctacaatcctatgtggtttcaactatatgatagtctggaaaaggcaaaactatggagactgtaaaaagatcagtagttgacagaggctagtggagaagagatgaatagatggagcataaaggatttttaaggcagtgaaattattctgtatgatgatataatagtggatacgtgtcattatacatttgtccaagcccacagaatgaacaaccataggagtgaactctgatgtcaactatagactttgggagataatgatgtaacattgtaggctcattgattgcaacaaatgtaccactccagtgcagagtgttgatagtgggcggggcaatgcatgtgtgggagcaggggatgtatggaaactctgtattttccactcagttttgctgtgaacctaaaattgctctaaaatataaagactatatttttgtttttgttttgttttgttttttgagatggactttcactcttttcaccgaggctggagtgcaatggcatgatctctgctcactgcagcctccgcctcctgggttcaagcgattctcctgcgtcagcctcctgagtagctaggattacaggcatgcgccaccatgcccggctaattttgtatttttagtagagaccgggtttctccatgttggtcaggctggtctcaaactccccacctcaggtgatccacccgcctcggcctcccaaagtgctgggattacctgcgtgagacaccgcgcccgaccaagactatctttaagaaattggaatacagcacttcagaatattgggggactctcagatctcttcttatataaagggtaattgtcacagcatccattaaggggcagtgacaccgctgcacacaccaccttgaagattctgattctctttggacctgtgtcactttgtagaatgcattccccgaggacccgagttttaaactcgacatgcaagcatcttctccttttactccaaaccatctttcgggggggcttgacgacttaactccttcgtctttgtgaacacaaaagatcaactaatctttctgaggtctttttcttctcctgatgtgaggccttccaactttaaaggagcagaactctgatgttttagcaataaggagtttttttggttgttagctgcgtctgcctttttctgtttttgtttttccccatatcaggagttctcacttcataaaataccgtgtaccatttctaatacccacattttttggtaatagggtcatagtaggacaaagatgtttttatgacaatgtagaaagtttaccctttgttggttaagctccatcatgctccaagggaagtaaagacttagttttcctaactggaaaataagaattatcaaattatagaattagcaccggccgggcgcggtcgctcacacctgtaatcccagcactttgggaggccgaggcgggcggatcacgaggtcaggagatcgagaccatcctagctaacacggtgaaaccccgtctctactaaaaattagccgggcgtggcggcgtgtgcctgtagtcccagctactcgggaggctgaggcaggagaatggcgtgaacctggggggcggagcttgcagtgagccgagatcgcgccactacactccagactgggcgacagagccagactccgtctcaaaaaaaaaaaaaaaaaaagagagagagcaccttaggaatcatctgcctcacacgaatattctgtaagtaaggaactagaaaggagaactgacttgtcagagggcacacagctaattaatagaaaagttaagactagaaaccc

SEQ ID NO: 6854 - DNA, 2300 bp, Homo sapien
aagatatgtgaggtttgtcaagttcacagatctatgttttgcatgttacatagacagtattaaaaaattacacatgttgatggagtacagaattttccatgctgccatagtaaataaattttgttataagctattacaagcagaaaagcaagacatttatcacagatacttttacttctctgctcataaaattcttctgaatcctcattagaagatacccaggaatggtgactttatttttgaaacagtctgtaacatagtttcagatagggtgatctcatcaagtcgtttttcctttgtcaacgtatgctattgtcatttcaacattgagtactagcagtaattgagtcttttaaatatttaaaacttttttatcttaattaaagttgtatcaccagaagaacttaaaaggaggcagatgtttctctgtctgacattgatggttaagacagctcttagaatatacatgaagtccttctgaaggaaaattctttgatcttttcattattccattaagtggtatatatactttttttcccagcaaaaattaggaggttgtatgatatagctaatgttctgagtagcctggatcttatcaagaaagttcatgttacagaggaaagaggccgaaaaccagctttcaaatggaccggcccagaaatcagtccaaataccagtggtatgtatttttttctttcaccctctgctttattatttgtgtgtgtgtttttctaatttttaatttccagtgtgtgttgttcccctccctgtgtccatgtgttctcattgttcaactcccacttacgagtgagaacatgcagtgtttgattttctattcctatgttagtttgctgaggatgatggcttccagctccatccgtgtcccacagaggacatgatctcatttctttttatggctgcatagtattccatggtgtatatgtaccacattttctttatcctgctttattattttgaattaatgcacattgggagatattttcccttccccttcctactcaccgccccacatggaaaagatatatatgattgaaaagatgattcaagatgaatggcaatatagaaagtttggctactggctccatcagctaaccaagatccataacaacctcccaccctgtgttcaagaagtacaatctgtatgtgaaagcattcggaaagttgaaagcaccacaaagcataaaacactattgctgctatgcggcacagtgaccacaacagaacctgtgcccattgagaatatgaaatgagttcactctggtatcaaagtagatatttctagccttcatcttaactctgcgatgctgacattttgcattctaccaaagatccccacccagaatcattgaaaatgacaagaacgtgggccatgaagacagagggaaacttaggttccattccaagccctgccactctggctttgcggcctgagacaagctacttcttcgaggattagttttctccttggtgaaatgggaagaacaatggcacctcagtggagttactgtgattttggtataatctcagagagaggtcctttcgtgcaggaatttggagtgaaaattccggggccatattgaccaggttcatatcccaggcccacatgctcccagttgagagaccttgagccagtaggttaatgtctgtgtgggtcagagctctcatctccgacacagggctgcatttcttgaggaacagttacctcatggagctgtgaggatcacccatatttcatcagatctaagacttcactgattgtaagatgcacaattctttctatatcactaagaaagaaaaatcactaataactacactctagcacaccactggttataagatatagtgcagtttcagaaatgctaatgtaggaaatattgtgtctcagaatccatttaataagataaacaaggctttctctgtaaagcccttagaacagtgacaggcacatggtcggtgctctgtaacttgccacttttattcctaaaattgttttatttcatatcccaaaagccaactgagccatccaggttttaatacacagacgttttctgtttcaggctccagcccagtcattcattttactccctctgatttggaggtgagacggtcttcaaaagagaactgtgccaaaaacctcttttccacacgtgggaaaccaaactttactcgacacccatctcttatcaaattggtaaagagtatagaaagtgatcggagaaagataaattctgcgcccagtagccctatcaagaccaacaaaggtatgttttcaggaatgt

SEQ ID NO: 6855 - DNA, 2300 bp, Homo sapien
tgtcaggcaatgttgtaggagcctgggatacatccgtaaacaaaaagggcaaaatctcttctctcttagaacctatattctagtggggcaatagatactgagtaaaggatataggaagtaagtaaggataatacatgctagaaggtaacatgcatagtggaaaaaataaattgtagatcaggatcaagggatcaggagtgctggggaggtgctttgccataagtggtcagatcaggcttcgttgagaaggtgacatctgggcaaggacttgaaagaagcaaggtagggagctgtaaggacatcagggagaagggttccaggcagaaggaacagccggtacaaagcaagtgcatatctggcaggttccagggacagcaagaggtcggtaggatgcacccttattaaaatagtgttttattgatcacttttccagaaaggctgatctcatcaaatatttaaattgaaattaagtttcttgaacgaagagaattctaacattacagaatattgaaaacccaatttaaatagatagagtcacagaattactaatatcatattgttaatgatagctagaaagtaagcaaaattagacccaaaaaggcatattttatttttatgtaagtttttaaaaactacatcatggtttttgtacttttctgaaatctcagcattttgtttctatcttatgatcattacagatgggcgtgtgtgtacgtgtttgtattggaagcggttggaaggtgtgagatgtagagttttaaagacttggtttgctacttgctagctcttttggggtgagctacttagctggtctgagcctctgttttctcatcgttttttttttttgtttgtttgtttgtttttgagacggagtctcgctctttcgcccaggctggagtgctgtggcgcgatctaggctcactgcaagctccgcctcccgggttcacaccattctcctgcctcagcctcctgagtagctgggactacaggcacccgccaccacacccggctaatttttttgtatttttagtagagactgggtttcaccatgttagccaggatggtctccatctcctgacctcgtgatccgccctcctcggcctcccaaggtgctgggattacaggtgtgagccaccgcacccggcctttctcatcctttttaaagtgcagatcataatacctacttcacaagtttagggtgaaaacttcctaaagctgtgtagcacaacttaggccctcattaaatgttgcctttctaattcatatgatttgtgcccttggaaagcaagcacatgtctttctcaccttcacagtatttgttgagtatgttcacttacagttaggaaagtgatattatccaagacctactgactaataaaccaatggaagaaaaagctattcaattctaaacacgttacaaaaatctgtaacacacaattgcacattctttgtagatgttgaacgtcgacgcatttacgatatcgtgaacgtcctagagagtttacatatggtgagccgcctcgccaaaaacaggtacacttggcacgggcgacacaatctcaacaaaacccttggcaccttgaagagcatcggggaggagaataagtacgccgagcagattatgatgatcaaaaagaaagaatatgagcaagagtttgactttattaagagttacagtatagaggatcatatcatcaaatcaaacactggcccaaatggacacccagacatgtgttttgtggaactccctggagtggaatttcgggcaggtgagagatggtagtgaaaactccaggcggcatggcatttgtcctctgtctaaggaaaaggttctgtggagaacacagctctaaagctactgctgcctttaatgttcagatgccacagttgtcagctgtatgatcaggtggtagtatttttagccttgttactttagaagtcacttgtccctttatgaattttaattctctaatcctcatccttctctaaagcttctgtaaacagccgcaaagacaagtctttaagggtaatgagccagaaatttgtgatgctgtttttggtgtcaacgcctcagatagtaagcctagaagttgctgccaagattttaattggggaggaccatgtggaagatttggataaaagcaagtttaaaagtaagtgtcatgactgccatggatttttgaacctattcttaaacaataaaatctcagtcgtaaactcatttccaaattaggaaacataggtgcataaacagatcttctctaattatgtttttatatcttctccccagaagccatgat

SEQ ID NO: 6856 - DNA, 2300 bp, Homo sapien
tacatttagaacccagtcttgctccaaaaaaggggtacctgggcttagtaagaaccagccgctcagtgctagcaacggtggaaccctatatagtgacctctgctttatttcaaatctgcgagccacaggcagtggcccctctgcacagtacctgaaaggcctgctttcaggtcgaagcgccttcttgagcaagacctgcacctcagctggcgacgaaagggggacagggacacgacggcgccaacattccagggcggccacaccgcaagcctgcggtcgcgttccgcggggagatgagccttcgctcgccacggagacccctggccctatggccggcagctgctgcgctgcgaccccagcctcaatatcatagcatccccgccctcatcgcgtttcgcagaaaataaaaatgcctcgccctgctagtcagcaatgggagagtcactgatccccaagttagcggtgggagtggggaagtgtggccccgggccctgctggagcctaaagacacgcgattacagaggaggacgagccaaaccgagtccagatcgagagaccggcgcccagatctcggcgcggttgggcaacactcagcaccagtccgcagaaaagtctaaggcagaggagagcaaagggagccaacgcgggcgcaaatgatccaggtgcagccgaggcagcgccgccgccccgggcctcggtgtcccgttctgcaaagtgaggacgaaggatcgaagtgtctccccgaccctgctagggctctacagggaaccaggctaaagctgcctgaggctcggagaccggaaaaagagggaaagacaacagggaagagaaagggaggagtgggtgggagaccctgaggaaagacggcgaggacagggttggagggttttccgccttcctcctcttcctcctacacctgagttctcaccgctgggccaaggcccagagcccacggagcttaggcaccagtagccaagcttctccctcctcgcgccagtttctgcgaggcacggggcagacggtgggcagcacaatcatgcatgccaggggtgcaagggggagaggtccggctggagtccgagggcaggtgagccggcctggggctgggcaggggtgagatagccccaagcggggaatcgcagggcgcctgcggcccagcccgcgagccccggacgggccaaattttattccccaactttgagcaaggggagggggtgtatgcaaaaaaaaaaaaaaaggaaaaaaaagttgctgaacttttcccccaactctgccgtagaggcgggagtggagggcggtgcctgcaccgattcgccggcggctacggtcgggaggctcggattggcgctcgggggccggggccggggcgagcgggcgtgggggaggggagcggccctccccgcccgcggtatcggctcgcgccgggagcgggttaatttcaaatcgggggcttggctgctcctggacggtcacgctccctctgcccgccagccggcccgccagtcccggtcccggcgtctctctccggcacccacctcggcgctgcggaaagactgactgccaggtacgcgggctcccgggcctgagaggggcagcggtgctgacgagtcccggctcagcccccgccggctcccgccgtgaggtggactgacaggtcagcgggacgcagaggggcgcggcgcccgggcgacacggcaccgggagagggctcgggagggtggcggcggcggcggcggcggccgtttcccgcctcccgcttcgccgggggccgtgagggaggagctgagctcccgcgcagaggggcgggggcgaacgagggggaggggcggggttgccgtggttccgggcgcgggtttgcccgcgctcaggccccgcgcagctaaggggaggcgccggccacggtccgactttccgcgccaaatttttaaatcgaaggcggaaggtccggccccgcccctggcgccgtcggccaatcgcaggcccgcttccggccctctgattggtcgggaattgttgtcctggaaaccacgatgatgctgtccgggaactgtcgggactgcggcgggcggacagggcctgggggaggggcctttggccgaaagttgggggaagtgcactgagcgagtggcggccgggggacagtacctgcttgccttattgggcaaatacagccttccaaggtggagtctaacgccgtggtgtgaactggccacccgaacagggagtaaatagtgctttgtatctttaaggaagcccttttttaaatttaaaaaaaaagtcttaattataagactctttaa

SEQ ID NO: 6857 - DNA, 2300 bp, Homo sapien
gctgaataaatgaatatatgaagcagtagctagcactaagcatatagcaaacattcagtacatgttagcaattatcatttgatcacctattctgtgttaataggtgatcttgatctttccaattttgtgtggtatcattctcctcactttatagatgagaaaactgagattgggattaagttactggctcagggtcacacaagaagctgcagtgttgagatttgaacctaggtctgcctgagtcttttagtttgaggtttcaattggattcagaaaagggtaatacgtatagccagtttgtcagagttcacttgcattgtggtctgcagctgaaaagaatgattctgaggtttcacctttgcaaaggatcccttgaaggggctgtggagatagtggtggtgagcaaaaagcgagtatctactttttttctaaaagctcagctacttcctgggtcagcagagggcttcagtcattctgtctataatgtcacccactcttgggtatacaagataaccttctgaacattctgctcctcactgattcttaccaaattcagaacatctgtgacttgggaattcacttgcagaaatctgttctggccgagtgtttcacgtgtgtgggacaagccttcaattaagagggatgtacctgtgaagtcacatcccctctgctgcttctctcccaagcatctgctagtccttctcctcctcctcctcctcccccctcacaagccctctgtggccgagtctcatgtccgcctcttaacctgctttggcactgagctgtgcggaagccttttgtgataggggatggcttcggccttattccaaagtagccaccagtcaggacagctgcaagggagggtctgtgggtttctgtctagtacccgctgcggccggatctggccgcagctctcccggaggctggcatggcctgaattgtagaatggctagtgcgttcattacaaatgctggcaagactagtgccttttagtaaagagctccccagcccccattcctttccttcctgatggtgctggtgttgggggaggaggcattcataattacttgttgatgcatgatcttcctaggatcctcagatatgtccccacctcttggactatttatgggagggtgtaccaagtgtgaatatttttcttggtgcagaggtcccttcctctctcctccctccctgtccctccgagcttctgtgacgtcagccgggaggtgactgagtgtctgctctatctgcagattcccaggcagggaatgcggctccataggcagttgcttttcggccctgagacaatctcggctgctctttctcaccctccctgaggaccctggtgtctcgcctgccatacactgcctcctgcagctgtaattgggggaaaaatattgatgctttgtgcttcacagaccattgcttccctgtctcttcatactatcgtgccttattcctctgatgatgatgatgatgatgatgatgatgatcatgcaccccatggaagtttgaaagataactcatttccagctccggtgtgcttatttccagaacgtgagaagtggggagcccgtgaggcccctggagtttccttgtccatggatgtgctcagaggagcttggaaaacgatcatcggctgctgcttggttcaggcctcactatgtggctccagatggtgggaaagacagctcaaatctgtacttttctacaaaagacaaatctgactgttgaacgttttctcctcaggtatgggtcttacaccatgaaggaagatgacagcccaggaggggagccaccgctgtgatgaacgcttgcaggagccatgaggggcggctttccgcgcagtgtttgcagtgatttatgggagtcaggggctgccagagagggatgtggatgttagcagcttggtggattaaatgcccatttacattgttattgacatataaattatctgtgccaaggagacagtgaaggaaagggtttctggggcagtaatgtggtatgtgcctcaggatatggacttgtctttgcccagatttgtcctctgggctctcatgaagcgagtctcagacctaaagtaaaaccccaagacttagctctcatgatgccggcagcagtcaccctcattgcaaaggcagtggtgccgagtgaggttcccgagtggattttaagaagacaggaagacctttgaagaggtggtgctgatttccttggctggcgggaactctgtctggctgttgcatgcatcacttttgtgtgggttattttgttcctctgtggatttggaagcatcgctg

SEQ ID NO: 6858 - DNA, 2300 bp, Homo sapien
ctcggtggggcctatggtgcatcctcctgatgagagacaccttatctgctccttggcagacgtggggaggtggtgcggggtgcacgcactgaatcgctgatagatgccatgcacggaatcagcgcgcacccttaataaagagcggcgcctcactatttgtggtgatagggccggtcgtgataacagcatctccttcagattggcttttgaaatggcagatggagggctgggtgggggtggggtagggagtcgctcacggaggagatgctccctgtcatgaaactgacttcgtgtctgccagtgctctaggtgtcaagctgaggacaggtttggcgccttctttgattgtctcctctgaaagaatagctgatcagcacacacaccttagtgctgctaagggcgtgcagcagcttctgaggatccgttgggtccacaaggcaggtcatgcactggcaccccgctctgagctccctgagggcaggggctttgttgttttcttccagttgtcccaccccaggctcggtgctgggcatgtggagaaattaagtgtgtcagcagaggcccatggcctgagttcaagccctggcttcgtccctcactccctgtgtggttttgggcaaattactcaacctctcttgaatctcttccccagtgtgtgcaggggcagggcagagaagtttcctggaaaggctgctgccaaagctgagtcttgaaggaggaggaggaggactgtctggaggacttttgtgggccagtgaagttggctccatagatccacggggctggtggtgaggagattggaaacttgcagtgtggctcagggtcagacagactggatggggcgtgagcaggggcaaggacactgaggccctggtgactgggcgtggggtcactaagggaagtaataaggtggaaaagtcagaggggtcagagagagaactattaatatttagagaataagagcaaggcctattacttgggagcaagggggtggttgagaagggatgctgtgaagcaatgacagaagtagggaaaatttcaagtgaaattcagaagacattcacatctgtacatcatacttgcttcactggaaaatgtccttcttctgtccatttcctagttatgttctgaagcagatacctgagtggccgttgtggaggaaagggcagagaaatgggaggagagaaagtgacagcctccttagattactgacacctgctgggcttggccacatccgctgccctgactcttccctcctccggcatcttcccggtcctgttgtggctctggtgagctgaccagagcttcacatggacttcttccaggtctttctctatttcacgtcagactgcctgctttccttggcattcctctgagacttcctcgcattctcctttttttctgttttgctgtctgcaggcaatccagccacgtaattctcttctcacctgccaacagtgtcttcccaggaagcatttctactcccgccagcaccaataatttaacaggctcttccaaatcaccaaacaccattccaaaaacagatttaattaacatcttggttagctttagtatctatagttatagacatatataataaaattatataattaatataatttattatagttgcaaaagggataaatacggccatgatggtttttaccttccaggctcctgcataacacatcccttttacctaatcttcttcatccccttattgttgccatgttacttgcagttaaccatgtaagtggaatctttttatgcaaagaaataaaactaatagcgtatatcttctctctactctggcaacagtctagtcagtcttaatgagatttgaatacaacacagtgatgttgatacccatcaagcttgttacagtgggattctctccatattgaatttccttaggccactgctgttcccttgcattagatatttcatccctgtggttctaaaagtctggaagacactagctagaaattgtgctggtctgggaaaatcatggcatgcttgaactgtctctggaatttccatgtcctgtgatctaaagggctgctcaggaagtggagtgcttctgagtaggttaccatgaggcatgtgggtgtgcaggagggaagagctcccatctccggggatcttccatgacattctccatgacagcaggccaacaggaagtggcagaaccttcatgacaaagcattggaggtcagtgtgctctgaggcattatgaatcatcccatggtgtgacgtggaggaaggtacaccctctgtctggatggtggaatcagtggagt

SEQ ID NO: 6859 - DNA, 2300 bp, Homo sapien
aagatgattttgtgcacttgcatgcgcatgcacacacagacacacacacccacacacacaaacacactaataaacaataggggacgaaacctccaaaggaaagtgaatgagttggcacagaccttaagggttgcctcgctcactcatccccaaccccattttacagaagaggacactgaagtccagagtaagggactgacaagtcctaatgctctgtcctttttctgtttcctcatttgtcacatgcaaataatttcttctatattgcagggtatttgaggatacaatgagaaacacaagccctgaaatgtagtagatgcttaataattttactttctgctcttccttctcaaactacccagttatgtaataattttgttttgtttgctttctcctgaacacttagtaggaccacaatattaaggaagctaggaaatttatgaagggctcaccttgcaaagcataagcttttcccccagggcagatgttgagatttcggaggttttacttgctagttcatttatttaacaaattcagagtcagccactgttacaggcatttggggattcaatagtgaataaaacatttattgagagagataaatcttaaatcattatactcataatcatttaattaaaattctgattaagtgatacaaaaggcagacaggtggctgttggagtacaggacggggaacttagagactggagtggaggataatcagggaaggcttccctgaagaggtaacatttacatgcaggtatgaaaggtgattaggaactcgcccaacagtaaatgggactgagaatgagaactgcgaagagaagcccaggaggaaggagtagaaacatatgcaaaggccctgaggagagaaggtacctgccacacttaaataaccaaataggattagcaggaagtccaaggggctggttttgtgcttgtatgcttatttgtttttctttagtttggaagaggacaaaggtcagcatccatagagccctggggaggaagggccattagagtggatagtcaatgagtcagccttgactcatcctgaccctgattctgacccatggatcaggtcagggtaggagttgctgcaactccagaggaatcagtaggacagcctcaggaagagaaggctgaacccctgagacagagcaaggctggtccacagagcagcccccatcagcatgtgcttattaaaacaatctccctccttcatcccaccccaccactgcccttgctataaaaggaaacatactttccatttcatcaaggaccaacctttcagagccaactgaaatccagaaatgcatgtctcttaggcttcacgtatttattaatcctcatcccaggggcactgtgtataagggttaaaagcctgggctctggagttagactgcctgaatttgaatcctgacattgtcatttactagctgtgtgacctcaggcaaatctctgaacctccgtgtcctgatctataacttgaggataacaatggactcactgatagggttgttataaagattaaatgagataatgtacacaacatagggacatataggtggaagccttcaataaatggaagctttatgatgattataatgatgatgatttcattaatatcatcggcatcatagaaaccatgtagtatctgtctataatgctccagaaactgagctaagcatttcacatcctttattttcaatgttcctccaactttggtttaatgatccccattttctaaataaggagacaggctcagagaaattaagtgatgcagctatttagtgacacagtgcagattcaaacccaggctccaaaagtagtctaccctccacatttctataccaaattagccacttctcatcaaaatcctgtaaaatcctgttaattacaacaaatgaggatgaagtcagtttatactacctgttcattaattggcagatttttaacatcattccttgtcccaggaggactctccaggggtctattattaccatacaattctttgggggaaatgaaacaacagctggccctgccagtcaccatggcaacactcctgtaactactagaaccatgtcaacagcaactttatacatacatacagattccaaatttgcacttaactgctatattatgtatgtacttgttcatgacaccacttggaattcaggtagaggtattttcaatcagctccaacatccctttccttccttggatgtttccaagacaccatcaagccaggcacatttaggcagagaggttgctggggagaatagaacattgccaagctc

SEQ ID NO: 6860 - DNA, 2300 bp, Homo sapien
aggaggagctgtaatggccctggggtgatttttttaaaaagacaaggcagaaaggacaggtctgccttcgtgacactgtggcagtagggccatgtgtggacctctcagcatgatgctgaaagagaaggaaaccttcttctggggcaacatttcacaatgcccacccaaacctttgcacctcctgacagggaggcggggaacattatcaggagaggtgggacctgtccccgagacctgggcctccaccctaggatacacgtccagcttcccctaagcctgaagactggtttttctgaactaccaatctcagcaggtcatcagataaatacctgggattccatatcaatgagggagaaaggttaaacttcctcaaaggaagggagggcaggtaggttatctccaggaggcattttttgtctcctagataagaaaatgcagaatgagggcactgttccacgatgtgataggtatttctccaaccacttcttctgtgggaacaagactatccccgcagttttgcctgcaaccccctcactgagagaagtgcccactttgcaaagatgggcaggttctcgctgaagttgcttcctacctcagggactacccagccttctaaccttcttcccctgcgtggctccctgggcacacagacttgtcaacaccttcgtaaagaagatgcgtggtttccacatcactaacgacagaccgcagtcctcacttcctctgcctgcaccccctcttctatttcactcagaccaagtttggtggcaggctcaaggaagcatatccaacaccacttaagaaattcattctagagtggtttgggattggcacacagcaaagcctgagcatttctgatgatctgaaacatggtgtaggaaaggggccactggagaccaacacgtggcttcagctctgccacctacttgccatgtgtccttgggcaaatcagtgcacctctctggggcccagtttccccatctgtcaatgacacaggttggacagtaagatcctttctagctctaatgaactccagttctgtgaaatctgctatggcttaggacacactgcactttagcttgaatttatgacccagacaactatttgaacacaaatttgatatttcttttatggagaaatgaatgacattcacagggtaataactaggaagccatttcaaacccgggattaacaggaagaaaaaaaccccacatctccaaacttgctaaatataattgtgtttacacaacactgatcttatatgccactctaaacacgaagctgtgtctgttagctgaagtcaaagggcctggatatcacaatcctaaataacaattgtagaaagcctagaagcttgtaaagaattagcaggaaagagacaccatctcctagggaagtccttagagcttaggaaaatttgagagtggggtgctgggacttcccaatgtgaaattaatatcttaaaaaaagataaaaacaataaagtccccaaacttctgcaagctttccaagagtctgttacaagcctggcccttttaggcccagccccccaccaaagccagtactgacgtcagctcactgtctccatagccggcagccctgggagctgaactcactagatcaatgaaaacatcaaccatgccagacgtgcctgccctgctccaagcctgccaaggagccaggggttcaggtgcagagccgggccatctgtcattaggctctgctgttaattgctgtgctaatgaacaaggtttgaactggaggcacgaaacgcacatgcagatttacacacagctctgtagtactgtgtcccattccctgacaagctagcacagtctcttggatgcaaaggtaaaggtggccaagtgacatcacacacacagacgttgcataacccaaccagcagatactccaagtggcagatgtgcagaatttttcagctaggtgctcattcctccagtcatccatctactcaacaaatactggcttggtcgtggccaccatgtcaaatgccagggctccagagatgacaacaacagggtccctaccctcaggggatcatatcctaccaggggagatagagaggtgaacaaacaggacaaatacaggttgacaagtgctaagagagaagtcagaggctgtgggaacagagaggaggagtatctaaccagcctggagtatctggaagacttcctgaaggaggagaaaacacctgggctaaatcttaaaggaagaccagaagctacccagggaaagaagtgaaggaaggcattataaacagagaggccaggaggtaagag

SEQ ID NO: 6861 - DNA, 2300 bp, Homo sapien
gttcatcccacaagagcaccccatcttccaaagaggaggctccacatggactcacatgatattcaccagacgaagtgccctctgtcattctggctcgatgctgcccccacgtggccactgactgtccaagccttccgtttggacacatcctgactgcaggaatgcagcttgagaatctgccatcccttcagccacctcttgatcccaccctatgcttctcacctggaagtgcagccccagttctgttctgtgttcggtgtggatcccattttagccaaggcttttcgcgttcactgcttatagggaagcatcccacctgaagctcaagttgaagtgtgtctacgtgaccacatgagcactgatagggcccctgggagacagaatgtccctgcctaagccatcagcagacttgtggcaaccagaagttccagttttctcattcagagcctagagtaccatcgattgtccatgaattgcatagacaacatttaatcaagggcagatgtacttcagcaggagaaacattcatgtgaagagattacttcacagtggctaaaataaatcaattctacaaacaaaacattcagtttactcatcgtaagccgtagattgccaggctcagtggatctaacaggtaagagtctgggtttgaatgatacacctcggttcaaactctggttccatcatttgctgactgtgtgaccttggacaagtctcttaacctccgctggcatcaatgtcttcacttgccaaacggctacattaataccatgtctcttgtggaatttaacctgcgggttaaatgatatggcatctgagagcacttactgccttatcatccagtgatctaataagcctgaattatattttctttgttcatttgcttatttaattttaaaattccttggttattttacatgatagaagcaatgcatgtctattatgtaaaattttggaattagagagaataaagagaaagaagtaaaaaactctgatacagagatttttaaaatcaaggtccataaatcccctagaagactagtaagaatttcagagagtacatgaacttggataggaaaaatgacgtttttatttcatgatctaaccaaaatacagcatggtcatttattatgaattttggcttcaaataacagtagttttagctatatagacaactttgtcactgacagaaacttagacatttttataccacattttagctattgcatgtaatttaaaatattacttgaattcatcactaccttataggtatagtaattatttgatcttctgctagatcgtgttacttaaggtattaaaaagaagcacatatattgaaaaattattttaacattttgatatctgtatttcaatattattggttttctttgaaattctatggtttatatttcaggcatttaaaaacatgctggtaagcccataggctcatcaagctgccaaaggtgtctgtggcacaaaaagggttaagagatccctgctgtggttcctccagccaagcccatgagcagttcagattttcctgccactctttaactgtttacttcgttcatattgttgcagtcaggttgcatagtataattttgtagcctgtgttgctaaccataaacatgttttcacattgcttcttacacacataatttttaatggtggcatgatattccactttgttgatgcaccataattcacattcccctgtggtttaccatttacaatggcttgaacctgtcacttttacaaatgacattaggatgagtgtcttctctcataaaggatctcctgtattttagattatttccttaggcaagattcccagcagtggtagagtgaacattttcaagtcgctgacacccttcctggtccccggggagctgcaagcacatggaatcagcacatggaggattgaagaagagtgaaggctttgaaaggaggagggaagggaggctgaggaggagaaagataaatgggagggcagggtctgtagggacaggtgcacaggctgtgacccactcaagggtgtccagccaggtgataagcacaggctgaactctagtcaggctctgctaccaagctgtgcactcaggctggggctggggctggggctggggctgggtgggctcgaggaaggtacatcttcttccaggcaccatgggagcagaggaattcactattgctgagaaattcactattgttccttggtggtggcatcttcttggggtcttcaggacatacaaaccccacaccctcagagaatgctagaaagaaggagtcacattttcaac

SEQ ID NO: 6862 - DNA, 2300 bp, Homo sapien
tggtctgagatctttgtcactttgggccactataacaaaaataccataaacaggatggcttaaacaacaaacatttatttcttacagtactagaggctggaagtctgagactaggatgccaacacggtatcagattcttggtaagggccctcttcctggtccacagaagactgccttctgtgtcctcacaaggcagtaagaaagcatctctctcctgtctcttctaataagagtgctaatcctatcatgagggctccactgtcttgaccttattacctcctaaagttccccacctcctaataccatcacactggggattacgggtttaacatgaattccagggggacagagttaatagcatctgagttattctaaatcaatgctatcagcactgaagatcaggctatagggtgggcacaaagtgtcctggaaacaaagaagaaagacaaatagtttataaacagagatgactttgggggaaagcagcagtaatttaacaacagggaaaataaagcccagcttttattggtctcttacattgccaggtacttgtgctaaatgactgccatgcaccaaccatctcatttaatccaaacaacagctcattaggtaaatgtcgtcaagcctccaccttactacatgtgaaaacagaagctttataagcatgcatgtaagcttaaataacttgcccacttctaatccaagcagttctacagggtgggaggctcctcattcataaatcgcgaaggctggcctgcctgatcatctctcagtttccttcttattctcatccactttcagtcagcgaggaaaccacagagcaacccaaacagcgaattcgagtcgaggaacctgttggggccagtgcgtcccaggcgcggacagggaggggctccatgaaacgcagcaaggtttggccagagcctgccggggtcatggagcctctcccggcttcttcaggccactctaattacagagtctgtggtaggttgcgtggaggagctgtctcggggcgggaagcttccctgcgtattgtatttgcctataaatacttcaaatagttaagtgaaatgtgcagcctttgaaaactggagaggaagccgttgggaggccccccgcccagccggcctggaagagcaggcagagaaatggctggcgcgctcttaaagcgggagacgagcttcggccctgcccaagccagatgggggcagcgaggctgcgggcgtgactccggaagactcaaaccgttaaggtgaccggagcaatttgaaaaaggaaacaaacttccctcgagccgtgcccgcgtggctctggggcggacggttgcgttcgaaagggcatttttcaaaagaagggtttcaggaacgcaggggtgtgggccccccgggaggcgcgcggccggggcagtgccgcaaagcggccaccagcccgctttgtactcgcggccaagcgcggccccagagtttcggcggcggccagagtttaggccacaccctctttgcagtgagacccgcggccgctgattggcgcaccgtggaccaatgggcgcgccggggcggccccggctgtcagcgcgcgccgcagcagcgccggcagcagcctgtcctcccctgcgctgagccccgcagccagcgcagccttcccgggaagcgcggcggccgctcccgagcgcagccctgcccggcccgccagccgcgcgtcccggcgcccgcgccccacggccacagccttgcctctatctagctcacggagcatgtgcagacccgcaggcgctaaggtgctctcagtccgggggccttctgggcagcggtgactgtcaccccaagagagacctttcgggggctcttgccgcacctctgctgcgtcgcgggtgacactgcggtgctcgcgagcagggtggcagctgcctctcggtggagacgtcttgggacccttgcgcccttcttctctccttccttcgctgctgtctcctttccttccttggctgctcgctctttctctcgccggctcagacccgtagcctccggaacgggactcgtgggtcgccgccgcctctgtctcttccaaaggggcctcctcacttcggagatgcagtgacaagttaatatgggcgtccaagcctctgtttcccaggaggaaatttgcaagaggcggcagcccctgagcgcccagagctcttgaaaggccacccaggagaggtgtgagacccggcggcagcatccgtccaggtgggacccgctgagcgccgtggccagtcccccattcccatcccggcaccccaaaggcgcgctcgcccgatt

SEQ ID NO: 6863 - DNA, 2300 bp, Homo sapien
tcccatccccacgccccgtcactcgggctaccaacaccaggatctaccacccaggaaggaggggcttagcttcggccgccattctgaggcagccacctccacccccacccccaccgcaacagccagccaaggcgctaggagtctccagctgccggcctcagctggtgcactagtaccgcagtcccagcaccttgcccggaatcccgtcaccccgcaggatggggcagggacaggtcatcttcaagccaagggaagagcaggttcactgccacccgcgatccccttttcttcctggatcttacagccaggctagggggcgtcgaacccaatggggccttagatcattccttgtccggaacagaatctctgcggaaccgccagacagacacacagctgctgctgcggatactggcttcttggggccaagacctcaacatgcaggacctcacatttccagcgatgcacacgttttttgagaacatcccgacctttcctcctccccaggaagatgctgcagacgtgcccgccatcccaggtctcgaagagctcttaaggcaaacctccggcacccgggccacacccaccggccggcccactctcctcgcgcatcccccaacctgccggcctaaggggaatggttcccttccctggccacatggtagacccttctcccatccagccctttctcccacaccatcccgaaagaactattcatccatccttccagaacagtaccccggcaaacggcatctctcacctgggtatcgaacccgttttccaccgagccgctcttccgcagcgggagcccctcccccgctggctcctgcagcccctgcagcacctgcgatttcagggggatctggctaggataggtggtcttgctcacctccaccttgcttcccaacttcaggtagcagggctgggggcccgcccgggccgggggcacgtgcaggatgggcgcggcgctgtgcacgggtttgggcagtcccgacttcattttggaggcgaccaggatggccggcatcttctcccggggcttgggctttcccagcacgtccctggcagcggcggcgggggcgaccgctaaaggcagcgcgggtagcagagcaggcgccgggccttagcccacgaggcgcccaccaccagcggctaaaaaaaaaatccccaggtcggggaactcgaagcaatcgggcgagcgcgcctttggggtgccgggatgggaatgggggactggccacggcgctcagcgggtcccacctggacggatgctgccgccgggtctcacacctctcctgggtggcctttcaagagctctgggcgctcaggggctgccgcctcttgcaaatttcctcctgggaaacagaggcttggacgcccatattaacttgtcactgcatctccgaagtgaggaggcccctttggaagagacagaggcggcggcgacccacgagtcccgttccggaggctacgggtctgagccggcgagagaaagagcgagcagccaaggaaggaaaggagacagcagcgaaggaaggagagaagaagggcgcaagggtcccaagacgtctccaccgagaggcagctgccaccctgctcgcgagcaccgcagtgtcacccgcgacgcagcagaggtgcggcaagagcccccgaaaggtctctcttggggtgacagtcaccgctgcccagaaggcccccggactgagagcaccttagcgcctgcgggtctgcacatgctccgtgagctagatagaggcaaggctgtggccgtggggcgcgggcgccgggacgcgcggctggcgggccgggcagggctgcgctcgggagcggccgccgcgcttcccgggaaggctgcgctggctgcggggctcagcgcaggggaggacaggctgctgccggcgctgctgcggcgcgcgctgacagccggggccgccccggcgcgcccattggtccacggtgcgccaatcagcggccgcgggtctcactgcaaagagggtgtggcctaaactctggccgccgccgaaactctggggccgcgcttggccgcgagtacaaagcgggctggtggccgctttgcggcactgccccggccgcgcgcctcccggggggcccacacccctgcgttcctgaaacccttcttttgaaaaatgccctttcgaacgcaaccgtccgccccagagccacgcgggcacggctcgagggaagtttgtttcctttttcaaattgctccggtcaccttaacggtttgagtcttccggagtcacgcccgcagcctcgctgcccccatctggcttgggcagggc

SEQ ID NO: 6864 - DNA, 2300 bp, Homo sapien
ctcagaaagtggacatgcccttccctcatcttcccgttctgcctggtactgtactagaaaggtgatagatgttctacagatccttggaacagattgatacctttccaggggcttgagagaataagccatatcttttctcatttacgggctattaatgttgattcagcatgccccatctcttaggttagcaatataaatagctacttttattaagtgttccttatttgccagacactgcactgaacactttacgttatttttcttaatgctcacaactctaatggttgttcatgctcattttttaatagatgagaacactaaagcccaaagaaattaatcaaggtggtcacctagctagtatatgacagacgcaagacaccagcgatacccatctgactttaaaagctatgttatcagccactacacaacccaatctcctgccaaaaatcccctgaataaaaggggagtcaggggccccaagagagcatttgccatttaattcattgtttcctgagtatcttctaataatatataccaaatttgggacctggaaactaccagatggccagtcagacacagtcctcatgccataaccaagagactgttttggagggggaatgggtaccctatcaggcagactgtgggagaagccctggcaaagaaggtaaaatcccattggccaaaatcactttgatgtcagctgtgcagacagggatctgccacagggaagagcccccagaacccctgggcactggcaaacgagggcaggcaggtaaaaatcagggtagtccactggaagtggccaatttccttagcagtccatccaaactatgttcaccatcagtacacaagggcccattgagggcgagagaggtgaaatggggggattatggaccaagggcaaaagagggaagcaaagtcttgagggaagtggactgttccagcccctcagagagaagctgaagaacattttttttcacggacagggtgatgaatcacctttccagagcctatgcactgccagtcctctgacaatgtttgttaaatgaagggtcaaacgggcaaaggcagaacagctgcctggatatgaacaatcccagcatggactttccctctcattcctcgggtgctcctcatcaggctcgagggtatgtgtcacctccagtcccgagtcactgtactgacctcccaccgactgcccactacacctcataaaccccaagtccatggatgaagggaaaccccatgcagaagtgtaccctggtgctcacccccatggcagagcccactggacaaatcctgtacgtaacaacagaagaagagcagagcacaaaaccctcacagaggcaggcccccggagcactggaggaaatcttgccttcctcccacacaccatcactcaaacctgtcagcttccaaaaatgtttagcaagtgcagcagcaaggggcatgcttatcagcctggtgtgggagcttaatctgctttgagggccttctccagcccagagttccaaaagtctgcttacaattagcttcagctccagttcccgcatcagaaagcctaggaacgtgttgagctctagcctctgatcagagaaagctccaggagaaggtggagatggtgtcagcagggaagtatgtgccaaaaaggtcagctggtctgttgccattttcctgacaccagccccaaaccacctcccctctggcttcccgcctctcctaaccggacagtcacatccgtcaggtcggcctgtccccaaaagtccctgctgactgactgccaagaaaatatagccccctcctaccagaagaagggggaaatggagcggggaggaccaagagaacctgattggcccttgctaatttctgtaaaagagattgcacggccagggcttgtctggatgcaggctctgtctggaaaggtaggagtcaccaattctcttcaagccatctcccatccccacgccccgtcactcgggctaccaacaccaggatctaccacccaggaaggaggggcttagcttcggccgccattctgaggcagccacctccacccccacccccaccgcaacagccagccaaggcgctaggagtctccagctgccggcctcagctggtgcactagtaccgcagtcccagcaccttgcccggaatcccgtcaccccgcaggatggggcagggacaggtcatcttcaagccaagggaagagcaggttcactgccacccgcgatccccttttcttcctggatcttacagccaggctagggggcgtcgaacccaatggggccttagatcattcc

SEQ ID NO: 6865 - DNA, 2300 bp, Homo sapien
ttactttcccttttcctctctcgttgcctgggtctcccttatccctactaattattatctttcaaaccatgagaaaaccctgactcaattagaacctgtagctgcaaataattcagagcctctaacatgaaaggtgtgattcttttaaccatagaaagaaaactaagacctccttaaagcactatgtctcctacaataaactcacccctgtaaaaatcatgtgtaatcaaaacgatatgtttagtgttgtacatttacatgaacttttataaaaagaagaaactccatctattaaacctccaatgtatcctctctccctcagagtaaaagacaagctgcttacgctgacttgcagggccccatttaggcactctcctctctcgctgtacccttggactctctggcctgaccccctcctcaccccactttggttcaccgctcactgctccagccactcattcttggaatgcattgcaagtcgtatactatctcagggcctttgcactgaccatttcctctcttgaaagtcccttatccccaggtattcagatacccagctcccatacttcttttagatttgtaataaaaaccatgccctcagcagacctgccatagccagcccatgtaaaatttcccacaccccaccttgacaaatcacatcttcttctttacaatacgttgttctcccgagcatttattgctaatgtactgtaaaatttacattttgtctcatttattttatagttctaccactgaagctaagttccattagagttgagatttttggtctattttgttgactgcttgtatcttctgcacttagaacagcacttgccacattgcagatgctttataaatatggtagttgatgaatgaataaatgaatacatcaacatttcctagcttaccttgatgacaaatcagaatgtttacctattatgtttgcctagagcgaggaaacaatggaaactttttagagcgtgtgtgtgcatctgtgcccatgtgcctgtgtgtctccatacacacaatcaccatcccattcccaagttaactcggatgttggacagattctcaaagaagtaatatcgtaaagatacagtcagttccagggacagcatagaaggtaaggggtggtttgaagcatccttgtcagccagaacttgggtctgtcccaacttttttgtcttaatatatctggacactactccttccctcaaactcacccactgcccacccccacctctgcttcccactccccacggcagatgcctcagcagtatttcaagtggacgagggccctgaaggatgagatgtgaatgattaactttggttgggactccttcgagattacaatctttttttcattcacctgggaatcaccaccagaccctcctctcctctttgagcagatcttttattccctcccttttcagtgggagaggaatggctcttcattcccctttgaaagcttctgtttgctgagcaaatgctgaccacacagagacctcgcttggagccagttactgcttccttccctaaccatcccccagggccacaacccccgctccctgcttccactggagaggccaccctggccagggggagagcctttcttggggaaagtctttgaaagctaccaggaaccaactggtaggatttttggagagggagtcagggttttggagaacatcttaatccttcgttttcaaataaagcttgtggctataacataagtttgcttttgagttctcagtagtaatacagttgttcattgttcatagcatctgtttacatagttctttctgagtgccttgattacaggttttaatagggattagtccatgcaaccccttcccatcccagagctgggactctctcccacccacctccccttccagcctctgtaccataatgtttaatgtagccatgcctagactgagattctttttcttttgaaataagtagcctgcggaattaatgcatatttttgttggcactgcatcaaaattgacatcaccggaaataatgtatgtgtgtcgttgttaactgtacaaacaggtatcatttcctttttaggttcagaaattctctctgtaggctaatcttttcaatcgaatgctttgccttcagacgtcaatggaatgagctaagaaatgttatagtcaatgatttttgcatcattaaaagtagcacttagggctggaaagactttctgcaatgtttctgtgcagtctgtgaggatttaaagtagtttttcattcttagattttcttcaatttgacccgctgttgcaaactccc

SEQ ID NO: 6866 - DNA, 2300 bp, Homo sapien
atcagtgtcctcaaaccttgctttgtatgtctgctttttcatatgctgtgattcatggtcatttatttgtgttgtagaatggcagatgccatgagttgtctaattaaaactccctcaaagctctaacagcagctcattttgttgcttcagtcctgtcaaggtgggggctttgacgtgacactgtcatgaagcaacatgttacagatacgcccagtgacggctcttctgagcatttaccaatcttcttccctttatgtgttccctccaaactgaaagggagtagtcattttccccaaacacagccaaatagaaaaaaggttttgagaaacttcataagtttcaggacgtgtagtgatctgattttaaaaaaaatcatcttcggatatatgttttctttttatatatttaccatcagctccacagagttcattttaataagcattgttcatagttaattccggcttgatttctgtctgtccaggtatactcccacctcccagcttcgcacgcaagaagatgcaaaagaatggttacggtcccattctgcaggaggccttcaggacaccgctgccaattcccccttttcctctggctccagcgtgacttctccctccggaacaagattcaacttttcccagcttggtgagtagccacttgtcattacctatgttgatcagctccacagggcagtggttatcttatatacataacatatttttatttcaatagtttttggggagcaggtggttttggttacatgggtaagttctttagtggtgatttctgagattttggtgcacccatcacttgagttatcttacattttgaaatagacatatagtcacatcccgctcagtgtctgattagccctcggcaatatagatcgattacaggggattgacagaaaaataaatagagaaaatagtaaagtttttgatactgtaatcaataattttctttatttggttgatattggtagggctatagcaaagaacatgttatcccattcttaaaaagaatgcattctttttctaagacctctgaagaaatagattttatcgcatatcccatgttaggtcatcctcattgctttattaagttggaaataaaagttaagttttgattgaataggtattcttaacaatgcctacttctgacataatgctttgactggcacagtggggaaaggaaaagaatttgtgtcacagtccctgctgacatgtcaatggaattctttttcaggaagacaaacacatcaatgcacacctatataatagagtaaaagagaacaatccagagctttatatgaaatcatgtaaaagctgaatataattagatagcaagcattagacacatttagaaaaaggaaagattagtgctggctgaagttataggcagaggttatgtgaaggtggcagagtaggagctgagccttgaaggactgatagagggtgagaaatcttttctaatctcatctcactctttagagaggcaggcttttctgaatatagtgaataacaaattcagagtctttaaggatagaggtggcttgtaatcaagtgaggtttaacacttcatttctgattgactaaatgagtacctctgaaaatattgcacatgactcaaatggacaggattttcataagaaagctagttttagctgagacaaatgtaccttccttgcattgaaactctttatataccattattaaatgtcccccatctgaggcaatgggatctgtgttcatactgttctttcccagccataactctttgaggcaagagattcttgtcatgcacaaatgcttcccatctgatcaaaagcctgattggactattttgggcttttggctttagagaaaatcattccagatgagcctggggagtaattagctcatgcctggaaggtgatactggcctgtctgaacgtgccaagttggaaagctgaggcccagagccttgctttggagctgacctgcctttttactcttatttttagctcccggtgtgtaactcaaatgctgatgggactaccttttagaaaacagatgggagaagagttggcagaaacacatgtggctaaaaataagcagtcttctctttgtccccaaccaggatttgaacagagacatgaatgtctaaccttttgattctattccttttattccagcgagtcccaccactgtcacccagatgagcttgtccaacccgaccatgctgaggactcacagcctctccaatgctgatgggcagtatgatccatacactgacagccgcttccggaatagctccatgtccct

SEQ ID NO: 6867 - DNA, 2300 bp, Homo sapien
ggccccgttccccatttgtgctgacggcatcctgtttcactagtagcttcagtgtcctcattcattctgtacacttctcactcattttgtgttatcttggatgggtggcgaggtctagtgatacagacatcaggggtttagtaattttggttgtcaatgacttgcattggaagcaagctaaaaagccagtctagtgtgaccctctcatctttctgattaaattttcttttttaagttactaatggctcttagtcaacttatttgttatgactaaacacagataggattaattcatattgctgtctctaatatgcaatcgataaacatggtcagctttgattttcaaagtgacgagagagatattttctacgaaaaatagtggttattccattttcttcaagaaataaaacgtgcttatgttgctttaagacaactcccgcttatcagtcaaatcagggaagatggataattggcatcctcagctaatcccaaagcttagctctgtctgatctttgtaatctcctcttccacctggcttttcaccagaggtagaggcaaggatttcaggtgatggcttgtgtccctaatccttctgtttctgtgactgctctctggaaatattatcagaggtaggaaatgggagagaaaagggatctagatttgcccacaagctggacatgtggtttattatagatgaaacctgttgatgggagaaaaatctcatcagtttttagaatggcctgttttctgaatttttcagtggctaagaaaacccctggaacgtattttcacaaggaaaaaagactttagaaaaaggaaattacttttaaaaggcctgttttcaagatgaaacattagtttttggcctagaaaaatctgattatggctttcagagaagacattgcattttaattctttatgttctcattaaaatgtttaggtatccatttcctgcaacagaggcgggggggaaagaattttcagatccatctcatgatttggggaaattgtaatatactagttccttttccccccatatggttaataaatttctttaaaataaccattttctgagtaacaagtgacatggctaatttgctgcttattagattatcttcttatatacacaaatagctgaaactcctaagtggataggttaaggagctatacagccatccagggccagtgtgacagtgaagctagaattgctcaaaaagaagacatcctctccaacctcccccaaaatttaaagcacagagaggtgactgacaagaaaaaagaagagaatgagaagcacaggaaggtgggaggcagccatttcagccagacagggaaaagctggaagaactggaattgtagaggactccccaacctgctattcccttcctttcagaagggaggaacatgcccccagtgcttttaaagatttgtgttcctactggaaacctcccctgtgtgtggtgtttattattagccatgttgtgtctgaaagtccgaagctttccctgtcactggctttctctgttaaaaaattgtcttttttcctcccccttccccatttttgcttgcgttttctctggcaggtcaatgaggtaagcaagaccaactttaatatcagataccaagctaacccatccattgatatgactaacctcatccgcatccatcaccgtgtctgagcatcctgctttgttgctgtgtaacctcatcttcccaacatccatctgctgagccagactctgtgttgctgttggcatctagtcttgaaccaagagtaggcatggaatgttacccacagatgcagtccctcaagctggcaacaccagataactcttcctcccttaatgcactgattcaaaagagctcttgggaacctcttccattggtggggggaaaaacatgggagaattaatcgcttttttgtgtgcatgtctctgttttgccaaggcctaagcattggttgcccccgctgtgagactgacagtcttgtatattcagttacgcagctccttcaagcaagctttcgggaagaagaagtccccaaaatctgcgtcctctcattcagatattgaggagatgacggattcttctttgccttcctcaccaaagttaccgcacaatgggtccacaggttccaccccactgctgaggaattctcactccaactctctgtaagtctgtctgtctagtcagataacatctttggcccctgagaaccttctccagtaggaatggctaggagtcctgttatgacacatctgctccttgggatcctttatgctttgctttaataggactgt

SEQ ID NO: 6868 - DNA, 2300 bp, Homo sapien
ttgagagcctttgtgtgagttagggaacttctcctgggaccagtaagtgaaggctccgcaggcatggggagccacatgcctggggcccagagatcacggtgaagagggactaagagaactagccactttaaaaggtgggctttttctactgctaacaagacatattttgacttaaaatggaggcccagggtgggtgggtgctggtaggagatggagaagatgttaccccctgagcaagcaggctagcatctaagacaggccagtgtggtgaagacacagactggggcaggcacccaggtctgacccatgcccgctgcttacccgctgtgcactctcaggccaggcaccttatcataccatgcctcagcttctccttctgtaaaatggacgtaatcatagtactcaccttctaggttattgtgggactacagaagttcctgtgtgtaaggcccttaaagccctgcctggctctaagtgatgccagctatcattatgacagtaatggcaggcagccatcctaggttctctgccagctccttatcttgccgtttcagccttttccactgatgcaccattattcttcctcttccatttttgacatgcatcccttaccccaggcatgcagggctgtgttctagtccctgttgagccaatgccccacccgttctccaaggttaaatacaaagcttgccctttcagcaggacttccccaagcccggtgcatatagacttgtctccccaatgctgtgtgttgtgtctgccacagcactactcagcatgacttaagtgtgtgtctggctcctctgctgctctgatgtgtagagggcttctgtgtatgtagctctcaggctacacacataaagagcacagtgctgtgcttttaccccaggctcaaggtttccactcatcaggtgaatactggaagtcaggacccagtcctaactcatcccatgcccactctgcatcccctgaggaccaagccagtgccctgtaataggcaggcacccagaatgtgtttacagcgcagaatcatgaagggcctttctgcctccactggcctgggtgaggcaaaggccctgagcggtgtgtcttcactgagtgcattcacccacttgttctccttcggccttcctggccaccataggaattgcgccagtacctgtccaaccttgctgaccagtgcaacagtgagaacaatgctgtggacatgcccctcgtcatcatcctggacaacctacaccacgtgagctctctgggagagatcttcaatgggctgctcaactgcaagtaccacaaatggtaaaggctggttctggacctcatagccccccgggagagagtgctgccagctgatggggcactgtgcacacaggtggcccggggccgttgtgggagtgaagctgtgcacacgcatagggttgggagtgggaggcagccagctgtccactggcctggaagcacagggccatgggcctctgtgaccaccttgttctctagcttggcttggaatcacagctttcttttcctttattttatccgcagcccttacataattggcacaatgaaccaggctacctcttcgactcccaacctgcagcttcaccataacttcaggtcagttttcccttcccttgtccagttaaacaatggaatcacaaagaagaaaagcaagaaggggcgggtagagatgcctgtgttgagtatgtgttgtatgctaggtattgttaagcatttttctcagcttaatccatttaattttaacttcagcctcaagtaattacattcaccactctcagtttaccaatggggaaactaaggcccagagacttaagtgacttgggtgaggtcacacactggtcagtggcagagtggaacttgcaatcaagtctctgcctctgagtcttgctgtcatagggtcaagggggcagctctggaagggactgcaggtgaccctgctgccctgcttgtttccagtggcgtctctctgtcccaagtgaacatgagcaatgacagcttttacctaaaatgtccccacctagctgggtctgtgggccctcgagtcccagctgctgtgactccctaccagcttgtcttccctgccccgctgccatagcaccacgctggtgctctctcatggccaggatgtgggaggggctgttcacctcggttgtgctagattgcattgctgcctgattgacatcaccaaacaccccttgccccatattgaatctcagttgactccacctctcctgcctgggcccttagaggtggatgtgaaggtgtctcctgggctaggaccc

SEQ ID NO: 6869 - DNA, 2300 bp, Homo sapien
gaatatttaaacatgttgtgggatattcatactggaatactggaaggctactcagcaataaaaaggaatgaattcctgatacatgaaacaaccagggctgatttactcatttggcacagtaggcacagttctggggcctgtgaaaataaacttttaggtggaagaaaatgttttaggtgaaagaaattgtcatattcatctttatagcaacatagtcataagacataatttttgattatataaatagtttgtcatattcatctttatagcaacatagtcataagacataatttttgattatatagtgtgtgtacataaaatgaaggggctcatgaagtgcttagggcccatagaaatcataatgcaggcctacaaacaagaataaatactaaaatatgtgttaagccaaaaacctgggacacaaaagagtacatgctgtactcttaaatagaattctacaacaggcaaaactaatctatgttgatagtgaccagaaagtgattacctctggagtggggagagattgcaagaagggaatgaaggcactttcagggatggcagacatgctctatatcttgtttttggtggtggttatttaggtgtatatacaatctcctaaaatcatggaacagaacctttaggttctgtacattttattgtatattaattatgccacaattttaaacaaaggggaagaatagacagggtacaatgaataatttctgtgacagatttgataaatgaattactaggacagtgtttgctgacaaggtttaacattgcattcttgtagaaaacctttaggaactcaaagggaagagtccaggcactgtgacaggccagtggggaatgaaccacactgctctatattaatcaagcttttttattgcaaacaacagaatatatctggtaagcttatacagcacaggaatttatcagaagaataacaggaagtactgtattcacaacagtctctgaaaacaggcaggaatttaagacaagatcagaccatcagatggctggtggatcatatgatgccataatcctatacccttgccccaaccaacccacatatatctcaggccttcactgcatcttttcattactcctccaaaactgaaaacctatgcgtgagcctctggcttgctgagcctaggcaaagcctacatataataactcccatggagatggaagaggcaatgtgtttcattggcttctagatgggaggtggggcccccaaatgaccaatgttcccaacaaaacctgaacaatctgaaattattcagatttctgcttgtcattctaacctctgttcaggacttccaagatccaggacaggcccagtgtagatacctgtgtcccaaaccactgatctgggctaggaagactgaatcacaggtgtggaaggtcacccgggttcaaccatctaggtgatgaattaggccaggacctgggcaggtagaccatttattctggggagatatgatgcgagcttgaattacatgggagaaatatttgtaaggcagatgggataacaggacttgataagtctgtagtgtggaaaggctagaaaagaaaggaatcaaaggaatcctgatttctgacttgacagggtagaaggaggtgtgtgtgtgtgtgcgtgtgtgtgtgtatgtttatgtagggacagtgacacccaagagaggctaggaataggtttgttttattcctgtttggggtggttgggtaggcagggttaagtttttgacttggtgaatttgagatgatggccaatatacaattgacattccagctggggggaccattgaagatcaagtctggcaagtctactagctggcgcctgggtgagctgagcccagcaggtgagggaaaacgcgggaagagggtcttgcagattccaaacttaggaagggtcgcggctccgcgcacgtgctctcggggtcaccttccccgcgcctgtgagggtgccaggagttcgtctccaggtcccgcccctgtgggcggggcgaggcagcgtcgccgcgaggccacccggaagaccaagccgggtaggcgctgtctccgtcgcctccaacccccccggtccgaccagggaaggtgggatgctctgatggccgggcctgcggcgctgagcgcggcggcggcggctgctctggcggccgccctgctcctgctgcgtcgtgaggacccggggccgggggctggccccaggtaacccctccgcgtatgggaccgagctgggccaggtctcctggccgggccggggataccgtggggtatgcccagtgatgccagcagct

SEQ ID NO: 6870 - DNA, 2300 bp, Homo sapien
agccaggcatggtggtgagcacctataatcccagctacttgggaggctgaggcaggagaatcgcttgaacctgggaggtggaggttgcagtgggacaagatcgcaccactgcactccagcctgggcaaccgagcgagactctgtctcaaagaaaaacaaaaacaaaaactaatatttaatggattctgtcctctaggaatttacaattaagggagaaaagtacatttagaagtacatttagcaataatataaggcatcatttttattcagtgaatacattcagtatctattaatactatgggccaggccacatattatgtgccagagaaatgaaagtaaagagacatggcccttacttacccttattgttcagtgctgtggggtatcaccaaaaaagaaaaaaaaatcaagtaagcaaatggtgggtgctaagaaactaacaggatactcctgaaataatggtggaaactattttagaaatggcctgaggaaagtgtttctggttgagaccaaagggacctacccatgtgtagaacattcaatgattagcagtaaataaaaggcttaagggtgggacccaaggtgaagggttccattggaaagaggcaggattatgcagggcctgataggccaattagataaactctgctagagcctggggcactccctcctaagcaagaattctgggccgggcggtggctcgcgggcaggtggatcacctgaggtcgggagttccagaccagcctgaccaacatggagaaaccctgtctctactaaaaatccaaaatcagccggacgtggtggcgcatgcctgtaatcccaactactcgggaggctgaggcaagagaatcgcttgaacccggaaggtggaggttgcggtgagcctgagatcgtgccattgcactccagcctgggcaacaagagcgaaactccgtctcaaaaatcaaacaaaaaaaagttctatggtttgaagagatataaggaaaggaagaaagggacgtggcatgaggcaggcaggggaacatttgtgttcttccccacacagcagccagattgttactttctcaacacatctgagagcatcactccctggcttaaatagttatgtctgagcactttacatgtattaactcgttttatccttactgtagttctgaagttagtccaggttttttgttttttgtttttttttttttaagatggagtcttgctctgttgcccaggctggagtacggtggcacaatctcggctcaccacaagctccgcctcccgggctcaagcaattctcctgcctcagcctcccaagtagctgggattgcaggcgcgtgccaccacacctggttaatttttgtatttttagtagggacagggtttcaccatgttggccaggctggtctccaactcctgacctcaggtgatccgcccgcctcagcctcccaaagtgctggtactatagacgtgagccaccgtgccctgcccaagtgcagttattatccttgttttgtatttgatgaaactgaggcagagagaggtcgagtaacttgcccaagatcacagttacaaagtgacgtgggtaggattcaaacccagcaggctgcctctagagttcacgttctcacttaaccaaagattaaaatccgtcttggggggtttgacacctatctgtccctgcagtagacccaccctggcccatgcagttcgttccctctcgccagctgcaccccctccaggacctgggagcccagaaaccagccgagcctccagcgtttggcctcctccgccaccagagggcgtcatgggccgatcgcccctccgctaaccgctcatcccaggaaaaaggggcgcacagaggacaggatgccaaccccaaaaccgcagcgacgtctctctgccttggggctcacagcagcgggccgcgacctcccactaacgcctgccgcaacccaaggaggagacaaaagtcatcttccgggctgcaacattaaccgtcatcagcgcgcctcttcagcgcgcactgcgccaaccctgcggcaggaggaggcggagcccccgctctcgccccgcccccacctcacgtgacccgcacggcgcctcgaggccggaagcgattgcgagccagcgcgcgcgcttcggcgttcccggcggtctgcgaagtttccggagcccgggtcccgccgcgggttcgcgcttgtgctcgcgctcgttcctggagtcggcggccgctgcgcgcgctcgttgcccaacccggtccccgcccccagacacgccgggctctcggggcaccacagccatgtgctcgt

SEQ ID NO: 6871 - DNA, 2300 bp, Homo sapien
attattactctagtttgtgttaagtaattgagaattaatgagtttaagaacaataagggttcactatggtagtatagtatttagtttatatgctttattttaatactttatttaccccatttagagatactttgtattttacaattaattttaatattggctcaagttatttaaaaaatgatcttataccctgtgtgtgcatgtgcctgtgtgttagaaatttgtgttttttggcttttcttccttacacttttttttttctttattctctttttccctctctcttttcctctctttatacattggcatggttacttaaaagttcaggttttccgtttgttcttcctgatgggaaactagtcccctaatttaatcaggaatattatgatctctgccatttatatacctttccttggaaattttttcccactctttttactttgagaacatgtatattgataatgtatcaggttgttataattcggctttcatctctctaaggttacttcatggggtttacatgatatggcagcagtaacaacttttgtgttttaaaaatcctttttcctgatttttgtattgtttggaatataatctggattggcttttcattttccatacctcttttttaagagcagtgtttcacttgtgagttggctgaactggacagatatactgtaatttatatggtgctctgatctttttggccaaagcattgcacctcgtgaaaagtttataattgtttgtgctgattcccaccagagacaaataaatgatttcatttaaaaattatagttatcagttttttatatttagtttttttttgtatgctttctatatgttactatagtggagacttttcatagtttttttttttttttttttttttttttttttttttttttttgagacagagtctcgctttgtcgccatgctggagtgcactggcgcgatctccgttcactgcaacctccgcctcctgggttcaagcgattctcctgcgtcagcctctggagtagctgggactacaggcacgtgccaccacgcccagctaatttttgtatttttaatagagacggggtttcaccatgttggtcaggatggccttgatttcttgaccttgtgatccgcccgcctcggcctcccaaagtgctgggattacagacgtgagccaccacgccggcccttcatagtttttgtatttgcaaaacaagtgctggaaagcttatttaatgtttgtctaaaaaccactctgtttccagtgaagcaaattatgttgctgttaatgatgttgctttatatttctagttggatgatgcccagatttttattttattttttccttaatatgttatatagagatgaaacatgagaatcactaatcctggctagtctggaaccagttatatacttttgggcaagtggtgaatctctttgggcctaacctgtaaggtgattgtaaaaattccttctggttctaaaattctgtgggttttattacggtgagagcattatcattgtttttcttttagccatcttctcttaatacttggtgataggaataccagaggagcttgttaagaaagtaagttagaatgttccttcagtatgcttctgaatggacttgtcttataataggtaagtaaatactgaaaaggctcaagtattagtaatcataagattaatcatcaagatattaaatatttttattaaaaatgttttctttccttttttccttcccttctctctccatcccttcccagcctccttttcttccttcttttcttaatattatttcaattcacaaagctcctgtggaggccatatggtttctcagattaatttaactttgggtggtatttaatcgtgttgtcacccactcataattaatttctgtttgtagtttattgaagaaattcccagttaggtgccttctttatgcttgtgattattatctacagttaaaattcattcagttttttaagaaaaaaaatgaatcaaatttcctcatcattttataaaataatgttcattctatttctacctctttgattctatcaaattttagctaatctgcttgatcacctaattctaagctagatgtgataaataactaacatacaattaaaaatataggctttagaagaaggttaacctgtgtttgaatgcaggccctacaatttaccagctgtgtgaccctggacctatttctttgcctctctgaagctcacattcttcatttgtaaaatgagaattaaataaggatttcatacacatacacatatatgcatttgtatata

SEQ ID NO: 6872 - DNA, 2300 bp, Homo sapien
gctgcccccattgcttgaattccctgagagtgacattcatgtgtcagcataataccaacaagttctggcctcctgcctgtcttttccagaattctgaatgagattgagctgtttacatgctataaccagaatgatgaagaagtctggagatgaagaaaagagtgaaaaggcctggaatgggctgaggaactctggactgtgatttaggatgtctgggttcaatcctgctaaaccctagctcactctgtgacactcggcaagtttcctttcacttggtctcagtttccttatgtgatgctaggctacctcagggattctcagtgggggagaaaccatttcccgggaggtgatctggaaagttatgggggcattttacagtgtcccaatgactggaggttgtttctggcatttactgggcaggggcagggctgttagataacctgtaatacacaggacagtcccccacagtgaaaaaccatcccacatcctgcacaactgtcacatgtcctcctggatactcatgtagatgaaaaacttgttcataattgtctgactccagtcagataaaaactagctctgctttaaataggaacacaagttgtttttgcaccgtaccagtgtgtgttgaacttttgaaaatggaattaccacataaatcaaaagaaatccacatcttttaaaaacagttttatcgaagtatgacttatatgccagaaaattaattcattttttcagtgatatcaattcagtttgtgtttattcaattcagtgattttggtaaatttgatggagttgggcatgtatcatcaaaatccagcttcagaacagttccttccttccaacaagtttccttataccagtttgctgtcaattatcactcccaccccaagccccaggcaaccactgatttgcttactgtttctgtagatctgtcttttctagaaattttacatataaagaatcatacaatatatagtcttttgtatttctctcctttcacttagcatcctgttttttaagattcatccacattgtaccatggattatagtttgtttctttttattgctgaataatattccatagcagtaaaccacattttgtttatccatttatcagcttgatggacatttgaattgttgctaggttttggctcttaggaatttggctgctatgaatattcctatacaagtctttgagaggacatatatttcatttcacttgggcatatacttagaagcaggattgctgaattatttatttttttttaagtcaagagttgtttaaactcttttggaactcattttggaaaatcaacattgctcatggtatctgaatcagcaatataatgctcctgtatacatgtgcatggggagtgctactggtcacagtcatagacatagaatcacatatgcatcagtatatcaatgcatattctatgcataggtagagtatgtgattctgtgtgtaagtatatccatgattctatgcataggtaaagcatgcagttctatgtgtaagtatatccatgattctgtgcataggtatagtatgtggttctatgtgtaagtatatccatgattctacacataggtacagtatgtggttctatatgtaagtatatccatgattctatgcataggtgtagcatgtggttctatgtgtaagtatatccatcattttatgcacaggtatagcacgtggttctatgtgtaggtatatccatgattctacacataggtatagcatgtggttctatgtgtaagtatatccatgattctatgcataggtgtagcatgtggttctatgtgtaggtatatccatgattctacacataggtatagcacgtggttctatgtgtaggtatatccatgattctacgcataggtgtagcatgtggttctatgtgtaagtatatccatgattctatgtgtaggtgtagacttctgagtacttcattatgtctctagttaggatgtaatcaaacatttctgtatttttttttttttaatttttttttttattgatcattcttgggtgtttctcgcagagggggatttggcagggtcataggacaacagtggagggaaggtcagcagataaacaagtgaacaaaggtctctggttttcctaggcagaggaccctgcggccttccgcagtgtttgtgtccctgggtacttaagattagggagtggtgatgactcttaacgagcatgctgccttcaagcatctgtttaacaaagcacatcttgcaccgcccttaatccatttaaccctgagtggacacagcacatgtttcag

SEQ ID NO: 6873 - DNA, 2300 bp, Homo sapien
caggattctgcccactctgcgcagttctcccttcctcccggggcagccaagtctgtgcgccctggaacgtccgggcgccgcgtagactctccattcgcacctggccctttgcgggggctgctcaaatgcaaattgggaaactggccagaaccttccaaagtcgtgactgtccctcggggaagtcggccggggaaccgcagagggaggcctacaccgatctttgggcccgcctcgtggtaccgctccggccgatcgctctctgagcccgagcctgcctgccaggcctgccttctacagttctcgcattcgtcttgagccctctcggaaactggggactgtttaggcagaaacactcgtaggtccccttggcgtcccccaagatgccaagagcctgcggggtgcttctcagcgccagccggaacttgagcaggcacccctgcggaattctcagtcccacccactcagacgaccctcctccagccagagtccaccacagcccaccctaccctcttaaccctcgttcccgacctctccctacgagcgggccccggggagagagcgactgaccctagcgacagcccggcgggaggtggttgggatcttctccagggttcaaaagcgactttctgagccccaatttcctcagctttgcaattggtatagtttctgaaaggccattgctaaatctaaccgagataattcatggatatcccttgcacaatggttgagtattgagatctcaatagacgttagctcaaaactgcaataaaaagcgacctgaaatcctcaaggcgtctcaaaagaaagatctcctcctcctgcccccaccaaaggcaatgcagaccgtgtgtccccagccagctgccctttagaggggctaggcgggaaagccaaccagcggaggcatccaaacactctcgggctctccagaggagcaggagggtgccccttagtgcccccggcgcccgccgcaatctgccactgcagcctacgcctgcggccgcggccgccgcggcattgtcctcccgccgcgtgggacggcccagccgctggcgacggcgcgcaccccgaggcagtgggctgggctgttggcagtagggaagggaaaacgtgctgtctgtggctcctcatccccgaggccaggggttccccgagctagaccggcaaggaaggagagaagggaagcattttgctgataatccccttctagtctccaaactacaccttctttgtaaaggcgttttttcctcttctgattatagctattgcattgtacacacaacaagaaagtccatctttttatcgccatggccacccccactcccatccccgccacagtacggttgaacatcctggcatggctttgcagattgccagctctcattccccctcccccgcattgctgggcatcccgatttggacggtctctaaggtcccgcgctgccaaatcaggcctggctcttgtaggattttattgaaaggactgtaaagaaagaatgggtttcccttgactttgaaagtgacctaagaactaggtctgtgttggaaaaacttcgtttttctttctctaaaacgtcttcagaaaagcttaaaaatacaatgaaaaaggtcagttatactcagaattttctcttgattgtgataacagaaataggaacggaaataccagatcacaatttttaagcaaaaaccccaggattcctccaagactgactgtctggaagggtagggatgtgagaatctgaagtccacatacatgctaggtaggtacaccttgataaatgcaggacccatgcctgcttcagtcatcgcagagctgtggggctatgcgcagaccctcaacctctttcggagtaatattttcggaatccctgaagataaggggggacagcaatggaatctagtgaaagggaaagaatagacagtgatttaaccccctccttcctcctctacagcccgatccactctgttggcggctgcgccttgccttgggtgcagtgggacgtgtccctcccatgtttcccttaattaggaggaggcaaacttctgtcttcccctcctgccggtttcggtttagtaatcagaccacatgagtcacgccaaacacgcagccccctcccgctggagtgacaactggccagcatactctaggctgttgtccctttaaaacttgaatccaagggggtaatgatttatcaaacttgtattatcaagaaaatgtcaaaccaagggcaccttgctttgcactgacgcaaacccggcctttcccaaggagatatagaaagcgcctctcctgcctg

SEQ ID NO: 6874 - DNA, 2300 bp, Homo sapien
ccatcccacaggaccagctaattacacagagactttaaagatagagagctctgaagatcttacccagaccaccttttccccttgctggggtcactgtacttttaaggattctgggctttctgaaatcaataaaagggccttggaaacaacagtccaaagcaactcaaggctgttcctgctgaggtgtacttaaagactgcagaggagagacaggaaatggctcttataatacaacatggtgtatggtgtccttgtccacaaggcccaacaagacttgggaaatcctattctcttcaagatgtgtgattttaatgttagctttaaatgcaacacgctccgggtggaaggaaaaacacgtggactctgttagtgaaaatacagagtcaaggcagacagatttcctttgggtcttagccgaatctgagttggagtcagctgacatcagtttacctcttaatcattcagctcaacttctggattgtgcagtagacttcttgagctggaatttacctgcttgttcactttctttttcatctgccaaaggaccacaacataaagggccaaatgggacagtggcttgcacacagaaatatccagaaaaatagggcagagaccagaacagcatgctagtaaagccttctctcttaataagctgcgctgatttggtgaacttcactggggctcctggggtcaaagttgtgtaggggttaaggatataggaagtgaaagtgggtgcaagtgagaagggcacgttcttattagtgaagaggattctgaaacgttggaattggtttccaggaaacgagggacggctgttctgaggtttccttggactcctctgggatccctgttgtgaatatcaaaggagtactgctggtgagggggagcgggggcttcagagagagtgggaagactgagcaagctaagtggagttcatttggtataaatcagaggctgtcatttcagatttcatgactctacatatccagttataaataacgttcctaggtgttagtaggacaaataggaagtgggacagaagtcttaaatttgggggatcttcatagggaaggtcaggtcctgaaagggtcgcatagaggggagaggacccattctcttcttgccggcaagtagaaaacaaagcccagcccagcttttctctccagagaatgttgtggtgggagagggaaaagaaggtggaggtcccggaggaattgcacatggggccaaaatgtgactatgaaagaagagtgggcttttgataataccattaagaaaatcacgcaagaaagaaaaaaagatggttaggaattacccctatgtggcagcatctgccctgcagaatgagaaggtttgcaaatagacttcccaaaccccaaccacagctcgctccgcctcgaggaccccttttctgcacccccacctcagcgccctcttcctgcacccacaaagagagtactcagtcataggggttcaacaggagagaggagacagaaggtacaggcggtgagcagggactcagccatcatccccctcaggtccctccccacccagttgacagagcgaatcccgagtaattgttttccgagggggtccgtgcgcgctcggtggcgccgcctcggtctgggttcccccgaggaaaaatacccacccgcgagggctcggcggcttttcgactcggcggggatgaactgtggcaacttcggcagcccccaccgcggtgcggaagtaaagagggcaacattggcgactgcggctcggaggggctggagcgcgtgaagccgtgggggcgccgtgcgcctcccgctctctcgtttcggccgcaggtcctgggactccgacttcggtgctccgggtgatagcggctgcggcgcctgcagtccagatcctcgcagttctgcgggcgaaggaggcgaacggaatcggcccccagtggggagcgcaacaagccacagtagccaaaccccgcgctcctgcccgggctcccagacgaacgcagccgcagcggggggccgggccccgagccccacgccgccgccgccgcgccagcggtggggggcgggctgggggcggggcggccggggctgccttcccgggcgcatatgcgagcgcagcacccggcgctgccgagccacctcccccgccgcccgctagcaagtttggcggctccaagccaggcgcgcctcaggatccaggctcatttgcttccacctagcttcggtgccccctgctaggcggggaccctcgagagcgatgccgatggatttgattttagttgtgtggttctgtgtgtgcactgc

SEQ ID NO: 6875 - DNA, 2300 bp, Homo sapien
aagaactggagaatggcacctcccgtcttgactccactttgcactctaaaacaagttctctgaacaaggcagatttaagcagctcctcatgacacctatcattagatcttttcatatgcaactgtgtctgcactgcagtcttgctttaattaaaatgtgcctgatatcatctactcagttccattaaaagccggtgatatctgagcagctcactaagtgaaccacatgtttatttcatctaggactgttaacagcccagacaacaattgtcccacttgacaaagaaactttcaacgcagctgtttggatgctgataatcacaagccagcctttgttacctaagaagagggtggatggatgatgtggaaatgatttctgcacagaatcagagggctgcctccagaaagctaccgcttataccctctcaagctacaagatactttaagtgtacaaattgagaggtaattcccccgtctctctgattcttccgataatgtgtgtagaagaaatatgcggcctctagtgttcaaatagtgccaagtgacattgagaacccaagctccctaggcaacagccacaaccagtgggtcagatccttccatgcttccctgcctttgctgaatctgctccctctgccaagaatgccttcccactttgtccacctggaaaactccctagaaagccttgaaggtacatctctcaaatccctgaccaccactcctccctagaattaattcaaactgtctctcctccacatttccttaatacaaacttatactcctacctctccaccaccccccccatcaatctgtaaaattaaaatgcctgccagtttctatctagattcccagctgagctttaagttcctagaagtcaaggactgtcatttcctctttgcataagaaatcctggcacccagcaagacatcgtttgttgaatgagtaaagacatgaatgaatcttcccctacaacgaaatttttacaagatttaaaggggattggaagtggaaagagggaaaatacctgttcttaaagaccccttccacaagcaatgaaccctgaaacacgttccattccgtgataagggtactttggcgacttttcaaaggagtaatgagaacaaaggatttaggcatattccgtagtgatgtgcacttagggatgtgaactcactaacgggttgccccctccctacctagcttcttcctgtctgcggttcctctgtaagatgtccacgagcaccagactctcgcgctcagagccagtagcccacgctctgcactagtcttgcctgtcctgatcttcctggggtgcgcgcactccttcagcgtgtcctggttttaaaagactaacccatccggatgggcctgaactcaagaagcaactattctaagctagactgagccttggcgtctccgcagcctgggaagctcggatagaggtaaggaacggaatgggaggtttcttttgtcccttgagaaatccatattcaacattcttaaccagacgaaagccgctgcctgctcagtcctggggaagtgggaagggccctctgaaagctcctagacgctagatcttccagcgggctaactgccaaagaggggcgcctgggcgcaagcggagggaacttttgagccaaccaagtgcagacgccccttcttagccctctccagatgaacttgctctttggcctagagagaaggccacgcctctaaagaaggaaataaggatggtaaaggggggagaataaagggaaagggaatgaccacacagattctggggtgcagcgcgtacggaggatggctgggtaggattgcaaacctccgacactccccccagttgacaggccctatttttgccaatttcctacatctcaccccacctcacctcaccccagtctccccgcatctactactagctctttgaagaaggcggctgcaagccagtctccgaaccccaggggacttttgggcaagggagccggtggaagcagaaggaagaagatgcgctgagagtcctcacaactgcgtctccggaggcagaacgaagtggggacttcagacaatcaagcgtcatccttgctcccccctccccacacggaaccctgcgattatggcaagagaaaactggtttgagcttgagaaaatttccccagattgtctccactgctctatttccctcagataattgttcgcccagcccttgggagcaaagacaggcggaggagaatactcctggagttctcctgggtagtcaggaaggcacaggaggagatcgcgggatcccagggttctcccgca

SEQ ID NO: 6876 - DNA, 2300 bp, Homo sapien
gggggtagccagttagtggttacagcagaccttggacaaggcccagtgctttgatggcttaaggactgacccagcatagttccagtggtggtagccacaggggtacttgtgtcactccacccccagatccagagagagagagagactccatttgtttgggagaaagtaaggaaagagaagaagagtctctgcatggtaatccagataattcttccggatctcatctaagaccattaaggtgctacatctaggagatgcctatctctcgtcatatacaaaaataaataaaaatggattagacttaaatctaagacctcaaactatgaaactactacacaaaaacatcagaggaagtctcctggatatttgcctgggcaaaaattcttcttgtgtaataatttacacgcatagacaacaaaagcaaaagtgggcaaatgggatcacattaagttaaaaagcttcttcacagcaaaggaaatagtccacaaagtgaaagacaacctacagatgggagaaaatattttgccaactatctatctgacaagagattaataaccagaatatataaggatctcaaacaactctataggaaaaaaaaatctaacaatctaattaaaaatgagcaaaagatctgaatagacgtttctcaaaagaagacatacaaatggcaaacaagcatatgaaaaggtgttcatcactgatcatcagagaaatgcaaatcaaaactacaataagatataatctcaggccagttaaaatgacttatataccaccacacctggctaatttttgtggttttaatagaaacagcgtttaggctgaggcacgggaatcgcttgagcttgagaggtggaggttgtagtgagctgacatcataccatgcactccagcaggggcaacacagtgagactctgtctcaaaaaaaaaaaaaaaaaaaaggcttatatgcaaaagatcagcaataagatgccggcaagggtgtagagaaaagggaacacccaacactgttggtgggaatgtaaattaatctgaccactatggagaacagtttggaagttcctcagaaaactgaaaatagagccaccatagcatctagcaatcccactgctaggtatatacctgaaagaaaggaaatcagtgcatagaaaatatatgtgtactctcatgtttgtctcagcactagtcacaatagccaagatattgaagcaatgtaagtgtccataaagaaatgaatagacaaagaaaatgaggtacttatacacaatggagtactattcagccataaaaaagaatgagatcctatcatttgcaacaacatgaatagaactggaggtcattatgttaagtgaaataagccaggcacagaatgacaaattgtgtatgttcttacttatttgtgggagctaaaaattcaaataattggactcatggagatagaaagtaaaggatagtgaaagaagctgggaaggatagtgggggagtgtgggggaggtggggatggttaatgggtacaaaaactagaaagaatgaataagacctagtattcactagcacaacagagtgactgtagtcaataataatttgtgtacatttttaaataactaaatgagtgtagttggattatatataaaagataaatgtttgaggtgatggatatcccatttaccctcatgtgattattatgcattgcatgcctgtatcgaaatgtctcatagcaatctataaatacatacacacactattgtacccacaaaaattaaaaataaatattttttaaaaaattaaaaaataagatagaacaaattgagcactctcgtgtgggattttggtagtggaagaggttgtgcttattttggaccaagagaaaacaggacatgtttgtaccctccactcaatttcgctgtgaccctaacactgctctaaaaataaagtctgtgtttttaaaagcatgtgatacagagtttcacacactgaatttgtctagtgaattattatctagatccaaaatagttgtattttctactatataacacattacatcatctgtctagctatctctctcacaaagtagaatgtctgtgaaatagaacacaaggaaggagagagaattatgacccaagcaagaatcatgggtccagaattccacccaaggaagctagttcaaagccagagaaagagcacagcttttcacacaattgaatagatctcaacttcatgattttggtattgaagatgctgacagtagccagtggctctgtgaaggcaattttccaacctaccattcttggctactcctggga

SEQ ID NO: 6877 - DNA, 2300 bp, Homo sapien
tatcaatagaatggtgggtggggaggggaatgcagtagcagaaaaatgaagaaaggtcaagacttctttggtcacctcatcctaactttcaaatcaccccatccttatcctaaactcagagtcactgatatggttcgctgcgtggcatgcccagggaattgtaataattctcaccctgaattgtaataatccccacgtgtcaagagcagggccaggtggagataataatgggggtggtttcccccatgctattctagtgatagtgaataagtttcaggagatctgatggttttataaatcggagttcccctgcacaagctcttgccctccccccatgtaagacgcacctttgcttttcctttgccttctgccatgattgtgaggcctccccagccatgtggaactgggagtccattaaacctctttcatttataaattacccagtctcaagtatgtctttattagcagcataagaacagactaatacagtcactccctcctcatcactcaaggctctcagctgagacctctacctcactgttagttcatcatcagtcttatttccccgccattagacagtgaatctagtctctcaattattgtgtagttggcagttgatcgggtctcaaaaacacagaaccaatgcagaggggcctgtgaggagtagaacgacccattctgcttgaggttaaagttctggttggggtgggcaggaagtggaggggggaaacaaagtaaccctttgaaatggagtagggatcaatgtaatatgagttaattttcttttcttttttttttctcttcttccttcctccctcttctttttttcttttctttactttcttttgagacagggtcttgctctccatcacttaggctggagtgcagcgggatgattgtggctctatgtagtctcaatcttctgggctcaagcgatcttcccacctcagcctcccgagtagctgggaccacaggtgcctgccaccatgactggctattttccaattttttgtagagacaggggtatccctatgttgcccaggctagtcttgaactcctgagctttcaagcgatatcgtccagctgagatgatgacaggcgtcatcccagctggactataatatgggttaatcttaatagcagctaaatgtttaacacattctgtggcaaggactgtgcaccgtgcttctctcaacagcctaggaggtgggtactattatcattctcctttaaatatgtggaaactgaaacttagagaaacttgccccacactatccaactcttaaggggcagaggctgacttggaactcaggccacaagggatgaccttcccccacctgtagagggcagagatcctgctgggaacccaggaagcaggcagggccaggagaaaagtcaatactcccgctccagacgctatggggaaggggctgctggcaccttggagtctcgggccatgagccggccttaaaagggaggggttcctttaagggagagggacttttccccacgagaccaaaagtaactcccaactgggagaggggttctctccgagtggcacgcatgagcggatcgatgaagacccggccaaccggctgagggagcatcgggaccccctttggggatcggaggaggaggattccgacaggagggaagcggcagccctggggaaccaggattcctggtcgtgggtggacccagtggaaaaggacgtgcgaagcctgtacagaatggagcaggccggccaacagggccggggggcggcgggtcccgaggagggacgggaggctgcatgtccggaggaggtgcgggaggcggcagagcagggacctggggacggcttgagcggagaggagggggccagcgtggagccagccgggccggggggcggggagatggcggtctccgagggtggggcgccggccggtcttgcggtctggaggcggggaaagaggcgtggaaacagggacgcagcgaaggggaaaggaaagctgccagagggcaggagtggaaaggatcctggcgagcaccgggaggagtggcggctgcgggatcagctgccgagcaggcacagggacaggtgcctggagaagtactgggagagcgcccaggagcgctaccggctgagggtggggaagcgcagggccaagcgcgcgaagcaggttgtgggggaccgggtcgagtggaagtacccgccggagaggaaggccggctggctgtggcgcccagagacggtggagtccgaggaggaggagaaggaggcctgcagaaggaagagcaggcccttagaagtccagcag

SEQ ID NO: 6878 - DNA, 2300 bp, Homo sapien
ctactgctatctcttagaatttggaatattttcttgttaaaatattaaaatttctacttcaagccacaggggaaagtgaaaggggtcacaggttaagtgagaaattgagttaagtagagcagcacagagcacagtcgcttctgctctttttcctggcaagttagcagtaagatcggaaactcaaatcaaggcatcagcctcttctctgagtgttctctccagggttcaagctcgtttgaatctgttgtacatagacatcatggctgacgtcaagcaaaagaccacattattcagtcagcgctggaatgatcactgagatgagactttcattatatactatcttcaaatttggagttctctcccatttttacttttctctgctatcaacagtgagaaaatcatagcagataaattgcttttaaaagcacctaaaaactcaccattttcctcaatgggaaaaaaaatcaagttcacattacaggttttgtaggaatacagctacatttcactaaaatgggggagttatctgtgtctttaaaataatttgtgatactcttccagtattgctgaaaatgtcatgatttggctggatcagctcatgctactgggagatcatcagctcaggaaaacatacttttctacatttttgtgcttcatgatcctctattgcagggtgaagataatttaatattttgttatctttagaattcattaaatgacagatcatgatcatgcattttaaataaaggagagggaaaatgtgtattgtttctgccactatttgctaattacattattttcaaaattaatatagccattgaattaatgagagggcaacacaattctgttggaaatcatccctgcccttgacatgagcttactttctttaaacctgattgtaaaacagatgagttctaatggcttatagcatggcagatagtgtttggagatgagcataagtttcttcagtcttatttggtgtattagtttgttttcacactgctataaagatactacctgagactgggtagtttgtaaaggaaagaggtttaattgactcggttcacatggctggggaggcctcaggaaacttaacaatcatggtagaaggtaaaggggaaacaaacacgtttttcataaggcagcaggagagagagagtgcatggggaagtgccacactttaaaaccattagctctcaattggcgaggcatggtggctcatgcctgtaatcccagcactttaggagacagaggcaggtggatcacgaggtcaggagtttgagaccagcctggccaacatggtgaaaccctgtctctactagaaatacaaaaaaattagccaggtgtggtggtgcacatctgtagtcccagctactcgagaggatgacgcaggagaattgcttgaacctgggaggcggaggttccagtgtgctgagatcacgccactgtgctccacctgggtgacagagtgagattccgtctcaaaaataaataaataaaaccattacctctcttgagaattcactcaataccaggagaacagcatgggggaaaccacacccatgattcaatggcctcccaccaggtccctcccttggcacgtgggaattacaatttgacatgagattttggttgggacagagtgccaaaccatatcatgtgggtttgaatttcaaattctgtgtaaccccaagacaagaatgctgtctctctgactgtggtaacaatagcttcctaggcttttccagtggttagtttaatacaaaatgtgtaacagaaagtctagcacaaatccatagttacttaatattggcctactatcgccagaatggggagcattctataggctcccagaatgatgtgactagatgttcacttgtcctagggagtacgaagttcaaggaaaaaaataagaagatgcactaaacatttttttttaacttaacagaaattcctcgaacataccaggagtatgagagcagtcttaccttgaaaatgttcctgtttcagtttgtaaatttttactcatcctgcttctacgtagctttctttaaagggaagttcgtaggctatcctggaaaatacacatatttatttaatgagtggagaagtgaagaggtaagaatttccttgagagttgaggtgtgtagcttcaatacctcagtattaacaactttctgtgtgtcaagcactgattcacatgctaaaaaattacaaaatatatctaggcactgactctatccacagagagtattgttcacagatgaatcctgtcatttgataaacttctcagtttattt

SEQ ID NO: 6879 - DNA, 2300 bp, Homo sapien
gatttatattgcttagtgtcccctcatatttgtgtattggagacttagctatcatgtttactgatggtttagatagatctctagtcatttgtggtgcaacttaagctggagtgcttaggaaaatcatttacatatcatcaccccagcttcacaaatatttgttgtaaattctatttttttgtataacttcccagaattccaaaatcattaatatctctaaataaatataatttaatgaacttagttattaaagatttgaaaaatacagatattttgaaaacacctagataagtcaagtcctgaatagcttgaatcttttaatctttttcttttctttttttttttgcaaggaaatagtttaatgagggttttttttttgtctccttatacttgatcttgagaaatagatagtattctgaggcatcccatggttttagagaaaaattaaattcactgttttattgaagatacatattttaacacaaatttatcaaaaaagataaaaatgtcttcattatccttttctttattatatttcacaatggaaataatttgacaactatcaaacttaataatggcagatggttttagctactttgacatttttttccagctatccattcagtgaatacatagccattatatcatttgaactattcaggtaatattcttatttgattctcaatttagatccatatttttgagattttgtctcaggatcctaagtaaaattgactccctctgttggcttatgtgacatccaaggttttgaccttgaaaatgtggttcaaggccagtctgttctgtaagcattggcctgaattgtacttaagaagtttgtgattcatgtgaaagagattaataatttacattaatctagcagttttcttgcttgcttaatgagataaattcattgatgctgtacctgtatatataaagccaaaactcttacatgaatgtctttcaaaatttatgctttaggagaaggacatacaaagaaaaataaaataagatttgaatggaatatatgtaaattaaaataaatctttttaaaaataaatctttaaattatcaattacaatttgttggcaagcacaaggtatagccacatatttcatcagtatattggtatttcagtagtgtattgtaaattagttaaataaagatgcttaaaattccaaggaatttatattaaattaactgtattttatttaatcaacttcactgagtttatagctattcttttttcttctctccatacctcccacctctttttctttatctctcctttcctctattcttcattctctccctttctttctttcatctttttcctgtcaggagttaaaacaaacacatgaacaatgtaattatgtattttgtgtgcacatattttatattcaagggagcctaggtgtcttggaacaccacaagcataagttaaatatgttgaaatctttcttccctgcaatactggcatcagcgtgctggacaaaacgtagcaaactagaagtaacttgtgaatttttaataaagttgtcttccctagcagagctaaatgcaccattctccctgcaaactctggagatgatgacatcttcccaatggtttccatagcatccgttcctgaagagcccccgtatggtccttggtcagggcgatccgcccagctcccctagaaagttggcaacctagctagccaaaagaagagtcccctattcctgaaacttactctgtccgtggtgctgaaacattgtaccgagacccgcccagacgggcgctgtcagccgctgaaaaaaaaaatcttccccgaggctgcccaaatcagaactgtgtatcttttatttactcacgtcctcaaagagcagcaagccttctccatcttaatttgactctaccgcagagcagacttacgctggcgtgatgggaggagatcatgggcagagaggaaaaactaatagcagcattgctcacctgagacctgagatgctcccatgagttttgaatatgctctgctccttacagcaaagacaccatttttaaaagtaccattcttttgactttgctgttcccaaggcttctgtgatattccggcccctccgtttaaaagccatcagatttgagagcaataagtcttcaaaaccgggaatttacattgtttttcagctgaccgacttccaggaaaaggactcaaccgcatctacccaaataccgtggcactgcttgcgctctttgccaccggatcctccccttccaatgagactttctgattgtgtctaccaactctcctattaggaaac

SEQ ID NO: 6880 - DNA, 2300 bp, Homo sapien
atacaggatgtgacaggctcattctaatgctactgatcaaaaatatcctaggaaattctcttttaaggagaagggacccttaggatattaagatgatcaaacaacatataaggaattctttcattcattcaacaactattgagtgtctattatgtactaagcactgtgccagtgctggagatacagagttctctgttctgtagagaagagtctagcaggggactgtcatgggctgaatgttttgtttaccttcccaaattcatacttggaagccctaacattcaatgtgatggtattaggaggtgggctttttgataattaattaggtttaattgagctcatgaagatggagctcccataaagaggccttattattagctttcatgagttcccttattataagaaggaaaaaaataccccagatatttctctctttgccatgtgaggacacaatgagatggtggctttctgcaagctaggaagtggactctcaccaaatagtgaattttcctgactttgatcttggcctcccaacctccagaactgtgacaaataaatatctgttgttctagctacccagttatggttttttgttatagcagctcaatttgacaaatacgtggacacaagcattcatctagcagtcacacagatatagaattacagaccacaggaataataaaaaatgtacactgtgcttttaatagagtatattgggggccccttgggcagtacatgagactgcttctctgacgatatgacaaactgagccctgagggactggtaacagttaaccaagtaaaggatgaggtagcctttcaggatggggaaagtgaatgcactgaggtcttaaaccaagagggagaaacccatcagctgactgaaagaaaagctaagccaaggaatttgaatatgtagtctagagaagagtggggtatggtggtgggatgggaatggggtgaagttgagcaaggtgagagttccagataacttgtcctatggaagagggactagactgagacagttccattgtgtgaaagctatagaatgatattttaatttaaaatatggaaaacgtcctgcttcttgagtcagtgttttgaaggcagtaagcgtctgtctctagatccatttgcatggaggctgtatcacaacttggttagaattttgtagagatgattcagagtgttggaaatgctgaatatttaagtccatctcatttaggagattttgtgaatcacttactttcagttaaaaagaaaaagctagtcctcaggggtaaatatctgatgaaggtacatactattaaaaattccccaaagacaagagaatcttggaaattcttttccaataagacaattgcaagcttttaagaaacatcagtcctgctatacttatagagtcctgaaaatacagcatttacatttttaaaaagccaccaggacatttaattgtattgtgcttcactttactgtgatttgcagatattgcttttttaaaaaaattgaaggtttgaggccatcttgctttgagcatgtctatctgcaccatttttccaatagcatgtgctcactgtgtgtctctgtgtcacattttggtaattcttacaatatttcaaattttctcattatatctattatgatgatctctgatcagtgatttttggtgttactgttgttacttgtttggggacactgcaaaccatgcccatgtaagacacaatgagatgttggggaacttaatccctaagtgttgtgtgtgttctgactgctctgtgggctggctattcccccatctctctccctttccttgggtgtccttatttcctgagatacaacaatattaaaactagcccaattaataaacctataatgacctctaaatgttcaagtgagatgaagagttgcacatctctcactttaaaccaaaagctagaaattattaagcttaataagaaaagtatgttgaaagctgagataagtggaaagctaggcctgcaccaaataattagtcaagttgtaaatgaaaaggaaaagttgatgaagaaattaaaaaggctattccagagaacacagaaattgtaagaaagtgaaacagccatattgctgatatggagaaagttttagtgatctggatagaagatcaaaccagctacaatattcccttaaaccaaagcctaatctagatcaaggcccttgctgtctttaattctatgaaagttgagagaggtgaggaaatagtagaagacaagtctgaagctatcagaggttggttcatgagatttaaagaagaaagacatc

SEQ ID NO: 6881 - DNA, 2300 bp, Homo sapien
aaaaggtaaacaggcatattaggagaaaaaaagccaaataagactttttaaaaatcactgaaatttaaaaccaattgatagcttaaacctcagatcagacagaattatcaagactataccaatactacttagggttataggcaatgttgatgacataagacatcccgagcagtgttcataagagaaaggtgtattcctctcctatattaacaggacaagctaggtaggtgggctctgttttgccattctgtacatgtgacttcatctttgggtctacagcaattgtcccagtcatcttcagccatatgattcaaggtagcagcaaactagcagcaaattaactttctagcccattaaaagggagaagcagagtattaagggcaaataacttcagatttctagggaatgaatattaagttgtacatatcacttctgcttatataaaagtaaccaaaacctagcattatcgccacatgtaactgtaggagaaattgggaaatttactctctatctgggtggccattttcagctaaaacctggtggtaggctaaaatgaagatggggaatattgatcttgggatataacagcaatttccaaagcaaaatagaatgatatggagatagaaactgggacagagcggttacatgatatgagtagtgtgagaagatctaagatctaatataggcccgatcaaagtgacaggaatgatttttaaaaagtggaagaaaggaaatattggggaaaaatggctggaaatttttcagaatgaagaaaaacacatatccacacataaatgaaacacaacataaaacaagcaagaaaaacagaaatttacaattagatattctgaagtgactatagatactgaaatcgggaccaccttaaaataaacagaaagaagaaatcactctacaaaataaccacaagtagacgaatagctttcttatcaacaatgaaaaccagaaaagagttaatatctttaacatgttaacctgaaatcaggaacacagcaaaactaccttccaacaacaacaaggaacgatcttagtaaataaaaactgagtttaccaccaagagaccttctccaagggaatttgaggtacaatcatgggaaacaaaattgttaaaccaaaacactggataataacttgagagtttatagataagagatcagggttaaagtttcctaaggtccatagtatcattaagaaggagggttaagatactaatattagatatttttaagttaaatatggtaagttttgagagtaaaagcatgggtatagaattaacatcctaactggtagaggggaaaatatcatgaaataagaagacaaacaaatatttagtcaattaaagaactgagaagtgaaacatagagaaatcaaaggaagtggaaagcacaaaataggatagcaggaaaaagtccaatcatacagtgttaatatatgacaatgataatagaaaaaaatagactttaaagcagaaaagcagtcactacaaacaaaaggttcaattcattaagatgatataacgattctatatttgtttgcatgtcataaaattgctcaaaatacataagatgataattgataaaatttcctgaaacaatgttacaatgggagatttcaatagtgctccctcatttgataggacatagggaaaaaacacaaaataaatatctctagattttataaagaagttatcaaatattctatttttatagtcttcctctcacttttttctctctcagtgtatgcgtagattcctaatcttttcaagtccttaagagaaagtatataaagctctaatgctggtttcatttattcaaacactacaagtatctaccatatgctggacactgtgctaggcttctggaaataaaataaatgacagatacggcttccactttcatgttgcttttgtttatacccttgggcattttacttaatcttttagcgtatattcataagaatacagttttggtgtgaagattaaataagattatgtatgtaatgaacatatggagactaaaataacagaataataaatggtaagtataaaatagattttaaaatgttatttcttaagtctattgtcaatctttacaattttattgtaaatcatagtgtgagatacagctgcaaatatagggaagtaagttcacaaactgttattttctaaagctaaagctaacattaggccttgctatggtagaactcttcactgggttgtttcttaaaaaaaattcacgcaactgacaggaggaattgtctttattcttgcattaatgataaat

SEQ ID NO: 6882 - DNA, 2300 bp, Homo sapien
ttttccacctccttaaataggcctggttctttcaactcagatacctgcaaaaaaaattaaggattcctgtagccttgaaggctcctctgaacactcagctttgaactttcaactgaaaagttggtttcttttcctttttttttccattttcctttttttttttttttgagatggagtcttgctgtgtcacccaggcaggagtgcagtggcccgatctcagctcactgtaaccttcacctcccgggttcaagctattctcctgccttaacctcccgattagctaggatcacaggtgtgcaccgccatgcccagctaatttttttgtttgtttgtttagtagagacagagttttgccatattggccaggctggtctggaactcctgaccccaggtaatccacccgcctggcctcagccccacaaagtgctgggattacaggcataagccactgcctccggcctgaaaagtcagtaattaaagagaccttcctatcccctaagacttggtgaccccactcaatttcatcctactatcacatttgaggttattcatttaatgtctctcttaaatggtacaagatgaacttctccactcatgctaggactgcatttattttactactaaatctgtagcacctcatactatgtatcataataggtgttaaatataagaataaataaatgaattagtgatgcctgtacatttgctaaaggcaggctgcacacttggttctaagtttgtagtagccaagaaaaagaattttaagattcatagtatccttaggataaaataaaataacgatttcaggaccaagtaagagtttgagataactaataaaaatcaaataatagccgggcgcggtggcacacgcctctaatcccagcactttgggaggccgaggcgggaggatcacttgaggtcagaagttcgagaccagcctgaccaataaggtgaaatcccatctctactaaaaatacaaaaattggccgcgcctgggcgacagaatgagactccgtttcaaaataaataaataaatgcataaatctgaattaacagcatgcacatcactgctttactttctaaaaggtgtaggaatgcttattttaataaatgaaaaatgactcttcccctcttttaaatttgtttctcttcccctttttgttaaagtacaaaacaaaacaccttcccccacttttcgaatagttttggctgtgtctttaggactggaaggaaattcagctcaaatgaattactatattatgaacttaagtaagaattgttgtgcattttgtacagaatgcaactcctaggagttgacaaatgtttgttaagtgcatcagtgagcgacataggaccttctcctccctactctcttgtcacggtttttatttaatcaaacatttattattgttcgatgctcttaaatgccatttccttcagctgattatttgtatgacagaagagtcaattaagctattttgtcctaaaaattacgaaaacgaaatgtacaattgtgaagtaaaattttgttcctttgcaaattttaataaattattgaagtttattttttgtttcaaataatctgggcttcagttctaataatggaaggacaatgtgaaggcccagaattcagcatagcgcctggcattaataggaggtcagtacatttttagtacatgtttctcaaatagatcttaaaatttcatttaagagcgtttcctcacgtcacagtatgtctctggcgttacttaattttgaaaaacctcaacacagattctagttttaggcaaagctcagaaaatttctacttaaggatatttccaaagcgaaaggaagcgcggagacgttcatgactggcatcatctcgcacgtggttccggaaattctcggtaggatgccctacatctgctctccctccactaagaagaacctctttgtgtggcgaaagtaaaagtattagggcttttaagttgcccagagtcaaggaacacggataaagacgctgggagattgacatgcatttcgaccaatagcattgcagagaggcgtatcatttcgcggatgttccaatcagtacgcagagagtcgccgtctccaaggtgaaagcggaagtagggccttcgcgcacctcatggaatcccttctgcagcacctggatcgcttttccgagcttctggcggtctcaagcactacctacgtcagcacctgggaccccgccaccgtgcgccgggccttgcagtgggcgcgctacctgcgccacatccatcggcgctttggtcggcatggccccattcgcacgg

SEQ ID NO: 6883 - DNA, 2300 bp, Homo sapien
acctgtggggatcagcacactcagcaagcggtccccgcgcattagaggtgaatcagacacttgaacatctgtccacttcatggaagacgtttcatctcagaatacacgtactaataaacaacagttggagacaattgtctctgacattcaacataatgctgagctgaggctgaaagaaggaagggtggaattgtatttcctttggtaaagcaaaaacagccgtgagtacagcctcttctaaaaatctgatatttaaagagaattgtaagacatcaaaatgttcaatttggaatgaagagtggccgaagttactggaaagctcgtgcctccgtctgcaaaatcactggccaggaaagcaaaaacttttccaacacccaattttaatattgtgctaaagctattgactctgttaaacctctagagttaaatatgatcccctccccagcccccaccttttctctcttaggttagtgtctgggggacaaggagggggctggagcttggccccaacctcggaattgctgccaagggcttgtaatacaatctctccccgtttgaagggtaaatcagtgtcaactgcatttgcgtccaccaaaaaaagtaagcattttacttccgctcggtctatgaggactgatgaaatgtaggaaatctgtttctggcagggagaaaaaatcgttttcccaaacagcactaaaaggagccatcagagaagtatgaagaggggtagtgcggctgtagctgctgccgctgccgccaggctggtggggtgcggggagcggctgctgcaggacctgtgcctggagggggccggccccgagaagctgcaggagcccagcccggagcccaagcgcctctgagagccgccagcagcccagctcgggacgcgggggtgagcacgactggctggcccagttctgcgccaacgccgccgcagcgtgcgcgcaccgcagccggggctcacgggagcccctgcctgtctactgcacccggggcggcgggggaggggagaggtcattaaaaaataacctcaggaacgaggcggggaagagtgaagagccgcggacagttggacaggctctttctctaagagtgggtattcactgcagggggtgactttctgattctctggaaacaaccatgtgttccttatccctattgcggaacaccccggacaaccgcagcacgtaagcccgctggggtggctctgccaaccagggacagagtgaggatttttaatgaacacatcgattataaatgcacacatatgcattcgtgcacaagagtatctgtaatgcatgctcagcattgtctgttatggtggggtgggatagagccagaatggtcttaaagggctgatcctgaatgttttacttgagtcgttgaggccaggatgggaggaaagagcgccacatgtgtgatctggggtgatactcactgtgtctgatgagtttgatgaaattgagttttatgtgaataaacaaacgctagccgatatatatcaacacactttggggagattttgcgtggtatcgttctttttgttcagtccaaagttgagactggaatctgaaattgtttggggaacaaaggaggcaattttgctttggagacattatttatactggcaaaattaaattctgtcaactcagtatggtaaattaccattaacttagcccaggtatccgaagaagtttccattgtcttgaatgaagagggagcaaaagcgagggttaacagattctgtttctacattctaaaaacaattgaggttgggggagggttgttaattcttttcccagttaacctttttgaaatcacagtctttaccctctccatcttcttcatcttcatcctctcacctccgtgatcttcttacagtgaagagtttgcaaaactttattcttataaaattatctcctccaaccctctccaacaaggttagatcagttgtgtatgagagatcttatgccaaggaaataagatctgcttgtgcacaggaacacccatttgacatcctagtattaaaataaaggcttagacagtttggatgtaccagcctggcagaggaagtccacttttcctccccacgtatcccctgagattcacagaggcaaggcagagaacaagacctgtgcttctttactccaaactcttagcagtgtggacactgattaactgcagctggggtctgatttgcccagcctgtctttgatattgatcaatgaactccttctcaaggaatgctttcctctaactgcggtgaaggtggtggctctggtggttctctccaacatggg

SEQ ID NO: 6884 - DNA, 2300 bp, Homo sapien
tgaatcatgtgcttatatgtattacttaaatgtttctgaggccagcaggcatataggaatcttaaccagctacagggagaagttttgtttttctaggactagacatattttttttttaactggggcagaaaatgctttgggtttttcatgtttaatcacagaatttggagaaaactttaggactttatatggataacatcattattaactatgaaataataaaaagtggtgttctgattcccataatgacaatctaataatgtatgacaaggtgtattgaaagcagttcacattttcaatggttgactttagatagatatatataagatgttttcagagaaaatttatggtatttttttcaaaaattactcgacagtaatttaattagaaatgaaattgtgcttttaaatactatatttatgataccttttaggtacttactcatactcccaacagtcttttctattactacagcaaaatatttgagagatgctcccactttgcatttttctaaacaccagtgtcttatttgttcttcaaaagcaatatttaaaataaattaacttatgttaagtgaattagagtttgaggttaactggaaaggaatactgtgtagagtttcaaataataaaaccaaaaggagaatatattacttattggtaactttaaaatgccataaatactgcaatatcactgaaaacctcatgatatcatataaacattacctcttgcctattgcaagtattttcattttcattgtcatacagtcataatgcatctggttatttcataagcatatttatatacagcgtagaatcctgcatgttattaaacatgactattacattaactgcttcattagttcttccgtagtcttacatcctataaataatgcatacaaaagtgctatattctgtccgggcatggtggctcaacgcctgtaatcccagcattttgggaggccgaggcaggtggatcacttgaggtcaggagttaaagaccagcctggccaacatggcgaaaccccatctctactaaaaaatacaaaacaaacaaacaaaaatgccatattcaaggccaaatatatattcaaataccttttctacaacccaagtaggggattgcactgctcacaatatgatcaggttaatgaaagcatccttgtttttatagatgtaagatatttaagtacttctactctaaagatactttcaaacaaaacgcagcatgtaaaacaaataaagtggaaagataaaaaacaagaaagagaaagagattgttgtagcaatagcagaggacaaacaaacacctctggcagcatttgttagaactatgatgcagtgcttgggttatcatcaatatgggttcttggctattccattttgtaaaaatgtgtcattacagaaagagtagtggtcttgggaatatgaagactcaggttcaagcctagttctgtcatgacctagctgtatgatcttggtgaagtcacttatcctctatttttttattttttttttttatttttctttttttggtttctttgactgcaagagagaagtgtggtagagagtctttgggtgtacctcttcccctgcttctcacccagttctctaaattgtgagtccatgattgcttggccgtctccaaaaaagaagtactttgcttaaccttttaggctatatttttaagggtaatgatcatgtgtttacagtgagttgtaaaaatgctgtcattgccagtgttcagtcataaaatttggtgaaaatctatggttttaaatagcccaaacaatgggagttaacaaattgggcactaacattttaactttttctcgtgtttcaatatgtggaatttcttgcttagaagctggctctttccaagtatattgtttcatacaaacttggagtttcttgtttgattttctatttgacctttgattgctgctgttttcctactaagtgtttggccaaaagtgagagggccagtacagataaagcaaatagtgtttcatggggttaataattaataaactgaactgtcatcagaaaacccgcggatccagttcattataatgtcatgatgacaacattttgtgagagaagtctgtataaaaagcaattgctcttttgtttccaaaacaggtattacaagtggataaataatgtgcactgctctgagcccaaaggtacgcagtggacctggcctctctgatatgcatcagtatagccaatggctagccagcagacatgaagctaatttgctaccaatgaaagaagatctggccttgtggttaaccaatc

SEQ ID NO: 6885 - DNA, 2300 bp, Homo sapien
ttgaagaaatttgataagaaaaacagaaagacaacaaaaatctgtccagtgtgcaaaacatttttttgtctatctttgctttctaggtttttctttgggggtagggagttggtttatttttggtaacatagaaggagtgtttctacaacagccttacataaaacatcatttcttcactgggtattttgtaactatacaaattttcccctaaacttgcttcacatctgtaagtattttacaatgcacagccattttaaaaggaaggatgttactaaaagagtatctgaatttagagaagatatgatagttttcatatattaatataaatatattaatgcaattcatataaataaggaaatcattttgaaaataattacatttaaatgtaaatttttgggatatcaaaggccatttgcgttagaaaatctagctatggacatctatgaagaataaagtccaaactcaattatctaagtaggcaaaacttgatctttaatcttacctctttttgtcttctctctgcagcctctgcaagctttgctcttttctcttcctaaataaatgtgtaaaaatatgtattaaaataacaaacattattattaataaattattcacatttatttcataggcactataacaatttacaaaaatattcggtactggccctaaatgtcccacaaagaatgccactactcaactttttgaatttcattctcctaatcaatatgccttcaaatcagcacatgctaaaacagatacaaggtttacctatataatcatttatttactctcttttttaataaaaaggcctacaagctagtcagggcaataacaaaacaaataatgtttacaaatacaaaaaggaaaatacatggtttgttactgccggttaaaatggagtctgaagtaacctggtgtttttaggaaaggttaataaatgaagtgggctaatctcagtgtgtaggagggaaggactggagtaatttcatgagaggtattgttccatatcagaaaacagtgaatgctatttttctagaccatgtactacttattataaagccctttttctaggtgctgggatacaacagtgtaaaaacatagataaatgtctcctcccaaatgaaacaaattccaattgcgggcgcacagacaaatataatgaagtaagtaaacgtctgtcagatggcatggcagataagtaatgggagaatgggtgggtggtattgtggggaatatattttgtttaacgtggtcagcaaaagcttcactggtaaagtgacatccaagcagtgagccgtgtggttatcaagggaagagggtatagtatgaggatgggggggagggcttaacaaatctgacatgttatattttatcgacagccagaacaacaaaatcaacttaatttaaaacaacagcagcaacaaagagaagctgaactttcccacatcaaatttataagtactaaatttttagtatctatagtagctgaagagttaatgtacttcccaaaaatacttcattttcttcaactaatttttagctagagaagagaaacaggtttatgttaactccctgtaaggagtactaatgtaaagatactgttaacagaaagctacaaaaagtgtacatgtattgtaccacacacccactagctacatttgaatttcagataagcaatgagtaatgtttttgtagaactagatccctaatattgcatggcacaaaacgatattataaacgtattccttgtatatctgaaattcgaatgtaactgggtgtccagtatttttattaaatacgacattataaattggacactctgtactacatattcttttaaagggagaacgtaaaagaatgagataaatactaaaaagaaatcattaaaaaaacatatccgataaagctcaggcgtataagcgactttccgagcaccttcttttaaaagatggtagacacagttgaaaacgcacatctcctagacgactaaagagctcccggagaaagcaatgtcttttcgcgccgaattccatctaccacatcccccggaatgtcccacgcgtaacgccctctgcgtgcgccggcgccctatgaagatccggcgcagctaaagtcagtggaaggtagaaagacgccacagccgcctttcgacaactttttgttacaaaagtggagatctacacggaggcgacggcctaggtcgctctgacaggacccaacgaccctcctgacgcgtccacccgtcctcgctagcagggtcccccagcgggctctcgacctgcgccaccaggtacaatggc

SEQ ID NO: 6886 - DNA, 2300 bp, Homo sapien
tttatatagcctgtcagatacagtccactacacacatgttaattgtttttatctaaaagaaatctaaaggaaagaataacacttgtatctcttgacaagcagaaagctccatcttgaagccaagtgcctagacagtaaactaccatgaagacggggagacaggtgccactctgggatgttttcatttctaagagaaagccaataggcctccaaagatattctgaggatacaaaactggcaagaggcttatttaggttctttctttctgatgcaaaactggcaagaggcttatttagcctcccctgccctcccctcccctcccctcccctcctctctttcttttctttcgacgcaatctctctctgttgtgcaggctggagtgcagtggcgcgagctcggctcactgcaacctccgcctcccgggttcaaacgattctccctgctcagcctccggagtagctgggattacaggcgcccaccaccatgcctggcgaagttttgtatttttaatagagaaagggtttccccacgttggtcaggctggtcttaaactcctgacctcaggtgatccacccaccttggcctccaaaagtacaggagtaagccaccatgcctggcctttttttttttttcatacatttcagtgagacagagatagcgcttacaatttcacgttttctaaacacaatgctaaagaggaggtgggtagttatctttctctttttgcaacagagaaccttcactttttctttatatatttttatttacccttagaaacggcccatgcaatcgaataatagtattaaaaaagcatcatcccctattatttaaggaataaactactgtttcattcaataacatggaagaatttagaaaatattatggcttttgcaaaacatattgtatatttcatttatgtaaaacttaaagactatagtgatattaacatttatgcaaaacttaaagactaaagtgatattaaacaaattaatagtttcctggatctaggtataggataaagtattgaatgggattgggtacaatagaaggtttttgggtgatggaaaacttacatatcttgaatgtggtgatcacatgtttgttaaaactcagtgaactctacaatcaaaataagtgcataatattatatgtaaattatacatctataaaaaattaaccagcaagtatatcaaaaagccgacaatggtttctgagacgctgtcactatacatcctacctttttgtaatgtttgaaaatttttacataagcagaaataactaatagaatgcaaaaataaaataaaataaaataaaagcatttgtgtggagacgagatcagtaactttagtatcacctgtgggtttactggaaatgaatctcaggtcccaccttatacttactaaatcagcaagtaaattttaactagttgcccagctgattctcatacttattaaaatttgaggagaatcattaaaacatttctcagtagatgaaactttattatttctctcggaaggataaatgacttctaaataccagaaactagtggaaatgtcaactaatgccacatttatgacgctagattcatcgtcataataatggattttatattctgccctctgttctggaatagcactgtcactaagaagggagaaaagggtgctgatgtttacttggaattttggctttaatttctaggacaccagagtcccatctcataaaaaaaggtagcatgaactacccagagctgtaccactcattcatttataaatggtaaggcaaggttagcaggaagagctttggaaccgtagcgaagcttttccatcccttccctgcattgctacccacagcaggtgtttcctggaacctaggctttggccacaagcccagcggtcgcggggcgggggtaggcggagctgtgggtgaggaaggggcaatgccttaagggggcgcagctgagctgtgggactggttggtgtcgcgagaagaggggggcgttgccgcagagaggcgaggcggggcagagctgcggggtgggggcggggcgttgccgctggggcggagccgagccagtggagggcggtgggggcggggcaagcgcggaggaccagggaccggctccggaccgcgcagttagcgccgcctggcctgggccggacccggtcagggttctcaagctgtcgtccctatggggctgtgttttccttgtcccggggagtccgcgcctcccacgccggacctggtgagtagagcaggtccctgcgtccgccgggccgcgccttgagcacctgtcctcgggt

SEQ ID NO: 6887 - DNA, 2300 bp, Homo sapien
ctaccttgtaagtttggctcaaccacacagctgtttttaacttctgatcagagtcttatcttccatttgtccccatgatgcagatatagcctatggtgaaacaaaagaagtattaataaaaaggagaagtaatttgcttcaaacatattctatatcctgtattttatgctttggctggttttctaggcacacctttttctggactcctgttaggcaaaatcttcaatggtaggcccacatagtttgcagtgtgattctatagtgtagacagggtcagagtaattaatcaactccaaataatctgcaatgagtcccaatgtgaaaaccgttctgtcacaactgggtagaactacagctgctgccacactgaattgaagaatccgaatatattatttgacagctcctatagtgcattaaatgcatagactttaaaatcattcacacctgagtttaataacgcaacttttccacttatcaactctgtgactttggaaaatatgcttaggatttctaaatctgttttctttaccaagacaagtataaataatatagaatacctgtagagctgctgggaggacaaatgagatagtgcttattatcataaatgattctgccaacaacctatatatctttgtggccgcaccctttctattcaggtcactcaacttctatctgccagcagctttatctctttgctggaggtgtttatcttgccactagagcctgctttgcctatagatgtggaaggttaaaagacctggagaattattcttgggagttattggggtgatcagacccaacaccaggtcatgggggtgacgaagtccggcggagtcaaaggattgagaaaaagacagtttgagaggtaaagtgggatcagggggccatcgctagagtatggaggctgcaaaggccccgagctctgggagcccacgctatttattggtaatccaacggagaaacaggtggtgagaatgtggaggtcgaaagggcatgttgcattaagcacatgatttacagctgtgatggtttagcatttgctctgctacttgagatcatggagggcaggttcttttaaatccagatataatggatcctgggagagcaaggagcaaggagccagcaagtctagaactattccagagccacgagccctggattttatccaagccacgagggattttatgccctgggcttagatgatgatgcatcaggggagccttccaccctttagcacaaagcttggtgttccaaaggccacaaggggttttagatcctggaccccggacatgttccaacacttttttacattatgtcagacatgcaagccctgcctcagcttctcccaacactcagctttttcccaacatgccccctcttctcttttttgtaaaagagaaggtatcattattactagctaatattattactagcataaaaggtggccttttaactaagcaaggtgattgcaggctgtgcagcccttcattaccagttggtgatccagcttcattttccttagcccttattcaaactggagtcactctgatttgagtacttctcacatatttcccctttcccttttacaagaggacccttaatcccaggggctgcagaaggataaaggtccgtcttctgtaacttcttcatgctgaataggggcagtgatattcctgcctattagggtctcttgtattcagggtagagaggagctgagtcggaaagcactggtccattaagcatcgtgactctggtcggtcttcattccatctttgcattcagattcaactggctcatgcctcgtactgggggaacccggtccatggttgggatccatgggtccctccagtctgccattccatggtcatacacatcttgagggcatccacacggttagttcatctcctgcagaaacacaagcataccctcacccccacgttagtaaatctactgaaacagaagcaaaaacgtttgtggctgtgaccgggaggccactgatgagaaacaggccccttctaacagaaggcacagagaaagcaaattgaggattttcaaaccttcaatttgcactgtacaggtgggcccactagatgccgtggctcatgatagatcttcagatgtttggtgggcacccacacaaacatctgatcatcacctggaaagacacaagcaaatccttgtccccatataattatccttcctttttcccagctctttgtatgtgaccatctttttctaaggcctgtggcattacgatgagttaaagaatggaatgcttgtgcatcagcaaaagctgcaga

SEQ ID NO: 6888 - DNA, 2300 bp, Homo sapien
tgaagtaatgcagactgaatttgaatgccatcgccactatataagtctctgagtgaccttgagcaagttacttaactactctgaaactgtcaccttaactggaaaagagaaaaatactagaaataactaccacatttggtttctatgattaggacgtaagataatggatgcaaagttgttatataaaaaatgtattctacaaatatgagtgttatttcctggtgcacacattaaaaaaattgccaagtagccttatgtctttgttgagtatacaactcaagtaatctccttcaaagtgagcagggaatctatgttagaaaaccctggcaggagcaaaccagagtttttattttacttggaatcagagttctgttttagaaaagtgtggtgtcgtttttttctcttaaatgatatgcaattcacatgttagtttatttgtatatgcctacttattaggcatatacaagatcgataatgttgtggatcttattattattgcccaaggggctaatattcacttttcaaaacttattactcatctagttcagcagctcaagattttgaagcaaatctgttttacatacatgtcttaaccttcaatcccatttaaaaaaaatagtaaattagatggttaaccttttagatttgcatcctctttaaaataaagctttacagcaaatgcatttttcctacaaatgtcttcgaaaatgagattgaagaggatgtatcatctaaatttttctgtaaagagcttgcccccgaaataattggaacatgaactgaaacctctagataggaattcctggacacagctgtccattatctttcgggactttggtgcacctcaccctttactgaacacaactttgtgtcaaacactgggctaggagtgctagttgtgatgtttgaggcaacagtggaatttttcttaggacttagtagaaccagttcttttttttaatatgcatagtcagattttgatgatattcagtctgctcatatctataatagtgatattaacgtctatttcactaggatggctcttgtgaagattaaattaaatactgtatgaagaagtgccttatacacagttatataaccaggataatatccagatggaattctcattctctctctctctctctctctcactctcactcacacacacacacacacacacacacacacacacacacatgcaatatcatcttataaatatcctagaattgaatatctcagtagcagagatagtagttctgtttctcagaattgcttttgcaaaatggtgttttggattataattgtgctatttaatttttctaattaaaatttctaaatagagcctattaaatattggatgcttatgatagaacatttgaaaatatagaaaaccaaatgacctacaaaacctctaccttccagtaccatcattccgagctgattactgttaacattttaatggtttttgtccgctaggtctccttgatgagtttcacctgaggaaaaggactccttcaggtgtgtgaacttgagccaccaggtccaaccccattggcaggtgctggtacagacgactgaaatcagaggaagatcagaaatcttcaaaacccagagcagcagatgtcttaacggtcccgaaacgttctttggttctttgcagtcaacattcacgggttaagaagattgcaatgccatgacgggctgaggttgcatttctggacgctgcttactcccgcttccttccatctgtttcaggcaaatcattatgcagttctaattagaacaatcttctaaacactctctccagagcgacgttcttccaaacacggtttaagcggcgagagacacctgcctaggaccctacgcgtctggaagtctctcccagtgaattgggtctcatctcctgccgagtacgcaagttcaattatcggcagattaggtttctactctccgtgccccgccccgcgccatcctggggagcagcgggaataaatgatccgcccctggccagtgctcacccgactgaccagagcgcagcccggtgaccgaagcgcacggggcgatcgcgaggcgccccctccctctccccgcgccgcctccagcgcgagtgacggcgcgccctccgggctccggagcggcggcgccgaacaatccccggcagggctcgcctcgccggtgacatcactcctgaagatactcctcgctcccagcgcctgccttccccaggcgtccgttcgtgtgcccgtctccgcctttccgcctcggaagagcgctcatcactggctggggacagagccggg

SEQ ID NO: 6889 - DNA, 2300 bp, Homo sapien
gtataaataaaaatgtaatgccatcgtggtgtaaaatcatcctctgggttttgctcatggaactgagtcaagccaaacctgagtagtatgagtaataggctctgttaagttagaggaacttaatgggcagtaggtaaggggtgggcaattcggacctgagggtttcccccatttttagaccatatagggtaactttgtgaccttgtcatagcatttgtaaaatgtcatggtactggtgggggtgtcttttagcatgctaatgcattgtaattagtatataatgagcagtgaggatgaccagtggtcaccctcattgccatctaggttttgggggttttggctggtttcttgactgtaatctgttttatcagaaaggtctttatgacctatatctcgtgttgacctcttatctcaccctgtgactttgaatgcctaacctgggaatgcagcccagtaggtctaagcccagcctctattcaagatggagttgctctggttcaaacgcccctgacgctgttacctaacaaggcccagaggaaatgagagttttatcagagacaaatttgtttttaccattatgtggggaaatcgagtagagatataggctaatctgagaaacacaagaatctacattgctatggcaacgattctaaatacagaaagttgatgcagaaagaaagatggcaagtttcatcaacagagtaaacagacaacctatagaataggtggaaatatttgcaaagtatgcatctgacaaaggtctaatatccagcatatacaaggaatttaaatttttaagagaaaaacaaacaacctcattaaaaaataggcaaaggacatgcatgaacagacacttttcaaaagaagacacacatgtggccaacaagcatatgaaaaaagctcaatatcactaattattagagaaacgcgaatcaaaatcacaatgagatactatctcacaccagtcagaatggctgttattaaaaagttaaaaaataacagatggttgtgaggttgcagagaaaagggaagacttatgtagttagtgggagtgtaaattagttcagccattgtggaaagcagtatggcgattcctcaaagaggtaaaagcagaactatcatttgacccagccatcccgttactgggtatacaccaagaggaatatacatttttcttccataaagacacatgcatgtgagtgatcattgcagcactattcacaataacaaagacatagaatcaacctaaatgcccttcaatgacagattggataaataatatgtgacacatatacaccatggaatagtatccagccataaaaaagaatgagatcatgtcttttgcaggaacttggatggagctggagtctattatccttagaaaactaatgcaggtacagaaaactaaatacccaccactcccacaagggagctaaatgatgagaacttaggaagacaaagaaggaaacaacggatgctggggtctacttgagggtggaggatgagagaagggagaagagtagagtggagtagaaaggacaactgctgggtactgggctgaggacctgggagatgaaataatctgtacaacaaaccctcatgacacaaatttacctatttaacaaaccttcatacatgtccccaaacctaaaataaaagttaaataaagatggtaactttcaaaaaaggatattttctacatcagagtaacctagagtatatttcctttcctgcaaactatcatggtggaaatcatgtcagttcaagagaaagtaataagacatatctttgtatttcagtgttcaaaatatatcatgaaatgcattagctcctagaaacagactgagtgtggatataaaagtatgtcataatgaaatttataaattaggcaattacatttgaaaagtgatatgtatttttgtggggagtataggctaagaggaaagggagaatgcaagcagataattgatgagcatagctaaatgtaaatatgttaatgcctctttttttgtaggagtcacagatgaaagcaatgaaagagactgtgcagctctgcttgacatctgttttccgtgatcagcctcctccccctttgagtttaatcacatcaaatccaactcggatgttactcccacccaggaatattgcctctaagcttccagatgcagcggccaaaagcaaggtacctaccttttatttgcgctttgtaaagtaacagcaagtaatgtgttgtctttaaagcccagtatatataatcaccagagtggattcaagtatgataacaaatccattgaaagatt

SEQ ID NO: 6890 - DNA, 2300 bp, Homo sapien
acacagagagagagagagagagaggaatctttttctctttgcactgcctttctataaagcagatggtgcttcaaatttcctcggcccctcacaaagctgttcctctagcaacctcccctaaaagactgattttaaaacaagcaaagatgttctttgaatcccctgctagtcaatctggcagtccaacctaaaatgtttctaattttaagaaaagtaattaactttatgacaagatagtttaatcatagctgcaccaaggaggttagggtgcaagggtgttagaaataataacaaacattctttccttggaaaaaaatccaatgaggttcaaaatctcaactcatttctagttctggcagatacatatttgcctcctgctgggttttggatcagggagtaggttggagaaaatcagggatcaacagaaaaagatcttaggaaggtaaaggtgatacctgtgcctagaaatgtggaatagagggacttaaattttttttttttttttttgagacggagtctcgctctgtttcccaggctggagtgcggtggtgcgatctaggctcaccgcaagctccgcctcccgggttcaagccattctcctgcctcagcctcctgagtagctgggactacaggcgcccgccaccgcccggcgaggggactttaattcttttaactagtcctgctgaccagggattgaattaaagtttaaatttcaaaaatatttctgattctaaaaccggtgatttaaaagggggttttaaacatttaaatgagatctacaggggtcataactgactagtaagtattgggtgttagttttctgccattcttaaattcattgtctaatcctcacgtaggagaattgggttgcattagaatcaatgagttggttcacatcagaatgatctgtaagctgagttctatcagaattttaactctggatgaacaaaatttaaaaaaaacatcctcgagcaagtcatttattcttctcggtttcaatgccctcatctatacaatatctgtattaaaagcccttacggagacagtctctgaactgtgttttagatcttcatttggaggtgaactcacactgagttcattgtctgtaaccaagtatttcttcaatgcctgcatactgagctcttattgaatgctcagcatttctttctggaaagaccattatgatacattaaagaaggtagcacattgtttgctcttcctcccactgagagtagaatccaatttcgctttttgcttcagatgactttaagaccagttactgaacaatcaagagagactctgagagataactgcctgtctgaatctagcccacctgcaaaatccataagtaataataataaattttagtttacagcttagtttcagggtagtttgttatgcatccataaataattggagcatctgtttgttcaaagctatattcccctcattcttttgtatcatgcaccacagatgaatcaaacagcatacaataataactcaatatttttgaggtatcgaaagtttggaaatttctgcatattttttatctgcttttatttggattattcacctgattctgagttgattccataaaacttcaaaactgaggaagcaacggactctcacgatgtgtctgttcaataacatcttacatcttccaggaagaacttagggctttgaatcagggagcagagatagatggaggaaaggagatcctactgaaaaatgtgttcagctagcttctggtcctattttggccactgcagtttggtctttcaaaagttacttcaaagtgggagctgaatgatgagaacacacggacacaatgggggaacaacacacactggggcctgttggagggggagggagagcattaggaacaatagctaatggctgctgggctcaatacccgggtgatggggtgatctgtgcagcaaaccaccatggcatacgtttacctatgtaacaaacctgcgcatcctgcacatgtaccacgaacttaaaatacatggtgaagatataaataaataataaaataaaacttctcaaactaaacaaaaagagttacttcacttctttgggtatcgggtgccttctctttcaaataaggtgttgatttatgtggtcttgagaaatctttgttgctctgatcttaagtttctttttataatattagaatcatagtttacctacattacagggcttttatgaagattaaatcgagcatcgtgggtagtgttttttcagcccctgtgactaagtaggttataaatggtcctcagtcatcatcatcataa

SEQ ID NO: 6891 - DNA, 2300 bp, Homo sapien
aacaaacctagaacacagatacttggccttatgagctgaaacccacctgatggccacccaaattatggaggagagttggactaacctgattcattgtctgcctttaacattggactgcagaggcaacataaccaaggaaattaaccacctactgcccttgggcagtcttctgagcaggccagagtcacgccctgcttcctgtgtcctgcctcagctgtgcctattattctttaaatccaataaaaaataaaaatacctactaaatgggtatagcaatatttggttacattggttctgaatacaaaaactgtagagaaaaggagtactgtgggtgggagcagatactggcagcatctgagagccatccacactgggaaagagtgtcatccttgttacatccttgttttgccatgttacagagcatggcaaaacaacattttaagcataggccaggaatcagtaatcaagaatattctacttgtacagagccatgcatgctacatgaagacttgcaggacaccataaattggatcagggcctttacccaacaagctccacatcaggtcaagatcggcaagctgaggcagaactatgacctcttctgaactatgaccatttcacaaatgtaagtcgaatggaaaacatctttataatattcagtattcacacatacagagactagatttaggacaaaaaacaggaccacagagcaatgaggaaagagttctttttacaatagggtgctggaacagttggataaccatgtgagagggtggtataaagaaggctttttcaggagttggtgaggttctctttcttaacttgggtaatggttatgtaggtgtttatcttgtaacaactcattaagctatgaattcttttactgcactttgtgttttgtagtgaattatatttcaaaattatacgtaaaggacttctactttcctttgctatggttccatattcacatcaatgccatttgcattacttatctgtttccaactgtctttgtcctgagaaagataattttccagaaagtaaaagggttaatttggattattggaaaacaagtaaaatcgcaatgtaaatgaatacattatatagttttacctgattttttttagttaaaatagccaacatttttctgatctcctgaaatgaatcagtgttgcgactgttctgcttgcactgtctcatttagccataataataattctacaatgttggcaacattgttatcttcatttaaaagctgtagaatttaggctaagtagtgaagttaaatgcctaagaaggcagtaaattagattccaagtatgtctgaatacagttctcaacaccttaaccagtgtgtcatactacattttactaactcacaagtatggttaacagataactggcaatcacctactgattaatgacatgatctaattttatatgtgctggataaagactggctgtggtaaattcacaaagattatataaccttccgtgtctgttggtacctatcaggcttcttctggatacactctgacattcttcatgtctttatagctcataactctattaatgcgcaaaatagagcattgtaatgcaatgtttacatgcctataactgcaagtatatgataaaatccctgaaagttttcaatgtcttattttctttagccctacagtttagcacacaggtgttaaatgatgcttgttagattgagaagaataaacattcagggaaaaaaaaaaaaaaaagcctgtcaccttcaccaagacaagcagttactgctctaatcttatttaaagagtaccctaaaacaggttccttgtgcaaatgggcaaatctctaccactattttgcaaatgggctaaaatatttgcaaagtgttcctactcaacataagccataacttgcatattcttgagataatttttagaaagatcagcttttctgaaagtatctgagcttcatggtttgcaaacacattaatgatttagttattttcaaactgtttaaagattaggtagatacctgatgaatgaactgcatcccaccctctctgagaaaaagcgaattttattctgtcccctagaaacaataaacatgaaaaaactctaaatcaaatgcactccacattgtaattggaaagcatttcactctttcagataactcatgaaatgaatcatgattttatgtttggacaactgttattataccaaacaattcaagaagctgtattctttttatctagatgtaatgacacaggtaatcagttttcagttaattctgttttaaagcaataggtt

SEQ ID NO: 6892 - DNA, 2300 bp, Homo sapien
tggaaccaagtggatggcttaccacaaacagtgatagcttcactgggtttaccccttatcaagaaaaaacaactctacagcctaccttaaaattcaccaataattcaaaactctttccaaatacgtcagatccccaaaaaggtaaatataaatgattttaactttccttttgtgtgaaactgaaattccaaataagtcatgcagagtaagtctaaggaatcaccatgctggaaaaacagaagagaacacaatagcatggattttctcacttttgagggatgatcattatagtcactagaaatagtgaagtggttttagggcttcaatgaacatatactagtcatttctctttgggagtgtaaggagacaatgggacaaaatgtgaagttaggttaggtcaagaaaagatggagactgaagcaatggtacagctttgagatactaggtaacaattttcaatgaatcttgaaaagactacctgaaatttcacatgctcatgtgaatactatacaactgaacttatatatatatatatatatatatatatatatatatatatatatatatatatatgtgtgtgtgtgtgtgtgtgtgtgtgtgtgtgtgtgtgtgtatatatatgagtatatatatatgagtttttaaaaagttgaacaaagtaatgaatttataaattatctgtcacaatcacaaacaatttattatgtggacatttttatgtttcatttaaggattatgtcaatcttttccatttgaaacataaaaattgttttacatttttccataaaatgaaaaaaaataactaagttttaataattcattcttgttttgttttttgaggtctaatgtattttccccccttgaaatttttttaataatttgttttcctccaagaactcacttccagtgtggtttacttaaggattatattagtaatgtaaaaaacaaatcatatatacaaattcctgtttgaatgttgttgccagtgtgtaggaaaagttttaaattctgaaatataggctttttataataccactatcaatatattgtatatgtacatttaactatgattttaacatatcttgtcatttttaaaaatgcttcctctcttttgtctatctaaacctaatatacatattgagaatactgagtacttactcttaccattgctattttatgtaaaaaaaaatttagttagcttacttctcttttagtaacaagtttactgtactctaacatgaaaattaatttttttagaaatgagattttatatagaatcagagaccctgcaagaccctttgcctacctaattaatgagtccttcaaaaaaagagaagaaaaaaagagaaatgtactaaatttcagttcagagaacatttagtttattgaaaatttagtcttcaaataagataccgagtgaaaagaataatacagtgaaattttgaactcccgtaagctcaggcctagacaactgttcttgatatgcaaggcactgaagttatcttgccttggtttatttgtggtgtttggaaataccttctatcaggatacactgatttttccttgtagtgacttcttatttgtttatggtggactcattttctattacccacttactcctattggcttttaacctttgaattatttacagaaacaagtgcaaaattcatttcatcattaaagttcaacactgatattagatcttaatggagtatgcacatggcatttcagtgccactgatgttaataagaacaagacacaagacacggctatagagctaagacttagaagtatttcaatgtaattaaaaattagaagtgtggttttatcaacaaatacgtttgcccatatatcccaaatagtactttacaagacacacacacacacacacacacacacacacacacacagagagagaaacacaccattatctaattttaaaatgttaaacattctttgttatatggaaagttcacatgcatagagttcggttctttgaataattattttatatttctttaaattttttttgtcctgtagaaaatagaaatacaggaatagtattcggggccattttaggtgctattctgggtgtctcattgcttactcttgtgggctacttgttgtgtggaaaaaggaaaacggattcattttcccatcggcgactttatgacgacagaaatgaaccaggtaaaatctattttcaatacttcacctgggcacagtggttttaattaaatgaggatgccaatgttcactgcattgcctagaaggtaattccaaaagaattcatatgaatg

SEQ ID NO: 6893 - DNA, 2300 bp, Homo sapien
caaaacaatgttttcaattagtttgaagtgtggtcccaagctatgtctgcttctgtattcagatccattagtgatattcatgtgtcttcgtgttctggaaactccacttgtgagtggttctatcattgcagactaggaagaggtttttcttcctcccagtatgtattgtgaaacgtaattaatgagtgtaaagcaattggtgagtgccagatgaaaggcaccatagtgggtaagtaccaaaaaaaattatacaagcactgcacagtgtgtcatctcagctgggtttgctgatgaaattgcaggtaattatctctcattgtggagttcctctggagaaaggaggtctaaagtgggattggtcttacctagaacctaggactgtatctcagtgaaacttgtttgtttggctagaaattactttttaactccaactccatgagtaaacaaaggtttctgataacaactaagtgagctaagtaacaactgaggcattaaatttacgtacagtttacattttataagtttatttccagatgtgctcaagacagtgagggtaggtaaggtttatctctagggtgaggtctaatcaattgattatgattgtaaggagggcaatgatgaataggattctgggcccacagaaagggtcttcaggaaaaagcaacatgagaaattagcgggacttttatggcagtgaaaacggagagctatagcaaaagtgcattgcaatgtttatgcctggtataagccataattactatggttaaggcagaaggggataatgatattcccacacatattgcagaaaaggcctagggaaaaggtgcacccagtcctgcccaatcatgttcagttctctaactacaaacagaaaatatatttagttggatttttacctaaaaagtggctaatctgaaaataagccattgaattctattaagccactgttcagtaactaactgtttgattaaatttaacctgcttttcttcgtaccacagtagagacagcttaaatatcttttgagacaatattttttcggggttggtttaatttctaatcaaactctgaaggggcctttgggcttcagaaaatttaaaactatagaattaccttgttctttcctcgggccaattaactgggcagattctttgcattccatttgaagcttactagctcctgcattttagctaaagtttcgtttctcgctcagcagttgaaaacctatctccttgtgcagcagaaaccaagtatgaacctcaggcatattgagctgaacggcccttggcgccatccccaaacgctgatgtgcggaagatcccagtttcactcttctccctttcataagctctgaaaggaagtgtaggaagtatgccaagttgttattcaactctagtatttaatcaagcattacctgggcacttctgaaattctccagcttctaaagtgagagtaaaccagagagaacacagggtggaaactacttaatcgagaaggctcctaggataagtgaggatcacatggccattctcaggccccagttcctctccaaactcctgaaagtcagcaagaaaccgaatctcagtcatgatgattatttttcatgtaacacctcacagcgttctcagggatcccaatatatgctactaattcactttgtgttaagtaggagtttcttaaaaaaacaatttcagtggacctcagaatagacgcctcactactgaccccactacattttctctacttaggctttaagtacacaaatagggcaatctactagagtacagaaaaattgtttatgatttcagagaatgtgcggctggcatagagcaacaagtgcagggcatgacttgtttggattcctcacctgcaaggagcagggggcccagcacatgtcagaaattcctgctataccagatgactttgccaaaatctttgtcctttttttcacttagggtgaaaaaaaaaattgatgacccgtgttttgctaccactgacgagagtaataccttgtcccaaagctaaaacgatcaacctatgaaaactggagggttgggcttttgttgttgttgttaaaggcctgaatgaggtgatatcttaatgcttacagctgagaagcaggtcagtcaggttcctgggcgctctgttacacaagcaagatacagccagccccacctaattttgtttccctggcaccctcctgctcagtgcgacattgtcacacttaacccatctgttttctctaatgcacgacagattcctttcagacaggacaactgtgatatttcagttcctgattgta

SEQ ID NO: 6894 - DNA, 2300 bp, Homo sapien
gtaggggagaagggacaaacttgggttctgacagctggatcttcattttgctgctctgacaagctaatagtatgtcttcaagtaaatgttggttggataactatgtattgagtttaaatcaagatgaataattatttggaaaaataacataacaatatttttaaaacatttataatagcaggattttctcagtctaacaaaattgccatctttcaattattgccatgtgcacacttacatgcatgtattttgagaaagtcttttgattccagaaagcttgactttacacttattaatgtatatactataggatattccataaagtctgtgtcagatagtatacttgattaggtctctgtggctacctgacccttattgacctttctcttagataaatcctgtggggctaagtaaaggagattgatgggtagcgagcattcgggtctttgcagcacttcccaagcagtcttaatcacttgtctgatattggggttgacaagaatattatgtctttggggagataatgtgagggaagacaatatcctagccacaaaaaatatgagctaactacataagattttagtgcactgttaacattgatttattatctatgttagtacattgtagttttttctatttggtcaggaaaaccaccttgatttctcttaatgaaatcaccttgtcattttgggcagccattggggccctcatttaccctgcaccagcctctaagacatggcctttgcctagatatttaataaagtatagtaaatattataaatttgtgtcacctctcccctcatcaatggccatagctgatcctactaaccaatcatggctctccttcccatagaatgtggctacaccttcagaatctgtctcaacatggctctccagctagccattatagatcaaccagggttaaccctccagttgaaatccattttccacttactggtaggccaggggtcagcaaacgatatgcctcaagccaaatctagctggccccctgtgtttggtatggcttcaagctagaaatggttttgacattttttaaatggttgggaaaaaagtcaaaagaagaataatattttctggcacaaaaatattacataaaattccaatttcagtgcccataaataaaattttactaaaaacacagccaggctcttctgcttgggtattgtctatagttgcttacatgccataagagaactgagttgttgtgacagatactgcatggcttacaaagcctaaaatatttattgtctgactgttatattagaaattttcagatcacttgtttagaccaaggcacaagtattcaaatcacacacactgattaaatttcttcaaacaataatggagaaagtattctggaactcttaccaaggcctcttctatttttttctgattaactagagaagccaacaggtttcttttctctgactcagaaggctcagtttcctagcagtgaccagaaacatcagattatattctctagtggtcctaatctctgctagattgttctgcctcctctacaagaaaagtgattctttgacttttcactatttatcaagaaatataaaccttaaatgacaagaccattaaatgcacttgctagtattcatactcaaacaaaaaaactcagaactagggagtcaggggactctgctggttacttaggaagagagataggagtaataatttctgtataaaagctgtcaataactaaaaatgacctagtatttgaagttttccttaacttctgaaagtcttctaatgagaattgaggtttcagcagctttttaagtagtaagagaaagaaaccctaaggagaaaaataattattgctagaaatctaaatataatgatcaccatgaaattatctgatgtcttcatttaaagaacaagtcactccttaataaacctgcattatgggagttgaggtgaaggcagtttgagcagagtgtttctgaaatatgtggccaagatttgggatggaaagccagaatctctaaggcatagaactcctcatctcattattctttccatagacagctttgccaaatttcccattaacctttttcttcttcatccagggtgcactaggaggtcttcttactggaatcaccttgtcattttgggtggccattggggccttcatttaccctgcaccagcctctaagacatggcctttgcctctgtcaacagaccaatgtatcaaatcaaatgtgacagcaacagggcctccagtactatccagcaggtatgctgactttatagatggtgctaagtcc

SEQ ID NO: 6895 - DNA, 2300 bp, Homo sapien
tatagaaatgtgccttctaattaatgaggtcattgaatgtactggggttttttttttttcacctgaaaagttatgaattgctgctgtgctttacaatctgcatgaactttgcatggagtgagtctttatggaattaagaagagcgtttgaggacaacgaatgctaccaaagggagaaaagggtaaatatgtagaaaataactgaaaattaaattactgaattgatgctgtgccttataatcaacaaaatgttgaaagcaaggaatactttcctaagaggcataaaggtttcttcatatcccaggtattaaccaatctgctccctaccacttcaaaattcaagactaattggagtcatgcagataatactgttactacacaaagtttaattaaaaccatcagtactcattaactcttttgttataggtttctagtatgtacctttagaaagttattgatgataatgttttgaaccattcttaacctgacttatacaaggggattacatgttttatagattgaatattaaccattaggtagtgtaaatattaaactataaaggagtcaagtttctgaaagctaaaaaagttctgattttctgctgagatcacaacaaaaacctcatatataattggaatacttcatgatacaaataattaaaagcccaggttaaggtaaatatattaaagaccaagatttgcagtaacatttatcatatcaaatctccaaatctagtggaggaatttaaacagaggacacagacagctcttgggagagtcttcatatttttattggtaactaaaagcatactttagctatctaattaaacctttctttggtctaattcaaattcatgaagcaaagatttattcagttatccagatgtgaaaagcaaaattagagcgttttttgttttattgtttggctggaaatgtttctgtctttgggcattatggataattttagttttctcctttctaaaaattattttttttattttctacaatggctataatgtattgggtatatggactagagctttgcttctgtcttcaaggaaatgtcatttgaacagctgacagactcctgtagccggttacatagagattccctaaaataggcaagatgatggctgagtacaaaatgagtactagggaggctacgttctacaggagttgacgtggagaggcagaaaagcttcacagagtagagaaaactcatactagatcttgtagaatacacaagctttgtagaggtggggatggagaaggccactgaagaaggaggagaagcatgaacaaaattagaaattgcactagaggtactttggaacaattgacagagtctaaagagagcagaaacaggaatttataactggattgttaccttccttctctaatttgtcctggtcctaattctaacttagcctgtgggtacagtgatagtaacctggtgaaaataagagaaagacaagataaagttgaaggctataaataatttattaattaatggcaaattgatttttctaggtcctagaataaagaaagaaaagctatgatgttccagagtgctctgctgtaagcacagataatagccaatggggtacatattattacctttcattttacagatcaagacaaagagagtcaggaagtttaagacttaagtctttaaagaccttgtaaggtcttattatccctgtgttccaggtgaagttcagaaatgttaaatgatttatgaaatgtttcatggctttctcgtggttgagccaggactcgagcaaaggtctctgaattcctagtcctttgcttctttctctccacatccactgcctcagacaattgcaggcacacagccttcactctcccttcttcaagaggaagacactgctgaggattgtgtttgcattttacagattccatctcacgaattaaaaatgctgaggtggtaaattgttatcaattctatgtttcccagaaatgtttaaccttaagttaaaaaaaatctaagagataaaacagcatgttatctggccagtccattccacccccagtggttattaatttcagaacacatctgaattccttctctgtggcatatgctttaggagaggagcagacagctcttagctagggtcagatttcaaattctcatctcttggtgccaataccaccaccagattcttctttgaagtcaacttttgagatcttcactaagtacacgttggtgtctgaagattcacacgagtgcctctggtaatcattttcttcagggaatcacagtctctcctctcagcaaagc

SEQ ID NO: 6896 - DNA, 2300 bp, Homo sapien
gaagccgctgttgtaggccatatcttttatagcttacaggaagaggagaacttctggatttgcagtcttttgtcttttatgataaaattattggacatggttttttccctatcaatctctgtaagcagaagtaagcattatattgaattatcctcttcaggataggaattactcaattcctcctggaaggaggcaatggccacagttgctttgcagtttgtttttttaacccataatttctgttaaagtatagtttggcatcaccaatttgcctcccaggaatttgtttgataggcatgctcattgagagaaagctctatggggaggactactttcactatctcaattaagcagcttattcacattgtgaggaattctttgagccatccttaatattcattggactgaaatatgtaaaaattattataataatttttctgaaacatagttttaatcttgccacttcctagtttaaaataaaaacagggccgggtgcggtggctcacgcctgtaatcccagcactttgggaggccaaggcgggcggatcacgaggtcaggagatcgagaccatcctggctaacatggtgaaaccccgtctatactaaaaatacaaaaaattagctgggtgtggtggcaggcgcctgtagtcccagctgctcgggaggctgaggtcggagaatgctgtgaacccgggggcggagctggcagtgagctgagatcgagccactgcacgctagcctggccgacagagtgagactctgtctcaaaaaaataaaaaaaaatgaaataaaaaataaaaatagagcaaaataatagccattttattcttgtacaccactcctactcccattggctttgagaacagatgaaggaagacaccaatttagtgaaagtctagtctcaaatgaccaaggcttgttcatgtgcattttcttctctttgatcccaggccaaaataaccatggtgtgcagagttcactcttagcaacattgcaacaatggtgttttttgttttgttttgttttgttttgttttgttttgttttgtttttaatgccccatttcttccagttctttacctttttctcttttggtagcatttgatatcatcaaactctttctttcccattacaacttgttgcatgcaaattgctgaactattttaccttgcggagactactaatgttagcaattacaaatttaacttgttaagcatgtgagtaattgagtagcaggaccttgttaaggccatgtatgagtaacaggtgatggtgtttatattctgacagggtctcaagccttacactaaatgagtcaaatacaaatggcagtattctgtgcacatgagagagggtagaggcgctacagggatttcttcaggtcgaagaagcatattttccctccttctcgctatattaacatttctgatatagaaatgtgccttctaattaatgaggtcattgaatgtactggggttttttttttttcacctgaaaagttatgaattgctgctgtgctttacaatctgcatgaactttgcatggagtgagtctttatggaattaagaagagcgtttgaggacaacgaatgctaccaaagggagaaaagggtaaatatgtagaaaataactgaaaattaaattactgaattgatgctgtgccttataatcaacaaaatgttgaaagcaaggaatactttcctaagaggcataaaggtttcttcatatcccaggtattaaccaatctgctccctaccacttcaaaattcaagactaattggagtcatgcagataatactgttactacacaaagtttaattaaaaccatcagtactcattaactcttttgttataggtttctagtatgtacctttagaaagttattgatgataatgttttgaaccattcttaacctgacttatacaaggggattacatgttttatagattgaatattaaccattaggtagtgtaaatattaaactataaaggagtcaagtttctgaaagctaaaaaagttctgattttctgctgagatcacaacaaaaacctcatatataattggaatacttcatgatacaaataattaaaagcccaggttaaggtaaatatattaaagaccaagatttgcagtaacatttatcatatcaaatctccaaatctagtggaggaatttaaacagaggacacagacagctcttgggagagtcttcatatttttattggtaactaaaagcatactttagctatctaattaaacctttctttggtctaattcaaattcatgaagcaaagatttattca

SEQ ID NO: 6897 - DNA, 2300 bp, Homo sapien
ttattgcacatctttgtgtctgtagttaccttaatactgcaccctgcaagtggggagcaagtagtaagtgcttaatataggtttgcttaattgaattggttagtaagtcagagagagattgtgcaagaaatggaatgaatcagagtaaattcctcttcgcttctttggccaagcagccaatatgaatccatctgttgtcatttctgaatgtcccagagaaaaaggaatgaagcaatgtagctcttgagtccaacagtccagtctttcaactgaaggaagttgtagttttcttctgggatagagtgaaaataggccttggtcttccacttggcataaacagtaagaaaactcctttggtctatgtttccatgatgctaagtatctggataagaatgaaaatgtgcagtcaacatgcttcagaaactccatgcatgtgataccacatcagcaaaatatcaagttacttaaccagacttctcattttctctgcaggagtctgggttgtttatatccatgaaagtgatgacaatgagtataactgtcccagaacagtgtggcactgtgagtctgaatgaagccagtcccttattacttggggagggagataggtatggaacactggcaagtcaacatgaatgtttcagttacatttcaaggaagaaggagaaaatacccatagaaacaggagtgctgcctgcttctgctttcccatgcttcctctgtttcttttcttccacagccctattgatgtccaacttacatcttatttatttacatatttttctttttttgagaaaaggtcttactctgtcacccaggctggactgcagtggtgcgatctaggctcacagcaacctccctctcctggattcaagcaatactcctgtcttagccccctgagtaactgggattacaggcatgcaccaccatgtccagctattttttttttttttttttgtattttcagtagagatggagtttcaccatgttggtcaggctggtctcgaacttctgacctcaagtgatccacccacctctgcctcccaaagtgctggaattacagacgtgagccaccacgcctgacctattttcaaaaatttaagttttctatttcccaaaatataagtgccaggaaggcaaggatttgtctttatttttgttcacagctgtattcccactacctcaaatagattttggcatgcagtaaatgctcaagaaatattcattaaacaaatgaatggcctttaggatggccatttgccaataagttcataaattagaaattaaaatggccaggttaaaaaaaaaaaaaaaaacattgtttttctccccccaagttaaattaaaagaccttgtgacaattagttctggctcaactaaagtctaactgtgtgactataatcaatttgcttaacattctgctccttcatttctccatctggaaaatgggcataatagtaccagaaacattcttcaaaagctttcaagactctcaaaagaggcaacaactataaaagcattaggttcaagattcaatgcagatgcttagcattgtttcataaaattaaataaggatctcattgtcctttaactcactaagctggcaaaatttcatttttctgcttctgttcttatacatactaaagactatacattaagcaactttctgtattttcatttcatccaaagtattgttgatataaattttaattaaccaatcattttcaaacaaaactgtaatttctgacactttaaatttgccttcaaagtcacaaagttttaaagataaaaatagatatactcagaaaatccaacctgatatttattgagacacgtgaaatggcatttttccagggtaatcattccttccccctcccaatatgtcaataacaaaccagggtttttgtggtggaaattccatttattctcttctcattttctctttcgagctaaattctattgtagagtcttcccttccaacctttaaaaagcgaccctgtacctttaatagtggagacctggtgagaggttcttttccaaacttgttccctggcttccaagtgacgaaaccagctgtaatttgagagcagagagatcctcaggatatctttagccaaaggaaaagctccgcattcccacccagtccagaaattgaaatactatcagggggcaagagcctttctctccagctacacactccatctcccgggagcaaggggaaactccgagaggagggcaacagagccagcatcttgccagggccccggaggaggggttccccgctacgcctgtgccggagg

SEQ ID NO: 6898 - DNA, 2300 bp, Homo sapien
gccttcttccatgattgtaagtttcctgaggcctccccagacatgcagaacgatgagtcagtaaacttgataaattacccagtcaggtatgtctttatagcagtgtgagaatagaataatacatacactgttgctggaaatgtaaattggtacaaccgttatggaaaacagtatggtggttcctcagaaaattgaaaatagagctctcatataatcctgcaatcctacctctggatatatatccagaggatatagaataagtatgtcaaagagatagctgcactcccatgttcatttaagaagcttcttacagtggagagcagagttttgattatttacctgtttctgagaatcaattctttatgtgcaagtctttaaactttattaacagatttacttgtcggtttatttattgtttgttctatttaatcattccattagaaactatttatatctggcacattcttgtcagcaactttcttaaagctgaaacagaatttacctaatttattccagtaattgttactaaagtacaaagtgtaaaggaaaaattcattgtgtatatttctgtgatgtcatgaattattaaaatataattatctgattgcttttggcatacttataacttcagttaccgtgggtttaagatgctggtcacatttatgacggcacccacatatacacaccctcctctcatacatggaaaacaaaacctgctgttgttttcactggccagtgggtgtcagtaatttgacctggagacttgggggaagaaaggaggaaagtggaaaagaggttcctttcttcagatgcagggaaacagtttaaattttattgttaaaggatctgaaaaaacatcgtttagggaggggatgctgacattctggaaggggagatttcccataaaggaggccaccagacagttgggctgcattttctctctgtgtggctacctcttgttcttttttgactgagtctcactcacagccctgcgaatccttcgggcaagaagcaacaagttgcaggctgcttctacatctgcctaggaagagggtgttaggtgggaggagggcagatgactcaagcgtctctctcctggaccttagtttccacctgtagactttcttttaatgtaatctagactctgttaggacctaggacctgagaccagtccaacagggtctcccccacactgggcactctccaagagtatgcctggcagtcaggctctgaatgctggcatgctgcctattctggcctttcccttttgttgccctaagggctgtgtgttgtgaatcaaatcactgggcaaccaagtaccttcaaaaacagccccaagctctctggaaactacttcctattccagccaaaattgcagagaaaggagggcatcaagcttaggggaccaatccctgtctttctaccagtccctgataactactcaagctccctttaaagaggctcatattggaatactctgttgacaagtagataccacttcacctctgctagggtgagcgctggtagctcctccctgttaaatgcccatctcaatgcctctgccctaagtgagttgtgcaataaatgagctgtcactctgaacaggtgggaaagaagtgaactgcttgttcacttgctgctgttgccactgctggtacagaaatagaaggtaagacaggtgagaactgcttttccttctatcaagaaagattccaaactgaggcaatgctttgcattgagtcctggggttttgtggttttgggaaccaacagtactcaaagtattttctcttgctaactgcttcccctctaggccataaagcctcttttctttcttttttttttttttttttaaaaaaaacacagcacaaaaaaacaaagacaaaaaacctccaagctcccttcagtagttgctacaccttcagattgagacatccttcctcatttacaaacctcagctgtgtctgggggcagggccacagtgaaactgccaggagcaaaaaggcttccaagaaaaagtaccacatcagattggaaactggggacagatcattcctgggatgtgacgggcaccagaatgctccctctccaaaggatctaaggaccaaagctgacagtttctttacttggtaagttttgggtggtttgctgtgtaaagcatatctgagaacaggtatgattgagctcatcttccttttctccttattgcaagggtttgtgaattcaagtctgtggactgaggtggtggggagcatccaattagaactccattcacatgtagctcacagtcatgtgggctgt

SEQ ID NO: 6899 - DNA, 2300 bp, Homo sapien
tgcatttaagcatgattgtattccatcgtaatgaaagcataaacttagataacttgatcaagagtaagcaaactactgcctgggggcaaaatgtcgcctacattgtttttgtgcacaccatgaactaagaatagttgatacattcttatagggttttaaaaaataaaaacaggaatatgtagcagggactgtatataaactgcaaagcctaaaagatatgccgtccggcattttacagaacatatttgccatcccttgacaccggttaaaatgtactacatttcttttttttagtgttatttaaggatctagttgtattattccagggtcattggagccatctttgtcttttgaaacaatgtatgtgagaaaacttgccagccaaccctttctcttgtcaggaaattcaaatgtcctacccattccacagagaaactgatgttaggacttccataatgctcctcactcagacttatgagctaaatttccaggtttgaaagtacactataatttttgattatttttaagtaatagtgttctcctaccactatacaaatttaaagaaaaaaattatagttccaaagcagaaataagcatgagagccaattaattgtatttcacacatgcaattattggataactctatatgtgaagctaaagggacaaagcaatatttttcctattgactctgctccataacttgactaaattatccaagccaatgatctgaggaagcatatgtgaaaccacctagaagtattttactttcatgttgtgtaaggtatattttaagttatcttaatgttgcataaagtcttcccataatctcaagaaggacagggagcaattttatcttacttgtcactaaatcccccagtgcctattgcagtgcctggaagggattttataagctgtgtgtgtgtgtgtctgtgtgtgtgtgtgtgtgtgtgtgtgtgtgcgtgcacatgtgtacatgcattcctacttccccttcatctcaaggcaatgaagtattgtttccattgtcatatgtcaccttctgttaatgatgagcagatcactacatggacgaagttaaggagctctacttctcgcatataaattctacttttcctatgtaagttctacttcatccacgtaagtttagagtgctggaaaataacatatgaagaaagtaaaatgtaaaacattggcatggtttctgaaggtcaaatatatagtcactaatggaatcaggatcaacaccgttgctcaagcataataccacggtgtctctgtttcactaagtttcctctcctgtaaatagtccatgtccttaaatttgctggatttttttaataaaagtaagtcatgtaatcccaagtaatatgaaggtatacacaagtactccaaaaaggttcagaataaagtaactgaagtaacaaggcacactctattgatatgcattaaaacaaaaaatctcaacaaaccaagcaagtttcttgcagaacctaaggacttctatatttcattaagaaaatgtattgtaaaggtaaaaaagcaaatgatagaacagaaacagcgcaatattctgaattgaagaaacagtgcaatattctgaattacagtggtctttaagtaaataataagcattaatattctcttcataaagacgagtttactaatttagtatcataaaaacattttttttcaaaagccatgtccaagtgggcaccagttaaaataggacaggggtgattgttacactttcaatttgtggaacatttttcttccttaaacattccagagcttttatgcaaacataattattaaagtgcatatgtcattggttctgaacttaatatctgaattttctgtgagaaaaacaaggaattcttttcatttggatcctgactcagcacttacatcccatttacttttagtcactgtgtttctgcttacagtatgtgaaatactctcaccagaacaaaggtcccagcgtcaataagtcaaaccgcagactctgacagctgagtgaatagcagaggccagagtccacttgaagtgttcacactctcagaggccaagtttagatcttatctgcctgagattccttttaacactgatttgtcatagcaggtagctgacagcatctactcctgaagaccggaaacatggcttgtaccatccaaaaggcagaagcacttgacggggctcatttgatgcagatcctctggtatgatgaggaagagtctctctacccagctgtatggttgagagacaactgtccgtgctctgattgctacctggattccgcaaaa

SEQ ID NO: 6900 - DNA, 2300 bp, Homo sapien
ctagacacatttctatttgaccttattttatttatccaatgaagcctgcctgcaaggaactcatgaagatataacactgggcagtagtagtagcattctacatttttcaagcaaactttcacccaaggacctcaaaggacatagcaggtattaaaacacccctgcagaaagagtgaggcaagtccgcagtagaggaggatcagagagatctgggaaatcacatgaaaagctcagatcgacttctcgcttacaaacagcccatggtgaagccatgattagactgcttccctgttgatcctatgagcagctgtcaaggacgtaatccagtacagatgctggggggcactgggtccccaattcttcctaaacgttttgggcgtaaagtttccaaagtatttatttatattttctactataaacttgtggccttataagttttattcaacagttatatagcttccatgcagtgctatacaagataaaagttgactaccaccaagatccacatttattttatctccttttcctattgcctcttgccttctttatttcattccctgaagttgaatttcatatttcagatttttgtttccagttttaccccattattcttaccagtgtaaccctcattacatgtattaatgcaacttgttggtgccagcaaataaaacattcttagaaaaaaaacaaatctgaactgctgggctcagttctgaaaagaaggatgtctcgctagctaaggttagaagttttattctcttctgcttgactttttggggaagaagagtcactctgagtttcccatgaggttaacttttaaattatggactgataaattttgacaatgttgtcaaagagcttttgttgtcttgttcagatggaagtctacaatatcttacttagcacatattccctttcattaaaatttcctgagacgtaattgtgtgtcaggtgctgagttaacagtaaagatacgaccttgattacgccaccatttatgcctataagaagctcaacatgacagtggcaatggcaatgatataagccttcttagttttcaaaggttagactggtagagttacaagcaggatagttaattaataatataaaatatagttgacaaatattttttaaaatgacactgtacccttcccaccaagtctttctttctctccctttctctgtgtcatgaacacaaacatactcacagatcagcttatgtaaataataattccctggactctccagtttatttagttgtccaactcattaaaaaaggaattttcagggtttgagttttgccattttagagaagattgtctgaatttctcaatattatcttaccagaattatagtatgataaagccatgcattgctacagtccagcataaaaaacagtagtgacatcttacacaagtgttgttcattttgttttattaatataatgcatgtattactactaaaaatagaatctgcaacaaaaagtagaaattgccttactttatgttaagagtttgtgggagagaatttccacttctctttcctgatgggccatcaagagtgcaaaactcgttcatttgagtgaggagcatataattattttggtttattataatgccagggcttggggatgaggtactggtagtggtttcacagaacagaggctgggagagaatttctactgtagcgctgcagaggatgccagatcaatgggaggatgtagcaggtgtggtggttggaagggaagaggaaaaatgttagtaagtcaagtgaaaagggcaagaaaggccaaaaagcagccaaaaagacatgaagacttggcacaggttgtctgtagtcagaataaaggtccaggagatataaaagcaagagagatacatgcagcaaacaaaaggttaagcaggaagagaaagaagcggtcctgaacaaacaagtgagaaagggactgatttaggggatggccaggaatagggaagaatggcatgtcatagaaatggcatgtgtctgagttggattagcttgaggatggggaggaagggctgcacgacattgcataatcttaattaaatttatattattttgccacacctatttacacaacggtagcctgtgtaaattttgaggagtggattcattttgtctgaagataatattggtagatgagtatttccccatcttgaccatgctttgcatcatcctggggatcaccttcctgttatccaccctctttgaactgctgttggcatatattgactgtcatgttccctcagttggaatgccaaaagtccggggttactttt

SEQ ID NO: 6901 - DNA, 2300 bp, Homo sapien
ttcatcctattcactaatcccctccaatccctctgccccttgcattattttgaagcaaatttaagacattatattgtttcatctgtaaatactaatgtctagggataaatttttaaagttgcataatatatgccacagggctaactggtgatggaattatttaagcaaaagtgactcttatataagtttccagagccagcaaaacataattacctcaaatataccatggccaaagtactaattgtatgaaaagatgtcactaagtcaataccctaaaacttaaagggagagacactcttttatacatttgtacatttatatataattctacccatctcgattatggcttctcagctccagtaatgaaaaggcactgtaagaaatgaggccgctggacttaattatgttcaaacaccagcaccagcaccatctgactctgcctcatacccttgggggggtccagcattgctagtgcataatgtcacagttggtcataatgatgaccctggcgcatcaagaaaagggtatactttgtttaggaaaacattttaaggggacaaagaagtatatgacatttagattcccatgcgtagaggttaaagtgaaaaagttctgaagtttacacacaacttttcattgtatctttctgattctgagcttagaaactttgagaattaatgagataatatgaccctgtgaggtaaatttttcccctattttcagaggagtgttaggaatggaaaacctatcaagtaccaagaaaaccactgattccaggtccctttcatactagtgtttttcccactacagttatgtttggttatatctattggaaaacagcttctcaagcttacctctttatgaggccctaaggcagctcagtgcgtttcgatgttactgattctagagatgttctgataaaaggtttttaaatgccaatattgaataactagggtcgagaacgaaaactccattaggtcagttttattccttgatcaactttattactcatttggagtgctccaattttctttcattttgttttcaccgaaattttaaagaaaatattcaatttaaatagatttaatcatgtcatattttattaattatagctctgccttctgaattgcctttggttgctattacttctaccatagctaattctcctgtgttaaattttgcagatctagatttcatcaaagtttttgtatcactctggtcactaaaaagttttgtgtgatgtgttagccatggtcaattttcgtttatggtatttctaccggtaatatacattatgaactggacaaaagccctatttatttacaaatgtacagttttgtcagcatgaataaagcatctacctttcctttactgcctttatccccattcccgagagtgcccctcagatcccacataaaatgcatatcagcatatttactgagatcatttttcacgacaacaggatgaggaacttaagggcgagacttttaatcatctatcccttgtgctttacgcagaccctacaatacactagaggcttcaaagaggtcaaaaattcacatgtgtagacaaattaggtcccttaagatgccaggcaaacgaagtgctaccaaaacacgcaatgactgtcctaaaagtgcgttctgggatacacctgtaaacttggatcaagttccctcccctctcctcaaaatatatcgacttgtgctgaaagaaatcacgaccgatgctcacaattctgacctcgtaattatatagggggtggttttggtttctgcgtctttccctgattcagtggcaggtaacatatttcatgtacaaaatgaactgcaacaccacggcaaacaagggacaggccctcaaagttgtcggtagggagccaggaccccgccagtggcgtggggagacaccgtactaaacaagcttgcaaacagcaggcaccttcctgccactgaggaggaagggctggctaagggaggccggggcggaggaagccaagctctgcaggccctgacaaagtcctcccggcctccacgcgtcgccatggcaacgcggggtctgtgctggccgggattggccggcctggcgcgcgcagggcccgctgggaaagcgcgtccccgccgcggctccgccagtttgaacttggcgggccagatgtgggcggcggggcgctgggggcctacttttccctcttcctacgccggtttctctgctgactgcagacccaggtctcggccctcctcggactcctgctcagtccctatgacgggcgcacgtgggcaggggctggaggtggtgcg

SEQ ID NO: 6902 - DNA, 2300 bp, Homo sapien
gaaagcaatctattttgccttaatttaaaactaggtatattaatgaatttagttttaaagtaagcaaattaaatatttgtaagtggacagtattagaagaaatgttggaagtaaccattagaaaacactattttgatatttatttgtaaacatataagaacattttgctgaaacttagaaataaggttttatcctaagtctgaactatactcatggaaaacagattatgaaatttcagaaaaaccattgattcaatctttatctaaaaagcaaatgattaaaaaatctgcatgatattaaatgtagtcagttgcccagatgcttagaaatacttcagtatttacaatcattaagtcctcattttacagatgagaaaacaaaaggcttaatgaaatttaagtgaatccctgagtcacagcaaatttgaccccaaaccagaacccaatgcctcttcatttgggacataattttgtgtgtgtgtttgttttaaatttcatatatgcttgaaatttccataacaaaaagtagagtagtataattaccccacctccctacccttcaccccatacctgtcactgctttgacaattatctgcagcatgtagtgaaccttgtttcatcttcatcctattcactaatcccctccaatccctctgccccttgcattattttgaagcaaatttaagacattatattgtttcatctgtaaatactaatgtctagggataaatttttaaagttgcataatatatgccacagggctaactggtgatggaattatttaagcaaaagtgactcttatataagtttccagagccagcaaaacataattacctcaaatataccatggccaaagtactaattgtatgaaaagatgtcactaagtcaataccctaaaacttaaagggagagacactcttttatacatttgtacatttatatataattctacccatctcgattatggcttctcagctccagtaatgaaaaggcactgtaagaaatgaggccgctggacttaattatgttcaaacaccagcaccagcaccatctgactctgcctcatacccttgggggggtccagcattgctagtgcataatgtcacagttggtcataatgatgaccctggcgcatcaagaaaagggtatactttgtttaggaaaacattttaaggggacaaagaagtatatgacatttagattcccatgcgtagaggttaaagtgaaaaagttctgaagtttacacacaacttttcattgtatctttctgattctgagcttagaaactttgagaattaatgagataatatgaccctgtgaggtaaatttttcccctattttcagaggagtgttaggaatggaaaacctatcaagtaccaagaaaaccactgattccaggtccctttcatactagtgtttttcccactacagttatgtttggttatatctattggaaaacagcttctcaagcttacctctttatgaggccctaaggcagctcagtgcgtttcgatgttactgattctagagatgttctgataaaaggtttttaaatgccaatattgaataactagggtcgagaacgaaaactccattaggtcagttttattccttgatcaactttattactcatttggagtgctccaattttctttcattttgttttcaccgaaattttaaagaaaatattcaatttaaatagatttaatcatgtcatattttattaattatagctctgccttctgaattgcctttggttgctattacttctaccatagctaattctcctgtgttaaattttgcagatctagatttcatcaaagtttttgtatcactctggtcactaaaaagttttgtgtgatgtgttagccatggtcaattttcgtttatggtatttctaccggtaatatacattatgaactggacaaaagccctatttatttacaaatgtacagttttgtcagcatgaataaagcatctacctttcctttactgcctttatccccattcccgagagtgcccctcagatcccacataaaatgcatatcagcatatttactgagatcatttttcacgacaacaggatgaggaacttaagggcgagacttttaatcatctatcccttgtgctttacgcagaccctacaatacactagaggcttcaaagaggtcaaaaattcacatgtgtagacaaattaggtcccttaagatgccaggcaaacgaagtgctaccaaaacacgcaatgactgtcctaaaagtgcgttctgggatacacctgtaaacttggatcaagttccctcc

SEQ ID NO: 6903 - DNA, 2300 bp, Homo sapien
ccatctctactaaaaaaaaaaaaaaaaaaaaaaaaaaaaaagtagctaaacatggtggtgggcacctgtaataccagctactggggaggctgaggcaggagaatcacttgaacccgggaggtggaggttgcagtgagccaagatcacgccactggacacagtgagtgagagtccgtttcaaaaaaaaaaaaaaaaaagaagagatcttaaagaaacgattacagaaactaactttacaatttcttccttatttgttcatgacagttgctagaaaataatggaaatgatttagacgatgaaagcctatttagggaaggctctaagagtaccagattaggagccaggagcccaggagctgttccgtgatgatgttgggcagaacacactctctctcgagcctcagatttcttatctataaaaccagagttttctgggggtctttaagttgtctttcagccctgcagtgagaggagatatgtcattcctaaaacttgaaatgaaggcatatgtttatttattaactctctagcttctagacagatttactgtatgtgacttatgtgcccaacctgacattatcttttagataaactcccaaatacaaagatgataaaattttttcattttaaacttataggtctgcatcaacctgtttccattgtcctaagttttatttacatacgatggctagtcaactttatatgataattatctttaaatcctgctttttttttttttttttttttttttttttgagacagagttttgctcttgttgcccaggctggaatgcaatggcgcgatctccagctcaccgcaacctccgcctcccgggctcaagcaattcgcctgcctcagcctcccgagtagctgggattacaggcatctgccaccacacccggctaattttgtatttttagtagagacggggtttcttcatgttggtcagggtggtctagaactcccaacctcaggtgatccgcccgccgcagcctcccaaagtgttgggattacaggcgtgagccaccgcgcccggccgaatcctgcttgttttaatgtattcattaaaaatgtctccattatagagtaaaacgactcaacgccatggcagagagcaagaaacgaagtacccttaaagccgtagttggtacaggtaatgattccgtggggtctattaggccacagggactcaaaatccagaagaggagggaatgctgataattacctaacaccaacgttgctgctggcttctcagccgtagtcacctcccactcagatgttttggaaattgtccagtgttcagaaacatcactttctctgaccttttacaaaattcctgtgtttcaggattttaaagtgcgtgagaaaggagtctaatttgcagtcaccaaaaacaccaaatacagagagaggactggggagaatgaattgctaagacttagctaccaaatgtgtatcaagataggtgtaaagatcccaggtgaagtgaggcactggagagggtacacttttaacttagtgtatagctaaaacccaaagatgtgtgtcagatcgagggaaacttttttcctcctcttcaaaatcttttttccgtttgcagagctccagacgtcctcgccctttggaacagcggagagtcatttaaaacttaactgaacgctggagggaagttctacttaccaggtcatccaatttaggagatccaatttctgcggagggaacaaaaagacgggtgggggagggaaaaactagaccccttgtcctactatccttctaccttcaatccacaacctgccagacaaatccagccaagtcaagattttgccttgaaccaccaccaccaccaccaccaccaccgccgccaccaccaccaccaccaccgccgccaccaccacaaccaccaccaccttgtcactcacgcccgagaaacacgcccctctggtcctcctcttggccaatggcggctctcctctctgcatagtaatgagctcgagacctccccgggccaatggcgctccgggagaagggatacttttgcatgtacctaagtgatttgcataagccagcggccgggggtttgggaaccagagcgtgcaaccctagaagggaaaaggacgggaagagattgagccgcggctgggagacagcgagccagagtctgggtgtttgtgcgagagccacggcgggggctggggcgagtggccggcatggctgaaggctgcgctctgcaaccttgaagagccgctgcattgagaggccagggacagggagaccggtgcgatggcagagcgcggcccccgc

SEQ ID NO: 6904 - DNA, 2300 bp, Homo sapien
tctgacgctacgtaaacagttgttatatcacattgtttagggaataaggacaagaaaaaaatgtctgtacatgttctatacagacacgatttttttctgagtattttcaatctgcagttggttgaaatatggaacccatggatatggagggctgactgtaattcatcctactaagaggtggagtcttctactgaagaacagaaaagaaatctgtaacagcaaaaaacaaagccaagactatcaaaactaaatgccacagaagttccacattttgtgttgcatttaaaaatacaaagaccggccgggtgcagtggctcacgcctgtaatcctagcactttgggaagccgaggcgggcggacttcctaagctcaagagttcgagaccagcctgggcaacacggtgaaaccccgtctctactaaaatacaaaaaacagccgggtttggcggcgttcgcctgcagtcccagctactcgggaggctgaggcaggagaattgcttgaacccgggaggcagaggttgcagtgagccgagatcgcgccactgcactccagcctgggcgacagagcaagactacgtctccaaacagcaacaacaaaaacacaaaagaccaatacgttagaatcttaactagctttcaaagaaaaaacttactcctgttaacaccaaacagatttgctcccatctataaaacacagtgccactgtgctcaagaggaagatgtcagagacttaggcctaactcggcaagtcttcccagagtagctagtcctctaaaatgatgctttaataggcttaacggaaacaatctcatttacagtgaggcttccaaatggtgaacacggtaaagagcaaatcagcaacattaagtgcacatttgtttgtgggaaggcattaggaaagaggtttttctaagtacagtaattctaaaaatgtgttttcttagggaacaatagtaatatttagactaattgcaaatgttaatatgtgcaatataatttcagtctccatcctacatatacatttttttttaccaccagtactcaaaatgtttatttgtacttctcaattcctatcaatgatttctaatgctggtgtatgaaaagcatgcttgaaattgtttgaaataaaggacttagggacagagtggaatgctggaaatctgtaaaaggactggaaacgctggaatgctggaaatcatggtaggcgcatagccagttattttcgtaggcttctctatctctaattactcagcagaggtggttttattttccttgacagtctgctctaggaagcaatcagccaaccagtttgcaattgtagggtttgtaagaaatgaaaaacactgcacctgcaagtgttttagcatctaccactattcggcttacttacgtaacctccttcccaagaccaagtcagtaggattgtttttaaagcaacctctccatttctaggaggggcacaaaagctagcaaataccccaacccgaatacaagcgaggttgtggagaaagtaatgaaggagtttgtgtgcaaacagcggggaaaggaggttctgttgaattgtaccgtgtgtccgttctcgtgctgtacaggcaatgagtgtagtctgtgcgaaccgggtgtgtgacgtttgcttttcgggtgtacgggtctccgaatgctgcttctgctgtgctcaccaagggagcgcgtgtgcggcgtgtgtctgcgaagcgggcaggttgtgtttagttgtgctgtgccttggaacagtccgtgtgaacagaggagggcttacggttaacagacaaaataccgtaagcgcccttcctagagccaggcacagagacaacggcggcctctggcgccggcacaagggacagcgtggcccggatctcagagcctgggtcactcctcctcccctccagcgacacagcactcccccaacccttccgcccacctccgccgagcctcggctgcactcacctctctccagccgcacgggttcccctagcgccgccatcttctcccttaacctacagacccacaggaaatgacgacagaagggctgaggtgggggggcggggcctaggggaagccggaaaagtgagtaccggctagtatcgcgagatcaggaaggtggccgagtgtgtcgccgcggccatcagggtaagggtacctggacttgcggctttttaggtcggcctggctccgctccttccgcggtgacgaggtcccccggcctcctagggttgggaagagctgctttcctgactctcgttccctgcctcaggcttcccttatcccaatcgcttcgaaccc

SEQ ID NO: 6905 - DNA, 2300 bp, Homo sapien
agctgcagaaaagttgagcatgttaagacataaaagatgtaagacacacacccacacccaaatcaaactggtagaggcaacaactacaatgttttatatgaagaatgaactggacaggatttcaatattagatattgaaaaaagattaatgaatatgaaaacatagcaattatccaaaaggaaacataaagaaaatcttgaaaaaaaaatgaacagagcgtcactgagctgtgagacaatgccagttagttcaatatacatgtatattatgtacatgcacatgactccaatagtcacaccaaaggagaggagcaagagaatggaaagaaaaaatatttgaagaaataagggcaatgtttgcatttgtcttgctctacctggtattcctatcaaggcacctggtatatattaggtgtttaataaacatttcttgaacacatttgcagcaaaaaaaaatgacaacgagtaagagataagcacctgagtgttactgcaacgtatttaggccatcagaggacaaaaaaggggaataatatggagaaaaggcttggtagaagtggcatgccttcagcagggacccacgaaatgggttcaactgagtgtgtacaaagtttggagactaggaagggatgaagaagggcattccacacaagaacaacacaaatgaagatttggagcctggcacagtggcccacgcctgtaatcccagcacttcgggaggccaaagcaggaggactgcttgagctcaggagtttgagaccagcctgggcaacatagcaagacccccatctctactaaaaatttaaaaatttgccaggcatggtggtgcttgcctgtagtcctcgctactggcaagactgagacaggaggctctcttgagctgtgattgcaccactgcactccagtctggacaacagagagaaactctgtctctaaaacaaacaaaaagacttggaatcaggaataaatatggttgaaactatactatctggactgaagtggtggttgcacttagtggtaatgagaaatgaagttagttggatgagttagggtcagagtatgcaaggctttagaaataggaaacaggagagaaaccattgaaagtttctgaacagaacttgtgatgatgaaatcagaattcaaggggagaaaaaggagcatagtggtggcatccatgatggatttggagaagaaaatactaaaggtgaatggaaagggtggaccaggggcaaacaggttattaaaacagtcccatcatgaagtgttgaaatgctggatgtaaacacacctaccacagtatcagtacagactaagggcttggataaatgttagtcaaatccaagtactaaaattcttcttggttcgcgaaaatttcagaagtggctcaaaaatctgtaatgcattaagaatattatttgcttcacaatatttcatttacttaagattttataagaatcagctgcttataaaattgttactttgtggtgcaccaaagcaccttgttctctccctcacccagatatgtttcatgctctttgtactttccaccccttaacagatttggagggaagattcaagccgtggatttttaaatttaaagcaatgctgtcacaaattgagaactgacaacatgtcattacacatttaattgccaccgaatcccagagtttaaaaattgtaaggacctaagagataggacctctcgttgtacagatgcggaaactgaggctgagagagggtaagtgaacagtcccaggtcacagagctgctaatgggcaaggtgggactagaatccaggcttgactcctctacgctgagccaagggttcgaagcgattgggataagggaagcctgaggcagggaacgagagtcaggaaagcagctcttcccaaccctaggaggccgggggacctcgtcaccgcggaaggagcggagccaggccgacctaaaaagccgcaagtccaggtacccttaccctgatggccgcggcgacacactcggccaccttcctgatctcgcgatactagccggtactcacttttccggcttcccctaggccccgcccccccacctcagcccttctgtcgtcatttcctgtgggtctgtaggttaagggagaagatggcggcgctaggggaacccgtgcggctggagagaggtgagtgcagccgaggctcggcggaggtgggcggaagggttgggggagtgctgtgtcgctggaggggaggaggagtgacccaggctctgagatccgggccacgctgtcccttgtgccggcgccagaggccgccgttgtctct

SEQ ID NO: 6906 - DNA, 2300 bp, Homo sapien
gattctggtaattcgtgcactagagtgtctatttcgaggcagcggaggtatcatatgacagcgcacgtcaaggcaccgtggagccctctcgtggactcccacccactttcccattcaccgcggagagggctgctctcgctgccgctccccccggcgaactagcatgaaatctccctgcctctgccgagatcaaatggagcttctcgctgatggggtgcgagtattacctccgccatgcaatttccactatcaataatttaacttctttgctgcagaacagaaggagtacataccgggcaccaaagactcgcgccccctcccccctttaattaagcgaagggaacgtgaaaaaataatagagtgtgggagttttggggccgaagtctttcccggagcagctgccttgatggttactttgacaagtagtgactgaaaaggtgggtttgttttctttctttctctttccgtttttctgtttggtcggctagaaagcgtgtggctttagcgaggtctgtcattgcctgggcttcctggctggaacaagtaacttggtgtaacgttatctgggggcgttcatcaataaaaaatgctgttattatcttgattgaattcctattaggcaaactctagagaggtcagtgcgcgaactctgtttaagccggcgtgtttaaggcagcagagtaaaccaatagcccccatgctctgtgcgatttcattgtgtgctcgcgttcgcaagctccgtagtgcaggaaggtgcgggaaggtgtgtctgtggcccgggaaacgcacgccctctcccagagaacttgggtgctgggatggggaggaaggggagagttgaaagctaggggagcgagacctcggggcgtgcgattctcactcgctccctcccgccccagcgcccacagccggggtttctgcagagggcgcgggacgcggggttccccggggctgaggctggggctggaacacccctcgaagccgcgggcgtcctgtccaaggcgccccaggagggcgcaggactcgcagggcgatgtcgcggggccctaggggaggaggtgaggacaggccccgggggagcggggagttccgggcgcccctcggttccccgcgcgaggaaaagacgcggcgttccctttaagcggccgcctcgaacgggtatcggtagcgcgggcgagcggggagcggggggcggggggcgggggggggggggcggcgccgtttgaccaatcgaagctcaaccgaagagctaaataatgtctgacccgggcgcaaggcgcagcctggagctccgggtccccgacgctgccgccgccgcgcccgggcgcacccgcccgctcgctgtcccgcgcaccccgtagcgcctcgggctcccgggccggacagaggagccagcccggtgcgcccctccacctcctgctcggggggctttaatgagacacccaccgctgctgtggggccggcggggagcagcaccgcgacggggaccggggctgggcgctggagccagaatcggaaccacgatgtgactccgccgccggggacccgtgaggtttgtgtggaccccgaggtaggcaagcgctgggaatggggcttggtgcaggagctgcccgtccgcgggagagagttgactgggggatcccccaccccaaagttgtgggacgaggccagtctccttctttcctcccctccggtagaagggacgatttggagttactcttggggagttttctcccccatcccacaacccagaaggtcagccggcaccaccagggaaaaagggacccggggaagtcacgaagtagaggagggaaggcctggaggagacccagagctgcgtgatgggagcaaagacggcgacccggggatccctcgcagccctcccccagcccaggagtagtcgagagagacttagggggccagagctgtcgagggtcctgactgaggggagggtgctggggctaggctaggaatccttccagggggtgggtggtccccgcgccgacttgcggggggagtgggagggaagcttgcgccttcagcccgcatcccttccccggagctgcacacggctacctgctccccaggaattgagactgaagtggacttacaagtccgaagccaatgtagcttggaaaacttgggaggcggaattcctaccgctgggaactgaaagggtctgcgacactctcgggcaggccgaacccacatctctacccatcctgcgcccctcttctgaagcgccctccagggaagttaagagttttgactttcggggagtggttgggatgtacgtgggg

SEQ ID NO: 6907 - DNA, 2300 bp, Homo sapien
cttcgcaattattaggtcaaacccctttgagattacagaaaaacgcacacacacagaaagctgcctgcagaatttgggtgtgggcttggtgggagattcctctgatacccagtgttgtacccccaagagagtgtttctcaaagtgtgacttcagattgtctgcattcgaattgcttgtggtatttattaaaattataactcctgggccctgccccacccctactaaatcacaatttcaggaggagggaccttcattttaacactcacccaggtgatttttatgctccgaggaggtccagggactccaagttaagtacggtactgctgtcttattctttattctaaattttaaggtctgcacaaattggttgaactaatgagaagaaaattcagctttaaagcagaaacacaggtagacggttgacagagttcatcaaatggataattgaaaatgtcctctggaccctagccatataagttctcttcaagggtcttggctacaggcaaatgagaacccgaaaggctatttgctcttttgctgcgggcagtggtgggggtggagggcgggggaggattaactgagccagttctgcccccaccctcgaatcacctacccccactctggttaaagcagaagactttttatttatcttggctgccctggttcgttattaaaagggttagcttatacgtgtgtttgctggggctggaagtgaaaacatctgcaaaagcatgcaatgccctggaacggaactcttctaataaaagatgtatcattttaaatgcgctgaattttgattctggtaattcgtgcactagagtgtctatttcgaggcagcggaggtatcatatgacagcgcacgtcaaggcaccgtggagccctctcgtggactcccacccactttcccattcaccgcggagagggctgctctcgctgccgctccccccggcgaactagcatgaaatctccctgcctctgccgagatcaaatggagcttctcgctgatggggtgcgagtattacctccgccatgcaatttccactatcaataatttaacttctttgctgcagaacagaaggagtacataccgggcaccaaagactcgcgccccctcccccctttaattaagcgaagggaacgtgaaaaaataatagagtgtgggagttttggggccgaagtctttcccggagcagctgccttgatggttactttgacaagtagtgactgaaaaggtgggtttgttttctttctttctctttccgtttttctgtttggtcggctagaaagcgtgtggctttagcgaggtctgtcattgcctgggcttcctggctggaacaagtaacttggtgtaacgttatctgggggcgttcatcaataaaaaatgctgttattatcttgattgaattcctattaggcaaactctagagaggtcagtgcgcgaactctgtttaagccggcgtgtttaaggcagcagagtaaaccaatagcccccatgctctgtgcgatttcattgtgtgctcgcgttcgcaagctccgtagtgcaggaaggtgcgggaaggtgtgtctgtggcccgggaaacgcacgccctctcccagagaacttgggtgctgggatggggaggaaggggagagttgaaagctaggggagcgagacctcggggcgtgcgattctcactcgctccctcccgccccagcgcccacagccggggtttctgcagagggcgcgggacgcggggttccccggggctgaggctggggctggaacacccctcgaagccgcgggcgtcctgtccaaggcgccccaggagggcgcaggactcgcagggcgatgtcgcggggccctaggggaggaggtgaggacaggccccgggggagcggggagttccgggcgcccctcggttccccgcgcgaggaaaagacgcggcgttccctttaagcggccgcctcgaacgggtatcggtagcgcgggcgagcggggagcggggggcggggggcgggggggggggggcggcgccgtttgaccaatcgaagctcaaccgaagagctaaataatgtctgacccgggcgcaaggcgcagcctggagctccgggtccccgacgctgccgccgccgcgcccgggcgcacccgcccgctcgctgtcccgcgcaccccgtagcgcctcgggctcccgggccggacagaggagccagcccggtgcgcccctccacctcctgctcggggggctttaatgagacacccaccgctgctgtggggccggcggggagcagcaccgcgacggggaccggggctgggcgctgg

SEQ ID NO: 6908 - DNA, 2300 bp, Homo sapien
ttttcctcagtaaaactgcaccacacactggaaagcgaagatacacacatttatttatataatgtcaagggagagtaggaataagaagattggccatagacccacccaatcagagtctgggaaatgagaacactttttccttcagcagaaatgctgacgtgccaatgtgaatttagcagaaaaaagatttgccataacttctaagtgagcagccttcagaatgctagcttagattcctggcattaacttgccaggtattttttcaggaaggaaataaattacaattgagcttaaaaacctgagggtagaactcattttcaagcaaatgtgaagcatcagtttgaagttaacaaagttaaagtttggagtagggttcctccagtcctttataatgtagtacaagtattttttttaaatgtataacactagccttttaaattgtattgtgctactaaaagaaattgtgcctgcattcatcttacaacctgggaaccaacgcagagggtctgtggggtagcggtatccagcttcatgccctctgtcctttattgctttctggttagcctgcgtatttcacatacattaaatattccacaataaactctgccatctgtgctgtagggtagtttgtattggtcatgtgctctgtcaagttgacagaggtgcaaagctaaatgtgtgacactcgaagaatatgcatatatttgaataatttgactatttagtccaacaatttgcaaaggcgctctgaatgatcacacattctgataacacttccaaggaacagatagcttcacttagggggtgggggagatggaagcagggttatttctagcaggaattcttgagttcactgaagtcttgtccctggtacttcactgtgtgaacgtgggtaaattatttcctggcagaggatcggattcttcttttataaaacgggtaaataatttctgtcactagtctttagaagttctaaaatagctaatgttagtgaattcattttgctaactgtaaacccttaggtaaattgaactgagtatgtaataatattatatattcagttcaacagcacattcttggtaaccacaagagggtccaggaaaggaaactgtttataaatctttccctttagcaaaattaatgttggagtctttagggaaattcttacagcaatagtcttcgcaattattaggtcaaacccctttgagattacagaaaaacgcacacacacagaaagctgcctgcagaatttgggtgtgggcttggtgggagattcctctgatacccagtgttgtacccccaagagagtgtttctcaaagtgtgacttcagattgtctgcattcgaattgcttgtggtatttattaaaattataactcctgggccctgccccacccctactaaatcacaatttcaggaggagggaccttcattttaacactcacccaggtgatttttatgctccgaggaggtccagggactccaagttaagtacggtactgctgtcttattctttattctaaattttaaggtctgcacaaattggttgaactaatgagaagaaaattcagctttaaagcagaaacacaggtagacggttgacagagttcatcaaatggataattgaaaatgtcctctggaccctagccatataagttctcttcaagggtcttggctacaggcaaatgagaacccgaaaggctatttgctcttttgctgcgggcagtggtgggggtggagggcgggggaggattaactgagccagttctgcccccaccctcgaatcacctacccccactctggttaaagcagaagactttttatttatcttggctgccctggttcgttattaaaagggttagcttatacgtgtgtttgctggggctggaagtgaaaacatctgcaaaagcatgcaatgccctggaacggaactcttctaataaaagatgtatcattttaaatgcgctgaattttgattctggtaattcgtgcactagagtgtctatttcgaggcagcggaggtatcatatgacagcgcacgtcaaggcaccgtggagccctctcgtggactcccacccactttcccattcaccgcggagagggctgctctcgctgccgctccccccggcgaactagcatgaaatctccctgcctctgccgagatcaaatggagcttctcgctgatggggtgcgagtattacctccgccatgcaatttccactatcaataatttaacttctttgctgcagaacagaaggagtacataccgggcaccaaagactcgcgccccctccccccttt

SEQ ID NO: 6909 - DNA, 2300 bp, Homo sapien
aatcattggtaacctcgctcattcattagaatcacgtaagaactcaaaaggaaacgtgtctctcggagtgagggcgtttgcgtaaatctataggtttttcgacatcgatgccagttgctttgtcttctgtagtcgccaaggtggttgagagtttaagcttgcggatattgcaaagggttattagattcataagtcacaccaagtggtgggcgatccactgagcaaagccgaacttctcacatgatgacttcaaacaagacacattaccttccagcatctgttggggagacgagattttaagacacttgagtctccaggacagcaaaggcacaatggtgagtagcaataaaacctgcattataattgaaaaatcttgacatgttgcttaacaacgggcatatcacggctcttcctagcacttcacacgccaaagaacagcagctactcaggccaggggaatcgggtttttacacagtgcaactttaattggaatcatttgagatttgacacagctatgtggaactgcgtggaacaaacttggagctgggtgggggggtgtgtgttatattggttgttcaaggctgatgcttgtctctcagcagtcttgcattctattcttttccttaatgtgtatggtgtatgatcatattctatgatttatatgtgggcatgtaattgacatttgcaagggggttaatttccatctaaaaacaataatgctgttagaggttggggttagggggtggagtgggggtaagggtggggtaaagactgggagtttaggtgtagatggggggtggggttggggggagagaaataagtcagaagtgcatatcaccggtaatgggtaatcctctcgtagaagaaaaggttctcatcaacatgtgatcaactattaacaggatggctttggcaaagccatccgcacgtgacaaaccgtaaggaagtggaagaaaccgtctagagcaatatcaagtatcacttaattagagatttttaagccttttcctcctgctgtgccgggtgtgtaatccgggcgataggagtccattcagcaccttggacagagccaacggatttgtccgaggtggcggtacccccaggtagtcttcttggccccgctgtaaagccaaccctgtgtcgcccttaaaaagcgtcttttctgaggttcggctcacactgagatcggggctggagagagagtcagattttggagcggagcgtttggaaagcgagccccagtttggtcccctcattgagctcgctgaagttggcttcctagcggtgtaggctggaatagactcttggcaagctccgggttggtatactgggttaactttgggaaatgcaagtgtttatctccaggatctagccaccggggtggtgtaagccgcaaagaaggtaagcaccagggcggggaccccttgcatccccaattcttgagctattttgatactgtcttccggagaggacgcgtggtggaggggaggaggtagagggagagcatgagagggggttgtttcttggtatttgcccagtttgaattgccctaggtgagaaccctggggcaaagggagaaagaaaaaaaagaaactcagtcttcctgcggatataatgagtttagttaacttggacctgcaaatgtctgattcaaatgtaagatttatctctctttttctcctcttcacctccctcttttccgttctctttgctggtgtgtgtgtgtgtgtgtacagtagattcattactaattatgaagcttttgcaaaacattcgaattcctaaaatttgactttgtagcatttagaatcaggcggtggaggtggtgtgcggtggggagaggaggtggaggttgggaagagggaaggaggtaaagctaaacctccaacacaaaaaaatgaatcaaggtaatttcagctcttctagtgagaaggattcattctctctgtatccctccctccctctctttccccctccctccctccttcccgccccccttcttccaccccgccccctcctccagcctccatccctccctcattctatctcttcctctccgtcgccctcgctcctcgctggatgcttctttctgggttttcttttttttttcccttctgtcctccctccccgcgagtttcgggcgctggcttagagggttcccgctttctcaagggaaggggagctgccgagaccgcgctccgctccccagccgggccggatgcctcactgagcccaggtccgagtcagtcggggtaactcagggaaaggggagcctccgcctgggagtagaaggtcctttc

SEQ ID NO: 6910 - DNA, 2300 bp, Homo sapien
tcctttcgcctccaagttactttccgccaacacgtgacctcttcgcttcccagcttgcgcagccactggtggggaagcgcgggcgctaaccgcagggcttcctgggagagccccctccgaggttcgccaccccagccctggctcccgccgcgctcaccccggcaccccggcggcggggcagcccccgcaggatgaggaagcggctccggggaagcagcaccgagcagcagcggagcgcccaacctgccgcctcccctcccgtccctgccttggcccgcggctccgctctccgcggctcgccttccgacctagctgcgcaccggggctgttaactcacatttgggaagccataacccattagagcaaacgcagtcataacttcattcaactcagccgctcgagagctcggcttacacaggttcctgtgggcaactagtggctcgccttggtgcctctcgcctagtcatcagtacctaagaggaaaagggaaagttgttgggctggttcgcgcttcgacgcatgcagatgttcccaaggacaagtcacttactcgcccccctccccccagtccccatttgatcatcactcacgacctcatcggctggagacccttagtcatgatgggggagggggaggggcacgaacttttctaagaagtttcctttttttacccagagagtcacagtgagtcggtcacgtaaacagcgaggttagtcgtcgccgttgccgccccccaccccctccctgctgcgcttttctggtattattattaaagcggtagtctgccggcgctgataagcaacaagttccccagcggtcttcccgccctagcctgacaaggcgaaggttttcttacctggcgacagggaaatctcccgagccgaattcagcttcgccggagccccaggtgtgacctgcgtagtgggcaagggagcggtgtgcaggctgagtttttttttttacaggggtaccctgaaactcctcactttctctgggaactttcagtgccaggacccagtaacgggcggttagaaggcagccctaggaaacacctgctacatagcagggcagttgggcaatcattggtaacctcgctcattcattagaatcacgtaagaactcaaaaggaaacgtgtctctcggagtgagggcgtttgcgtaaatctataggtttttcgacatcgatgccagttgctttgtcttctgtagtcgccaaggtggttgagagtttaagcttgcggatattgcaaagggttattagattcataagtcacaccaagtggtgggcgatccactgagcaaagccgaacttctcacatgatgacttcaaacaagacacattaccttccagcatctgttggggagacgagattttaagacacttgagtctccaggacagcaaaggcacaatggtgagtagcaataaaacctgcattataattgaaaaatcttgacatgttgcttaacaacgggcatatcacggctcttcctagcacttcacacgccaaagaacagcagctactcaggccaggggaatcgggtttttacacagtgcaactttaattggaatcatttgagatttgacacagctatgtggaactgcgtggaacaaacttggagctgggtgggggggtgtgtgttatattggttgttcaaggctgatgcttgtctctcagcagtcttgcattctattcttttccttaatgtgtatggtgtatgatcatattctatgatttatatgtgggcatgtaattgacatttgcaagggggttaatttccatctaaaaacaataatgctgttagaggttggggttagggggtggagtgggggtaagggtggggtaaagactgggagtttaggtgtagatggggggtggggttggggggagagaaataagtcagaagtgcatatcaccggtaatgggtaatcctctcgtagaagaaaaggttctcatcaacatgtgatcaactattaacaggatggctttggcaaagccatccgcacgtgacaaaccgtaaggaagtggaagaaaccgtctagagcaatatcaagtatcacttaattagagatttttaagccttttcctcctgctgtgccgggtgtgtaatccgggcgataggagtccattcagcaccttggacagagccaacggatttgtccgaggtggcggtacccccaggtagtcttcttggccccgctgtaaagccaaccctgtgtcgcccttaaaaagcgtcttttctgaggttcggctcacactgagatcggggctggagagagagtcagattttggagcggagcg

SEQ ID NO: 6911 - DNA, 2300 bp, Homo sapien
gtttgtgggcaatttgagcagtcctttcatttggcgagaactgttgtgttgatgactgtgagggtttctgaaatcctttcataaggacccatctcaggtctccaggagcctggcaaatctagaactactcctaatgagaaccaggaagcttttgtatacagatattttatctggagcctaagataagcctgtttgactttggaaacatttctagagaagcatgaactcaacactagacttactgctaataataataacccagtaccaatgggggctgcaatgaacagaggtccatgcacataattgggaagtaaaacttattttccataaggaaggcatttctgggatgggagagggaggaccttgaagcagccactgaatgcttatgttctgttgcttctaatcatcctatcgtgtaagtaagatttttctacataagcaagcaagaatgatattcaaacaaagcacttttgactggaataaagaaactggaaattggaaagggctgggtggtctgaaacttaagagctatccaccatcttctgcagcatcgctgtgcctcatccctgcagtcaatagcgccacggccagggcctgtgacgccgttggtgggctccccttggtgggaactcagagcgagtaaaatcatggtgtcagtgccaaaacgacgaaacctgaaatgcgtctggggacttcccagggcactagcgctcctcagagcgacggacatctccataacaactggtctacattcatccctggttcttctgctctgctgtgctagcgatggctgagggtaggcaaagggcagcttcagtggaaagataccttgcgttagcgcctccctaggctgggggacgttgccaaagctcgagttattgcctatttcccgagatttccggagtcgtccccacatctcccgcggagagcggcgcccctccgccccccctcccgcctccccctctattagacactccaagggggtagtttgtttcattgtgctttttttcctcttctcaaagttcatcctttcgcctccaagttactttccgccaacacgtgacctcttcgcttcccagcttgcgcagccactggtggggaagcgcgggcgctaaccgcagggcttcctgggagagccccctccgaggttcgccaccccagccctggctcccgccgcgctcaccccggcaccccggcggcggggcagcccccgcaggatgaggaagcggctccggggaagcagcaccgagcagcagcggagcgcccaacctgccgcctcccctcccgtccctgccttggcccgcggctccgctctccgcggctcgccttccgacctagctgcgcaccggggctgttaactcacatttgggaagccataacccattagagcaaacgcagtcataacttcattcaactcagccgctcgagagctcggcttacacaggttcctgtgggcaactagtggctcgccttggtgcctctcgcctagtcatcagtacctaagaggaaaagggaaagttgttgggctggttcgcgcttcgacgcatgcagatgttcccaaggacaagtcacttactcgcccccctccccccagtccccatttgatcatcactcacgacctcatcggctggagacccttagtcatgatgggggagggggaggggcacgaacttttctaagaagtttcctttttttacccagagagtcacagtgagtcggtcacgtaaacagcgaggttagtcgtcgccgttgccgccccccaccccctccctgctgcgcttttctggtattattattaaagcggtagtctgccggcgctgataagcaacaagttccccagcggtcttcccgccctagcctgacaaggcgaaggttttcttacctggcgacagggaaatctcccgagccgaattcagcttcgccggagccccaggtgtgacctgcgtagtgggcaagggagcggtgtgcaggctgagtttttttttttacaggggtaccctgaaactcctcactttctctgggaactttcagtgccaggacccagtaacgggcggttagaaggcagccctaggaaacacctgctacatagcagggcagttgggcaatcattggtaacctcgctcattcattagaatcacgtaagaactcaaaaggaaacgtgtctctcggagtgagggcgtttgcgtaaatctataggtttttcgacatcgatgccagttgctttgtcttctgtagtcgccaaggtggttgagagtttaagcttgcggatattgcaaagggttattagattcataagtcac

SEQ ID NO: 6912 - DNA, 2300 bp, Homo sapien
ggtacattatggtcctgaccagttttttagactaaccacagtaagcaatcattgtcatgatttcatgacttaagtaactactatcttaatttgggcttcccaaagaagagcactgctcactgatgatgtggagctttttccggaatgggaaataaacacacggtggcctatgaacaagcaccgtcttcatttccgtatgtatcaatggctatgagtttttcatactttattgatgtatcaacatataaattccctacaagccagccaaggtatcatggagaaagcactaaacactgaacacagagacctgtgcttaaatcccaggattgcgacttatttgtttgatcttagatgaatcacttctcttgcctgagcttcattttcttgacatttaaaataaagataccagtactaatcttaccaacattttgaaatttggaggaggcttaagtaagattatatatgtgaaagcacaaattaaaaatctagtcaactgccacatagtaggtgttccttaaaggaaagtaaaaatacaagtatgtcaaaacacctagtatattgcatgtcacttagcagttgatcaaaattatttgtcaactctatttctggaataaccatttgtttattggcccaagactttggttacttggcaacttttccaggaagtatttctggagccttttcaaactcctaccttagatagaattgacctgattgagtagaggcaccattattttttaagcaatttaggttgttttccagttggaaagggggggttgtaataaataatgtcatgataaaatctttttgcataaagctttctccacattcaggaatttattttccccccatcatttaggttagatttcccaaagtagaatcactgggtcaatgggtccacactgttaaagctttagttatattttcaaattgctttccaaaaagtttatactaattttcacttatatatcagttgtatgccttgaattttacctaaccctcatataggtacctcctacacacatcatttataataccagcaacacaatgtcataattttcacatatgtattaacccttgtaaattgggagctcgccgggccagatttgttgacacttgttgaagcatgaatgaaaagggagaaaagaaagaaggaaggagaaggaaagaaataaggaaagaagaaaagaagaagagaaagaaatagagacagagagaaaaaaagaaaggggagaagaatatatagatatagaagacctgcaggaccagataaatgaagcatggagaggaaagagtttatggtttttagctgccagcactaattaaagcctcctatggagcacttttcctcgaagagaggaagggcagcatgtcacatactataaggtgcatatacatgagtaaataaattgccaaccaatacatttttaaagggagcccattatgcttatttattgaagctttcaagtgttacatcggatcctgcaatgaagtaaattattaagcatctctgtatctactctggaaaatatcatggctgcttcttttgagccttatttctatttccactctgagtctttcttttggggcacttggagtaattctttgtgatatgcatcactagagtgcctcttaagaaaatgtcagagaccacccactcccagtttttacagaagtctggtagacagaaattatctgtgactgattaatatggatattgaaaatcaaagtaatgtttatcatgtttgtttttctgtgatccctttctcccttctccaagttcacctgatttctaccactttttcttaatcttgcctcaaagaaatgtgttcgtttgttgttttctttcagaaactagaaattggaaatagttgaccttgagtttgactgtaaccgaagttgtcagtcatttgactgcctccaaaacctgcagagattttactttcaaagtgaaggcaaaaataactatacaactcagtcaaatgaaagcaaatgcaggggccagtaaattagaaaagagtttcaatcctatttttgtgaaagctctagctcattgatttcagtgaattcaagcttcctttccaattttatcaccctcagctcctctgcatggaaccaggtggggagagagcgaacctcaaagtcatgcaaagggcttcttagcctggcttgaccactttggaacaggctgtctgtgggcaaaggattcaacctcactgaacctcaattttctcaaatgcaaaaagggtatgcagcagtacttattagattgttatgaggatgaactaaaaataagatat

SEQ ID NO: 6913 - DNA, 2300 bp, Homo sapien
gcctatcattcattgtagagaattgtaccagcaatgaattatcactatgagctacttattagaacacagaaggaaataacacaaaataattttttagagactaaattttgttattttttttcttaaatcttgtcagtaatagttgtaattgtcatttggttagcaagtaataaactttatacctttaataaattcataaaatcgggtcactagtactacatagaaatgtgtgttacttataaaaattactttttaaaaaatggccagagatataaactacagatatgtattcagtatgatgcagtagagtgaagctgtctaggctccagttcctactctgctaatacctttatgaccatggacaaatcatttaacctctcagagtcttagttccctcatcattcaaatgggtctccttttgaaatttattattagtaattatatgtcaaaattaatgtaattgaaggataaccgaaacaaataccacctgtccttggtatgggttttctgtaacatttaagctctaaaatttcaaaagtttggactacttggacattgtgaaataatagatatcttccacagtaagaaccatgccatctccatacaacctgcatttcccagagtttcccagtaccgtgtgttccatacatttcctgaaaataagaaaatgggccgggcgcggtggctcacgcctgtaatcccagcactttgggaggccgaggtgggcggatcacgaggtcagaagatcaagaccatcctggctaacatggtgaaaccctgtctccactaaaaatacaaaaaattagccaggcgtggtggcaggcgccagtagtcccagctactggggaggctgaggcagcagaatggtgagaacccgggaggcggagcttgcagtgagccgagattgcgccactgtactccagcctgggagacagcgagactccgtctcaaaaaaaaagaaaagaagaaaatgcacttcagctatcttacttatctctgtttcaccatagtcatcaaggcaggaattatgagtgaggggatgactccaactttaagtttcaatttcaaacctaggtaatcaaactcttcaattttctggaatgatagaaaattaatggcaacatgagatcgaaggtatgaggtgaataaaagtgaggtgctgcttgtctttaggataaaattctaataactttaaattagcagtgtatgtgtgatgtaatcaccattttttttttttacatcaatgctaaagcagttctttttattttaaggtatataatgaacagattcgtgatctcttagtaaattcagggccacttgctgtccgggaagatacccaaaaaggggtggtcgttcatggacttactttacaccaggtatgtatataaacatctttttccctgttagaatagcaaatgtgactattaagctattttcaccagccatgcacttactttccatcctgtttgagaaaaaaaactaatgaggtacagaatttaaatgattagggtatatttttagtcttattttgttttcttttaaaatagagtgaactttttaaaaacattttttaaattttatttttaaattttaatctacgtatgtatgtatgtatgtatgtatgtatgtatgtatttatttatttatttatttatttattttgtgaccgggctatgagactggctaatttttgtatttttggtagaaagcgggagttcaccatgttattcaggctggtctcaaactctggggctcaagatctgcctgcctcagcctcccaatgagtgagcttttctttcaaaaatctgcttgaacatttaatgtcatattattctactcaatagactccactcctgagaaactagattttatcttttattcttcatataaacacacacaatactaagcagatgagacaaagttagtatttaataggattgaatttatagaaaacattttcttttacctttaaatctttttgttttttgaacatttattgaaaaatttaaagatatattgctgatttttaaattttgcttctacttaaacttctccagcccaaatcctcagaagaaattttacatttattggataatggaaacaaaaacaggacacaacatcccactgatatgaatgccacatcttctcgttctcatgctgttttccaagtaagaggccactagactatcactcttaaaattggatttaaaataaatgaagctaaattcatgaatcatcattttcatacatgtgaaaaaaatctgtctgtagacttcacttgtcagtactttcctttatag

SEQ ID NO: 6914 - DNA, 2300 bp, Homo sapien
ccttggagttattcttcaatcctgtctctctctttcactctacatctacctgtcagtaaattctgtcacctttaccctcagaatacacccataatctgaccacttaccacctctgctgccactaccctattctgagctgacagagttgtctcttgtctacattacttcaatagactagtctattatattatccacatagcagtgagagtgatagattatgtcactcctgtgctcaaaacgacttccagttgttctttgtcttactcagagtacaagccaaagttcttttaatggcctccatttctcctctcatgtcttactacactcccctttgctcactccattctggccaacataaagtagcaccctgggtccttctctctatggggaaaagcttcctacaatacctgtatgactaactccctcacctccttcaagtccttacttaaatgttgttttgggtgaatttattatttttgtctcttttattttaacttacaaatgacaaaaaaaatgtgtaagtttataggatacaatgtaatgttttgatacatgtgtacacagtggaatgagcatatcaggctaattaattaacatatccatcacctcacataccatttttttgttgtgagaacatttaaaatgtactcttagcaattaaccatggtcaccttgctgtgcaatagatcaccaaaactattcctcttgtataactgaaactttgtaccctttgaccaacatttccccttttaccacccaccccaccctcctcagcctctggtaaccattactctacttctctgtgttcatatttttagattctgcataaaagtgagatcatgtgatatttgtctttttgtacctggcttattttacttagcataatgccccctagattcattcatgtcgtcataaatgacagaattttagtcttttttaaggctgaatagtatttcattgagtgcatataccacattttttcgatctatttatctgttgataggcacttagattgtttatatatcttagttattgtgaataatgttgtagcgaacatggcagggcaaatatctcttcaacatactgattttaattcctttggatatatactcagaagtgggattgcaggatcgtcctaagtctcaccttttggtccttactcagatcttgttgttttggggtgttttattttgttttgtggtttggtttttttttgtctttttgttgttgttgttgtttgtttttttgttttggtttttgggtctgcagattctagagtattttctggatagttgagacttccaaattattgatctttgttactttacttttcttctttgcatgtgaaccagtcataaaatcagaccataatttttaaacctgctatcattgattccttaaacttgcacacaattagaaagcagagagtaggatcaatattcagagactaggtctctgaatacaccaaggagtctatgccatctctatcaccttcagacctgagctatctagttgaatgcatccttggaactatttttaaccctatgggcttctgagatacaggtagagaccagcctgggtgtatcactttccacggccaaggggcttgcagccaagatcacttttactaaaaatagttcacaagctaaggctctccaatcataccttgatatggttctgggagatccttttctattcattcccatgacctaagctgaaatagtgctggagggcttgtgaaaatcaaatctgggttttaggatagcatatctgtgattatatatggttcagctatagtatttgagtttaagccaaatatcctactaatatttcaggtaaagagatttttatcgtagttgtgtgtacgtatgtgccatttaattgtttgttttagggtacttaagtgcatatgtgtgtatgtgtgcatatatttgtgtgtgtgtgttgtgtgtgcctacgtatgtatgtatttttcccccagtgtttacctagtgagtgaaacagaattattaacatcttttttgaatgaatactacatgccagttgttttgcatgaaagtaaaaactgatattaaaactttattttcttttttaatttcagagaagtattcaagtatttatacagataggaatcaagataatcaacaatgtctgtcactgaggaagacctgtgccaccatatgaaagtagtagttcgtgtacgtccggaaaacactaaagaaaaagcagctggatttcataaagtggttcatgttgtggataaacatatcctagtttttgatcccaaacaagaagaagtc

SEQ ID NO: 6915 - DNA, 2300 bp, Homo sapien
cttccaaacaatgatacagaagtagagtgacagttatgatatattaaatacaaactcaaacctgaattagattcagattcaacaaacactgtataggactgaaaacgatactcaacactatcatctacagtccatcttaaagctctttttggaatatcagtcttgggggcactactcccaccaacttacaaccatcagggaagaataaaaggttcaactggagggaaggccggcactgacagctgagctattttttttcctcttagttttcacagttgtcagcaaaaaaaaaaaaaaaaaaaaaatcatttttatcgtgtctcttaattgatttggggtatttctatgatgggacaagatgcactttcaatataaaaatattatgtatttgtaaatacttttcaatagtagaagaggaagggctgggtgccctgcctcacacctgtaattcctgcactttaggaggccgaggcgggcagatggcttgaggtcaggagttcgagaccagcctggccaacacagtgaatccccgtctctaccaaagatacaaaaattagccgagtgtggtggcaaacgcctgtaatcccagctactcgggaggctgaggcacgagaattgcttgaacctgggaggtggaggttgcagtgagcagcgatcacgtcactgcactccagcttggaccacagagcgagactctgtctcaaataaatgaataaataatagaaaaggagattaattactactattaaaggcagataatcttttaagtttttttctttgtgattgtgctttgtagataatctttgtttattgaaatagttcttacaaactatgaacttaataagaagcactatctagtcattggatatcacattctctagcatcaaagtttataaaaaccttacaaaaacgaaacaggaggctagacgtggtggaatgacactaaaaattaaaatctgtagagtgcctaaatttctacctaattatccataatctaaactatatattataccacaaaatcagttcattctggtcaaatactctcttctcatataataaacagcagtcagtcttggcttctctgtaactgagtgactaatgagctcctaaaaaaaaaaaaaagtcctgcggaaaccaagaacagactataggactgattctaaatgtttacagtttaatttcatctgcagagcatttgccaaacagtatctcttccgtacctcatctgatcctcggcaatcccgttaggcagtcagagcggcttttatctcgatgctacctacaactggggctcaggaggggttcccgattgaccagtgcaagactaacagttaaagctcttcagacaaaaattttatgcagtgatgaacaaaagctcctcgtttgataggtaagcccctgggtacgcttatatgtgagtctgaaacaaaacactcccaatttggagtccggaaaaaagctgacactacaaggtgctgggcagttaaagttctctgccagtctgggaaaggggccaagatgccctttaaaacttaagacttcctctcaggacttaaggagatccctgcccttccagctgagcagtcgaggattacggtcaagcagagctgtgctcttagcaggttctcgaatccctttttcctttcactttctccccaggtaccctgatcccccacccctcaacgcttctgtgtttgtcaagaagcccacctggtcttctagacctgaagcggcaggaccctccgttcccaataatacaagtcaccaaaaggagcgtcccagagtccagttttaccttcatgtgcctctcactcacttcaggcccaggccaggttaccgcaaccacttcactttaatgtccgcctcccagcgcttcagactcaaccacaatattcaaacccaagccactttcctcagcgcttcgtttcattggctgccgctcgcgtgatgtcatcacgtcggacgctgtcacggctcgcggcagcttggcgccaagaagctcagcctggctgcgcaggggaagctctttgcttgctcgtcaccgtggcaacgcgcgcggccgtttccggaggcggtggccaaagtgggcggggctaggccggagctgctggtgggaggcagccacttgagatcaccaggcctcctgtagaccggcgggtgcagggcccggtcccagagttaagggtgtgagtgagactgctgcgggcaggggttggcctatgccctctgctagggggagaggtggagtttgggtgtggattaatgggttctgggtgtttattttcttttctctgagtagt

SEQ ID NO: 6916 - DNA, 2300 bp, Homo sapien
ttgggtccacgtccgcccaagcaactgaggaccgtctgcctttggttccgctgtttccagcctcagctgccaaagggtcctgttggcctggggtttccaaacgactttcctgggggaaataaataagacctcactattgccatgtttaaattcacttttactttttccatttttattttttggtctgaaacaactttaaatctaacttttcatttatccttatctctgctctttggtttacaatgaaagtatattaaacttgtattctgataacacagcagttatactccaatttttaactaaaagtgggaatttctgtctcattagctctatgtttagaaactacaaggagcaaggtggcacagtagtgggattgattgtaatgtcaaaatctctctgctttaaccaaatgtacaattcctttaaaatatggacctcatcatctgaacactgttaaatggcaagtgtaacactgaatttgaaatctaaagtacttggattaggtgtgaaaacatctgtggcactgataaaccttatacaatgtgggtgtcaaaaaagacaaactttaaaacacttctattcttcaccaatgatccatgcaattttacaagcaactggcaaaatatgcatattttcagactggattaagatattctcttaatgtcacttaatccagaaagtatttcagagacaaatgactcaattctgaattgccttgcctgtatagttcaagacaaaattttgtgttaggaattttctgaaaacttcagttttctctcagaaaaatgaaaataatattacctacgtctcatgggctgttttgagaattaactgagagaccatatgtaaagggactaataaaatacctgggaagtcaaaacgtaaagtactatacaatgagttcttactggaaataaagacatctcgattttattaccaagaccagcagcacacaaataaccatttcattagctaagatacacgtaatacagccaaaaataagtagtagctttattgatcctctgtctagtgatcagaaacaataatataacatgcatcacatacagtacacaatactcccgattttcctcaacaggaaataaatgtccataatacagaggtttccatatattgttgcatttataatactctgcatgggtatgagtcatcctatttataaagtgatattgaatccacaaaatataagctccaagagggaagagtttgattccattgcatactattgtgtctaaaatctaaataattgctaaatggatacaataacagtaatatatagaacaatgaaattcagatactgttattaaaaacaccctgccaaataaagttattttagcaaacgtatttccgatttgttccaggtattttctctctttttaaagtgtctatgctgaaataatatctataacctgggacttaaaaaaaatcacttcacctaataataaaccaagccaaaatctttaaatttattttgttatgccatcattagacagagaatgtaaaaagtaaccaaacagaaaatagtttcacggtcagtactaatgggagtaggcctggaagtcctgagaaatgaagcctgaggcctcaacccaaaagatctccaattaattcaggtgaagagaccccacattttggcccatattaatgtgtctggaagaaacaggtccctacaacttcttggaggcctcactactcagagaaaagaaaataaacacccagaacccattaatccacacccaaactccacctctccccctagcagagggcataggccaacccctgcccgcagcagtctcactcacacccttaactctgggaccgggccctgcacccgccggtctacaggaggcctggtgatctcaagtggctgcctcccaccagcagctccggcctagccccgcccactttggccaccgcctccggaaacggccgcgcgcgttgccacggtgacgagcaagcaaagagcttcccctgcgcagccaggctgagcttcttggcgccaagctgccgcgagccgtgacagcgtccgacgtgatgacatcacgcgagcggcagccaatgaaacgaagcgctgaggaaagtggcttgggtttgaatattgtggttgagtctgaagcgctgggaggcggacattaaagtgaagtggttgcggtaacctggcctgggcctgaagtgagtgagaggcacatgaaggtaaaactggactctgggacgctccttttggtgacttgtattattgggaacggagggtcctgccgcttcaggtctagaagaccaggtgg

SEQ ID NO: 6917 - DNA, 2300 bp, Homo sapien
cgtttcattggctgccgctcgcgtgatgtcatcacgtcggacgctgtcacggctcgcggcagcttggcgccaagaagctcagcctggctgcgcaggggaagctctttgcttgctcgtcaccgtggcaacgcgcgcggccgtttccggaggcggtggccaaagtgggcggggctaggccggagctgctggtgggaggcagccacttgagatcaccaggcctcctgtagaccggcgggtgcagggcccggtcccagagttaagggtgtgagtgagactgctgcgggcaggggttggcctatgccctctgctagggggagaggtggagtttgggtgtggattaatgggttctgggtgtttattttcttttctctgagtagtgaggcctccaagaagttgtagggacctgtttcttccagacacattaatatgggccaaaatgtggggtctcttcacctgaattaattggagatcttttgggttgaggcctcaggcttcatttctcaggacttccaggcctactcccattagtactgaccgtgaaactattttctgtttggttactttttacattctctgtctaatgatggcataacaaaataaatttaaagattttggcttggtttattattaggtgaagtgattttttttaagtcccaggttatagatattatttcagcatagacactttaaaaagagagaaaatacctggaacaaatcggaaatacgtttgctaaaataactttatttggcagggtgtttttaataacagtatctgaatttcattgttctatatattactgttattgtatccatttagcaattatttagattttagacacaatagtatgcaatggaatcaaactcttccctcttggagcttatattttgtggattcaatatcactttataaataggatgactcatacccatgcagagtattataaatgcaacaatatatggaaacctctgtattatggacatttatttcctgttgaggaaaatcgggagtattgtgtactgtatgtgatgcatgttatattattgtttctgatcactagacagaggatcaataaagctactacttatttttggctgtattacgtgtatcttagctaatgaaatggttatttgtgtgctgctggtcttggtaataaaatcgagatgtctttatttccagtaagaactcattgtatagtactttacgttttgacttcccaggtattttattagtccctttacatatggtctctcagttaattctcaaaacagcccatgagacgtaggtaatattattttcatttttctgagagaaaactgaagttttcagaaaattcctaacacaaaattttgtcttgaactatacaggcaaggcaattcagaattgagtcatttgtctctgaaatactttctggattaagtgacattaagagaatatcttaatccagtctgaaaatatgcatattttgccagttgcttgtaaaattgcatggatcattggtgaagaatagaagtgttttaaagtttgtcttttttgacacccacattgtataaggtttatcagtgccacagatgttttcacacctaatccaagtactttagatttcaaattcagtgttacacttgccatttaacagtgttcagatgatgaggtccatattttaaaggaattgtacatttggttaaagcagagagattttgacattacaatcaatcccactactgtgccaccttgctccttgtagtttctaaacatagagctaatgagacagaaattcccacttttagttaaaaattggagtataactgctgtgttatcagaatacaagtttaatatactttcattgtaaaccaaagagcagagataaggataaatgaaaagttagatttaaagttgtttcagaccaaaaaataaaaatggaaaaagtaaaagtgaatttaaacatggcaatagtgaggtcttatttatttcccccaggaaagtcgtttggaaaccccaggccaacaggaccctttggcagctgaggctggaaacagcggaaccaaaggcagacggtcctcagttgcttgggcggacgtggacccaatctgtccgtccttacaagtttcccccaggggcaggacctagacgcgcggcgcattcaggttctcctggaccgtagtggtagtcgctggcccgagttagaggccagctgagaagtcttcgtgcttcaggtgaggagaaggggaccgagtcccgggaactcgttttggaaaccaccaaacctttgggggtactccacaggggtcgctggattcgtccg

SEQ ID NO: 6918 - DNA, 2300 bp, Homo sapien
ttggggcctaatatatctaatgtgtatgtgtgtgtgtgtatgcatacatatatacgtatgtgtgtatgtgtatgtgtatatgcatacatatatatgtatatgtgtgtatgtgtatatgcatacatatataagtatatgtgtgtataaatataacttaaagctacttaattgtagctctattactaataaatagatcatttctcctctttgggatttaaatttaaaaaaattagtatcttttagatttcagcactgactgtttggtaccaagatgggtaaatctgattagagtataaagtattatgggttcttaatagttatttatagctcttaattaatagttattaatagctctgaatgatgtaagaggatgtgtttatatttgggggaaacttcggcaatgtgattgtacttttttttcttcctggctcataataaaacattcccagggcctctatttttggtttgggatatagcaattgtatgcggacatggcttggtcctccattcttggctgggaattctcattaaagagatcctctaccattaactcactgtttgcaagatcttggtgatgaagattaagagaggaaacatctgcctttccagaaaggaacccatgtcattattttgtttctgtctctgcatttggacttcaacaaatagaggtttgtgggaagagaaaaagagtttacgcatgctcctatgatcaggtgttgctcatctgtgagtgggcagatgagtgatgcgtgggtcaaagatacaggattcccctgggggccctggctactcttaacaacaggttgaagttttgctttaggctaaatgtctagaagataaaagtaaaagtctacaaactattgaagctttgtgaaattttagaacctactcaatatgtcttttggaagagatggaaactgggaatttgataagaatatatatgaatccatctaaccaagttttgacatgtgttggggtgggatgatttgttggggagtataaggacctggaatgtttttttcatcctgttgtcaacccagtttctcattccgctgtggctttaccctatttaagttctatctgctttctttaaatatatgaatgtgggtgttatgggatggttagtccagatgagtgttggatcataccctgtacttgacttatttatttattgcagttttcagggagtaattgattatgagttggctctgtgtccccacccaaatccaatcttgaattataatccccacatggtgagggagggtcctggtaagaggtgattggatcacggggacagtttccccatgctgttctcgtgatagtgagggagttctcacgagatctgatggttttaaaaatggcagtttctcctgcgtgcatgtactcttgcttgttgccttgtgaaggaggtgcctgcttcccctttgccttccaccatgattgtaagtttcctggggcctccccagccatgtagaagtgtgagtcaatgaaacctcttttgtttataaattacccagtctcaggtagtatctttatagcagtgtgaaacagactaatacagcaattatgttcttattgtgaatgatataaaatagtcacaagtgagggcagaattctgttctcagtatttgcgaatcatcttgagcaatacaataactccaagaacttctaactctaaagcatgagctgaaggcattaaaatcttttttaggatgtgctgctatattaaaatgagtcagtttcaaactctaggtccctgtttgtactttgactctaggcaaatatacaggagccttgtgaataccatctaatgtaccaaaaattcactttgatacaggtaattctggagccctaaccaagattttcatttttcttttacttttttagttttaaccagatatagcaaaaggacttcactgtaattctgtcttataatatggatcccatggatgaggtagtacaagtttctgtgtgctgcacatatatatatgtgtgcgtatatatatatttcctgtgttgcatatatatatatgtgtgtgtgtgcatatatatatatatatatatatatgtatgctacagggaattataatctgtagcagttttctcagaggatctctataggcagttaatagtagttgaaaaaggaactgtttttgaatttttgagttaaacagtaaaactagtttctttgtggtacttctcagagcctacaatctgctaatgtgtgtagtgaatttccatgaggatgatgtgtggactttctcacatttttaaatgtaacccctcctccttttattttt

SEQ ID NO: 6919 - DNA, 2300 bp, Homo sapien
gcactagctgaaagacgttggaaaaaccagggtgcactccaggtttcatttcttctttttctttcacactgattacaattcgattttgtgtgtgtgtgtccggttatttgaaaagataaaagaaaaatcaaacagcaacaaaaagcagccctccaggtgtccttttccgagcccgcaacggttaggtgagtgagtgcaaggcatatctataattcagctcgggaatatttcccttaataattaattgagcatcacaaaaggaggaggcccaatagagcccttgaacaaagctgccgccccgaggacgacagtgacagtcctggcgccaaccaaccagcccaaggtcggatttgctccagcagtccggggcatagcgctgccactgcctgcttggtccatcgggcgagctgggagaggtgtctagggagaccccgtcgccacgtgggcttctggttatttgtgtgtgtgtgtgtgtgtgtgtgtgtgtttgtttgtgtgtgtgcgcacgcgctcgcgtgtgtgggagtggggtggagatggacagcaaaacccttttttttttttttttttttttaaatggaggtgggcagtgggagagatcactaagatagagtcctcccgggagccaaacctctcgcccggttgattctggcaagcctgagacaggcaaactgtctactttcctgttttgatgtggtccgaagaaataaacaagaaacaaggagagacccttcctcaaactgtaactccagccaattagcatgaaaagctcaagaagctattaaccagaagtttcggctttaggggaccagggacttgcccgaggccctggcatgcgcggcggctaggtttaactttcaactcatagtgaccttttccttaatttaatgcaaaaaatctttcccagaggtggagatttaagatgctaatgatacatacgtcctatgaagaagcatgttaaaccaccatgcatgcaccagaaaaactccacctctacatgccctgtctatagttctccttatttccccttacgggagaggcccgtaaaagaaacccacaccctgacttcgaggaacagcccacttttttttttcttggtgttagctcccttgtgcgcacaagctttaattaaaagaaagaaagaaagaaaaccaaaaaaacttgctttttgctgcgatatcccttgatttctgtcctgaaggatccaaagagccctcagggagtcgataccagagccgtatttgtttttgcagcaacaggttggctgcgggctcttcccccgccttccaaagccctcagcccctggcccaccctgcaacttactcatctctccaaccctcctcccctagaactgctgcctcctgtgcgcagcccctagcctgggcctgattccaatttctgtaacattcccctgcccgggattgaatacaggttgaaagtcggtctcctccgcgcccctgaggcccaaccccggcgctgaagcctcccaactcctgtgtgcaaaggagacggagactgagggatctgggcgctctggcaggcacaggagggctccccgcccgtggcctcgccggagatgcacccggctcccaacccaacaaacccgctttgggaggggatggggtggggaaaagaagacggggctcggggctcgaggggagatatagagaaagcaagttaggtagaggagatgtcccagaggaccccattttcgggactgcacctcccattggagctccccgctcccaagccctctggggactcccgcgctgccgtcgaaacccctattccggccccaacggggacacttctccaggatttgctcctcgcctgtggggaccacagccaaagactcctggaatcgatcccagatcctgggagtcggggggcccagccggggtgcggggagtcgcggcgtcgtgactgcacccgccccgccgcgccgggaggcgcccctggcgaccgtcgcgaacgccacaccctcggttcggccctggccccgcccccgcccagagcgcgttcgcggccaggggaggcgtgtgctgctcccgcagccagcgagagcgagagagggatggatgttggaggaggaattcgggcttaacaagtgatcgctgctgtctaggattttgtttcttttcgggggaaccttgacttcctttcccaggcaatccctcctgtgctgaactccagaggaaccaggagtcttggggtcttctctggggcagccccaacccccacccccaggctccagccgcgaggactctgtgcacccctcgggccaggcaacagaacttgtt

SEQ ID NO: 6920 - DNA, 2300 bp, Homo sapien
tgggaggccaaggagggttggatgacttaaggttaggagttcaagaccagcctggccaacatggtgaaacccatctctactaaaaatacaaaaattagccaggcatggtggcacatgcctgtagtctcaggtacttgggaggctgaggccagagaatggcttgaacccgggaggcagaggttgcagtgagccgagattgtgcccttgcactccagcctgggtgacagagtgagactccatctcaaaaataaaaaataaaaataaaacaaaagaaagttatttttacccaacatccacattaaccaaatacccatttctttattgatctttgtaaaaaaaagctcttggaaaaattgtctatattcactatgacttatctcctccaaatcacttaaacacataccaatcaggtttttgttttcatcattccaaagtaacttttacagccaaggacagtagcgaactttacatcgcatatgcattgtgaagttcttgatcctcatcttacttaacctgtcagcagtatctgacacaggtgtcactggctcctccctgagatgctctctttatttggcttttgggacaccatattctccccattcctactttcctcaatggccctcctcagtctcctttggaaagaggaaaaagaaacttcattatctcctggatgtagtacaaacaactcaagctcaacatgtgcatactgaactccatttccttttcccaaacttcgacatttacagccatcccctttcagctgatagcaagtttatccttccagctactcaaaccagaatctttagagccatccttgacccttttcctcctctcacactcaacatctatccatcagaaaattttgttggttctactttcaaaatgcatacagagtcagagcatgtctcattacctccaatagctaccatactagtctgaacaaacatcatttctcacctgggttattgaacaaacatcatttctcacctgggttattgatagcatcctaacgggtcttcctgtttcttggttcccctatattagcaacacagcagtcagaggagtccttttagaactcaatcagatcatgtcacgtcactcctctacttaaaatccttcaatgggtcccattacacaaagagtacaaaccagagcccttacactggtctacaagttccaacatttgactcctgttatctctctgacatcatattctaatattactgctgttgtccttttgctccagtcacactgtttgattagtaaatatttattaaacaaagcaatcctagtctccaaagagatcatagtttattggaggaaacaagagcctataaatggttacacacagaaggtagtgattatggttctccctcacctcccatcctaaactttgacaggtgaaactcccctggatgttgaaggttgaggaatttgccagggttcagggtggtgttggaggaggcagggaggaagcaaggacatttcaggcaggaagaacattacatgcaaagatctaaagatatgaatcagcaacatatttatggaattacaagtaaagtagaaagttcttgctaaaacatcaaaaaataaagatttgtgattagggggccagaatgtgggagggaaagagagatacagttcacactttagacaggagccagatcatgaaatgttttctctttgtttgtttcttccttcacagcttttgatatgctcttggagcaatttattaaccatattttttaatgcatctcctgaacagagtcaaagcaatacttggaaaggactctgaatttcctgatttaaagatacaaaagaaaaatctggagtcacaattaatttgagaaggtaaaggagtgggtgtgctactgtatcaaatttaatttgtacaaaatcatcatctctagtaacattattttttctaatctactgcgtttagactactttagtaaagcttgatctccctgtctatctaaacactgattcacttacagcaagcttcaggctagcattggtcatattaatacccaacaaatccacaaggtgttagttgcacatgattttgtataaaaggtgaactgagatttcattcagtctacagctcttgccaggcaaggcagccgaccacaggtgagtcttggcatctaccgttttcaagtggtgacagctacttttgaaattacagatttgtcaggacatggaggacaaaactagagcttctcactactgttgtgtaggaaatttatgcttgtcaacctggcttgtaaaatatggttaatataacgtaatcactgtta

SEQ ID NO: 6921 - DNA, 2300 bp, Homo sapien
cacctggccctctagcccaggaccgcacctctcttctattctctacactcctgatagttttacagttttcacaggttaaaattcagtatctctaatatggcataaaaagggcattatttgttacctatgcgcctttccagctttccactctacccatactgaaaggctttgcagtttccttagggatggatgaaaggcgtaagaagtgttaactatagacagtaactaagctagtagcttatgagataaatgcaaaactcctagcatattttaaatatagaatatgagtaagcatgtactttgtgaaacataggcaggattatgtaaaatatatagagtaagttagtaaactataagacatgccaaagttaaatagaaatatgatggaatagagagtcactgatagccaaaaagggatggaaaaactaagcaatgagcaatcatgacatctctgggctattaactatgtcacctctaaatcagccacccattggtcacacttagaatagtctcatatgtgctctgcccaggaaatgcaaataaaacctgtatctgttcaacaacttaccgagtaagctctggctgtgaccaggcatacttctctgcgtctatccaataaagcaggtgtgtaccattggcccaaagcactttccacctgtgggcctccttgctgacacctcacctctggtcctcgtaagtataccaccagcggagaaggctgttgtggcagataggatatatgaacattacttaacccatgattcaggtgatggcgtccttccacttgcttgcaccttatcctaagtgtgtccacttaccacaactctttcaccttttcactggatacttaaattgaataggctatattatttaataatcttaatttgatctgtgagccttctctgtttcattacctttaggatagcttgcctagtttactaggaagtcacaattgcatcaaattaagttccatgcaggcattaatctcctcccagaacgctcctgctttagcccctatcattttatcctgtttatatccatgtgtttctgttatgacacttttcacaccacactgtgattaactgtttattcctctctcactagtctgtgagctccttggaagcagaaataaattttgtttttgtctaatcattgcttaacaaagtgccaaccacaaagtaaacagtaaaagaattacagaatgcaacctcctgcagacacagttgaagaaactattcattgttttttcctttctgtcattccctagttctaggcatcaaatcgcttgcctagtcggcgagcagtatgaaagtggtgggaggaccatagacgcactgcagaaaacagcttacagtagatgcagagaattactagcacgcttgggccttggtggggcttgtcttatttacctgttcctcatttttcactgggagtttaaaacaagtttttgtttccctgctatcccgaccttaagataattaaaaggccaagaatctttaagagactttcagttctcctggattctagataataaaacccactttaaaaattaatgagcacctatactgtgacagacaataaggatacaataaaaataccatttctgttctgagaaaatttacaagcatcttcctggagcctacattttactcgaagtaatagctatttttatagcttacaataaaagatgcattttggaatatatttcgcttgaattaaagaaatagaatgtgagaccttaaacaaagggtccgttcttcagatccttttaactcacactctccttcaggggtcggggtatttgggtgcaaaagtttactatcacgcacaggtgtagagatgtacaaatacgatccaatttagtggaaactgtgtcttgtaagagatggcccccagggacctcccacatccctaacctctcggaggactgcaaaagacagcatctgaagcacctcttgcctcgccttgaatcatttgccacttcacaccgccccgccccttccgtccccggaggcggccagcctcgtgtccgctctaggcttctcccggacgtctctttgtggtggcgttgagctcctctagcccgcgcttgccgtcctctcagtggtagcgcggggactggctgggaagcggtcggtcgagtgtggcctgtgtggactcgcatcttgcccgaagccgggcggaggagagctcaagctaaggtggaaggggaacgggggaggccctggagaggagtgggagagtggagacaggcccctgggtggcgagggagcccggcggcgtaacgggggaacccgggg

SEQ ID NO: 6922 - DNA, 2300 bp, Homo sapien
atgctgaaagaatcagacttcccatgtaatcagaatgtgaaaacctgaaaggctgtgctctcaacagtgcagttttctattgaagcagatgtttttctctgtccttagtgtatcgaatttaaatctcctctccctcaataatcttccctagagttagacttcctgtaaggcaaatacatatctgtgtttttcttactcttttttgctatcttctataaaatatagaagatatcaaaacattttaaatttaaattttttaattgaattatctgaagcagtacatagcaaactgtaatgtgcttacaaatcacttgggtatctttttgaaatgcagatcctgactcattgggtctggagctgatactgagattctgtatttctactgaggtctcagctgatgccagtgctgattcagggagagtaaacagtaatgcatttccaactatattaaggaaggggccagataaatcatcgttatggaagaacatagcactgtactgtaggtgaaaggaacaatatgaacttgctggactgtcatttgaagaaaacaaaatataaactgtaggccacattgccagaacacagaccaaaatgagcaaaaacagttgctaggaaacaggcccaaatgcagaactttagcttataggaggaagtcagaaagagctggaaatgagaacattgaggaatataacagaggaggaacaaccagagggtgtgatttttagaatgcaaacagtgaccacttaggatcagtgtctgaaatttggtgttccttgagctagctggacttggactctttgacagtatgtgaacaaactgcctaatcgtagatcagaaagctaacctatggaagactttaaaactaccttgactcaggtgtgtgcagttttactcaggtgtgtgcagttttactcaagtgagtgggattagtttgccgctgaattttaatctgtgtaaaatttagtttttatcacagttggcaatgtcttctatcagataggatattttaattttaaaatgagctgatcctgtaaagaagtaattcgttgtctgaaattcaaatctaacagggcatcctgcgttttttatttgccaagtctggtgaccccattttctgcatccagtaagtagagatctttggtgctagctcaatgtgctgcctgttactaagaaaaactgaacttcctgtaaacaacttacaggacccacctactcagaaggctgaggtgagaagatcacttgaggccaggaatttcagaaataggtattcaacttcactggcacaagttacagagtctattccattagtttcctttaatcatgatgaactctgttgaattttgtagtaatttagccatgaataaaggaaactaatggaacagagactccccaataactaaggaaaagaattttttacctaaaattaaaattaatagagtaaatgaaattaccctaaagggtaaaaatgtattattactatggacagataaggtttctaaagtaattagtttcctaaatccaagatgcttttcctatcaaatatgaccatggtagcccaagttttgaatattaggaaatagctttatggcaaaaaaagttccattatagatctgtggctaaaaactggtgatgattacctccaaataaaaagaatctctggcattaacaaaatactaagcattattttctgtacagtgatgagggatagttgtcctagtttcccttgtattaagaaaggtcaggccaggcacggtggctcatgcctgtaatcccagcactttgggaggctgaggcaggcggatcacgaggtcaggagatcgagaccatcctggctaacatggtgaaacgccatctctactaaaaatacaaaaaaaaaaaaaaaaagcaaaatttagccaggcgtggtggcgggcacctgtagtcccagctactctggaggctgaggcaggagaatggcgttaacccggtaggtggagcttgcagtgagccaagatctcgccactgcactctagcctgggcgacagagcgagactccgtctcaaaaaatatatataaaaaataagaaaggtcaaagccagattgtgtcccttatttgctaatatacattgccacatagttcgttgccttgtaactttacctctgatttcctttttctcctccttaatttatcttaatccaattatctgtttgaagaaaaaaaaaattttttttatttttttattttttgagatgagagtctcgctttgtcgcccgggctggagtccagtgacacgatctcggctcaccgcaacttccgcctc

SEQ ID NO: 6923 - DNA, 2300 bp, Homo sapien
actttgcccaaatccatcagaggaatcactcactgtctatggcagctctggcctcacaaaacgtatttcttaaataacagacttgaaagtcaaagtactccttgatccgtgggctacagaatgaatgttgtgttaggaggcatgaaacatttatctcctgggacatctctatcagagctcctgagtgatcaggtacattgtcaatgagtagcaatattttgaaaggaatccttttatctaggcaggaggtctctcaagtgggcttaaaatattcaatgaacaatgctgtaaacagatatgctgccattcaggctttgtcccatttatacaggacaggtagagtacatttagcatcattaggaccctaggatttcgaagaggtaaataattggcttcaacttaaaagtcaccagctgcattcgtccctaccaagagaaacggcctgtcctttgaagatttgaagccaggtatagacttcccctctctagctatgaaagacggcatcttcttccattagaaggctgtttgttggctgggcgtggtggctcacacctgtaatcccagcactttgggaggccaaggtgggcagatcacgagggcaggagatcgagaccatcctggctaacatggtgaaacccgtctctactaaaaatacaaaaaattagctggctgtggtggcacgtgcctgtagtcccagctacccaagaggttgaggcagaagaatcgcttgaacgcagcaggtggcgggtgtagtgagctgagtttgcgccactgcacctcaggctgggtgacagagcaagactccatctcaaaaaaaaaaaaaaaaaaaaaaaaagaaggctggtctacattgaaaatctgttgggtagtgtagctaccttcattaataacttgctgcttcaccttgcacttttatgttatggagatggcttctttccttaccctcataaaccaacctctgctagcttcaaacttttcttctgaagcttcctcacttctctcatccttcagagaattgaagagggttagaaccttgctttggattaggcttttgcttaagggaatgtgttgtagctggtttgatcttctatccagaccatttaaagtttctccatattagcaataaggctgttttgctttcttatcatttgtgttcaatggaatggtacttttaatgtccttcctgaactttttctttgcattcacaacttggctgtttagcacaagaggcccagcttttggcctgtctcagcttttgacgtgccttactcccaagcttaatcatttctagctttttttgtaaaatgagaaacttgactcttcctttcacttgaacacttagagaccattgcagggttattagttggaccaatttcaatatatttgtttctcagggaatagggacacctgaggagagggagagagtctagagaacagccagtaggtggagcagtaagaacacccacagcatttatcgactaagttcaccaccttgcattagtgtggttcctagtgactcaaaataattataatagtaacatcaaagatcatcataacagatacagtaatgaaaaagctggaaatattgcaataattaccaaaatgcgacagagatagggagtacatgctgttagaaaaatgacaccaatagacttgcttaccaccgagttgccacaaattttcaatttgtaaaaataaatagcaccttgtaaagaataaagtgaagcaccaataaaatgaggtatgtccgtatatatataataacaatgcttttcaaataagtgaattactttaattgtaattattttaactctcatgccaaaattatttcttcagttcactgctaccttcttagaaacaaatttttgtagttgaaagggataccttaattttatatgaataaaaacaaaggccttcataggtttttactaattctacattatccaatttaaaatatgaacccagaaaattcaaaatttaagagaaaaataggggaacaatgcagatgtgaagcagcaagttaacatgtcttcagtaacacttagcctacctgtctgaaccagcggttgcattttttgtaagccttcttttttctcttttaccagtttctggagcaaattcagtttgccttcctggattcgtaaattgtaatgacctcaaagctttagcagttcttccctgaagaaaggtaaacaaattatcaactcaaatcttgacaacagacaacagattaacattttatttaatgttaaaccagacgattccctaacatggaagacagtctggaacacacaaaaaag

SEQ ID NO: 6924 - DNA, 2300 bp, Homo sapien
tctaggccacatttgcttggtttaattagtgtgtttactccagaaacatttaaaatctttctagtactgggtgcagagattgttactcagaggtcacagcggtctagacatgaatttgatttcctttgcttcttaatgttcagtatttcacacaatagacattgatggaagaatgaacataagaattgtcaagtaatttttacaccactctctaatttatgcaaacactaacttctcacagtctgaaaatgtgaatttttccccctctgtgctttgatggctaacattctttttaatgacagtcatttctataacaggaagatgttttcatttgtatttacttttcagcgcgacgcaattatgcagttttgcgcttcagtagtgtctcggtactttgtgtctcaaaagagaattacagtacttagaacaggactgcaatttgaagcaggtgttgtgttttactgttatgcaaaataacagtaaaatataattgtgggagaaattaaggaaacagctgcaaacttggtatgaaaactgctacattatgatttgtaagcagttcttatagatatcttacatcagaggagcagggaaagattttaatttagttaatcctactggcctggttgtctatcatctggcgcttaaaagactcatacctcccatgaagtcaggaaaaagaaagagaacccaaagtgacactttgtttaaaatgccagagcacggggattcatctcttggcagtgcacttgacattaggaaggcaggcaaggtgggtgttatttagcttgctttgctaatatgaagaaggcaatgatttgagtagaacactctggaatttcttagcccagctagcatatgggggattactcaagccccgggttgtaaaataataaaataaatggcctatggcaggccatctgccttttgctcgatatttaaggtgtttcatgccaattttaaatctcatcttattattctaaatatttttatttgaaatagcagataagattctcagagcttaatggtgcacatggcaaacctattctgacgttgtgcacttaaagtaagagcatgggttacctaagggttacccaaggagtgtactacggcttcttctctaccgcactgatcaattgcaacaacttggacatgagaatttgcttccctcagcctttgcacacctaccataaaaatagacatcttcatttctcaacccagtgcagcaaataatatattgacatttatgaaaaaatcagaactaatggaaattttaaaaaatgaaaccaattactgagaattacgttgcaccaagaatgaggtggcagatgtaatggccgcccttctttaccgctccatcggggcttgaagaagggaggtaatgaatgcattcaaagtggtggtccagacctggaggtgtttggttttcccctgagtgactggagtgttgaaaaaaatgacactacatttaacaagaaagatttgccttaccataaggttctgggccagtgaggaatgccaagcattgcctacctgtgtattttgggagctgcttgtgaaagaaaaaaatatgtgtaatgtgtggttattatgtgcatgttatagtaatacacatgtatttgttataagcacaacattttaaattcttatctgtcattgtgttatatagctgctttaaacatggagctttcaaatgattacgtgacaccaactttgtaaagaccaaacattccaattagcagggcaggtttggaagattcttcacttggagcacaaaccatgtatagccagatgccatggcaacggtggatatgccccttccgtaattcacgctaagtgccataattataattaaagaggaaatcttagtttgaactccattgagaagatttgctagcacccagcaatatgtatagagtgtaatatccactttgaagtgcatgaagggaagagagttgggaacagttgtatccatgagccaacaacacatattcagattttccctgaactagtttcatgtctagatgttaaatttatgtctcttagaacaccctttttctctttgttctcattttatatacattttttttttctttcagaaatgcacagcggtattgatgagtagatccttggattcagaggttggctgaaacgcaccatgcctgcttccatcttttgctctgtaaagttgtgaattgctcatgcctatagggaggaaggatggcacatgggattccttctcaaggcaaagttaccataacggtggatgagtacagctcaaaccccacccaggcattcac

SEQ ID NO: 6925 - DNA, 2300 bp, Homo sapien
ttccagcactacaaattacaattttaagcctttttacctcaattttccccactcagtaaaatggtatacaaatttccatcaactttgtaatggataacccacttgattttttatggcattaagtatcctgtaaaatgtaccactaaagtagaaagcattattatttactgtctgggtgcacatatttagattcagaatcatgttcaaactagtttgtctgttttgtttgactgcaattttttttaaagaaggaaaccacagaaattatttggctggtgatgcttttttttttttgaactgattaaatcagcccaaatcagtctaaaaattcaaactattaagatatgaggaatgtagtactcagtcacagagtaaaggaaacaaaaccaagcatttcttcaaaaacgtgattctagtcagtgttcgctgatgggctagaaaacaaaagaaaacaaaatttaaaggtgcctctatgcccccatctttggcatcctttaatgtcaatgtcacttgttctgatttgtgctgggcaaggaaagacactgtcctttccaccccagcacatttgacaagcactgacactctgggcatgctgtaaaataaaataaatacattagtaagaccatttcccttttcatttcagcctaggcataagagatgggttacttaaaattcaagtgccaggaaagcccattgtaaaagggaaatattttcaagtgaattccgtttgatctttttttataggggctcctacaagcctctctcccttcctccccagaccctggaaaccaattagtctcagcacagaggccacagaccaggttgcaatggctcctttttatttttagggggtataatttcagccaggatgtctagtcagttgtcacatagtatacttagcacacttctctctcacacacatatatatacattggatttcccttcagagaatgcacagatctttcagtctgactcctagaaaggaattagatctggttgctgtcccaatctttcagcaatgacaatggcataacatcacagggccacctcatctttcacagacaaccctgccaaccaagttttctaaaagccttctctcccttgttttctgtcttccagcatttcagcggcatttcctttccttgtgttgtttgtacaaaattctgaaaaccttttcttccattttccaaagtagcagacaaaactggactaagtttgatttttaaaatgcttttgacatgcttatcttttggggaaaattttatccaaaagacgaaaatggaaacaattagagtctttgcctctcctcaccttcctgtcctgaatctgccttaattcatggaggtaaaaaaaatgatcagctgggttggccttttctttctcagcaacattgcagagagaaagaggtgagtgtgtgagtgagtgagtgagcgtgtgtgtgtgtgtgtgtgtctgtcgtgttgaaaggcttggggaaaaaggagcacagctctcccccaggaaagcctcagatcagcagatgggagggaacctagggtcgccttcctaggtctgagcgaagtgtcccagccgctccccttacccctgcggtgagccctgcgtcctggaacggtgccaggactcctgacagagcctggcaggtcggtgggtggcggggagctgggtgttctctttgcagaagaacaccatttgggagaaagctcccttcttttcctggggcaccgtagcccgccttccttcccctatcattttttacgcagatcgcactcatgatgatgaacttgcagctcagcttcctgccgcctgcttgacccgggagcaccagcaggctaccgggcctcgccctcggctccctcctcctctcgaaaccctggggcttcggggcaccggtgggggtccgagtgggcagggactgcgggaggggcgtgcaggggcgcggggtcccgccggggagcgcgcacggagcggcgcctcggccgccctgcttcctggagctgtgctcctttgaccccagtggcagtccctgtcactgcaccgctcgctctccctccggctcgccgcgccctcgctccctctcctcgccccctcgctcgctctctccccagatcgaggctgctcgggtcctttctccccccgcctccctctagcgccgcgccccctggcccccagccccagcctgcggcgggacctccggggtcgaaggttctggcccgctcgcgcccctcgccgcccccgcgcgcccccagcgctcctccagccggctcgggccgctcggctatggatcgcctgctcgccgggcg

SEQ ID NO: 6926 - DNA, 2300 bp, Homo sapien
atgaaagccaactccaaataaagtattgagctttcaagggaagcatcattttctttccaagcttccacccaaagttctcccacgctcctctttctcattttctttcctaaatgcattctgaaaagataatttaaaaggtattgcagtgggctatcaggaagcatatttaccagttccttcaatgaaatcactggggaaagggtccagctttgaattccattaaaagaaaaaaattgtaatatttccttgaagccaatcataaacttagtatttgattttcatccttcttttcttttccattatacacaataaaagttgaatttaacaacaacaacgaaaatggaacttatagactcacttatctttaaaaaaaagctgaagcttataggatttaaaatttgatataatgaggtaacatttcaaagcttatatgggagatgggatagacatggttcacatccaataattttaaattaagcttttagtgtaggtagctgtatttgtagacaatatgatttaacaaaatgcaatatgttcaaatccacgtaaagagaattatttgaaaagtgagtgtctttttgttcctggtttattatttaaattcattttcatatctccagcttgctagtagcctaatgaaaataaaatttcataatccaaatataacttggtcactattggataattgatctatcagcaggttgacttcttccagcactacaaattacaattttaagcctttttacctcaattttccccactcagtaaaatggtatacaaatttccatcaactttgtaatggataacccacttgattttttatggcattaagtatcctgtaaaatgtaccactaaagtagaaagcattattatttactgtctgggtgcacatatttagattcagaatcatgttcaaactagtttgtctgttttgtttgactgcaattttttttaaagaaggaaaccacagaaattatttggctggtgatgcttttttttttttgaactgattaaatcagcccaaatcagtctaaaaattcaaactattaagatatgaggaatgtagtactcagtcacagagtaaaggaaacaaaaccaagcatttcttcaaaaacgtgattctagtcagtgttcgctgatgggctagaaaacaaaagaaaacaaaatttaaaggtgcctctatgcccccatctttggcatcctttaatgtcaatgtcacttgttctgatttgtgctgggcaaggaaagacactgtcctttccaccccagcacatttgacaagcactgacactctgggcatgctgtaaaataaaataaatacattagtaagaccatttcccttttcatttcagcctaggcataagagatgggttacttaaaattcaagtgccaggaaagcccattgtaaaagggaaatattttcaagtgaattccgtttgatctttttttataggggctcctacaagcctctctcccttcctccccagaccctggaaaccaattagtctcagcacagaggccacagaccaggttgcaatggctcctttttatttttagggggtataatttcagccaggatgtctagtcagttgtcacatagtatacttagcacacttctctctcacacacatatatatacattggatttcccttcagagaatgcacagatctttcagtctgactcctagaaaggaattagatctggttgctgtcccaatctttcagcaatgacaatggcataacatcacagggccacctcatctttcacagacaaccctgccaaccaagttttctaaaagccttctctcccttgttttctgtcttccagcatttcagcggcatttcctttccttgtgttgtttgtacaaaattctgaaaaccttttcttccattttccaaagtagcagacaaaactggactaagtttgatttttaaaatgcttttgacatgcttatcttttggggaaaattttatccaaaagacgaaaatggaaacaattagagtctttgcctctcctcaccttcctgtcctgaatctgccttaattcatggaggtaaaaaaaatgatcagctgggttggccttttctttctcagcaacattgcagagagaaagaggtgagtgtgtgagtgagtgagtgagcgtgtgtgtgtgtgtgtgtgtctgtcgtgttgaaaggcttggggaaaaaggagcacagctctcccccaggaaagcctcagatcagcagatgggagggaacctagggtcgccttcctaggtctgagcgaagtgtcccagccgctccccttacccctgcggt

SEQ ID NO: 6927 - DNA, 2300 bp, Homo sapien
agatggtgaatgaggtggcatctcttggatgattcagatgacatacaacttgaagctggcatgagaaacaaggcagaaaaaggcattcagtctatcacaagaaggaagaaaatccagtagctttgttttcctctttcttatagatctctgctctagagccaatctaaaaactgaattctggtttctagtttttctaagtctgtatccactgacatacaatcaaataaaatgtctttaagtaaacagagatcttcatctcatcagctttaactggtgaatctggccagggacatttatcactcaatcccactgctttttctttaagaagaattgccattgtcattacctctgaagatgcaagcagcatttaagtgatagccacttaccatggggaatgttccagccacaattaacttcccattacgatacccatccccatttttgtatgcaattattttcactgccttctggtgtgtggctgccatgccactgtgagatgcagcttgcgtgcaggtcttcatccgtaaagacaatagacgtgcttggtagtaacttagagttttttcagccttgtcacacgacaaatcaacctaattttttaaaaaataaattgtacatttactcaaactttcttgttttagtgtgctacactttagtctcttaataaatgtgtgtatacgtgtgtggtgtctacattttgcaatgctctcttcatgttttatagatattgaatactagagccggaaggatgttggatccaaattcttcagttccctcccaggcctgtcactgagtcactaggtgactttgggcatctggcttgtgtttctggcattctcttgtttttgtttgtttatttgttttttgctttctctctgccatggccagagagagcctggattaaagtaataatacactaacattatggatagcctctgaatttttaactttaggatgattccaccatatggtggaagatgttgatgaatggggaggggaatggttgtagctttaaacacatggtagtaagggtggtgaacaccactcttctgctttcccttttcatcccaacctaggatgctgccctgagggcaaagttctgtctgaaattctgtagcactggggattctttccaaccaactcctcaccatctccttaagattatcccactatcttcaaagcaaaccagatgctttcaggtttcccagaggactgacttcctttctccttcagagctattgcttctgttgatgttttttgtaaccgcaatgcatatcaggattagggaagggaggagggtgatctggggatgaggtgagcaagccctgaagagcacaccagactggaagatatattccaccttttaggaatcgctcctttttattcaggtgtgtaagttcccatagtttttacttctacagttgaaagggagggttttttaaatggtaccattttaaacaaaggttataggaaagcggtaagagttttttttgttgttgttcctccgtgaactctaaatactattagacatagacgtgtgaattcaggcacccaacctgaacagtcattaacaacaacacatccaattccccctgaaatgttccatgctagtaaaaagaagttttttcctgtggatataggcaaaaagctgttccacgaagtaaagatttgcagttacttcctcacctaaaagcaacactgagaacagtgaaatatgtcagtaaatgattaaagctgcagaagtgcccaattaacttcaaagagtctattgaactattaatagacaatgcattttaaattacaatggggaaaaggaaatcaatgcaggtagaatggtaaaggtgcatctgaggaagatgaattggatgagtggagatgaacttgagtgcaaggcagataatgaatgcatcaaagtttccaaattgttgccatacatgcattagcagagctcagatcattacatacctcagccacactgatgaccttgaagggcccttgtaagaagggcttctgagtcttggtgcctgaaatacagaggaatggaacccctggaagcaattgtttcagtcctttctctgttctcatggattgtccacaagccaagcagagcatagtttttctctttccatcaggtgagagataacagtatccctaaaatgggagacaaagatggctttatataggagcatctaaattgttatagcattgctgtagaacattttacaatataaatatagcacttttaacaccccaaaatgctaaatttaaattttatgctaaatttaaatttagcataaatt

SEQ ID NO: 6928 - DNA, 2300 bp, Homo sapien
attataataaatattataataaacaaatatattatatatttattaaataaatatataatatattataacatatactatatgttatatattataacaataatatgttatatattatatattatataataatatgttatatattataataaatatataaataatttatatatatagataaattacaggtgtgagccaccccacctagacgtttttacccttacaaagggcatatatacatatacatatatatatatataacttgaggtcaggagatcaagaccagcctgggcaacatggtgaaactccatctctgctaaaaatacaaaagttagcctggcatggtcgtgggtacctgtagtttcaactacttgggaggctgaggcatgagaaatacttgaacctgggaggcagaggttgcagtgagtggagattgtgccactgcactgggttactgagtgagtctccggaaagaaaaaaatgggtaaaaaagtttcattctattcctggtttgctgtaaatttttattacgaatgcatttagaattttgttggataatttttctgcatctattgagatcattacatgattttcctatttagtctatggtaagtatggtatgttacattaattgattttcaaatattgaacaatcttgcattgttataatgaatctcacttggtcgtatgatgtttcattccttttttatattgctggatctaatttggtaatattttgctgaagctttttgtatctatgtccatgaggaatattgatctgtagttttctattcttgatagagctttagctgggtttaatattgggataatgctggctcgtaaaatgagttgggaagttttctctcctcttctatgttctggtataaactatatagcattggtattattctttattaactgtttggtagaacttgacaatacacttctttgagcctgtacttttctgttctggaaaaattttgactacaaatgtaacgtcttgaatacacctattaaaactacatatttcttcttggaaagagatttgtagttcttgtctttcaaatagttgttatattttaatttgtcatatatatgggcatagagttgttggtagtattcacttattatactttcactgtgtatgcgattgatctagtgatgtcttgtttttcatttctgatatcagttattattgtcttgtttttctctatgtcagtctagctagaggtttatcaattttagaaatagtttttcattcattgattttctctgttgttcattggttttcaatttcattgacctatgctctaacctttattatttctttctttttgcttgcttgatgcttaatttgcttctctttctctagtttcttaaggcagaagcttagattacagattttacatctttattctttagtaatataaaatttaatgctgttaatttccttcaaagtagtgctataacatgggcaatctctgaattttgatgttgtattttcactttcatttagttagcttataaaaagctacattaacttaaattaaaagtattttatttcagaatatttaaaaattttgacacttcctctttgatccaggggttatttagaagtaaattacacatagtattttgaagaagtaggatttaacataagttttcaacatttgctatatgctagaaaagtaatttttatataattttttttcatgtggagtgccattttacttttttaaattaagtaaatattaaaatttaggaaagttaagcctaatttatgattgaaaatcaaaattaacttggttggtctcaaatctcttatgaaatatgcaaagtgcattgagtttaccacaagctgtacaatatacttgttggatcgacttcagtacccaccttcttcatagaatataacacacaaaaacaaatttcctctacttttattttagattttttaatatcaagactaatattgacagtcaggaagtagtaacttttcctgaaatactacacattgtcttacaaatagcttataccagatgtctagactttggactttgtttcttcagtttacatagtggttgaaaatttaactattcctttagctttgtgtctctcagtaccatcatggcctctccatgtatctttacagtataccttctgagacctgctgaggatatgactcagcaaatcaccatggtgatgggagaaagccaggttgtgggggcaccagctataacggggtaatacttggaaggcaatttctttctgagaacttgctgcagcctagcttggagtcctgg

SEQ ID NO: 6929 - DNA, 2300 bp, Homo sapien
tggaggggaagagatgggaacagggagaccgcttagtaggtattttgttaatccaaactggggagggggatgaggggattgagggctattacttataagaaatgaaagaatggatatgacatatacatatttagaagagggatctgcaaaatatagccctggggacaaatctagcctgcagcttattattatttttttttgtaaataaagttttatttcaacacagccatgcccattcatttacatatcgtctgtgtctgctttccaaatacaattgtagggttagataattttgacagataccttatggcctacaaagccaaaaatatttactatgtgaccctttttaaaacaagtttgccaacactttgtttagaagaaaggattatttaaatggagtagacaatttattacataggaacaaataagagggatatgggaaaagaaagtaaaataggaatcattttaagttaacttgtttctatgcatgtaacacttgtaaaggtcttggtaaaagtcaaatgtaattgaaatttatatgtatacatatacatataaacttgaactaaataagtagagtagataatacatttaggtcatatgagtaatagtgcacactggctgtcactaacttctctgaatgctctgcagaagggatagaaataatggatttaacatcagaattagaatataggcggggcaaataccatatttttagctgacaaagaagtggatgagatgtaagtacagggaagactcttgtagaaggattttccattttatctgtgaatattgaaatgagctgtaggatctacacagcaaatagtttggaatttctgacttcctcatgtgaaatagtgatagagatagaaaagatagaccaagaaataaaaaattaaaacttgttatgcagaaaacacctagatttcaaaaaggaaacactataaaaatataccagtacattggccacttactgtaggttagacagtgggctctccattttttcatctaatttaattatcaatatgtaaagccagtgttattcttcatttatagacaaagattttattacctgtgcaaagtctcccagtcagtaagtgatgaatccaggattttaacccacgttttcgatgtcaatgctctattcaaacttactcataattctaaatgggtctaatttgtttaatttgaagaatcacagatgaggtagatttctgtttttcatctcttatggtcactaccataatatcaaccagtgtttatgtaagaatccagcctactagagagaatataagtttacataaaacagtgaagagtcaaagaatggtaatgattcttaatttgtaaactatatgggtgaaaatgttaactactgctattaataatccacaagtaaggctcatatgtctgtctaaaatataccaagtagaagtctagaaatttaaaaatcaaggttacagattccttagcctttggtgtttctggaaaaactatacgttttattttgacattaatatatatttaaaatattttccagaacagagcattgtctttgaagttatatacattttagaaaattgtatctatgaaatgtgggaaaaagtattggaatatttgggaggaagataataggttaactttaaaggtcaacaaaatgataatgaatttaatatatatattgaaaatttaaatgttacacataataaaataaaatattctaaaaaggaagatacatgtagtgaaatgaaatatttggtggtaggttacatacattggattatttaaagtcctaggagggttttattttgttaaacagtttaaaagtcctttgcaaacttgtcaaatgtatatgtttcttttcatatccagagatatttttcattcaacaattgtaaagggctacctaccccatattactgaagtgaaaatgttagacattttttcataaataaaagtagatgtaggaatgtatatctctttcattgtttttacttgaggatagatctgtactcaaattcctgtattgaagtcattttccccccatcaagctaggtactcaaaaatctaataggtgtgacatcaacaattacttctcgctaacaactcttgtaatttaaccccttcaggtgagcaggctgattgatgaattgcagacagctatcaaaagtaacataggtcatctctgtaaacttggcccccaattacaggctgagcaggagcaattctcctcttatgtctaccaacacattaaaagccttccagcaaacacgcttgtcccaggaggcctgcagcttaaggtg

SEQ ID NO: 6930 - DNA, 2300 bp, Homo sapien
ttccagtattttaaactgatgattcattattgaacatacttatggtcatttccctttgtgtttatagtttatttgtatatatttcaattcaagagcttaattaccattaaaatggtactataataaagataagttttacaaatgataatattaaaaaaaaactcttcaggaaggtttaaatgccataaaaatataaagcaagaaatatatgcttgtcaaatatacactataaataaataatttagatgaaaatggttgactgcatttaacaaagagactaccaaataatgaagggctaaagagtggttgttagatttgatgtacttcatttcatattgtaagtaattgctatccataaaaattctatggcttctgtataagaaaaagagacattttgacaggcaacacgaatatgaagcgacagcaagtacaaatccttggcaactgtcatttcattatcctgctgttgaattcacatccaaattgtgtgataacttatacctgcatgtttgtttttgagccagggtctgtcaaagtagccgcgtttcctgcttaagaatagaattattagccacatgcaaatttatgccatagaaatctaaaaatagcaaggatgttttgtgtttcataaagagggaaaataaaaactccatgtcattttatgcttatactgaaatttccagtgaaacgttcctgattaaataaaagtagaatttttagaaaatagcagataatttatattttaccttattttgaaattaattcaacattagtaaaggtgtttaataaaactaaaaataaagcaaaagtaattcggattgtcagttacattatactacatgtccattacatttaatgcagtagtggaaagctgattatatgttaggccactatcagtggaaagtaacaaaattcaactgaaagttactttaaaaatgaggaacattcattatttcacataagaagaattcagagagagagcaattttagggttaaattcagcagttcagcagtgttatcaaaaagtctggctcattgtgtctttgcctctgccatcctcagaatattggctagatcctttggcttgacccctcctgcttgcaagatggctcatcacatgttcactcaacaatgtccgagtaaagaagatggatgtttgatcacttgtatctctttttcattagggcaaataacctttctgtaaaagattttttatgtctcattggccaaaattagatcacaagcagattacttaacctgccagggtcaagggaaatgaaattaccatcattggctttagaccattgaagatttactcactggagctgatcgtaggatactttccatggacatataaggaagatgaattcttaaaaataaccgagactttatctaagaagaaatgggggaaatgacttacatagataatcaacattacctgacataactcttggcttcagctttcttttattttatttcttaaattgtgtttgtttcttttcagtggtatttggatacatttttgcacgctgtcataattatcaaagaataattcctgcatatcgaccactgattgagttcctgtggaaatgtagcagatgtaaaacaaggatcttactcttgcagagtgggatctgaaatcatcttaaatcatataaccgataacaaagcaaacatggcaatatgcaaaacaggacatcaatttatacaaagggcctgggaaaatgatttagaataaggaataactatgatctgacagaattaacttctcttaggtgtcttgtcatcctaaacagttttggtgaggccttttccatgaccctaacccctggaatttttcccttcagtaaccagggctttttcttcagagctaatcgtgatcagtaattgtaaatttatatgtgtaactatttaatagttctctctttcacctgacaattaatattattatgaaagagtttctagaaaatgtaagttctgagttgagatcaacatttattaaatatttattttttgaagggagtacagtaataggtatagattagctgagtgaacacaattggtaaaaaggtatgcagggcggggaggagccaagatggccgaataggaacagctccggtctacagctcccagcgtgagcgacgcagaagacgggtgatttctgcatttccatctgaggtaccgggttcatctcactagggagtgcaagacagtgggcgcaggccagtgtgtgtgtgcaccgtgcgcgagccgaagctgggcgaggcattgcctcacctgggaagcgcaaggggtcaggg

SEQ ID NO: 6931 - DNA, 2300 bp, Homo sapien
aattaattttgtagcttgcacttacggcttacattatatttctattggaaagtactgctctataaaatgaaaaatgaaggaagcttaatgatcagaaatttatgtaaaaattgttttaagaagtttattttggtataagcagagtgtaagacaactgttctcattcagtaagccaatggcaagtaaagaaaaaaacaaggttctagtgaagaaatgggactgctataatttaaaagatatttaagagacagaacagctaaatggaaagtgtacattttgtctgattctgagtcaagcaaaccaaccagaaaaagacattttcaattaaccgtggaaatgtaagtaaggtctagatattatgtgacagtccaataatgacattatggagataaaagaaaaagttggtacattttagggatgcaaactaaagtatgtagagatgaaatgacaaaatatttggtattgctggggaaaaaaactatttcttactttccaaaccccaataaataaataaggtaacacaataacctaataaatagtaaatcaaaataaaatgcttttgctgtaaaaaacaaaaaacctggagtaccggagcatatctacctacacaaggaagaaccaagctgtggacagaagggagtttgagggctagagatgttcaaggtggcatcattctgacagtactgtttagaaaagcattcaccacactacttaattccattgctttaggtattttcatgaggccacacaagaaagtatgatgcagccaggactaaaaccagatgctctttgtatctgcctttaaacatgacaaaaccctgtggagaacctaatctatgctttcatctttagatttttaaacttgcttgtttcattcagttattctttatagttcataacatcattaaataactgatcatattagattattttatttattctgcttaagtttatcttgactgcttctcaaactcagattggtagaagtttaaaaaagaaggaaagcaaaatcaaagcagtaacaacaaaaccattttaacatctccaagtgaaatttatgtcatgctggccaaaaataagatgtagttttcatctccaggtacaatgctaggaagaggtgttaatgtaaagtaagcagcacaaagaagtaataaaaggaaacacaggaatcaagaaagggagaagaaagaaaggtgagaaaaacaccaccaccaccaccaccaccaccaccagcaacaataacaaaccccaacagtgcccatatgcagtgccccctaactgcttcgaagaagaacagttcattctgcttttttctgtaagcttgaaagatagcatagctgccctgggaatgtgtagacttgctgagtccttgttctgcccctacccaactagctgtttggccttgatccttgatttctttcctcatctataaagtgggaataatggcacctgccttacttgtctcactgggttgaaatgaaagcgaagtgaaatagcaaatgtgaaagaattttggaacgtttttatgttgtaagttggttgctaaggtctaaaagaaatattaataattacgtcgaatatcttctgcagaaaaaattaaaccgaccccatcccccgcacatctagccctacctggcataggttttagttcttttaattttcgaattagaacattgtaaaggaactgtagggacgagagtggcatcaggtctcctcatccttctcacatccttgcccccgcacccctctctcaccccagagttcaagcaccaaccgaaaagattgagagtagctcagggtacggtaaacggaggaagctttgaaaaaggcggggaaagcctgggatggcgagggggtgctcgctgaggaggaggagagaagcgacagtcgcggggcccggaaaagagagacttagagcgaagccaaaggcgcctttcttcacagtttgggaacttactggtagtaaacgccactccatagaagcggtgaccggttaccatagagaccgcgtcggggtgggcggagcgtcgcttctgagctgtgccacggccacatcagctcggccagaaacgcgaacacgtcggaacagtgacttccggcggaagaagaagccggtccggagttctggccgacagcaggcgaggagtgggtagcagcgcctatgtgaagttaggtaggtctgatgtcgtataaagcgcggagagggtgcccgccaatggctgggtgggtaaagccgactgtgaatggagaagattcccaagtcccgagcttgaggaggccccggctgtttcgttaagtgt

SEQ ID NO: 6932 - DNA, 2300 bp, Homo sapien
cggaggttgcagtgtgccaagatcgcaccattgcaccctagcctgggcaacaagagtaaaactccatctcaaaaaaaaaaaaaaaaaaaaaaaaaagtcaactgataattagtgtataaatggtctaaatcagcattacccaatagaaatataatgtaagtataaatgccggctacatatgcaatgttaaaaaagtaaaatgcaagagaaacaaactttgatatgtgcaaatacatgcatgcatattatgtatataaaacacaaaatagccagtaatccaaaatatcatcatttcaatatataatccacataaaaactgtttgattattaactacaaagaattatcagacagggagtttaactgtgataagtttattaaaggatatagtagaaacagtggacagtatgtataaaaagatgagaaagagatagaaactttaaaaaaggagccagtagaaatgctagatatgaaaattaggtaagagatcaagaattcttttaagaagtttatcagcagatggacacagtagaggaaaaataaaaccagtgaactttaatcaacataatcaacataaaaattgttaaattattttaattccttttaaatactgtctttaaaatccagtgtatattttacccttacagtccatctcaagtcaggctagccacacttcaagtaatcaacagccacatgtggctagtagctactgttgtttattatgtaacaacacttctaaatattttacatggattatttcatttaatcctcccttggcacatataagaaaaagtaacttgtccaaattctcacagataaagatggactcaagattctaactcaagcagcctgactcagatctcctgctcctaaccatgcttttccacctcaaatcaagtttttctgcaatattactgaaatgttcaattaaatcaaattaatacctggattcctgccactggtatcctattttctggaaacctaaatttgtggtttcatataaaaattgatttttttcccctcatgatttaaaatctgaaagaaaagacttaccattaatatgagtttttgatatttttgttttaggtctgatatatttgcagatgggtctgctcccaggatgctgtaccaatccttttttggcatctgctcaaccgccatcatccatggaaccagaagtgggccttctcagattagctgaatagaaatattaatgacaattcatcacagtttgccatgtatctaagaaaaaattaagtactgcccttgtaaattctttagtatttagtcgagtaaatcatgattataatgcaaacctgaggaagcacagattttcatttaaaatgccccaagaattccaggtataagtgtaccgacaagtatggaaaacgtgttaggtatttcacgatatatatttatactttaattaatgaacagcattaaaaaaaagaattttataatgaaccaggtggtgtatgaacctctaagaaggtatttctgctagtcttatgataaaactggcacacaagtaagcacccactaaacacgctggaggagcttaatgaatatttacaaaatgaacgaataaaaaaaaagcaaaacagaacatcaaagaattaaaataaatttgggggcattccttctgaaagtttctcgtttgcttttcctccagattgtctggagagcatgatatgggaaataacgtcagcaccagctggtagagaacaagagtcccctgttattggagaggcgctgagacctcgcaaagacagagtgaaactctctacgcgaggatgccccagtcttccacgctccagaagagagaccctaccaggagccccagaaatcaggcaacctcttcccacagctatatacacttaacgaaacagccggggcctcctcaagctcgggacttgggaatcttctccattcacagtcggctttacccacccagccattggcgggcaccctctccgcgctttatacgacatcagacctacctaacttcacataggcgctgctacccactcctcgcctgctgtcggccagaactccggaccggcttcttcttccgccggaagtcactgttccgacgtgttcgcgtttctggccgagctgatgtggccgtggcacagctcagaagcgacgctccgcccaccccgacgcggtctctatggtaaccggtcaccgcttctatggagtggcgtttactaccagtaagttcccaaactgtgaagaaaggcgcctttggcttcgctctaagtctctcttttccgggccccgcgactgtcgcttctctcct

SEQ ID NO: 6933 - DNA, 2300 bp, Homo sapien
gaggccaggatggttggcaggggggatggggagaatttggtcaaagatacataatatcagttagataggaggaataaatttcaagaaatctattatataacatgaatttatagcaagctgactatagttaataatcatatattgtattctttaaaaaaatgtaaacagtgtagatgttatgtactcttaccacaaaaatgataactatgtgaggtaatgcattgctaattagctagatttaacgattccggaatgtacatacacttcatagcatcatgaggtacacaaaacaatgccatctgtcaaaaaataataattatatgtagcatttcaaaaagttcacagcatcaaaaatatttgtaggggtggggggacagagagcatcaggaagaatagctaatggatgctgggcttaataccgaggtggtgggttgatctgtgcagcaaaccaccacagcacacgtttacctatgtaacaaacctgcacatgaagcccagaacctaaaacaaaagttgaagaaaaaaaaaattcaagacgtttctatctgatattggactgctttgtcactttttcttttggtcttcctagtgcttatttactacaggataaaattagcacatgctatttaatgtgttcattttaagtactatgttgttttctatgtgttaattttatctcctccaggtgagaccatttttattaccataggtctaaaatgacaagattaagtccaaacagacagtaatcactcaacagctatttattgagtaacttaaagattcaatatgaaagcaaccttgatcaaagctttccagttgatatattgtgaaacagggttttttcctaaacatgattctaaaaaacaagcaaacaaacaaaaatcctccccaaatgaaaaactccagtcactatttagcaatactaatttcaatttatcaaacagaatcagcccaaaaatttcaacaggtcagtgagatttaaaacaattcgatggcaagaatttcaatgaggtttggctctaattaaaaggtatcacagatcactgtcaaagtcaataactcagtagtgcggtaatgatttgggagtccttttcaatttagacatttgtcaatcatgattgcctttaaacatcagttacccactgtccctgctcagttttgaaaaaaaaattaaatacaaaaatacaactcaaaatacatgttttttccacacataaaattggtattttagtaataaactctcgattcagggttcataaaataaagtaggtatacttctaattcttcctagcagttttttgggggaaagaaaccctaagtattttctgttatttgcagctgctttaacagcaaacgacaattaaatgtgtgaacaaggttgtcagagtaacacttgtcatttacaccgcttaggaaagacatccaagacttccagaaacactaattaaaattaacaaaagcttcttatcggaacttgtcagagagctatagtttgtcagacacaggaaaaccagatagcctcaaagttcaagagttttcgctctaaggtttaattccaaaccacctaccactaggcactaacgaactaagcccagacgctcagcaaccaactcattaaggtaagagatcccatcctttccatataacacaaaattaagaaaaagacatcgtggggaaggcggagtgaattttctatcagaaatcagaagataaatgagcaggaaaaaagtctatcctcacacacagcggagaaaggtgctagcaattgcttgataagccctaagggtttattgtttcaccaaccttttctttaactcaatgtgaatgaaggcactcaaaaggagaagaacgttacgtgatattacctacctcgggccccaaagaaccctggagaccctcaaccaggacacaggtgggcctttctcacctgggccccgccgaagtcgaccgtcctttcgtagggcgcacttttcagcaatacgccttccgattggttggctcgggactgacgtctcagtcctattggttacgagagccgcggttggggcgaggaggcgggagtttggcactggttctgataggacgggtgtttgcgttcccagagttcctattgggttaacactggaggctctaagatggcggcagtggcaacctgcggtagtgttgccgcgagtactgggtctgcagtggcgacagccagcaagagcaacgtcaccagtttccagaggaggggtcctagagccagcgtgaccaacgacagcggccctcgactggtgtccattgcgggcacgcgaccgtcg

SEQ ID NO: 6934 - DNA, 2300 bp, Homo sapien
cgaggttcaataaatggtcaaaacccctggaaagaatacgtaaaaatttcagacagcggtagcctagtgcaaagagcactaaatttgaagcctaacaatcagtacacatggtcactggttttgtgagactgttcatatcacttaatttgtttttagagctcaaacatgaaactccattctacatgtttcataatttcttgtctcagtttttttctacacattatttttcttgtattcaacaacttactgagaatctactaagtgccaggaggtacactaggaacattttgttattctaatgaggaactgaagacattataatagaaacataacctttttgtttggaaagttttagtatcaagtaaatgaagttacatatcccattgaattaaaaaatatataaggcctagaaatagctaccaaacttaaagttcaaatgtaagaggatatcaactgaggctcacaagggaaaaacggtggactatatatttgctaactagatattttgaatcacttctatttacagtaccatgcaactcaggaggaaaatatatttgaaacaattaagtgaaaaatacttaaacttatctagaaataaccggaaaatgaaatgagagaatcaagaagccatactctttctcataggttgctggtcttcttactttctctgcactaaacctatgaaaagcctactttgaggggaaaataaccgaaagaaatgtcaaacgaagtacaagaacaagcaatgagttatattttatgaaagtgtacaagatttaacagacacatatcacacactatgaaaaaagttatgtaaacacagacggggttttaatgaaacagcattcagaaattaatctagaagctttattaacacagcaaatctgtcctaccaacttaatctggtcattcctttgaatataacagttatgaaacaagcatattcttcagcaggcttctcataaaaaattccagagattttaaaggaaagcctaagaactagacttttctcgttaaaatgtgagttaaatttaaagatgtcgtatggaatgtagcagcaatcaatactgggaagcaaaatgtatatagaaaaaataaaaaatatatacacagatttaacgcagacactatctaaatatcaacgacaggctcaaaatactttataaggattatgtgtcaacataagcctttaacattcgctctcttaaagccaaaatgttttaagatttagaaccagagaacaggcagtctgacggtcaaagaggggaaatcatttttttccagcatcttctaatgaagtctgtctctcacaattataaaaacttttgcaggctggtctaaaccgtgagctgcctggagaaagcagaagggaggtatcctgaatgaaagccaaaccatctccataaattaatgtcttcccttgactagaaagcatttcagggtaaaaagcatgtacgaattcctccgtaatatgaaaaggggttggagggcagggaatgaaatagagagcgagggcactaaaacatgtttagttaacagcgctcagaagtctccacacaacccgtattcccctccatctcaatcagaccaggctattctctcctcctccgaaggtttaggggtcagaaagagatgtggggtcaaagtggcttccccgacaggtcccctccctaagtttcccctcggctgagcccagatctccgctctgaaccgacctaagagctggtctagggctgggagcccggttgataccagcagctgtccattccgcaccgacggtcgcgtgcccgcaatggacaccagtcgagggccgctgtcgttggtcacgctggctctaggacccctcctctggaaactggtgacgttgctcttgctggctgtcgccactgcagacccagtactcgcggcaacactaccgcaggttgccactgccgccatcttagagcctccagtgttaacccaataggaactctgggaacgcaaacacccgtcctatcagaaccagtgccaaactcccgcctcctcgccccaaccgcggctctcgtaaccaataggactgagacgtcagtcccgagccaaccaatcggaaggcgtattgctgaaaagtgcgccctacgaaaggacggtcgacttcggcggggcccaggtgagaaaggcccacctgtgtcctggttgagggtctccagggttctttggggcccgaggtaggtaatatcacgtaacgttcttctccttttgagtgccttcattcacattgagttaaagaaaaggttggtgaaacaataaacccttagggctta

SEQ ID NO: 6935 - DNA, 2300 bp, Homo sapien
atctgttttggaaacgccggtcgccccctggtgcttccggggctggtaagcgcgtagctgaggaaagggcacaaaggtggcgagctttgcgggagtagttgtgcagaacctgccggaccccagggcttggccggtaggctcgccttcggcggctgggctctccccttggagctcagactccccagccgcaggctgtctctcgggcgggccccagccagggcgcgcagccctgagcgtttgtcgctgcggcccggctggcaggccccgaggggcgcggggtcgcgggccggccggcagggctttgtgccgctcgttcccgggtgtgcgcgaggcgcggagcatccaaattgacaccatatgttttcctattagttgcttcgcggtcgagttctaggcgcataatcatcgccagtgggcgagagcgccagcagtccctagggaagggacacaatgattgaggcttaacctctgaaggggaatttggagctgcgctttctctctgccatttcgatgctgggagtggcgctctggccctggcgtctcctgggcaagcaccagccggcggtatctgcggaggtggctggcacgttgttattttttgaaatgagtgaggagggaggtctagatttaggcggccttacgcgcccgccttggcattagcagactgggaattgccgtggctatgcccgaagtttggaaagtctctctcggtctctttctgggacagcctttctttttccgggaagcttcctgtgcctagaggtggggctctgtagctggaggggtagatggaacttgcgaagcaaaggaaggcaataaaaggaagttaggagaaaccggaaacgtgggccaggccttgctctgttggagaagcggtgtccccgcaaagtccctgcttgcgctggtcccggccggagcccagatcccccaaacgcctgtcacttctcatcgagttgaggctccggcccccacccgcgccttggtgagggccccccctcagccccaagccttcggctaccctgaaaacgcggctcccctcgaaggggaaacaagtgcagttcaatctcgtctgagtgatctacaaataaggacggaaagggtcgttttatcacggtcccgtttgtcgtgacgatgcaatttcccggagcggagcactgtcacaaagtgacaaggctgccacaagcgccccgactgatcttttcaattagccttccatgcatgatccggagcgacttccgcctatttccagaaattaagctcaaacttgacgtgcagctagttttattttaaagacaaatgtcagagaggctcatcatattttcccccctcttctatatttggagcttatttattgctaagaagctcaggctcctggcgtcaatttatcagtaggctccaaggagaagagaggagaggagaggagagctgaacagggagccacgtcttttcctgggagggctgctatctaagtcggggctgcaggttggagatttttaaggaagtggaaattggcaattggctttgtgtgtctgtggtttttggggagggggactacaaagaggggctaactccctctccctattctctaaggttggaccacagggatgaggttgtgagatacaaagataaaggagggatggggaacactatgatgtggtatttttcttttctgttttttctttttgataatatctatccttggctaaggggagggcggagttcagcggcggaaataaagcgagcagtggctggtgcgaaccgactcccggctctaagccttacttgcggtggccggacttgtctgtggctgaagccgagcccgggctctgactctcacgtctgcactggaggtgcggaaacctggactggggttcaccagccacatactggctgctctggttgttctctcctcttccttcttctattctaaccaaacaaaacccaactcgatgcttgtgccaggccttggccagtttggacggtgatggaaacatttctggattttagcgtctaagggagcactcaagggctgtaaggtttgctatcactgtcccaacactgcagagaccttgaaggttcagtgtgggatctgtagaacccatggtttgcggtgacactcagaggggatctttgggagatttatagagccggttcttagcgctttgtgggttcagaggctggctgcagtgtttatgaagaggggcagtgggctggggacactgctggggttatggctgtagtgaggtccatgtgtacttgttccttggcatgtgtctgactctgtgttgctgctgcagtac

SEQ ID NO: 6936 - DNA, 2300 bp, Homo sapien
agagaaaccccatcccccccaaatcctgtaactcacaccccctctcgcccctgcccgggctctgaccccggagagaggggctgggctgatcagggcggggcgaagtcttctcctagttgagcgagaaggaggcccctttgggcttagccaagactgaaagtctccaccaacccggcggggttgggggcttctctccccaagtcactctcagggcagctcctcccctcctcaccccactacgggcctagaagggatggggagaggagcccccaggcctgcagcagggtaggggtggtaaactcgctgttacagggcgcgggagagagcacggtttactgggtctggtaaggaggtgcccaggaattggaaaatccctgccctggcaactgcaattgcttgggtcctgatagtcccaggcccagagcgcttttgatacttatggcccttgtacctccctgctttcctctgcccagaccccgtggggtcccacccaccttcctgttcgtggtgggtgctggtacgcggcagggctagtctagagctccgacctgggagcctggaggcccagcgaaaccaggcccggtttgaggttacggttgaggcacacggcgtcggggctcaactgaactcaaagtgtggaaaggcccgggtcttccagcagcctgccctggccgaaccacacaggcttaaggagggtccccagcaccttatccatctgttttggaaacgccggtcgccccctggtgcttccggggctggtaagcgcgtagctgaggaaagggcacaaaggtggcgagctttgcgggagtagttgtgcagaacctgccggaccccagggcttggccggtaggctcgccttcggcggctgggctctccccttggagctcagactccccagccgcaggctgtctctcgggcgggccccagccagggcgcgcagccctgagcgtttgtcgctgcggcccggctggcaggccccgaggggcgcggggtcgcgggccggccggcagggctttgtgccgctcgttcccgggtgtgcgcgaggcgcggagcatccaaattgacaccatatgttttcctattagttgcttcgcggtcgagttctaggcgcataatcatcgccagtgggcgagagcgccagcagtccctagggaagggacacaatgattgaggcttaacctctgaaggggaatttggagctgcgctttctctctgccatttcgatgctgggagtggcgctctggccctggcgtctcctgggcaagcaccagccggcggtatctgcggaggtggctggcacgttgttattttttgaaatgagtgaggagggaggtctagatttaggcggccttacgcgcccgccttggcattagcagactgggaattgccgtggctatgcccgaagtttggaaagtctctctcggtctctttctgggacagcctttctttttccgggaagcttcctgtgcctagaggtggggctctgtagctggaggggtagatggaacttgcgaagcaaaggaaggcaataaaaggaagttaggagaaaccggaaacgtgggccaggccttgctctgttggagaagcggtgtccccgcaaagtccctgcttgcgctggtcccggccggagcccagatcccccaaacgcctgtcacttctcatcgagttgaggctccggcccccacccgcgccttggtgagggccccccctcagccccaagccttcggctaccctgaaaacgcggctcccctcgaaggggaaacaagtgcagttcaatctcgtctgagtgatctacaaataaggacggaaagggtcgttttatcacggtcccgtttgtcgtgacgatgcaatttcccggagcggagcactgtcacaaagtgacaaggctgccacaagcgccccgactgatcttttcaattagccttccatgcatgatccggagcgacttccgcctatttccagaaattaagctcaaacttgacgtgcagctagttttattttaaagacaaatgtcagagaggctcatcatattttcccccctcttctatatttggagcttatttattgctaagaagctcaggctcctggcgtcaatttatcagtaggctccaaggagaagagaggagaggagaggagagctgaacagggagccacgtcttttcctgggagggctgctatctaagtcggggctgcaggttggagatttttaaggaagtggaaattggcaattggctttgtgtgtctgtggtttttggggagggggactacaaagaggggctaactccctctccctattctct

SEQ ID NO: 6937 - DNA, 2300 bp, Homo sapien
cctgcctcagctcttcagccctattccccctcgccctgtcctggggtgtgtacagcagcccaggccttccttctccttcccggctccgtggcccgaagccgccgagagagctcgggacagcgcaggaccaggcagccgctcgctctcctgtcaccttaactgcaggctccgaggggcgcctttggagtgtactgaggtgtgtcctaatcgtgcggcattcaacaaatggacttctggtgtgtggtcagaagagaaaagccatttacttactttcctccccggttttctggcaacagctgaaggggagctgcctccgtggactgagcagacccaggagagggagtcgtggtgcggagacacacgcaccacacacagatgaccggtggcacacacgacacacgctgacataccgacatcgccagtgggacacacacacacacacacacacacacacacacacacacagagagagagagagaatccctcccagcattggtcatccgcccccccacccaggcttccactccccctcccctcttatctcccctggcttcccctcctctcgggcgctgcgaaaagcagccgcacttagtcaacaaatggcacgtgggagaagttggtgagtgtttggtgaggactcttcagggcttttcacaagaaccctctgtacacaaagtaagtggcgtgtttactcgggcctctccagccagagctgtgcctctgctccgctgcgcaccgcggcttccgaaaggagaaaggagagaagaaagggcggggagagcggggtggaggatttggacaggccctggaggcttgggctggggaggcctctggcctcgtttagttctcggcccggcaacctcctctcggcctaggcttcgccgcggcctccgcagctggaatggagctgccaggacccagtgacgctcccgcccctttcctcttcttccaaggggccaggtgggctggggtgcggccgccgctgtgctctgtgtcttggggccccggctgggatggggtgggggcgggcgggggcggggcggcaggccacgctgtcctggagttggcaagaaaggacagcacagaaacttgcaccctccgaggactgggagtcccgagtccagcttagggggagtgggggcgcgacccccaacccagaaaccttcacttgaccgctcaagttcgcggcagcagggcgggccgcgccgaatctcggcgtgcgcggagcggggagatgcaggcgagcgccagagcccgggctcgggggccctgcgccggggagaggagccgggacccaccggcggagccgaaaacaagtgtattcatattcaaacaaacggaccaattgcaccaggcggggagagggagcatccaatcggctggcgcgaggccccggcgctgctttgcataaagcaatattttgtgtgagagcgagcggtgcatttgcatgttgcggagtgattagtgggtttgaaaagggaaccgtggctcggcctcatttcccgctctggttcaggcgcaggaggaagtgttttgctggaggatgatgacagaggtcaggcttcgctaatgggccagtgaggagcggtggaggcgaggccgggcgccggcacacacacattaacacacttgagccatcaccaatcagcataggtgtgctggctgcagccacttccctcacccacactctttatctctcactctccagccgctgacagcccattttattgtcaatctctgtctccttcccaggaatctgagaattgctctcacacaccaacccagcaacatccgtggagaaaactctcaccagcaactcctttaaaacaccgtcatttcaaaccattgtggtcttcaagcaacaacagcagcacaaaaaaccccaaccaaacaaaactcttgacagaagctgtgacaaccagaaaggatgcctcataaaggtgagtccgcttctttcttctcgctttatttttattgcaatattcagacaggtctcccccttcctccccccttccttcctcccctctcgccggtcccctcccccactgctacgccgggagagttgggccggagaagtttccacgcaggagcccaaactttctacttccagcgaaagcccgcgtcggagggcgactgccggcgagcgggagcggcgcagggctcggggcgggcggccagctcagccccagcgccagcgccagcgccagcgcgggctgagctcgcgggaagaagggagactccaggcgcgacagcagccgcggctcctagccccagcgtcgcccaatgctcccgacccgcgg

SEQ ID NO: 6938 - DNA, 2300 bp, Homo sapien
atactcgcctccagttcggacagaatcacttcccccccccccgcccccccgcaagtccctcgctcatgcacagcggacttgagtcttgagtccaagcttctttaatgctcgcttggaaagtaaaaggagagagaaagagaaagccgactttcgctggtctgggactcagggccgcggccccacttgccggcatcctccgaaagtcgcgctcctgcgaaatgaaacctcgcccaggaggccgcggacctggacacccggcgccacctccttcacctctgacccaggtttcctcccggcgctgcgagctcccggggaagggttagagccggcagccctccccagcccggggaggggagagggttatgcgaccccacctctggctagggccggggaggcctttgcttcccgggagccctgcccgggctccttggtcgcagggctgctgggtcccaggcaggaacgagagggtgaggcccacatgtggcccggcggcccagggcggcttgcagcgtcctcactgtcccggctgccaggggctgcggcgacgcggccagtcagcagcgagttcaggtcgcgcagattttattgatgagctctgactttcagcactttccctaagtcaagaagagtctagcgtacccttcggctgcttcatttcagcctccctgcctcagctcttcagccctattccccctcgccctgtcctggggtgtgtacagcagcccaggccttccttctccttcccggctccgtggcccgaagccgccgagagagctcgggacagcgcaggaccaggcagccgctcgctctcctgtcaccttaactgcaggctccgaggggcgcctttggagtgtactgaggtgtgtcctaatcgtgcggcattcaacaaatggacttctggtgtgtggtcagaagagaaaagccatttacttactttcctccccggttttctggcaacagctgaaggggagctgcctccgtggactgagcagacccaggagagggagtcgtggtgcggagacacacgcaccacacacagatgaccggtggcacacacgacacacgctgacataccgacatcgccagtgggacacacacacacacacacacacacacacacacacacacagagagagagagagaatccctcccagcattggtcatccgcccccccacccaggcttccactccccctcccctcttatctcccctggcttcccctcctctcgggcgctgcgaaaagcagccgcacttagtcaacaaatggcacgtgggagaagttggtgagtgtttggtgaggactcttcagggcttttcacaagaaccctctgtacacaaagtaagtggcgtgtttactcgggcctctccagccagagctgtgcctctgctccgctgcgcaccgcggcttccgaaaggagaaaggagagaagaaagggcggggagagcggggtggaggatttggacaggccctggaggcttgggctggggaggcctctggcctcgtttagttctcggcccggcaacctcctctcggcctaggcttcgccgcggcctccgcagctggaatggagctgccaggacccagtgacgctcccgcccctttcctcttcttccaaggggccaggtgggctggggtgcggccgccgctgtgctctgtgtcttggggccccggctgggatggggtgggggcgggcgggggcggggcggcaggccacgctgtcctggagttggcaagaaaggacagcacagaaacttgcaccctccgaggactgggagtcccgagtccagcttagggggagtgggggcgcgacccccaacccagaaaccttcacttgaccgctcaagttcgcggcagcagggcgggccgcgccgaatctcggcgtgcgcggagcggggagatgcaggcgagcgccagagcccgggctcgggggccctgcgccggggagaggagccgggacccaccggcggagccgaaaacaagtgtattcatattcaaacaaacggaccaattgcaccaggcggggagagggagcatccaatcggctggcgcgaggccccggcgctgctttgcataaagcaatattttgtgtgagagcgagcggtgcatttgcatgttgcggagtgattagtgggtttgaaaagggaaccgtggctcggcctcatttcccgctctggttcaggcgcaggaggaagtgttttgctggaggatgatgacagaggtcaggcttcgctaatgggccagtgaggagcggtggaggcgaggccgggcgccggcacacacacattaacacacttgagcc

SEQ ID NO: 6939 - DNA, 2300 bp, Homo sapien
gacagttctgacacctccaaactctctctttccccggtcaagcagaggcgcagcgccggcgcgctggaaagggtgaagactggcattttttggagaaggaaagtcttggcagacacctgcgtcactttgtagtgccccaaacgtctctctttttgcagaccctgggaaggtgggatcccttgtccgcggagctggcaaacgggtccagtgagccctaaaggcaaaggctcccatcccggccgcccagtccctggtgcctcccccacttccaggcctttgtccctctcctttctccagcaacctgccggttcccgctaacccggcagcctcgccgagcccagagcctagaaaagccaagaagatcccagagccgccccgtggcaccttcaggctgtggccactgctcggcttggggggaagccgcggtgccctcgcccttcctcgcctcctgccaaatggccagtgctaggggctccctgggttcagtcctcagtcctcttccgttcgctctgggaggccagcctgtctctctctctctctctctctctctctctctctctctctttctctctctgtcttctccctgcccacccccaaaatacctttaaaataacattgtccagtggagtctcccagcaaagggattcctagcagcccagcgggtcagactcccaaggctttgcctcccagtccctccatgctgttgtccagataggagttaggtttaaaactcctgacatgtaggacaactgaaatcagcggcactctccgatttttgcaaatagggttcctagaaaagtttgctttccatttcatcaccctgtgacgatccccccatctctcttttccctgtaacctctgcccccaagaggcaagagttcagcttcaaaggaaaagcaagcaagtcaaggccacctcagtcccttctccctggatatcccctctctaaaccgctgcctattctaaaggccaacgacccggtcctgcgatttgtcccgttgtagacctgggaacaggcaggcgggaactgggggctttactgggggatttgaggctggggagggggagggagcaaatgtcatggctggctcgctcaagcatccagggaaccgaagctaagcgcatcctgacgggcttttaaaatgacattgattaggacaagctgttcccaaccccagtaagagttaatctgcctgttaatcaaggcactaaggggctcaatgcgagttttattagcgacaggagaacagaggcggcagccagggatcaaaagccgggatcccatatatttgtcagcgctatctccaaaaaaaaaaaaaaaagtattttcaatttgaaaacaattcggcgcttttcgtcacttcctaacccagtctcacagagggtgacttccaaacctggctagcggggaaaaccgctgcccgggggacagaggggctgacaggaactgcgggttggctcagccgaatgcggccggggagaatttaagaattctcagcccgcgcggcccgatgcctctgattcctcacgagaggaaagggaatgaaaaatgaagcaacaaatgacaccacccaggctggcagccctcgttcccggccagaccccgctcctcaggcccggctctggcgccgggtggcgtccagcccctgcacgcgcggcgcggcccgcgggaaagtttgtgcagcgagagtgactgtccttccgcctcgcgcgcgctgcccccttctgccccggaggggcgttgggttcccttcggttttcctttccaattctaaaataaataaataaactccgggccctggggaaatctgaatagtaattccagtcatccaaattctatgagagggtctgaggaaaaaaagacaagcctatcacgggcgccctccgatcacgaagggcacgggcatgagaaggcgacagaggaggtcctcggctcgccctgggcgcggagcgaggactctggtcagaggtaattatgtcaccgcgttttctcgccgtgacagccgaataaacacgatctccaataaacatctctaatgagggaggaggcccgaggatggctgggtttgatttatgactggaggagaaggtccacttcccactgcgaagcaggcgacctgctcgccgcccagctccagggagaggaacccgcggaggagaggatcccggcccaggtaaggcgtgcggccggactgccactgcgctcgtcccccgtttccaggtgaggtgagcagggggcgccaccgctcggagtcgggcggaggtcccaacacctgtcacaggtgactgagctccgaagg

SEQ ID NO: 6940 - DNA, 2300 bp, Homo sapien
gcagggagctcttacacccccaaggtaatgctcctctattgctagaaattcagatctctaggctggctgggggaagcatgtctggtctcaggcacagtacttcttgtgccatgcaaagtcagctggtgggaagggggggatccaaggaaaagaaggggactaggaagagaagcggggatccaaggactggcttcccagctctcactgccagccagtggggtcacaaagacattgcctcaaatgtggagctgtcctctgctagctcgtacaggatcttatccttctctcacataactacatccttccatctagcttatcttactcaccttcagtctcaatttaaatgtgtcttcctctgggaggccttccctgattgattcccatgtctggatcggttcagtacccccagaccactacatgcctttctctgtgagcacttgtcatgctgacttgtgatccatggatctcagttagccagaatccagcacagcctgacacttagcaggtgctcagtttatggaacgaacgaacgaatgaacatctgttcatatacactatagctctgcagacaccatgattatcttgttctccattgtaccctcagcacccagtccagtgcttaggctgtagtagtaagacagtaatgatttattaattgattgaaagagggcgtcccaagaaagggacttgcgtctatgttgcgacgacatctttattgcaagggcaagaagcacatcccagacctttttgaaaacatcagggatggaggtgggaggcaaggcaagatggaggaaatttctaggagtacagatatttagctgtcatggtgggtttccctcttcaactatcgtttcagttttctagggtttttttttttttttatggagtttctctcgtttcccaggttgaagtgcaatggcatgatctcggctcactgcaaccttcgcctcccaggttcaagcgattctcctaccccagcctccgactagctgagattacaggcgcccgccacctcgcccagctaatttttgtatttttagtagagacggtgtttcaccatgttggccaagctggtctcgaactcctgacctcaagtgatctacctggctccgcctcccaaagtgccgggattacaggcatgagccaccgtgcccggccttctagggattcttaacctggggctcataggtggggcttcaaaagatccatgaatcctccgactctttaatcaagcacccgtgtcagtagctgtatgtgcatttttctggaagaggatcatggctttcaatgagtgtcaaaaggctgagactgctcgagacctcaccgtccaatacggtagccattagtcccgtgtggctctttaagtttagatttaaattaaaatttcagtgcctcacttacactaagctacacatcaagtgctcaacagccactacctacaggccagaccagatagagggcatttccatcattgcagaaagtttgatgggacagatatctgtattggtagcattaccaactgaatacaggtaagattggatccaactagtgcttttgtaaaatgagttaccaacatttagaaataaaacataaaaatctaaaatcctgattgatttcatttgggaaacaggactatctatcagcgtggggcctgcgttcccctggcagctggaacgcacagtaccgctccctttagagggactcttggtcatatagaagttccccgcttgaccctccttgacgactgacagtacgaccctcgtttctaggggacttcgcccgtcttggtctccttccaggctcgcgtttgtaaccagactccaaattttactaaatggggttgaattgggtttgagagcacatcttagagcagggtctagggctgagattcggggtctcagttggaagttgaggaagggcaacgtctccttccttacagttttcccggaactgtaggaagtcagagggaattttatcctgcacatctgttgcttgacaaagaacttcccaatcctcctccgagccctccagtccctagcccagttcgcccgggcccgcccctagcaacaagatcgcggggaggggccgaggcgaaacacgagccccgcgcccaccaccccagctggcgacgtggctccgcggccccggcttcccccggcagctcagcgaccaatgggcgcgcgagcggggccgcccgcagcttcccagcccgaggcccaggcgcgcccctctgctccggctcggggcgggcactggcggagggactggccagtcccctcctccgcgccggccccaaccct

SEQ ID NO: 6941 - DNA, 2300 bp, Homo sapien
tcatcgtctgcagcagagtcggccagccctatttggcggctagcagggtacctccaagtggccataggtcccatcaaaaggttttgctcattctgttacctgttggtgttgagaacaaatgatgatggagttggtctgggtttgctccttgcatcaacaccttaacttcattcatttattcatgcaacaaacacccgaatggctactgtgtagcagctaccatcagccactgatctagattattgtctttagtgaggaaaagcatgcattctctcctttattcctcacaacattccttgtgaagtaggtgttcagtttacagatggggaaactcagagagtcaagacacttgcccaagatcacgcagataatggggaccagaggcaggacggggatccaggtgttctgatgaaagtgctaggcttcatctccatcctagctgcctttcccaggatctcccttgacattgttaaagagaaggttaagatcttatttattcttacaacaaatatttattgagtccctaatatttgtcaggctgagctatgtcctagatgtttatttggcatagattagatgctgtcctttccacaaaagaggattgtagagtctgatgtcattaccctgagattatgtttcccagttggcgttgggtaacccactggcatgtctccactgtgtccccaggatcagagcagtgcttggcacataactgggctcaacactgcacaatgttaaaagaattctgctgtgtctggctatgatttcctgggggaagaagcctgaagacacttgaagtttcatgttttagtctttttttttttttttaaagacagggtcttgatttgttgcccaggcttgtttacagtggtacagtcatagctcacactgcagcctcgacctcctgggctcaggcaatcctcccacctcagcctcctgagtagctggagctacaggcatgcatcaccattcctggctaatttttttattttgagacggagtcttgccctgtcgcccaggctggagtgcagtggcgtgatctcggctcactgcaagctcagcttcccaggttcacgccattctcctgcttcagcctcccgagtagctgggactacaggcacccgccaccacacctggctaatttttttgtatttttagtagagacggggtttcaccgtgttagccaggatggtctggatctcctgacctcatgatccacctgcctcggcctcccaaagttctgggaccacaggcgtgagccaccatgcccggccattcctggctaatttttaaattttttgtagagtcaggatctcactatgttgcccaggctactctcaaactcttggcctcctacctcagtcctcccacctcagcctcctgaagcactgggatcacagatccagcctatcttttaggattgagacctgttaaacttgcaaatgaaggggtactttcaagctgttggtgatgtttacaccttcctgagaaagaggagcttgggttcttgggttcaggtaggaggtggagacattgattattcactcctccccttctcgtgtacaccctcccccacctaaaaaaaagttataggagattttctctgtcaaactatcaaactgatgaatttgtttcccattttttattaattaaagattaattgccactcagaatgtctgttgacaagaaagttttaccactgaagctgttagaattccagcccaaaacaaagaaagaaatctagagttagcctgtatgacctcctcccagataaatggactacaagggtgaaacttttttaaacactggggatagcttggaggtgtttttgaagttccccactgggatgctgtcctggtttgggaccatctggtctagagatgacaaaagtgggttcccagcctgaagtttgctctgggctagcatttagggtacctcagtggagttcagtgggaaatttgtgaaacctaggccagctgtggagctggtataggagtctttaccctaagagcagagggtttaaggttcctagagcggatcagctggtcaagttttgtgaatagattctatgatgtcaaggctccttcagccctgacatttgtgctgtgtccaccatctggtgtcttcttgctttacgtttcaagtctttgtatccatggtggtgggatttaaaaaaaaaaatcacttatcttttgatttacatacagtttccactttttgccttggacctaagccagaagacatgagttctcaccccagttttaccaaatactggctgtgtaatcttagaagttattcca

SEQ ID NO: 6942 - DNA, 2300 bp, Homo sapien
atgatcccgagtagactacgagcctttgggagtggctctctgctctcaggttggctctttggtttgacccaggatgcctctgagttgctgtgccaatgaacagtaaactcatttaattattgacccaatcaaaaaatactgaataagaggtcaagtatactaaatacagagcacaatacatcaaaaagtcagatatacttttattttttagttgcccactgtttcacatttctcttgacaccaactcagtattcatagtcctgttagcactagagtctattcttgtggtcatctaatccagtggttctcacactgggtttctcgcatgttccccagtgggtgttttggctggatggtggagttagttggcctggcagggcctcctgatatcgtcagagcacctctggggttacaggtacatcttgcttgctttgaagaaagcattctgctctggaaactggggtgggggattaggaacagaaactattgcctgttttttacagataaaaaactagttcccagggaagtaaggcgatgagccagaagtcaccaagcattcagccgtaaaagctggacaaatgaggacaatagaattctcagacttcttagagcacatggccatcttgcattctgttttaccttttgcttcctaggaaaccctggaggacatcgacaagaacggggatgggtttgtggatcaggatgagtatattggtgagtactgacctagagtcttgctcagctgtcctgactgggccacatgaccccacccacacgtctggctactttccccagacgtctcttttagcaacagctgcaagtctatacgtcactcctgggagcttccagcctgcttgtcccatcagccctagtgatgtagtatcagggaagtattattaggcctcattcagtggagaagagatgaaaaggctggccctacacaaggctggccaacagttggccccatgactctgagaggtgcccttcatcacactgcctagttttacctttgcaaaaggacattggagatcccatagatttacagtgaagatagaggagacagtgtcagggcaaagcctctaaaactggactgggtcaatggagcctagaaactctgagtagatgcagctgtgattaacagaactgtttatgtgtctgagcactttgcagaaaggcattcttcttagaaagataaatgctttacagagtgcacaattgcccaataatatgctcattttgtgcccctcgtttcccatcctttggatgggagtcctatagtgtcaaattaatgtatttgggtctgaacccaccattgctggttagagcccttcctggtagccccaaatcccccccagcccaaccccccgctagaaaggactagagcaggcaacaaggacaattccatttgatcctcaccacctgctatggcacatggctccagctgcaggctcccttctcatggcagctcttttcccaagtctcaataaagtaaaagctggaaaatcatttggtttaggtgttgacctatgaaaagagaaatgaaatatgtataatttttgtacagatttttaatcaaagccattaattacctttaaatgtaaaactcagagcctgagttgctgtctctggttttgtggttgtattactttgccatcccagacacgagaacaagtgccttcagcaatgaagagcagactttcctctaatcattagaaattatgtttgatcatgagccaaacactgttccttgtgtgtcattggtaacagacaaggtagctctcgccacagtaattaaagtgatcttggtggcactaccctgatagaataacatatgctgacagctccctcatcagagcaagcagttgagccttcctcttgctgggtccacgtgcgagggtcacgttcggaggcgcagacctcttactgtggcactggggatgaaatgagactgacagcaaagactgcatgatcaaaacaaacaatgtagtgcttttgattgaaagtgtgcgctctgcccagccctccggaactgtgcattgaaatggtgcaaagtcagaggcagaactcttcgagtggctttgcctaaaagaagcatcccattctttacagtgaatagggagagggaggtggaggcgttgcgcttgaaaatcgaatacctagtgactcacaggcagaggaaacccaatgtattgactcgtcatttcacttctcggggaggcttctcttcaagcggcaccaagtggaaagtgtgtggtggggggtggtagtaggaagagcactggaattaggaaccctacctt

SEQ ID NO: 6943 - DNA, 2300 bp, Homo sapien
tatttttagtagagagggggtttcaccgtgttagccaggatggtctcaaactcctgaccttgtgatccacccgcctgggcctcccaaagtgctggaattacaggcgtgagccaccgcaccaggccaatgtatcacttttgctcataaatcataagagcacatgcttatgtagacttaacatgcaccaggtaccactgtaagcactttacaagtgttgacttatttaatctacctagtgactctctgaaggacacaacaggttatcactgccattttacagaggaggaaactcaggccctgagaagtaaatttccccagtgtgacacagttaagggacggaagtggtgttcaaattcaggcaatacagctccagaatccatcctcctaccctctgcacttgctttctctctagatggataagtgccattctctttgtgaaggtggcatctgtcctcagtctcactcaaggatggtctcctatttcccacagttgtgaaagaagtcagttatccattagttttacctgtagctttcaacagaaagttcttagtggtttgggacagcgttttccctgaaggccattatcagaagcaggcttgagcattctcctgaagttctaacacacagagcagttgtctttcaaactccagactcctccagttttgtctttaccactgggtgtgaactgttggggtgaagttcagcccaggcacctaaagaattgcagggcagagacctttctccctgtccatccagacccagaaagaatgactgcttccaggaccaccctggtttgggcttgcccagagggaaggtaccagggaaaagttcttctgtcagtgtagggagtagtggggtccaaccttactaggcacaatttcccccctaatttctacctagaaaaggcagctagctgggccttttctgctgtctttccttcccagagtccctttgcctcatctttttgctgacttcctcggagaccccagtccttgactataccgacttcacatatgatcctcatggctactttgaaaagttctgtgcactgcgtttgaaaaatattcccatgcacactgattgtttcttttaggcattctagccctttccctttccttttgctcttttattaggtttgcatattcttctttagcaactgtgctacgaatttaaatgaagatatttccttttgctgtacttttgcctgttagcaggtgaaaccactccgactctggaagcaatcattcaatgttagtctgttttgaactggatgtgatgattcacaaatggtgacattgacagtggagcctgttacaagtagattatttttcatatgagagaaacttcctcagcagccatagagtttctgggaaatcttgggttccataactcagtgggaagtgccgatctaccacttgggttggccttcaacatagacagaaatcagatgacagcccatgcccaagaaaataaaattgtaattaataatgcctcttttcacttgtgtacctatgtacattgtacactgccttttcccttagtagaaaatcaatatttgtttcctgcaatgataggcagaaggtggaaggtctgaaacggcttccagggtgatgggcaatgttatcaaagccacaggcttgaattaaactcgtctccagggaggaggaaaaatctagttccaaatattcctgtaacttttgtgctgaccaagtgtttattaatagaaatggaatccccagtgggtttttctttggttagctggtgagcttgagagaaattacaataccaagagagtgactgtgaaataattattcattatggcctgctgggcagaaatttctaggcaggcaggctgcaaagcacctcaaagggaggagcacaggaaaagggtgtgtggaagtctggctgcaccctctgttaagttattaggtagaggtacacccacagaggcctttctgttggtgtgggacacagctattaccgaaaaagctggaaacatgaattctaatcacagatgccagttatgtctactttgagcctttttattttttatcctctgggggcagctctttacttcttccaagatgttacctggccagccagcagctacgtggcagaggtgaccctgatctcagccaggttagatggttctattcccttgatgacacaaattattctgctgaatataataaacagacttaaagatgaaaatgtgcttgaatcacacatgcgtttgaagagtggaggagttctcatctagataacagctgaggctttttttcttcctttctttttgtgca

SEQ ID NO: 6944 - DNA, 2300 bp, Homo sapien
aaaccatcgaatccatgcccctggggcacaaaatactactacgccattatctttttagtacttctaggggatttttgaaacctgggttctgtcgcttcgtttgggtcccttgtccagcccttttcagggcaggtctggtgcctgggatcttatcacatgtcgtggggggtgggactgtgggttttgcagccagcaggcattacacttctggaaaatatctggattcttctgtaatatacaggcgtggctgccatggagaaaaagttaaaaggggaccaggactagtaggtgaatgtatccttcttctccaccctggagaaaaagcccaatggagagagggccctagattcaagtcatatagcctggaagcaccatctccaggtttaagttttgtcttgcagtgaaaacagatgggtccatcttacccagcccttgaggctcattgggcagcttggatgtgagaagcgctccggctgctatcctggagtgggcaagggtggccctcgagattctgggtttattctttggatttccagggttcctgctgcttccccaggaatgcagggcctggcccaagacttgggctgtgagaggcaagggcatcaactctcaaaaatgtggaaatggccatcagagcgccaaggccaaaccccaggggagaggaatcaaggccgtctctggatccctagggcagtctagccatggtgcacaggcaggggcaattgttggtacccactcacaaccgcccaaaacttcacaagcatgttcatattttaaattcttaaatattatatcttgcatcctaatcttgtaaacattaatttagcaaacatcaatcgcctacttggtcaggcactgggttctgaatattaattaagacaatggcctcgagaacctttgcaagaagctcaccagctaatcctggagaggccccttgttttggatgaggaaatccaggttctatgagattaggtggcagaggtgggatttgaacccagaccatgctagggtgtttctactccttttccagggatcttggccccaccgttgagatggatttcttctggcctgcgggaggggcaccaaactcttagtccatgtgtgggggttgacgggtttgtgagggcagatgtggggtgaggacttgagtagccccagactagatgcaaggcttaaggaggaggggaaaaaagcttgcttgggccggacgcggtggctcgaggcggttggatcacctgaggtcaggagtttgagaccagcctggccaacacggtgaaaccctgtctctactgaaaatacaaaaaaaaaaattggccgggcttggtgacgggcgcctataatcccagctactcgggaggctgaggcacaagaatcgtttgaacccgggaggctgaggttgaagtgagctgagatcgcgccactgcactgcagcctgggcgacagagcgaaactccgtctcggaaaaaaaaaaaaaaaaaagaggttgcctgctagtccactgatcccgcagccccgcaggctcgcagaaccctaaggcatgattaggcctgggatcatcaggccaccctagggtcaggtgcggaggcctgcgacgcccgagggccaaaggctccctcttccggtcacacaggagagggtattttgttgggggacaggttttccccaatcacagtgcagctgcagtcatcgttttcagccttctgagcaccttcctggctgagcctgctgtccatttcacccctcagctctcacggcccggccaggccaggcggttcccggcttctctgcagccgccggcgggggaggagggcacagagcgcgtctcgcctcttagcgcacggtcaaggttgcgctcccctcccgggccgggactaaccgtgggaaaggcgctaccttggccactcgattctctccctccaaggcctgtacaaggagcctttgaacacgctgctccttccagccggcagctttacctcccctggcccctgcccccgcactctccgcgccaggccaagcgctgggcccagggacagcgcgctctaatcaaacccgtgtccgataagcttctaattaaaagagacctccctccgctccgcaggcgctttcaccactgcccctcccggggggacctgaaggagagggtttgaggccggtctttgcccgccgaggtctgcgtgtccggtctgggaggaggcctaggagggctcgcgggccacgggcatccttgggcccgagttctggggtgcggacggacgtctcgagagtgggtgccgcgactcgggacccacggccctcgccgg

SEQ ID NO: 6945 - DNA, 2300 bp, Homo sapien
aacaaggggcctctccaggattagctggtgagcttcttgcaaaggttctcgaggccattgtcttaattaatattcagaacccagtgcctgaccaagtaggcgattgatgtttgctaaattaatgtttacaagattaggatgcaagatataatatttaagaatttaaaatatgaacatgcttgtgaagttttgggcggttgtgagtgggtaccaacaattgcccctgcctgtgcaccatggctagactgccctagggatccagagacggccttgattcctctcccctggggtttggccttggcgctctgatggccatttccacatttttgagagttgatgcccttgcctctcacagcccaagtcttgggccaggccctgcattcctggggaagcagcaggaaccctggaaatccaaagaataaacccagaatctcgagggccacccttgcccactccaggatagcagccggagcgcttctcacatccaagctgcccaatgagcctcaagggctgggtaagatggacccatctgttttcactgcaagacaaaacttaaacctggagatggtgcttccaggctatatgacttgaatctagggccctctctccattgggctttttctccagggtggagaagaaggatacattcacctactagtcctggtccccttttaactttttctccatggcagccacgcctgtatattacagaagaatccagatattttccagaagtgtaatgcctgctggctgcaaaacccacagtcccaccccccacgacatgtgataagatcccaggcaccagacctgccctgaaaagggctggacaagggacccaaacgaagcgacagaacccaggtttcaaaaatcccctagaagtactaaaaagataatggcgtagtagtattttgtgccccaggggcatggattcgatggtttctcaaccgcctccaaatagcacacatgcagacagtgctctcggattcattgtttctcagtcacagatgtttagatgggttgccgagttccatatttaaagccccaagagggtggtgggtagcgcttctgcatctatggagtataacttcaagccggacccaatctccaggttgcccatctcagctgtcctcttatagacggggacactgagacctagaaactccccaaaagtaacaccagcctgctaaacaaaggtggcgcgatctgatcaaagaacacaagcctcagcgaccagtaagttgtcccaacgccccttgagtacaaaacactaatttcactaactaaaagcatagagtggaggcaacccttgggtctgcttgcggttcctccacaggacagtgatcccagattctcccgaagaaaagggcggtttcgatttctccaaggcttcgcgggggccgggtgctcctggttaggctaaggtaggagcggcctgaagacgcgcgtttagaaggcgcgggtgaaggcgggcaacaagggcagagcccttctcccgagccttgggcgaaggtacctcctgcaaaagatacactctgcttcccacgcattccaaaaacatcccggtccctaggccctcgagtaattttgctccaggaaaagcatccgccattgtattagtaaagcgtttactaaattaccgaatcaaaccgaactggcttaggttctcaatagcgtggaaatccactgaaaataaatgaagagggcaaactacaggggctccgcaggttcgggtccgcgccgcccaggcgaaagagaggtgggcgggcatcggcgcgggatgagaaaccaacctgatacttatcgtgtgccgagttccctccttgtatcctgactaagcacagcgaataaccctgtccttgttctaaccccaggtcttgaagaaatactgtcccagctgagccccgcgtttacaagatgaagaggcgccccagatgcgctgaaagaaaggccaaagctcgtgcctccttccactgcctgcggtagaacctggtcccgcatagcttggactcggataagtcaagttctcttccatccccagaacctgcgtggccgccgcctgagcgaagcccagtgaagatccacttctgtattaccatacgcgggagctatccacggacacgacgctgttccagaaagccatttagttactggaggtgcatgtgctcattctagttctctacgatacttaatgtgcacctaagtgtgtgccaacaccgtattataagggctggaggtgctcctggacattttagcgctgcggaggcagcacagcacaggcgctcacccccgcgctggtccca

SEQ ID NO: 6946 - DNA, 2300 bp, Homo sapien
tccccccgctaaaagtgccaaggatggtaaaagaagaaacaatctcaatcttttcgtttggaaatgaaagtccccggcttttcataaagggctcctcgcccctcacagttgagtcctagttaagaaaaacgacttccaagtagaaataataggcggggagaaggaagggagatacagggatctggggggttcttagggcaactggcagtgaattttgtctcgagagtcctttctccactcaaaaaaccaaacgcgcgagccccgcgaaaggtttagggatagatcgtgtgggagaggactgagcagagagcgtgggggcagtgtcttgtagaatctttcttttcttaataataattttaaaagcttctgagtggagacgacgcaaagtcaagcagcaaaggtggcctgggaggcaagcggagggctcaagtgccgcatctttaccctcagggtctcctgcgcctacgggatgcgcattcccaagaagtgcgcccttcgagtaagtcctgggcccgcacacacttcgggtccgcagccagaatttaatggcgacaacgtttatgcaatgcaagctaaaaaccaaagcgtaaaaaattactatgtcatttattgaaacgccattctttgtcaaactgcaactactttgcttcacataagtttggctggaaagcttgcagccccagcccgggccagccaggtacaggaggccggactgcaaccggttgcttccctcccgtcgcgcctggccgtcccacgctgcgccgtcgctgctgcctcctggcgcccctgggattttatacgcacctctgaaacacgctccgctccggcccccggttcttctccttgcctaggggttgtttcccaatagatactgactcctttagaagatccaaaaaccaaaccaaaacaccccctacccgccccaaacacctgctctggggcgcgggggctgccaaacagagactagacgaagggagtcagatttagcgaagctcttcgagctcccaaagattcgaacactaactcgcgcccgtgggccgatggaggttctccctactccactccttggtccccttaactggcttccgcctcctggtcaatcactgagcaaccagaatggtatcctcgaccagggccacaggcagtgctcggcggagtggctccaggagttacccgctccctgccgggcttcgtatccaaaccctccccttcacccctcctccccaaactgggcgccaggatgctccggccggaatatacgcaggctttgggcgtttgcccaagggttttcttccctcctaaactagccgctgttttcccggcttaaccgtagaagaattagatattcctcactggaaagggaaactaagtgctgctgactccaattttaggtaggcggcaaccgccttccgcctggcgcaaacctcaccaagtaaacaactactagccgatcgaaatacgcccggcttataactggtgcaactcccggccacccaactgagggacgttcgctttcagtcccgacctctggaacccacaaagggccacctctttccccagtgaccccaagatcatggccactcccctacccgacagttctagaagcaagagccagactcaagggtgcaaagcaagggtatacgcttctttgaagcttgactgagttctttctgcgctttcctgaagttcccgccctcttggagcctacctgcccctccctccaaaccactcttttagattaacaaccccatctctactcccaccgcattcgaccctgcccggactcactgcttacctgaacggactctccagtgagacgaggctcccacactggcgaaggccaagaaggggaggtggggggagggttgtgccacaccggccagctgagagcgcgtgttgggttgaagaggagggtgtctccgagagggacgctccctcggacccgccctcaccccagctgcgagggcgcccccaaggagcagcgcgcgctgcctggccgggcttgggctgctgagtgaatggagcggccgagcctcctggctcctcctcttccccgcgccgccggcccctcttatttgagctttgggaagctgagggcagccaggcagctggggtaaggagttcaaggcagcgcccacacccgggggctctccgcaacccgaccgcctgtccgctcccccacttcccgccctccctcccacctactcattcacccacccacccacccagagccgggacggcagcccaggcgcccgggccccgccgtctcctcgccgcgatcctggacttcctcttgctgc

SEQ ID NO: 6947 - DNA, 2300 bp, Homo sapien
gaatcaactggtatttcctgatgatctgctgtgggctgggcactgaggtgggtgcggaaatgcagggtgaacatgacacaggttccctgccttcagtttcactttccacattgttaaggctattccatgcaagaatgaatcctttcaaatttagtctagccagatgttttgtgtcctctatcccctcaaccttgtttttttcctttgcttggcatttattttatattgaagtataattgtggtatcaataaactgcacatttttgaactgcacactttgaaaaatgttatatatgtatacaatcatgacacaatcacagtcaaaataatgaacacatccataacccccaaaaacttcctcaagcccctctgtatccatctttccccccgccttacccaatccctgcccccaggcaacagcaatctataatgctgtcattatagtttctactttctagagttttatataaatggaatcatacagtatgatgattaactgaacaaaattattttgaattattttgggattgtcaactaaagaaaaaaaatcaagcttttattttaagagatggagtctcactcactttgtcacccaggctgaagagactgaaaaaaaaaaaagattcatctgtgtttttgcatgtatcaataattcatccttttttgttgcacagcagtattccattaagcagatgtataacaattttttgatccacttcattcatctattgatgaacatttgggttgtttccttttttttggctattgaaaataaagtgttaactttttggaaactgtctcctgaaaaagctaaacataaatttactaaataagccactgattcctctcataggtacatacctaagagaaatatacgtacacacaaaatcttgtgcactaacgttcatggaaacattattcataatagccaaaaaatggagacaacccaagtgtccaccaactgatgaacaaatcaacacaatgtggtatatccataacaatgcaatattataagcaataaataggaatataggagggatacatggacgaaccttgaaaacattatgctaaatgaagtaagtctgacttaggccaccgtgtattttgtgattccacttacatgaaatgtccagaaaaggcaaattcatagagacaaaatgtagtgtttgccaggggctggagagaggtggggccgggggtctggggagtgattgctgatgggtagtttcttttgtaggtgatgaaaatgttctaaaattaaatagtagtgatggttgtgcaactctgaaaatactaaaaactactgaattgtgtatttattttatgagacggagtctcgctctgtcgcccaggctggaatgcagtggcatgatctgggcttactgcaacctccttctcccaggttgaagtgattctcctgcctcagcctcccgagtagctgggattacaggcgcgcaccactatgccccggtaatttttgtatttttagtagagacggggttttgccatgttgcccaggctggtctccagttcctgaccccaagtgatccgcccacctcggcctcccacagtgctgggattacaggcgtgagatccactgcgcccagccaaagctgctattttttaaaagcggcaatgaacattcttgtacaagtctttgtacggacatacagtttgggtagaagaatagctgggtcatatgctgggtggatactgaactttttcagaaactgccgctcctctgcaaagtgactgcaccattttatgttcccaacagcagtacaggagagtttcaggtctacacaaacccatccatacttggtaagacccaacaagcttaacatttcaagggaaggtggacttagggaggcgccagcgggaggcaacatcaatgcagttagctacacgggcctgaaaactggaggccgcgacaagcgtcgctgagtggaggcccagtaagtcccacccactaggccagcccgagcgcgtctgccacgccctgctgcattccgcggcgagagcgcgcgataggattggctctcaaggccccgccccaacaggtcgccgctcagggtgacccggaagcagttgcgccagcagcgtcgcgcggcccagttcccttttccggtcggcgtggtcttgcgagtggagtgtccgctgtgcccgggcctgcaccatgagcgtcccggccttcatcgacatcagtgaagaagatcaggtgtgcttcggtctacgggtgccgccacggtggggtgggggatgtcctagtagcgcaagggaccgctgccgagcctgggccgg

SEQ ID NO: 6948 - DNA, 2300 bp, Homo sapien
ctgttgttttcaatcttaccttcacacatgctttcagtttgtgtaatctattatacctataaagtaaacctattttgagaaaacctttattttatacataggtgtatttcttaagtgttattacactaaatgcttatagtcttagaataaaatgaaaaaaatgaagctctttcctgttcataagtttcagattaacatcaaatgggatacagtttcaagtaatctaatagccatttaattattaggccagtttcctgtttattgagatagaatgggaaattttcagaattgttgagttcggaaatctctagttaaggtttagagatcaaacttggatgctgatttcggcagcacatatacaaaaaaattagattaaatttgggatatgattaatatctgtaatacttaaaaataactaattcaagcagagagctgacagctttaatttctgatttcctatatgtatacacaaagttttccttaattaagaaagtatcctagtcctaaatcataccagtaacttccaaatgattgaatatcatgacagtgaaaattgaaactttatatacatgtaaatcagtctctgttttactagttagaaaccacatcataggccaggcatagtggctcacgcctgtaatcccagcactttgggaggccgaggcaggtggatcacatggtcaagagttcaagaccagcctggccaatatggtgaaaccccgtctctactaaaaatacaaaaattagccgggcgtggtggcgggtgcctgtagtcccagctacttgggaggctgagacgggagaatcgcttgaacctgggaggcggaggttgcagtgagccgagatcgcaccactgcaccccagcctgggcaagagagcaagacttcatctgaaaaaaaaaaaaaaaaaaaaaaagaaaccacatcttaggtatcaatttccttcctctttaataaaatatacaagttgctttctgaatgcgaaagtgtcttacatttgatggtcttcattgtattaaaacactggaaatgcatatttaactagacgcattgagtattgtagtatcactgttgattgtgttatccatacttgtgtagatgttgaaagtgtgatgaacagtgtggtatccctactcttgatcctggaaccagacaagcaagaagctttgattgaaagcctatgtgaaaagctggtcaaatttcgcgaaggtgaacgcccgtctctgagactgcagttgtaagttaagatctgaaagaaactcagtttttctaggtgcttttttcatgttactaacttttaatggtgcagagcaggaattctggaacttgactctcagctgtggctcatattagctgtgaccttgggcaagtggcttgacctttctgtgccctagtttcctcctttgtaatatgaagttgttaacggtacctgccacaggtttgtggtgagagctaacctcaacttaaaactggttgctgatttcaaacattgtttatttgtttgttaaccaaccaggttaagcaaccttttccacgggatggataagaatactcctgtaagatacacagtgtattgcagccttattaaagtggcagcatcttgtggggccatccagtacatcccaactgagctggatcaagtgagttactgtgtggaatagttgttctgcttataagaaatgtactttttttttttttgagacggagtttcactgttgttgcccaggctggagtgcaatggcgcaatctcagctcaccgcaacctccgcctccagggttcaagcagttctccttcctctgcctcctgagcagctgggattacaggcatgcgccaccacgcccggctaatgttgtatttttagtagagacggggtttctctatgttggtcaggctggtctcgaactcccgacttcagttgatcctcctgccttggcctcccaaagtgctggggattataggcgtgagccaccacgcccagccagaaatgtacttttatatgttatactttatatgtgttactcagttttctccttttgtcaatctcttgtaggttagaaaatggatttctgactggaatctcaccactgaaaaaaagcacacccttttaagactactttatgaggcacttgtggattgtaagaagaggtattcaaaagtaatgaactaacatatcacttaacagacagtataagtaggtggggatgttttttaaagagaagtagggccagtaattttgctttactctgttctccacagagttgctataaatctatttctataaatttgacctaaagttaaag

SEQ ID NO: 6949 - DNA, 2300 bp, Homo sapien
caataaaaatatgaccccagtatttaaaaagtgtatacagaaaagagaccagaagatttacacaaactctttaatggtggttgggatcttgggtgattttaatgtaattcttatcctgtttcatatttctaaaatacacgtgtatatccctttcaactaaaacacaacacagtatggctcactcctgtaatcctagaactttgggagaccgagatggtcagatcacttgagcccaagagttaagagagaccagcctgggcaacatggcaaaaaatacaaaaattacctgggtgtggtggcacatgcctgtagtccaaggtactcaggaggtgaaggtgggaggatcacctgaatccagggaggtcaaggctgcaatgagctgtgattgtgccactgcactccagcctaggtgacagggtgagaccctatcttaaaagaaagcccaccataattgttattttgaaaacaattcagtattccttttgttttatctattatttatttttgagagagggtctcactctgttgtccaggctggagtgcaatggcatgatcttggctcattgcaaccttcacctcctgggctcaaatgatccttgcacctcagccctccgaggagctgggactacagttgcatgccaccatgcccagctaatttttggtagagatggggttttgccatgttgctcaggctagttttcgactcctgagctcatgcaatccactcgcctcagtttcccaaagtgctgggattacaggtatgagtcacagtgcctggcccagtattccttttgaagagaaaattttatctgggaatctctcaaaaacatcaaagattgttttgcatgaaattaactcgaattaatttttggtagggataaactggaaacaaacattcagtagtaggagatatatcaaacatccataaaagggagtattttgcagccatagacaattgtttttaatgacctaagaaactgctcacagaggaaaatacataaaattctatagaatgatcaaataggctaaaaatagaaaaaaacgctagcagcaaataataccaaaatgtcaacaagcctctctggataagggattactaatgatttttagtttctttctactttactctattttctaaatttccagtaagtattttaacatcagaaaagaaccttaaaatgaaaaagttatttaacacactatttttaaaattacccaatacagtgtcttgaaaacatgccaacttccaaatatctcactgcccttcctgtttcttcaacaatggtgttctgaagcatgggaggaaacatgaagtagtaaaaggcagtttttgtacactttacttcagttatatattagagattttgaagatctactacataagcctacacattcacattgtatacttttctggtgccagaactactaaggtagtggaaatcagccaagagatggtggttttaccacatactcataactgcagaggctttacagactctttaaaatcttttgtataataatttcgaaggtaaaattagtttatctttcccaggtgaaaacaaagcctctgatatcaactccactacaaagccatttgcaggcaatcaagacgactaaaaatacttctggtgatgatgactggcagagcctcattacgaatcaactaaataaaagtgaaaatttactaagtttagaaaatgacaaccagccaaagaaaagaaaagcagaagagacgttggaaaaaaacaacagattaaaataatgtagataagtgctttcagtagtgaaattatgtaactgaaattctggtatagtttttactagaataaaatgactgttgtatttaaagctctacagtttgtctttgcttttccaagtttttctaatgtgaagaaattgtattactctacttctgtcttctctctgtatattatcctttctttaaagtgctcattgcttcttcaatatccttttttaaagaacagaatttatgtattgtatgacagacattgtgaccccttgtaatttattacttcatatcctctggagtttgtgattttagtataaatttgagacaataactgtccagactaggcaaatttttttagtttataatgttttactatgatttagggcttttttttcaaagaacaaaaattataagcataaaaactcaggtatcagaaagactcaaaaggctgtttttcactttgttcagattttgtttccaggcattaagtgtgtcatacagttgttgccactgctgttttccaaatgtccgatgtgtgctatgactaaaa

SEQ ID NO: 6950 - DNA, 2300 bp, Homo sapien
ttttacagcttaaatacgattttaaaactacaaaaaatgtttttattttacgaaaaatagaaaatactaatcacataatgaagaaaataaaaatttcctataatcttgccactctaataaatcaacttacttctacaagagtcaaaagtttgttgtttatccagttcttaagacctttaaaaaaattaagtagtcaggattcttaattgcacactgatttagtcagcaaaggaatttattggaagggcattggttatctcggacttgaaaaatgattacaaacaagggaggctatgcagtatccaagactatagcataaaaccagcttccacttttgaatactgtatatcacagcttataccatcattgctgaccatagtggatgctgctgatgctgctgctgcggtatcactcacccatagaagcttgaagttactacacttccctgactatctaccaacagatggatttgcagtagtccttgtttttttgtgataactaatccaatatccaagacaggtgcatgagattagcagagcctagcctcatgcttataaagctggtacctggcatctttgcttctctggtaggcagccggctcttataatgtagaaaaactggccgggcgcggtggctcacgcctgtaatcccagcactttgggaggccgaggcgggcggatcagaaggtcaggagatcgagaccatcctggctaacatggtgaaaccccgtctctactaaaaatacaaaaaaaattagccgggcgtggtggtgggcgcctgtagtcccagctgctcgggaggctgaggcagaagaatggcacaaacccaggaggcggagcttgcagtgagccgagatcgtgccactgcactccagtctgggcgacagagcaagacgccgtctcaaaaaaaaaaagaaaagaaaagaaaagaaaaactgcccactgcctacctgagaagcaaagatgccaggtactaactttataagggagttcagatactgtgtagccgagaccgaaaatcagattcttgagtatttaatatagtcaatatacacagaagaacagcacaatcaattgcacactaattcaaaagttggtatttcaagattttaatgtgtttaattggtatctgctaaactcaatgaacatgtgacttcataaatgaagactgcttttacatccttcagttccaccctccacaacactgccagagttatttttctaaaatgcaaattttgttatgtcattcttctactcagaatccttcagtggttaattccccattttgttttatagtataacattcaaactctgtagcgtaacgtacaagtccttctcaatacttgaatcctgccaaatttctagacacaactaccaatattctactctgtcccctgaaataacacattagctccagtcatatcttattagttctgtttccctgaaaaatatcgttctctttcatgtttctgtggctttgtgcatgtagaaccttttgcctggaatgcctacccctttgttgtcttctttgcaaattgatctttaaagattcagttcaaatagcaccttcacatgtaataccgttttgatacagtttatgttttttattcatttttctaatatagcactcattacattgtattgtaattatttcttacataatttttcctattagaggctaataaatttgggaattgagatttccttgttatctttttatctcagaaggtatttgtttaataaataatggaaacactgtacttctggttagttagttgattttgttagtacactccttttaagattaaaagtcatgcagtcaatctctttatgattgattaactttgcctgatccacaaccgcagattatgttcccaccttggctaatcttgcaagggaacttgcaagggaattataacaaattataattataggcttaaggatgaactttgaaactgtcaggaaagtaccttgttttagtgaaatatgtgtactgaattttctgtttgatatgtttcttattaaggaactaaaaaaagcagcctcagacttgataaagtccaaagtcacatgtcaatataagatgggagaagaaaacatcaatctaacaattaaagaacaaaaatttcaagaacttcaagaaagactcaacatggtattttattaaatgtatttgtttataacattaatattttcaataaaacttatgagaatttcagaattgtaacacaaaaatactccgcctttgcaaagtcaatatgcatagttaaaggtattattaatctgtttttttattaattt

SEQ ID NO: 6951 - DNA, 2300 bp, Homo sapien
ttacaggcatgagccaccacagctggccgaaaaacccctttataagggcatcacatcctattctcccctcatgactcaatcgtctcctaaaggccacacctcataacacacttgctttggagattaagtttcaacatgaatcgtggacaggacaaaaacattcaaaccatagcactgatcattggggaaattgcatggggttaggagggcattcagaggtgattacattcaactcattagcctctctacaccttagttttctaataggcaaaaagtgcatagtaataggattgttgtggagactaagatgagatgatgtatgtaaaaacacttagctcattgtctggcacatagtaaattatcgtaaatattagttattattagagtatagctgttatggttggtaaataccaaattgaaaggtcatagtccatttattcattcatatgaatttatttggcatttacatgccaggcattgtgctagattctggtaagcaagtgaacaaaattcatctctgttttcacgaagcttgtgtcctaggatacagttaataaatataccagacgagatggtgattgtgctacagagaataaaacaaggtggggtcaaagtaggggatgtgcatgggtgttactatggggtagttaggaatgctttccctaaaaaggtgacatctgggcaaacgcttggagaaagggaaggagtaaaaagaattccagacagatttttactggaaaacgtggttaaaaatttgagggcggggggccggctgcggtggctcatgcctgtaatcccagtactttgggaggccaaggcgggcagatcacctgaggtcaggagttcaagaccagcctggccaacatggtgaaaccccgtctctactaaaaatacaaaaattagccaggtgtggtggcaggcgcctgtaatcccagctactcgggaggctgaggcaggagaatcgcttgaacccgggaggcggaggttgcagtgagctgagatcgtgccattgcactccagcctgggggacaagaatgagactttttctcaaaaaaaaaaaaaaaatttgagggcaggaaccacttcttttacattttggtagcatgcaaaaacaatgtaggcctgaaacatattacattcttattgaatgactattcaacataacatactgaaacatagcattagttaggtgcttaaaataggtgtgattatcagtataattagaactgcagttttttttctatttcactttaaaaattaagcaacttttcttttctttttttttttgacagggttttgctccattgcctaggctggagtgcagtggtgcagtcttgggtcactgcagccttgacctcccaggctcaatctatcctcttgcctcagcctcccaagtagctgggattacagccgcacgccaccatgcccggctgatttttgtatttttgggtagagacgggggtctcaccatgttgcctaggctggtatcgaactcctgacctgaagcaatcctcccacctcagcctcccaaattgttggggttacaggcatgagccagtgaaccctcacacccggctaacatttattttttgaattagtaacacattcacatgaagcaaacatcaaaaagtataaaaagctattcagtgaagtctccctctctctcccgttcccatccacacacttcccattgctccccacaggtaatacttactcatttttctttcatctttccaaagactttttttttaaaaaacgaatatatcgggaggctgaggcaggagaatggcataaacctgggaggtggagcttgcagtgagccgagatcgcgccactccactccagcctgggcgacagagcgagactccgtctcaaaaaaaaaaccaaaaacaaaccgaaaacaaacaaaaacaaaaaagaatatataagccaatacatgttgtacttaaggaaaaacatcaaatatccaggtatcttttccgaagcttgtatttaaaaagaaaataaaatcaatcatattttgccccagatgctcaagattacccacgtatcttaggctaatgaccttcaagccggaagtgccctagggcgggaaaaggtgaaccggaagggccaacaggagctagaggcgcgcttcgctgaggtaagtcggagcagtcacaagcgtgtagttgggctgtttaggaagcagccctaatcttttcatgcagggtccacttacgggtttgccctgcacctccagctgcgtaacctacccttccttgctctggttgccaaggggctgctttggcctggagcct

SEQ ID NO: 6952 - DNA, 2300 bp, Homo sapien
ccccaccaggaggtctcagtgctgtaggttgactcaatgaataaacaggaaaatgggtgttctagtgaaaatgtttcctattcttgtgttcaaccacaataaaccatgtctggcctcttcatagtctgatcccaattgcttgaataagagggaaagaagaatccatcatagaaatagtttagaccacgaggtagacaaatggaaagtgaagaggaagggattggaagaagggaaaggaaaagcactgcctagaaggaatcagtgaaaacaaaatttctgcagaaaacttaggaataattcagttgattatcaataataataataaaatagacaatatcctttgggaggagaaaaacagaatttggtaaaaattgaattagtcaaaaatttgaggccgggcacagtggctcatgcctgtaatcccagcactttgggaggccgaggtaggtggatcacctgaggtcaggagtttgagaacaacctggccaacatggtgaaaacccctctctcctaaatgtacaaaaaattagccgggcgtggtggtggatgcctgtaatcccagctactcggaaggctgaggcaggagaatcgcttgaacccaggaggcgaaggttacagtaagccaagattgtgccactgtactccagcctgggtgacagagcaagactctgtctcaagaaaaaaaaaaaaaaaatgaagggggaaaaaatgtttcccttggtccccagcaagtgccagaccacttcgaccaaagcataaatagtgtttcaaagaactgttaagcacgttctttggataaagaaggatgtgaccatcacctggcataggtactctgtccacctgctgccttcattacttgatgcagcagtttttgaagtctttaatcaagacctttttacgctcttttacattatcaaggaccccaaagagctttcacttatgtgaattttatctaatgatatttattatctaacattaaaactgagaaattttcaaaatattatttgaaatcaagacaacaaagcttactttttgttatgtttatgcatagactcaaggaaaagatcaagatttcaagataattacttcagaaaaatgaggttatagctatcctagtagatatgaacaaatagaactaatcaaagtacaaaagcagtagccaagagagttggtggacacctgtagtcccagctactctggaggatgagacaggaggatctcttgagcccaggagttcctgggcaacaaagtgagaccccctactctgaaaaagaaaaaaggaaagaaaaaaaattaagttcacaagtactgagaacaaattttattaatctctataaatctacataaatctctataaaatgtacatactgataatgtaaacatactactatggaaaataccagaaaatacaagcacgctcactcaggtattctattaggagacagaatgatgacgttattacacttcaaatagcccctggaaatttccactgtacactcttgagagaatgaaagtgaaaatggcaaatcatttattgttactataatggaaatagttttgccctcagagacccctggaaaagatcttggagacatcccagacctggcggaccaccattggagaaccaatgtaatcaattacttgtaaggtcatttccatttcttatcacgaataaagggtattttgtctgatgaatatcttgtcctcgtccccggaccacccttttgagaacagttgacctaaggtaaccacaggactcctggcccagtgggacccaaagcgaaaagccctggacgcgccgagggcgctctgcttaagactgagaaccgaaatgcttcctgaattaggatcattgagaacgccgagtgcagacacaaatcgaaaagcagccacccgcgccgccaaggcggggccagaactggcggcaggcggctggcccgcccggggatggggcagaagctggggcggctgagagcgcagcgcgggctcccgggagacgccggcccactgcccgcccgctcgccgcaggtaggcccggcccccgggaggtggggcgcggccaggtgtccccaggtagccgcctcctcccgtcctccgtcggccgcctccccggaccgaggcaggacctcaccccgcgcgtgttccccgggcgcccctctgcgaaccccaggcccttcccaggtttgcgcgcgggggccatccagaccctgcggagagcgaggcccggagcgtcgccgaggtttgagggcgccggagaccgagggcctggcggccgaaggaaccgccccaagaagagcctc

SEQ ID NO: 6953 - DNA, 2300 bp, Homo sapien
ttttgttatttaaatttatttatttaaaaattatttatttaaaaatatttgaaatatccatttattaaatggataatattcagcattaagtgggataaacatattcactgctcaactagacatactttggtattaaccactgagataatatttattaagcaactcagggtagctatgcaacataacctgccatggagggggccctacctaagaggaatgaaagaatagctggcgaaaaaaacacctgactaaaatgcagctagagatgatcaatacagatgagataaagatctcccctctctacaagttacttaattcgatccaacaatcttaatttatctagcataaatgttccatctgcctttaatggtaaaaaagaaaaaaagttaaaatagcttacatcttgaaatgaatagaatctgcttttattctgtgcaagtcttgacttagctgagctgtttaaaacagctttaagcccattatctcattttcctagtatctcaccaaacttgattttcagtgtattaaatagatgaatctgtccttttctgtctgagatagcccggtgcatagttgagaaatctccttggatttataaggtatgtatgttgcgcaacaaccaaactcaaacaataaaactaaaatgtattacaacagagagaggatgagaaaagcattaaatttgatcaattcttgttttacctgattttgtggttggtcctttagctgaatattcctgccaaaatgcaatctaaaaaaaaggtaaaattcccaagtttattcaatatctttattatcacatttcatttggtcctaatgacctagactaggggtagtaaactcttggcatgcaccataggtaggagaccagttcattcaagctggagggtgtgactcactctaattaaatcactaccacccacagctgcctctgccatctctctaattgtcaagggattactgccagtcccagctctttactactgtgcctactattttcccttcacctgactggagcccccactaaagcattgggggaaattattgcattagagagtaggtgaaagtaccaaaggtagaagttgaggctgtggacccactatcatgattgaacaggagactgaagttttctatgggaggtaagccctcagtttgtctcaggagatttttttttttttccggacaggattactctgttgcccaagctggagtgcagtggtgtgatcatggctcactgcagccttgaccttccaggctcaaacgatcctcccacctcagcctcccgagtagctggaactacaggcgcctgacaccacgcccaggtaattttttcttttttgcagagatggagtttcatcgtgaagcccaggctggtcttgaactcctgggctcaagtaatcctcccacctctgccccgcaaagtgctgggattacaagcatgagccactgtgcccttctgggagatcttattgaaaggtatttattgatttgggaagacattgttgagacaattttaagttcagtgctacttgagagaatagaaatgaattttaaggaactatgataaaattataaaagatttgtgaaaaacagaataaaattccaacagacacaactacacagtatatgcttcgttttcctccttaatagaaacagcaaatacttgtagggaaggatacctggggaggttcttattgaacaaaaagtaaaataggactcttaagaaagggaaaaaggagctagggttatgaaatctacaaaagtaaagaatttagggccaggcatggtggctcatgcctgtaatcctagcactttgttaggccgatggagatggactgcctgagctcaggtgtttgagaccagcctgggcaacatggtgaaaccctgtctctactaaaatacaaaaaattagccaggcgtggtggcatgtgcctgtagtcccagctgcttgggaggctgaggcaggagaatggcttgaacccgggaggtggaggttgcagtgagccgagattgctccactgcactccagcctgggcgactccgtctccagataataataataataataataataataataataataataatcatcatcatcatcatcatcatcatcatcatcatctcagttagttaacatttttcaagactatgccagattatcacaggcacaatgccatctgttttgtaccttatcaagattaacagaatttagttatattctaagaaagaacttttaaaaatgtttccctcaaattacactgatagaccaaataatatacttccgaatacaagggcta

SEQ ID NO: 6954 - DNA, 2300 bp, Homo sapien
ctcattattacctcaaaaggaaaaatggtgctctaagagacatattgactgatttaatttggaaaagttggcagtattttgggcctgctaaactatttcttgatgggaagaatattgtaaatattgactagaagttaggggttatctatgcatttttttccttcttcctttttttgtgggtacatagtaggtatatatatttatggggtacatgagatgttttgatacaggcatgcaatgtgaaataagcacatcatggagaatggcttatccatcccctatgcattttaattatttcattagccataactataggaggttaatgtatgtatagatactttataaatagcctaaatagattgatttattaatgtctaaatcataatttgtacttcacaagtgagaaaggaaaaccataggtttaagaccccaggcccatgttgcatttcattggctgacaaggtttagtgaaaatggtgagacttgaactaagccatatatttttttttaagtgttaggcttagattagagctgaggggagaaaagatgatatttggagaaagggaacgatactagtgaaagcacagagaagggctgagaacttactgcccatgcaggggagtgtaaagaagctgccttggtagagcagagagctgtaaaaaataaggtgtggctgcagtaagagaggctttgaagagaaggcacgggacttagaacttgactcagctggaagtatgctgcgggtttggcttctgaggagaagaatgacgtgaagaaagtactgcttaggaaggattggccaggcagcaggactgcaggagggaatggaggagagagacaggcatcagcctattgtgattacctctgtgacatctatttccttggtctggaattgcgccacctttcaacaaagcctgaatttggttttggtttcacatcatactttcaaaaagttttaatccaggagtaagagaaaagggaattcacttgttttgagtcctttttctagtgcaccagacactgctagaagctttccatgcatcttgctcaatccacacaaaccaactctgtggagacagctgatactagacccattatagagaggagaaaattgaggtcggtaacttgcctttggtcacatagttaggaaatgacaggatcagatttctctttttttttttttttttttagatggagtctctctctgtcccccgaggctggggtgcagtggcgtgatctcagctcactgcaacctctgctcctgggttcacgccattctcctgccttagcctcccgagtagctgagactacaggcacccgccaccatgcccggctaattttttttttttttttttttttgtatttttagtagagacagggtttcaccatgttagccaggatggtcttgatctcctgacctcatgatccgcccgcctcagcctcccaaagtgctgggattacaggcgtgagccaccacgcccggcccaggatcagatttcaaacccatgtctgactcaaagctcttggtctttccactgtaccaagactttcagagtctgggggtaaaataaaactgttatattaatacattgtgtttaatgtttattaagatagttggttggatttttaaatattgtcctctcaacctaaaaatgctacctttcctagacctaaatgttgtctctctgcttagctcttcagccgtctatgaaagggggaggcacactccctccatcattttcagaagacctgaggaggctgccttgtctccattgccgccttctgtggaggatgcaggattaccttcttatgaacaggcagtggcgctgaccagaaaacacagtgtttcaccaccaccaccatatcctgggcacacaaaaggatttagggtatttaaaaaatctatgtctctcccatctcactgactaccttgtcattttggtataagaaatttgtgttatttgataggccgggcatggtggctcatgcctgtaatcccagcactttgggaggccaggagttcgagaccagcctggccaacatggtgaaacccggtctctactaaaaattcaaaaattacctaggcgtcatggggcatgcctgtagtcccacctacttgggaggctgaagcaggagaattgctcgaacctgggaggcagaggttgcagtaagctgagatcacgccactgcattccagcctgggcgacagagcaagactccatctcaaaaataaaataaaaaaagaaagaaagaaaagaagaagaaaagagaagaaggagaaggagatgaaggaggaggag

SEQ ID NO: 6955 - DNA, 2300 bp, Homo sapien
gcaggggaatcgcttgaacccggaaagtggaggttgcagtgaactgagatcgcaccactgcactccagcctggcgacagagcaagactccatctcatttaaaaaagccctagaaaaggtgaattctacctatgcaaattatacctaatttttaaaaagcgaaaatgtgaaaaatttgaaccttgaactttacctcataccatacacacaaaaagatctcaaaatgagtcacagacctaaacatataagcaaaaacattaaaacttacaaaataaaacaataggagaatgtattagtgactttgggttggtgaagatttcttaggacaccaaaagcacaaactataaaacaaaaaatcttgataattcacactgagcaaaaattaaaacctcattatttaaagacagtggaggccaggtgtggtggctcacacctgtaatcctagcactttgggagtccaaagtgggtagattgcttgtttgagtccaggagttccagaccagcctgggcaacatggacaagctttgtctctacaaaaagttagctggtggtggtggtgcacgcctatggtcccagctactcgagagactgaggtgagagaatcacctgagcccgggaagtggaggctgtagtgagccgtgatcatgccactgcaattgaggttgggtgaccggagtgagaccctgtctcaaaaaaaaaaaaaaaaaaaggaataaataaagacactggaaaatgaaagagaatgaaaaggcaagccaatagactgggagaaaatactcccaatacatatatttgagaatgaattttgatccagggtatgtaaagaattcttaaaacccaataagaagggaaacaacccaggtttggttttattttcagcttttattttagattcagggggtacatgtgcaggtttgttacagcatgatgctgaagtttggaatacaaatgatcctgtcacctgggtactgagcatagtagctgacagtttgttttccagtccttacccccttcttccctcctctagtagcccccagtttctattattgccatctttatttccaagtacgcaatgtttagctcccacttattaatgagaacatgtggtatttggttttctgtgcctgcattaatttgattaggattatagcctccagcagcatccatattgctgcaaaggacatgattttgttctttttaatggttgtgtggtattctaagatgtttgtgtaccacattttctttatccagtcaaccgttgatgggcacgtgtgggttgactccatgtctttgctattgtgaataatgttgcaatgaacatgcaagtcaatgtctttttggtagaatgacttgtttccttttggatgtatacccagtaatgaaattgatgacaacctagatcttttaaaagggctaaagatttgaataaacttcactagagaagctaaaagaatagccttacaaacatacagaaaaatgcacctcctcgtatgttatcagagaaatgcaaattaagcccagtgatactccactgaacccacctagaatggctaaaattaagaagactgaaaagatcaagtattgacaaagatgcaaaactactggaatgttgatacatcgcttttttatttatttatttatttatttatttatttatttatttatttattttttgcagacagagtcttgttctgtcacccaggctggagtgcaatggtgcaatctcagctcactgcaacgtctgcctcctgggttcaagtgattctcgtgcctcaacctccagagtagctgaaattcgagacctatgccaccacgcccagctaatttttgtatttttagtagagatggggttttgccatgttggccaggctgatctcaaactcctgacctcaagtgatccgcctgcctcatcctcccaaagtactgggattacaggcatgagccaccacaacaggctgtgttgcagacattaataaggatacattaccttaacgacttcaagctcagaatcgtcagtaatgagacaaactgacactgtgtgcctcctcatgtgatgcaataagaagtacacaacaggtcaggtgtggtggctcatgtctgtagtcccagctacttgggaggctgaggcaggaggattgcttgagcccaggagttggaggctacaataagctatgatccagctgctgcactctagcttgggtgacagagaccctgtcttcttaagacaaatccagaatttgggacatcttataatttagttgccctggattcttcaaaaggtcaagggatttgggattaggg

SEQ ID NO: 6956 - DNA, 2300 bp, Homo sapien
gataaattaatcactagagatatgtacatttttactgatttcttcattttcctatgaccttatcaaactatatataaattatataacaattacagatatgaattgctgatatcattgtaacttcatttttactctatgaaaactagctaatccaggcgtggtggcttgcacctataatcccatcactttggtagaccgagataggaggatcacttgagcccaggagttcaagatagcctgagcaacattgcaagaccccatctctacaaaaatttaaaaattagccaggtttgggagtatgcgcctgtagtctcagctacttgggacactgcggctgcagtgagctatgatcgcaagactgcactctagcctgggcaacagagtaagaccctgtctcttaaaaaaaaaagaaaagaaagaaagaagctagctattttgaaatgtaattttcaaaatttacatgcagaactaactggtcaggtttttcagtcttaagacattttgatgagttgagggttatgtaagtcattactatgaaaacataaagtaattgtgccataattacataaaaatctttgtgccttttcttcataggcatgcattcctcagcagcaactgagctgtttgctactggacctttgccaagcactggaacacttccaccatctctctctgcttatcagcatcccaccaccttcagcaatagaaactttgctaccacttcacctttggtgcttcaggattcaacttttaacactacatcaaatggaattttaagtcatcatgaccctttgctacaaatcaagacttcccagggaactgttccaactgctttggcatttgagcgcctgggcagttctgtattaagtaacagcataccacctcagtcttcaacataccgctcagctcaagagtctgcaccccatcttttacaacctcaatttagtttgttgccttcagcacttgggggatcccagcagactcctcaagcctacagttcaactctctttactagttctactgcttccattgaaagagctcttcttcgagaatgtagtgttattaaacaccatcagcggccttcaggtacccagtcaattcaggcacaactgactggttcacagcactccttacatagttatctatcaaattcaagtgtagttaattttcaggaaacaaccaggcagtcatctttatcctgtagcccaattggagattccactcaggtgagcaacggaggattacaacagaagacctcccaggtctcagtggaacttgctcagtcttactcatctgcgattccatcatcagggtatcctccttctactacaaaaataaaaagctgttctacagaacaaccactgacatcaaccaagacccctaaacctcaaagtataattcctcctgtgcaaacactaagctattccaaacctttacataatcagagttctgtaatatcgggccaagcacaaatttattctacagcgcagctaccaagccttttatcagttagtcagtcccaaaattacggtttagtacagccacataatgtgccatctattgttcattcacaggtttataggtccagcaaggttgagaaattgccacccttgtataaaacattgactttttctgggtcatctcagactgtaactcctgaaaatcagacgcttaattattcatctaatcagcaagaggtattgtcttcagttacaaatgagaattaccctgctcaaacaagagatctgtcttcagtaagtcagtctcaaagttactcatctggtcactctcagggtttatcaccagttagccagacacaggttagctattcatctcaatcacaagttttgtcagttgttagtctttcagaaagctatgcttcaggggagtccctaacattaacagccccttctctttcttattcttctgcctctcgggctcagaatttgccagactctagcccgacccagaattatatttctatgcattcttcccaaaatgttcagactcaagagtcatcatctccccagtcccagaagtttttgcctgctgtccagtcatcatcttttgcatcctctactcattgtcagacattacaaaataacataacttcccctgacccaaagtcttatgctgaaagaaagcttgactcagatgtgtatccatcttcaaagcaagaagatggttttccaatgcaagagttacaggtgttgcagccacaagcatctcttgagtcatcaacccaaaggctatctgatggagaaattaatgctcaagaatcaacttataaggtgtcaaag

SEQ ID NO: 6957 - DNA, 2300 bp, Homo sapien
ggttatgtaagtcattactatgaaaacataaagtaattgtgccataattacataaaaatctttgtgccttttcttcataggcatgcattcctcagcagcaactgagctgtttgctactggacctttgccaagcactggaacacttccaccatctctctctgcttatcagcatcccaccaccttcagcaatagaaactttgctaccacttcacctttggtgcttcaggattcaacttttaacactacatcaaatggaattttaagtcatcatgaccctttgctacaaatcaagacttcccagggaactgttccaactgctttggcatttgagcgcctgggcagttctgtattaagtaacagcataccacctcagtcttcaacataccgctcagctcaagagtctgcaccccatcttttacaacctcaatttagtttgttgccttcagcacttgggggatcccagcagactcctcaagcctacagttcaactctctttactagttctactgcttccattgaaagagctcttcttcgagaatgtagtgttattaaacaccatcagcggccttcaggtacccagtcaattcaggcacaactgactggttcacagcactccttacatagttatctatcaaattcaagtgtagttaattttcaggaaacaaccaggcagtcatctttatcctgtagcccaattggagattccactcaggtgagcaacggaggattacaacagaagacctcccaggtctcagtggaacttgctcagtcttactcatctgcgattccatcatcagggtatcctccttctactacaaaaataaaaagctgttctacagaacaaccactgacatcaaccaagacccctaaacctcaaagtataattcctcctgtgcaaacactaagctattccaaacctttacataatcagagttctgtaatatcgggccaagcacaaatttattctacagcgcagctaccaagccttttatcagttagtcagtcccaaaattacggtttagtacagccacataatgtgccatctattgttcattcacaggtttataggtccagcaaggttgagaaattgccacccttgtataaaacattgactttttctgggtcatctcagactgtaactcctgaaaatcagacgcttaattattcatctaatcagcaagaggtattgtcttcagttacaaatgagaattaccctgctcaaacaagagatctgtcttcagtaagtcagtctcaaagttactcatctggtcactctcagggtttatcaccagttagccagacacaggttagctattcatctcaatcacaagttttgtcagttgttagtctttcagaaagctatgcttcaggggagtccctaacattaacagccccttctctttcttattcttctgcctctcgggctcagaatttgccagactctagcccgacccagaattatatttctatgcattcttcccaaaatgttcagactcaagagtcatcatctccccagtcccagaagtttttgcctgctgtccagtcatcatcttttgcatcctctactcattgtcagacattacaaaataacataacttcccctgacccaaagtcttatgctgaaagaaagcttgactcagatgtgtatccatcttcaaagcaagaagatggttttccaatgcaagagttacaggtgttgcagccacaagcatctcttgagtcatcaacccaaaggctatctgatggagaaattaatgctcaagaatcaacttataaggtgtcaaaggcagatgacagatattctcagagtgtaatcagaagtaattcccgtcttgaagatcaagttattggggttgctctgcaagcatcaaaaaaagaagaaagtgttgttggttcagtgacacaacttaaccaacaaattggccaagtcaataatgcagctacccttgatcttaagaactcaactaatttaatacagactccacaaataaggttgaatactaaagacttaaagcagcaacatcctctcatacttaaggtgcatgagtccaaggtccaggaacagcacgatcaaataattaatgcttcatctcagattcaaattccaaatcatgctttagggcatggccatcaggcatctcttcctaatacacaggtccttttagattctgcctgtgatttacaaattcttcagcagtcaatactgcaggcaggtttaggtcaagtaaaggcatctttacaagcacagcgtgttcaaagccctcaacaaatagtacatcccttccttcagatggaaggtc

SEQ ID NO: 6958 - DNA, 2300 bp, Homo sapien
gtccagggaagaaagtgggaaaagggataggcatttcctatcccatggttgtagaaagtatctgagtagagatgaacatttcagcattccagaagaggtaaacaattattgcataacctggtgaaaaactctctgaaatgttatataaagtatcaaaatggtcactgaggtcaccaagctttttcaaatattagtgtttttcaagatttgtcttctgagacagatgagcttttcccccctcccatgcagtgagggaggacttgtgtgttcattcagttatacagcacgggataaagttcattggtatactgggtgcctgaaaccagccctgaatgcatcctctttctgtgtgtagcagccaattgagagattacaaagaaaatccttaaacagaagtaaagcagggttttactaccatcaggggaagaggtcacattaaaaaaaggttgccaactggttggcaacctttttttttcttttttgagatggagtctcactctgtcatccaggctggagtgcagtggcacaatcttcgctcattgcaacttccgcctcctggattcaagcgattctcctgcctcagcttcccaagtagctgggattacaggtgcctgccaccacactcggacagtttttgtatttttagtaggggtttcgccatcttggccaggctgttctcgaactcctgacctcgaagatccccctgcctcgggccccccaaagtgctgggactacaggcgtgagccaccgtgcctggccagctttttctaacactaagcagcagcaactggcccccacctcccacccacaaacccaagtccccaggggcagcttcttagtatgtattctctgaaacaatcccatgtagaagctctttccaataagctaaataatgaactcccacttaaacaccattctaatttacacctaaatcacacaagcatcctccttctaagaagacgtcataatcgttttgaaaatcattgcaaaattcccaaacttgaaaaaaaagaaaaaaaaaagggcaagtgtctggcaattggattattggtctctaagaccactcatcctttcagaggtatccagcattggatccctggcctggcttcaacttccaagtaactaagatgtgtcccattaatagcccttcctccttttctctcctcaccttcactccaaccggcagcaaactgtccctacccacccgacccacagttcctttggaggcagcacagatttcctggcagccagtcccagggtctttcgttgctgccctcctgtgacctctagacattgctctcctgggccacataggatttgtttgttctgcacaggtagggatgtctgaaaaactcgattattattgttattatcactattactactactactatgacataattttaagcacttacgttccggacgcagttactaaatgctgaacctgaattggttcctataaacctcgttaaaaaacaaacaaacatctcagtgaagcaggtactaaacctacccccgcatcacaggtgaggacaccgacgcacagagcagttaggcagcttgccaggttcccgactttttctatttcttttttttttttttttttttttgagacggagtctcgctgtgtcgcccaggctggagtgcagtggtggatctcggctcactgcaacctccgcctcctgagttcaagcgattcttgtgcctcggcctcccgagtagctgggattacaggcgcctgtcaccaagcccagctaatttttgtatttttagtagagaaggggtttcgccatgtaggccaggctgctctcgaactcctgacctcaggtgctctacctgccctggcctcccaaagtgctgggattacaggcgtgagccaccgcgcccggcctggtcccgagttaatctacggcaggccgcggttcgaatcccgctggtgtgagccgcgggccgcgtagtgccggcccagggaaccgctttgtccccgaccaccgctcgcgtggcatcgcgcccgaggaaacttggatcgctggcgccgcgggctacgttcagtggttgccagagagacacgtgaccggcagcgggggcggggcctgcagggagccacgccccgcacagttaacagacgggcgctcagggagctagggagctgtgaagctgctggaggagttggcgtccggggagcaagggccatggccaccgtgcaggagaaggctgctgcgctgaacctctcggctctccacagccccgcgcacaggcctccgggtaggtgccgaggactgccgcctgggatggcgcgg

SEQ ID NO: 6959 - DNA, 2300 bp, Homo sapien
gaaaccagccctgaatgcatcctctttctgtgtgtagcagccaattgagagattacaaagaaaatccttaaacagaagtaaagcagggttttactaccatcaggggaagaggtcacattaaaaaaaggttgccaactggttggcaacctttttttttcttttttgagatggagtctcactctgtcatccaggctggagtgcagtggcacaatcttcgctcattgcaacttccgcctcctggattcaagcgattctcctgcctcagcttcccaagtagctgggattacaggtgcctgccaccacactcggacagtttttgtatttttagtaggggtttcgccatcttggccaggctgttctcgaactcctgacctcgaagatccccctgcctcgggccccccaaagtgctgggactacaggcgtgagccaccgtgcctggccagctttttctaacactaagcagcagcaactggcccccacctcccacccacaaacccaagtccccaggggcagcttcttagtatgtattctctgaaacaatcccatgtagaagctctttccaataagctaaataatgaactcccacttaaacaccattctaatttacacctaaatcacacaagcatcctccttctaagaagacgtcataatcgttttgaaaatcattgcaaaattcccaaacttgaaaaaaaagaaaaaaaaaagggcaagtgtctggcaattggattattggtctctaagaccactcatcctttcagaggtatccagcattggatccctggcctggcttcaacttccaagtaactaagatgtgtcccattaatagcccttcctccttttctctcctcaccttcactccaaccggcagcaaactgtccctacccacccgacccacagttcctttggaggcagcacagatttcctggcagccagtcccagggtctttcgttgctgccctcctgtgacctctagacattgctctcctgggccacataggatttgtttgttctgcacaggtagggatgtctgaaaaactcgattattattgttattatcactattactactactactatgacataattttaagcacttacgttccggacgcagttactaaatgctgaacctgaattggttcctataaacctcgttaaaaaacaaacaaacatctcagtgaagcaggtactaaacctacccccgcatcacaggtgaggacaccgacgcacagagcagttaggcagcttgccaggttcccgactttttctatttcttttttttttttttttttttttgagacggagtctcgctgtgtcgcccaggctggagtgcagtggtggatctcggctcactgcaacctccgcctcctgagttcaagcgattcttgtgcctcggcctcccgagtagctgggattacaggcgcctgtcaccaagcccagctaatttttgtatttttagtagagaaggggtttcgccatgtaggccaggctgctctcgaactcctgacctcaggtgctctacctgccctggcctcccaaagtgctgggattacaggcgtgagccaccgcgcccggcctggtcccgagttaatctacggcaggccgcggttcgaatcccgctggtgtgagccgcgggccgcgtagtgccggcccagggaaccgctttgtccccgaccaccgctcgcgtggcatcgcgcccgaggaaacttggatcgctggcgccgcgggctacgttcagtggttgccagagagacacgtgaccggcagcgggggcggggcctgcagggagccacgccccgcacagttaacagacgggcgctcagggagctagggagctgtgaagctgctggaggagttggcgtccggggagcaagggccatggccaccgtgcaggagaaggctgctgcgctgaacctctcggctctccacagccccgcgcacaggcctccgggtaggtgccgaggactgccgcctgggatggcgcggggcgggctggggtgcgcgggctgggtcccggcgcggggcgggcggcgtggggcgttcggccgcctgcgcctgtcaacggccggctgggcgagcacagcacagctgcgaccacttggccaacgcccccgccgagcgggcggatcgagttcctctctggctggtgggctgcaagcggcagagcccgcccgcacagcccagcttttttctttctacccagactctcaacttgaccgcgcgttggtctgtgcgcccgctaacgtgccaggcacgcgccggggagctccgggatatgctccgcggtgctaccggtgacaagtg

SEQ ID NO: 6960 - DNA, 2300 bp, Homo sapien
ggagcagtagccgacctctagagtggctgccacctttctccctccaagtcctatgtccttgcagtgaactccctttaccttaacgtaatttgaatttccagtccttgcagccaaagatcaaaatggaatgtgtctatatgtattttttgaatattgaaacagtacaaaacattaaaagattacaagtgaaatatcccaaattaaatcagtgattttggtattgttgcagtatcctctccaggtggaacttgagtatattcattcacttgctcctaaccaagtgaaaattggttatattaacctttttttttttttttgagatgtagtctcgctgtctcccaggctggagtgcaggggtgcgatctccgctcactgccacctctgcctcctgggttcaagggattctcctgcctcagcctctccagtagctgggattacaagcgcctgccaccatgcccagctaatttttgtatttttagtagagacggggttttgccatgttggccaggctggtcttgaacccctgacctcaggtgatccgcccgcctcgacctcccaaagagctaggattacaggcgtgagccattgcacccagccatattaatcttttaaggaaggttctagcctgcttccccagggagcttttaaaacttgtctggcatcaccctccccggagttttggatgatacttttccaacccctgcccctgagattccaagttgtatttgtagtcagggctgaaaaacactagagacttaatggtacgagtttagactcagaagaactgcatgttttctttgcagatcttttttttttttttcagacggaatctcactctgtcacccaggctgcagtgcagtggtgcgatcccggctcactgcaacctctgcttcccggattcaagcaattctcctgcctcagcctcccaagtagctgggattacaggcatatgccaccatgcccggctaatttttttgtatttttagtagaaacgaggtttcaccatattggccaggctggtctcgaactcctgaccttgtgatccacccacctccgacctcccaaagagctaggattacaggtgtgagccaccgcgcccagccattctttgtagatcttaacagttccatttagttgagtatcttaagggtttttggtgttttttcctccaaaaagtgaatcttcaccagagaacttctgtttttgtctttttttttttttttttaaagcaaagactttaatgtgcaagttagtaaatggtttgagggtctggtattgcactcggccttcaatacgttagcaataactacccacatgtgatctatttagaagcagtgtttgaaagcaccaatgtcaccccatctgcttttttgtagtttttttttgtttgtttgtttttgagacagagtctcggtctgtctccaggccgcagtgcagtggcgcgatctcgcctcactgcaacctccgcctcccagattcaagcgattctcctgcctcagcctcccgagtagctgggactacaggcgcgcgccaccacacccagctaattttcgtatttttagtaaagacgaggtttcaccatgttggccaggatggtctcgatctcttgacctcgtgatccgcccgcctcggcctctcaaagtgctgggattacaggcgtgagctgctgcgcccggactaacttttttttaaagctgaggaaatgagagaaggggaataaactttgtgtagctacaaacaggatggcaaaattaaatttcaaagaacgggcggggaaggtttcagatgcaatggcttcttattccttcttttgactgacccgcgccttctccgcctccctttctcctcgcgtcacccgcaccagcggctgggatgcggcgcgcgttccgtctttccgtatggaaacatggcgcctaggggcgggccatccccagcttcgagccaccgccagctgagactcatcggcgggcactcggccatgcctctcgcgtttccgtacgaaaacatggcgcctcactgcgtgcggcgggcgactcttggctgggagccactggccacggagccccctgagcggtcatcggccatgttttccacctctccctgaggaaacacggcgccgcccagctgcgagtcaccgcttactgaaccccttcggcaagcaggggaaagaccctcccgcctttccgtacgaagacatggcgctgccctatattgggctggcgcctcccggccaagagcagtctcctccttcctgatgctgagaagcggccgctctgaccgctgcccacccgagtcgggct

SEQ ID NO: 6961 - DNA, 2300 bp, Homo sapien
atattaatcttttaaggaaggttctagcctgcttccccagggagcttttaaaacttgtctggcatcaccctccccggagttttggatgatacttttccaacccctgcccctgagattccaagttgtatttgtagtcagggctgaaaaacactagagacttaatggtacgagtttagactcagaagaactgcatgttttctttgcagatcttttttttttttttcagacggaatctcactctgtcacccaggctgcagtgcagtggtgcgatcccggctcactgcaacctctgcttcccggattcaagcaattctcctgcctcagcctcccaagtagctgggattacaggcatatgccaccatgcccggctaatttttttgtatttttagtagaaacgaggtttcaccatattggccaggctggtctcgaactcctgaccttgtgatccacccacctccgacctcccaaagagctaggattacaggtgtgagccaccgcgcccagccattctttgtagatcttaacagttccatttagttgagtatcttaagggtttttggtgttttttcctccaaaaagtgaatcttcaccagagaacttctgtttttgtctttttttttttttttttaaagcaaagactttaatgtgcaagttagtaaatggtttgagggtctggtattgcactcggccttcaatacgttagcaataactacccacatgtgatctatttagaagcagtgtttgaaagcaccaatgtcaccccatctgcttttttgtagtttttttttgtttgtttgtttttgagacagagtctcggtctgtctccaggccgcagtgcagtggcgcgatctcgcctcactgcaacctccgcctcccagattcaagcgattctcctgcctcagcctcccgagtagctgggactacaggcgcgcgccaccacacccagctaattttcgtatttttagtaaagacgaggtttcaccatgttggccaggatggtctcgatctcttgacctcgtgatccgcccgcctcggcctctcaaagtgctgggattacaggcgtgagctgctgcgcccggactaacttttttttaaagctgaggaaatgagagaaggggaataaactttgtgtagctacaaacaggatggcaaaattaaatttcaaagaacgggcggggaaggtttcagatgcaatggcttcttattccttcttttgactgacccgcgccttctccgcctccctttctcctcgcgtcacccgcaccagcggctgggatgcggcgcgcgttccgtctttccgtatggaaacatggcgcctaggggcgggccatccccagcttcgagccaccgccagctgagactcatcggcgggcactcggccatgcctctcgcgtttccgtacgaaaacatggcgcctcactgcgtgcggcgggcgactcttggctgggagccactggccacggagccccctgagcggtcatcggccatgttttccacctctccctgaggaaacacggcgccgcccagctgcgagtcaccgcttactgaaccccttcggcaagcaggggaaagaccctcccgcctttccgtacgaagacatggcgctgccctatattgggctggcgcctcccggccaagagcagtctcctccttcctgatgctgagaagcggccgctctgaccgctgcccacccgagtcgggctgggaggaccgcccgccgcgtggcgagggatgcggcctcggaggggcagaggctgaaccgcccctgcctgccgcgcatccctccggcttccgccgcggcgccagcccgcgcctgattcgcggcgggagcggcaggagggagaacgccgactccgtggcaggtgagagcgggagctggggcggaggctggcggggcccgtccgggaggcgcgcggtccaagtcgcaggcatctcttcgcctcttcccgtcggatcccatcccgggatgtcgggggcaggcgaggaagaggcggggtccgcgggcgggtggagctcacccctcgaggctgtcctctcggcgcgcccgcgtcctcccctactcccggccctgccactccctcgctggcctgaacagctgtttacaacggaatccggacgccgggcgcgagtggagctcagtgccagaggaggggattcccggcgccgggggacagagccccttttttcttttgccgaaagaccctttctgctggggagcctcttgtgtccagcctaggcccgcgtgcagcgccgacggatgaccgtcttcttggcaagtgcgaggatcctcctcccctcgg

SEQ ID NO: 6962 - DNA, 2300 bp, Homo sapien
atgctgtttcttggattaatgttggctatccagttagttgagagcgattctttccaatgagatgcttattgcaaaaaatcactaacttttaaaataaagtatgccctcagttgaagtatgcctgggaaatctttccttggtccaaatcactgggattgatcttaccctaaacccatagtatttgtgcttttgaaagtgatttgaaactcaaatattttggtttttgcccccctccttttttttttcactgccccagcttgaagaagagagtaaaggagattgtacataaagcgttttgggattgcttgagtgtgcagctaagtgaagatcccccagcatatgaccatgctatcaaacttgtaggagaaatcaaagaggtgaggcaaagagtgaattgtgatgcttttctggtgtgttaggagtgtttattcaacttcttgtgtcaccaccagaagactttaaagaaattgaaggatcaagaagttaaagtacttgccagaaggtggatcaagagtgtttttggcttaatgcccttttttaaaaaaaagttttaagcaaaccatgataacctgaaggcatttaagacaacaaagttatttcacaaaatctagtttatttataaattttaataggtgtggacacattccatttataatggccaaaaagtgactcagcctttgggacagagaaagctttaggtggagggactgtttttgcagcgcctttagcagtagcatcaaagaagaaatgtatgcatggaaattgtcatcagctatggttggctcacaggctcacattaataaacatgcttttcttttttcaccattaacagttttttcttctatccatttaattgctacctagggcttaaatggaagcttaagtagctattgtaaatgatttgtaaacatgtttttctgtaggtttgttgaataagaagtaaaatatgtgcaatattacgtagcaattgagaagcccttatttggatagttataaattacatataattagaaatgatgtctaaagaattttgattaaacgtagctgtgttctcttgtagactctcttatctttcttgctgcctggtcatactagactgagaaaccagataacagaagtcttggatctggatctgataaagcaggaagcagagaatggggcgctagacatttccaagctggcagaattcattattggcatgatggggacactgtgtgcacctgctcgagatgaggaagttaagaaactaaaggacattaaggaaatagtgccccttttcaggtatggaaatatgttaatcatactccgtgcaactacaattcagaggcattttcttttttttcttttcttttttttttgagacagagtctcactctgttgcaaaggctggagtgcaatggcgtgatcttggttcactgcaacctccacctcctggattcaagcaattgtcgtgcctcagcctcctgagtagctgggattataggcacgcaccaccgtgcccagctaatttttgtatttttagtaaagatggtgtttcactacgttggccaggctggtctcgaactcctgacctcacgtgattggctgccttggcctcccaaagtgctgggattacaggcgtgagccactgtgcccagaccagaactattttcaatttaaacttcctgaagtcttggtactcatggatttaaaaaaaaaaaaaaaatttgtaaaatgcagaaaagtaaaaagaagacatttactcataattttacctctcagaggcataatcactcttatcattttgatacatagatatattttttatacattaatttccttcaacattttcttttgaaaaattccaaacctacagaaaagttacaaaaacagtacaatcaacactcacaagcccttcatgtggatccatcagtttttatcatgttgtcacatttgctatgctgcccaggctggtctggaactcctgggctcaagcagtcctcccgccttggcctcccaaagtgttgggattacaggtgtgagccacgcgtctggtcctcttttcctttaatgctatgtttactttacaaatgcttgcttctaaatccttttttctttcagagaaattttttctgtgttggacctaatgaaagtggacatggccaactttgctatcagtagcatcaggcctcatctcatgcagcagtcagttgaatacgaaaggaagaagtttcaagagattttggagaggcaaccaagtatgttgaatattttgtggtactttttttgttgtctgtggtttttcattttagctgccatag

SEQ ID NO: 6963 - DNA, 2300 bp, Homo sapien
tctactaaaaatacaaaaattagctgggtgtggtggcacgcgcctgtaatcccagctacttgggaggctgaggcaggagaatcgcttgaacccgggaggcagaggctgcagtgagctgagatagcaccactacattccagcctgggcaacagagtgagactctgtctcaaaaaaagaaaaaagaaaagaaacttggaagccatttcagaaagactccaggaaggccagcagccactcctgcacaaccagggggaagggctacattttactgcaagcagctgttttctctgatccttctttgtaaggaagtgcagtgattttgtgttttgaaggaagacttgaagaagcagttgggtaggtattccaataggactgatggggaggaaatcagatactccatgagaaggatttcagacctggtagagtcagaatacattctgctttcaggatttttgagattgctgatggtcccagggtttatacaaggacttggatctggctatagaaactcaggtagaaattacatgtatgcagatcagcactgatgttggttctaatctataatgatgtgataaattaaaaaaacaaaacaaaaaacagggctgggcatggtggcttacactataatcccagtactttggaatgccaaggcaggagcatcatctgaacccaggatttcaagtccagcctaggcaacatagtgagatcatgtctctacaaaaaatacaaaaaaaattagcctgttgtggtggcacacagttgtactcccagctacaagctgaggctgaggcaaaaggatcacttgtgcccaggagtttgaggctgcagtgaactatgatcatgccactgtactccagcctgggtgacagagccagaccctgtctctccttaacaaaaaaaagtagagccagatgtatctttttgggtcccaggcaggagactggagaatctgggtcactgtaatctggcagactggctgcattttgtgagggtacttttattcatatttatttatttttgtttgtttgaatgcattattatttttttaatagaaaccacatcacttcatttgttacagcgaataattcaagagggtcccagaaagctttttcatccacagaattacagaaaggataagcaccctcaccacccaagcctttggttcattttttattttttcaagacggagtcttgctctgtcacccaggctggagtgtggtggcgcgatctcagcttactgcaacctccatctcccggtttcaagcgattctcctgcctcagcctcctgaatagctgggattacaggcacgcgccaccatgcccggctaatttttggattcttagtagagacggggtttcaccatgttggccaggctggtctcgaactcttgacctcgtgatccatccgcctcgggcctcccagagtgctgtgattacagtcgtgagccaccacacccggcctgtctttaagttttatactagttaggaggctagtctatcagaatgtccctaatttagctgaggaacctagacaagtcttccttgatttcagcttcatcccaaggcctctgaatattttctttaaaaagctgcaggcgaatgaggtaaaatggacagagacatgagatagaaatcaacagaagggcaaagagtacggctcccacagcactaataggcagtaggccttccaagaccgaaaaggcaaaaagcagtgtgaccaccacatagcccttgggagtccgtgcctttagtttcttctgtagcatgagccacaggacaaaaatctggatggcaagtgttcccatgatgaagacatgcagggactggggaaggtggaagccaagcatccagaagcaaagatggccatgttcaaggatagtgtgctggatacagtggatacaaaggcatcattggcaccatagttaaaaaagatgaggtggcctaccagcatgaagactgacatggcatagatggtgtcagtgctgacagactctgtcagggtcttagcactggtgaaaagccataagtgaaagtaatgaagactagggcactcttcaggtcagcccaccgggtccacccactcttctgcccttcacctccatcagtgagatcaaacaaaacatacccaatcagtgaagaagccaggccagtcccaaaaagccattggggggccagaagaccctcatccatataccaccagataaccagaaaaacaaaaacactgcacagctgcgggatcaccacactggactcaaataccatagcccaatattggtatttccgagcatggatgtttttcc

SEQ ID NO: 6964 - DNA, 2300 bp, Homo sapien
ataggatccagaaaaacgtttttgtgggggaatccaatgtgtaaatataattgcatcatcatttgatgtttcactgtagcatagttctgaggttaggtgtataatcttaaacttcagttttctcatctgcataatggtcataataagaatacctttcataggactgttgagagggtaaatgagtttttgcatgtgtttcacttatatatagaatgttgtgattattccataaatgttatgatgagggtggtgatcattaaaaatgtgctaaatactgtaatagattcctgaaggaagtactatggaagcacagagaagagagtataatttaagttatagagctatgctgcacaattatggtagtcactagactattaggtattgagcacttgaaatgtggatagcctgggctgggtgtggtggctcacacctgtaatcccagcactttgggaggccgaggcaggcagatcacgaggtgaggggttccagaccagcctggccaatatggtgaaaccccgtctctactaaaaatataaaaactagccgggcatggtggcgtgcacctgtagtcccagctactcaggaggctgaggcggaagaatcgcttgaacctgggagacagacgttgcagtgagctgatattgcgccactgcactccagcctgggtgacagagtgtgactccatctcaaaaaagaaaaaagaaatgtgactaggccaaaatgagttgtggtgtaagtgtgtaaatacataccagatttcaaagacttagtacaaaaaaaaatgtaaactatcttaacaatttttcatattgattacatgtggaaataagatttggatatattaggttgattaaatatattaatttcacctgtttttacccattttattaaattccatatgtggcttgtattatattgctgatggacagtagtgttctagagggtgtcatagagaagggcacatgagttggattttgagagatgagtggtagttagccaggtaaagaaagataaatgcattattccaggcagagagcacaacacataggcaggcagtgtgaaagttctgtggaatggtaaaaagtgtgtctggagcaaagcttgggataaaacagaaaaagataaaatgtaagatttgtttaacattttttaaagtataatatgttaaattgaagagagaagccaaaaaaatagcgccatcttctttggtctaatatatttaatttcttggttttattttgcttatggacatgtaataaactgaataactactctcaggcaataaaaaacaactcctctgctgggttaatttttcttttgaacagctttattgaagtataatttgtatactataagtccatccattaggtgtacagttcagtggttgttagtagtagattcaatggttgttgttactgttagattcttaagttttaaaagataacttagagtttagcaagaagtgtcattttcccacttccagatatagaggacctcctgagactcttaaaatttaatacacctctgtcaacaattcttaattcatttacatttccatagttacctgccaacctagatattgtacctctgcaagagttaaagtagctaaatatagcatagtcctggtgcctcaaaataagaaactcaattatttctaagtttgagtttgccatccttccatgttcaatgtatttaaaaaatagcagtagtctgactaatgtcagcagatatgtacttgtcattatttttaaaaggcaaatgggatacctggttcagacggcactgttataaatggttttgcattagaactgcagtatagtagaggagggctgaactagaagggaaaaaaacatggcttgcagttactgctctgctactcaatcaccaagagccagatcaaatctcttaatctttctgaagctcaagtttcctcatctataaaaatcaagtgtgataatagttaaacctttctgcataggatttttgtaaggatgaagtgagataatgcatatgaaaatattgttgcatcgtaaaagtgaattaaaaaaattaaaatctttttcaatatcctagaggacaataatacccgagttttgtttgaacgagttttaacatctggaagccttcctcctgagaagtctgggtaagccattgtgaaaagttgttgatcaggttctaaagacagctttcttacctgaattgtggtctatggggtgaatgtttgcttgagtatgagtttcaagagaaatttcctttccttctcaagttttattttacctatcagcagtacttttatacct

SEQ ID NO: 6965 - DNA, 2300 bp, Homo sapien
tccatctcaaaaaaaaaaaaaaaaaaaaaaaaaaaattagctgggcatggtggcgcgcgcctgtactcccagctacggaggaggctgaggtggcaggatcacagagcgcagggaggtcgaagctatggtgagctgtgatggcgtcacagcactctagtgtgagtgacaaagactctgttctcaatctatcagcatggggagataaagcaaatatggcaaggctttcagctgttgattccaggcgaagagttgtcctacaggtgttcactgcacttttctttcaacttttctctatgttctaaactttgcacaataaaacctttgggagaaattatttttctataaattttcaccaccatctgtcccactgaaacaccacagttctaaaacattcaagaggtcatggtaacatttccgtgtctttgtaattttagataaattctaagaattaacaatgaatttcgaaaactttcaatgaaacctcagttcattagtccttcactttcagataacaaatactagatcagaaaaggggtaaacagttttgatacagtaattttaagactttgcatgcttgggcatgctaacactatgtaaaatgtaaatagtgcgaagatttctggactgaaaccagtcctcgggcaaacacaaaacaatttaatcaaactgccgacataatgaaatctacagtcttacagactatgcaatagaacgctcctattttgcctcatctctgccaacctccaataacatcttccacgttataagctagggaacctgaaaaacgaaaacctaagtgcatgtcgttgctatggcaatgggaaatttcaggaaattgagactgcaggctacctagcctccattttagaaactgtatttatctaaacacaccaggacttagatcgaaaaacacatttaatggcatttttcataactatttagcttcctctttcacactaaaaggtaaatactatcctacaaaattctgaatacaaagagcaaaagaaacaaatcacactgatctaacctaaaagtgtgaattttaaaatatttagttgtcactcatatttactattaaaacagatgcttttatttacagtggccaaaacagacttctcattttcaacttatacctgcaatgtttatgtagctggaaaaatgaaaacgaaatgtggctaaaagaaaagaaaacgaaagaaagccacaaaattcccaaaacctcagcataacttgcttctttcttcactcgctctcattaagtcttaattctccagattagctttgtctcaaatatttctcaaactagtaacctatttctgggtacagtatatttggcggggtaaaagaaacactgtcaagtttttctaaaacgtcgggtgcacgttaaaataattcctatccactctaataccaaaacgatatcaaaggaaagcatcccatctggagtagtcccatgaatctaaataggacgaagcagcctaccgctattgtctaaatcaagtatttactcgtattcatgcctaagagagagaagtaaaaaaaaaaaaattaaatcttagatcttgctccccattcccaccactcttctatataccctgtcccccgggttcactagacccaattccttcctcagccgaacatgtctggagcagtcggaggaacagacgtggagaagaggtcgccacgaggccccaccactctccttcctcacctgctccgtggctccgtctcctgacatggcctcagctgattacaacgtgcgcactgaccgtcgatgggaagctagaaaagaaaaattaaactaaaaaccacccccaaatcagtaaagttaccccctgcccagctgagccagaccgccaacaccaatcgccaccgcccactcaaatatgaattaaaatggctgcgcccctgccggccgaggaggaggtgtgtggcttccgcattaacttccggggcagtgggcggggctaatttcgcgactctggttattccgagcgtgcagaaagcagcgagatcccggggcgggcccaattcctgggctgacgtcactaccctggcttggagaggctgttgctgagccggctccaaccggctggaaggcgggaagctgtttcgcctggaggctcgcgcgctttttggaattcagttatcaagctttagagcctggctactcacagttgaagcctgattgcaggtcagcaatgctaaacgttaaatgcctcttatatttaggggataaggactccgtggaggttttctctggtcccagctcctgctttttacttttcttgggggtggga

SEQ ID NO: 6966 - DNA, 2300 bp, Homo sapien
cagagcgagactccgtctcaaaaaaaaaaaaagaaaaagaaaaaatacaaaaattagccgggcgtggtggcgcacgcctgtaatcccagctactcaggaggctgaggcaggagaatcgcttgaacctgggaggtgtagggtgcagtgagccgagatcgcaccactgcactccggcctgggcgacagagcaagactctgcctcaagagaaaaaaaaaaaaaaacctaaatgttccaaaactcaaaacgctccaaaatctaactttttaagcactgacatgactctcaaaggaaatgctcattggagtatttcagattttggattttcagattaggatgctaaagtggtaagtatatatacgtaaaacactttcatattctgcttttcttcatttaatacggtggttgcctttctgtcagtcatcgtacattagcatcagtttgctgtgtgatattccattgcagagataaatcttgtgatatttttaaccagtcctccattgctggatggtgcaatgaacatctgttaatacatatcttttgctcatgtgtctgattattttaagggtaagatttcagcctgtggaaagggagtaagtgtaagtttgagcagaggaaaggagacctaaaagaataaggcgagtctgggaacagttcactaggttattttagggcattggacccccgtaggcgagaaatgcttgcagacatctaacgatgacgcttaaatggaagagcagtttgagaagatttagtatcatttaattttttattttttattttttttgagacggagtctcgctctgtagtccaggctggaatctcggctcactgcaacctccgcctcgcgggttcaagcgattctcctgcttaagcttcccgagtaactgggactacaggcgcaaaccaccacgcccggctactttttttgtatttttggtagagacgagatttcaccaagttggccaggttggtcctgaattcctgactttatttatttattttctgagacggagtctcgctctgccgcccaggctggagtgcagtggcgcgatctcggctcactgcaagctccgcctcccaggttcacgccagtctcctgcctcagcatccggagtagctgggactacaggcgcccgccaccacgcccggctaatttttttttgtgtgtgtgtgtatttttagtagagacggggttttaccgtattagccaggatggtctcatctcctgaccttgtgatccgcccgcctcagcctcccaaagtgctgcgattacaggcgtgagccaccgcacctggcctagaactcctgactttaaatgatccatccgttttggcctcccaaactgctgggattacaggcgtgggccaccgcgcccagtcaatctcatttaatcttaatgccaggtactgttctaacacttttctatgtataatttatttcacttgcaggtactattattattcccatctataggccagaaagctgaggtacgaagtttaattaccagagttacttatcttcgttaaaatccaagcagtctgggctacaaacaattatacctactttgcagtcaaggaaccaagctgagatgttgagctgaaaacccaggtctcagacttcaaagctttctacacaagagtcgacggtggcagtaaaaattaatgggggcttgatctatccctcccacccccaagaaaagtaaaaagcaggagctgggaccagagaaaacctccacggagtccttatcccctaaatataagaggcatttaacgtttagcattgctgacctgcaatcaggcttcaactgtgagtagccaggctctaaagcttgataactgaattccaaaaagcgcgcgagcctccaggcgaaacagcttcccgccttccagccggttggagccggctcagcaacagcctctccaagccagggtagtgacgtcagcccaggaattgggcccgccccgggatctcgctgctttctgcacgctcggaataaccagagtcgcgaaattagccccgcccactgccccggaagttaatgcggaagccacacacctcctcctcggccggcaggggcgcagccattttaattcatatttgagtgggcggtggcgattggtgttggcggtctggctcagctgggcagggggtaactttactgatttgggggtggtttttagtttaatttttcttttctagcttcccatcgacggtcagtgcgcacgttgtaatcagctgaggccatgtcaggagacggagccacggagcaggtgaggaaggagagtggtggggcctcgtg

SEQ ID NO: 6967 - DNA, 2300 bp, Homo sapien
aggctatctctctgaaaggcagccattgttttgttcttctatattggaagccttttcagctggttatcctctctaacctgaaaacaactgtcattcgaaagtgttatttccagtggcctcagggcatactatcctttctcttttattttattttttgagacagagtctctccctgtcgcccaggttggagtgcagtggctcaagcgattcaagcgattctcttacctcagctctcgagtagctgggattacaggcgcccgccaccacgcccagctaatttttgcatttttagtagagaccaggtttcactatgttggccaggctggtcttgaactcctgaccacaggtgatccacccgcctcagcctcccaaagtgctgggattacatgtgcgagccaccgcgcccggcctcctttgtctcttaaaggcattatccaaaatactcatcttccggtttgaagagcagcagggattaaatgtgtattatgtatgcagcaatttgccactccctttgccctgccccagttactgcaatagaaaatttctgggaataaatacatctctggtaaattcaatcttgctagtgaagattatgaaggaaacaaagaaaggacacttccattccagaaaggtgtttgtttcccaaaaggttagacattgattcagaacaaagggaacctgaggaaacgggtataaaagaaaatcaactctgaatgtgaggtattagaaagccatttgtttcctagggaaaaggaggaaagatggggtgggagacatgggctttactgtataaccttggtcatgtcacctaaacttcttggaactcctgagtgtaagagttgggaccaaggatcgcaaagcttctttcattcctaaaattctatggttccacgattatgtaagctgaaacaggccattctgttgatttcctaatctccaggaggaaagaaactagtctttgggagttaaaccgactaatttaacggagaattaccaatgtggaggtgggcgaacttcacaattatggggttttggacagtagagatgctcttaaaatttccaagaggacccttcccccgtccttgaacctggctttacaattctcttcactctttgggataggggagcgggtagaacctagtttagattgaggtcgttcatttgagcatttcccctttacttattttgggacctttaacgaccaaatgccgagaaacagatccttaattacggttccgggatctcgaaaggcctgtaaaatcctgcttccgcatcttcatcctttcttcgggtattgggatcttttttaaaaatgtgtatttctggcggagggggcatggagtgaggttcagaacagcagagccgggctgacggatgcttctttcgcgggaggcttggcttgcgggactccgggttggggccgcacgggctggcaggcgggctccgggcaacaagggcgcggctgcggactggcgggcggaccccggggaggggcttcacggaggcgccgcggccggagcggagcggagccgcccgggctgggcgcgcagcgctgccgggcgggcggtggcgctgcggaggcggtggccgaggccgacgagcgcggaggaggggcccgaggctggggcggctggtggcagctgcctcagtgacgactgccggcatcgcggcgacctgaggagatcaagccgcaggccccgccgtcgccaccactcccgccagtcttccttctccgctcccggccggggcgtcaggaatgggccccaatcgccgtgggccccgcaccctgcgtcgcccgtaggccccagtagccggaggccgaccggcctcccactacccctcgccctagccaagccgtccccaccccaaatccccgggaaggaagatgagggagacgggcccggcgcttagcagccagagcagcagcagcagcagcagcggtcgggggagggtgtttcgccgtttcctctcagccgccaggacaagatggcagcggccgcggagaggggctgagcccgggctgggtggtgccgcctgctgaagcgcctggctcccggtccccggcacggccctgcgccccaccccggacatgctcagggctgcggccgcccgaagaggagagagcgcgggcctctaggaaggtaagggagtcgagcgaggggcgccgccaccccggggtggggggatcggctccgtctgcgggctccgcggccagcggaccccaagcctgacccgggcctggcccgacacctccggcgcagcccgcactcattgcgcgtcccgtgccccatccgcatccc

SEQ ID NO: 6968 - DNA, 2300 bp, Homo sapien
atatacactgacaattacaatataatgaaatgttgtaatcgcaaaatgagaagaatttaggaactactgtgagagcactgaatgctaacccctgcctagagggtgagtttatatgtttcaggaaaggcttcagcaagaagatattattttactttgattgaaatctgaaagagtttttaaagtgttcaatagtagatgtgagtctgggtgcagtggctcatgcctataatcccagcattttgggagcctgagatgagaggatcactcaggccaggagttggaggctgcagtgagctatgattgtgccactgcactgcagactaggcgagaccttgttaaaagaagaaagggtagatgtgcagaaaaacattaagagaacataatgcaaagttcctgtatctggcttctcagcttatttttacacttgatcatttgtattaggattttaccattagggaaattccaagataattttgtgcaagtagaaaacatggagtattacttaaagtgatgattctgtcaaatggtggttttgacgtacacgtttatatattgttgtggcagaccaagtagatggaaggcagatctaacacctgtgtaattatcagtttttctagctatggtactgaggattcattcttatgtgtgtatatgttttgagttcctatagataggtcagcagttgctaggttgatttcatattttataaattctaatttggtaaaataaggtcataggggagaatattaaatatgccagaataaaactggatcctctttcatatctatgttatatctgaatcaaataatgtttataaaatcattatacatttaatggttgtgtggtaagaatgttggctatttcagcctcaataaactcacatcctttttggatgcaggcataaaataaatagaatgtcatttagtccttgagaaccttagaatgattttaaatctgtttttcaaatatgatttgaaatttgatttgaaaatatgatttgaaaatttcaaatattttccaatatatttggaggaagtttaaaggaatatccatataataaagtacacattgagaagaatgggaacatgaatataactgggtagaaagtcattaacttgtctttgtaatataatgctttttaagatcaaaggataatatttttagtaaatagaatgtagcatcagctattcatgaaattggcaccctaattttatttaaaatccctgccataggtggggcatagcgaaactctgtctcaaaaaaaaaaaatatatatatatatatatagttaaagcagacatagattttttttcctcctgaggcaattcttgggctttaggtttaagaaatatggctataaactatgtttatataatgtatattttcttttcttgtcattggttcatacatttgaatttggtaatagaatgttttacttttgtcaaatgtgtacagttaaaggatctgtactttttttttgagacagagtcttgctctgtctcacaggctgaagtgcagtggtgcaatctcggctcactgcaacctccacctcccaggttcaagcgattctcctccctcagcctcccgagtagctgggaccacaggcatgcaccaccatccccagctaatttttgcattattagtagagttgggatttcttcaccgtgttggccaggctggtcttggactcctgacctcaagtgatccaactgcctcagcctctcaaagtgctaggattacagggatctatacttttcttttgagggaaaatgttggcaccgtttctagggcatattggccatttcagcttctcagtaaatatttgttaagtaattaaatgcacttgattctttattcttagccttttaacgcaatactcagaatagctgaagcaccaattaactgaaatggagatattataaagatagttatcttctccaagggaaaaaatcatcttcatggaaattaattacttttttacaaattgtgaatttgacccttaagagttttcttcctgatatttaaaattgaaaaaaaaattgttgacattaatatttcttctttccttttttttcttttcctttttttttttttttttgcaggtatggcctcacaagtcttggtctacccaccatatgtttatcaaactcagtcaagtgccttttgtagtgtgaagaaactcaaagtagagccaagcagttgtgtattccaggaaagaaactatccacggacctatgtgaatggtagaaactttggaaattctcatcctcccactaagggtagtgcttttcagacaaaga

SEQ ID NO: 6969 - DNA, 2300 bp, Homo sapien
tgagttacaaggctatgtaactgaaacaagatgaatttgttttgattctgaatccataagttggactcatggttgaatccatttaaacaaaggtacaaaagaagaaatcctacacagatttcacctgacatccacataaaagtggattctaaagtttaactgaaaaatacaaaaatgcaaaagtaccttatacagatgttatatttacccatataagtaaccagataagactgcatgcaaagtgtgaaattgaggctatctaggagataagcaacatgaacagggaggattgaggcatgaaagcagcatccaccttctgtgtaaaattgcaagtgtctgaggggggaatacctccttaggctgcatgtggtaacatagaaacacaatttccattgcaaaccatgaagcagttcctaaggagggcatgcattttaatgaaatactatgcagactttagtgtcttggagctatatatgcattttatcacttatttctatttgaggtgggccagtggaggccagagggagctttggctcttcagaaagcaccccaatgatcctgatctggtgatcaggagacagtcaggctgagctgggcatatgattacggcctgcctaggagatggagttggtttctcttataaaatcaagtcaacaaacctgatgtagtattggcttataccctgatgagttctaaaaatgatgtaaggccaatttcttgggtatccgtaaaccccaagaatggggaattttaaagaaaaggaagaatgagaaaggaatttttcagaatattgcctaattcagagtgaacttctagctttccaagagttgtttcctcgcctcctttttagcggaggtcaccagcttatgccctgcctccttgtctgtctgcctgtggggccacacatgagtgttgatatttctggcctctgcaggtgcttatagtgacaccaggccctgtgagaagtgtctccttcctggtttttctttctgaaatagcctaatctgaaagaaaatctcctttgctatttgacatggcatgaatgatagcacctggaatccttttaaatccaggaagataaatatgtttcattggagccatctttccaaacgcagacaacctcaaatatttcatatgagatgcctcagggtcctaaaaaagattcgtgcttgaatacacagttcttctttagtttcgtgcattttggtttcctggatgaggttgttttggtgtcattggccatggcagttgaccacattcagctttgcaagtttcacagtccacgccttgtaggtggtaccaaaacaattttttaatacacaagtattttcaacatcttgccttaagcatcacttcatcagaaactgcttcccaccaaccctgccctgtaggttcactgcaacattttcctacttgatattatgtaatttgttgtttgactctgtttcctgagccttctgtgatgggtccgggcagagcctgtcttgcacacacctttgtctccagcacctgaccacagcaggcacttcatgagcatccaacacctgacggcctgatattttgtttcacaggaacagacaatctacagatgaatgtcacccggactccagagtcatttcctcccgggaaattgttaccaatttcaccaacatggcctttcacagaagtcaggtcttcctcagcagcagacagaatcaagaccgtgctgggacagtcctctgacaacacaagcttgccacagtcagcccgaacccctgcgtccaagacacaccacagaactagggctcacgcggacttctcttcttccctttaccaaggaagcggacatagcgcctccctcgaaccttccaaggattctaccgagtccctggtccaaccggggcctaaagggggacaagaagcagccgatgtgtcaggtttgcctctcaccagcatgctcccctcgttgtccacagtcccatcagggacatccttcagtgctgtccccccatcccagccagtatgggcagggacttcctccatttcaaagcatcccccaaggtcagacattcccccactcctccctctacctccatcctcttcattggctcctgactcacctcattccatcatctctgagccagcagagcaatcccccaaagtgctgttagttccccaaacagctccagccgacccctctttaggtcagaacatagctaatcccttaatcccattttctgatgaaatggaccacactgcatcccaaaatgcccaggatctcataggcatccctcatctaggtgtttctggatcctcaacaa

SEQ ID NO: 6970 - DNA, 2300 bp, Homo sapien
aacgagtttctttggtctttactgaaagaagatagtagaaatttaaaagttgagagaagactagaaatggaactgattagaaggggaggttcaaactgtcaatgcacagacttttcaaagaagttgtttatattttccaatggcaaactgccctttctggaatgttcagagatgatgtgtcatggaaccttcaaacaagtctcttgttcggatgataataggtagtgtccttttagtatgctggttgatctttcatagtgttagtgttttgttacttaaaaaggaaatcagctataaataaaatgtatttttgtaattcccgtgtgtatatatggtatatttctatcaatggccagttgttgtagtccaaaacctaaatcagtttgcaaaacactgtggacagtgcgagattttattgacaggttaacacaatgcctacgtctatccacataggcattcaatgcacttgaatgaacaaagagccaaagaaactcagcctgttcatgcaaatggtatgagtctgataaaatcagctacattgtcctgctttatcaataataatatttcattagtgcaatgatatcaaccagtactttgtctacttggtaaatgcctggaaatactgtatgtgaaaatgatgtttcaagatcttactgtaattgaagtatacgtaaatgtttcagaagacagtgtctgaaatttggctgtttcaatgacttacagagactgagtctacagtttgcagagctatggctccagagtgctaagagggtggagtcacaaatcactgtggtctttacagagccccaggaaatactgagtgagtcaactgagacgactaaaaagatagcatgctaaatcagatactgtcttaaactagacaccatgggttcaagaatagtattaatagatgagaggaaaaccttaagttggaaagaaatcagtctgttcatgttatcccactcatggggagacagagccactctggtcagattttctgtgagtgagatgtggtcccttccctgaagaatctcctaacctcatagaggtgagagagatgactggacagctgactctaagagatggtcaaaagtgcctcaaggaattgaaataaggttcccagagagccctgaggaggcagcaatgaacaaacaccctgttcatcagaaccctctagatagtcacagaagccacaaaaggaccttggttgaccttggaggaggaagcagaagtaccacgaagtggagtgactggcccagtgattcagtcccaacctcctggttcacgaacctgcttgctttccatctcgccatgtggcctgcaggcttgtcagtaacacatttctttagctgtgcctagaggtttaaaaaaaagataagggtcatatgaagaactccataatgttcttgccaagaaaaaagatgattgagtatataacgaacttcagatacagtgtatagaggatgatgcatttgtggcataataaatagttttcagtgctggttttgatatgagttttctgcattcatgaaaaagaaatgcattttggctttttccagaaagagtaccatcaaggaaacggagacctcaactgctgttctagactgtgggggtgcattcctgtctcagcaccaaggatcccaacaggcaggcagggaggcccttgactttgtgtcactgtgaggcagcagagtccatgctctgcatcaggggaggtgcagtaaaggtccattgtgtggcttgagacctatgatctgaggcttgtgcataataagatggcagctgttacctacagagcaaggagtttcctctttcagggtagattatgtaagaatcaattccctggtcccaggagaagttttattgtgagtttgttaatttaagaactcactcagcagaaggacatgtaatgtctgagtaatcttgatggaagaaaggaaatagatctgtgattaaaacacacacacacacacacacacacacacacacacaccctacttcggagagagaatgtagaatggaggaggtgaggaatttaactaatagagatgctttttctaacaggcagaaattagagaaatggatcaaaagatttaaacattgattacatataaacgagtttcctttttttctacatagcacacaggtgctcaacatttaatgaataatataacagatactgtcttaaaagtttaaaaacaggatttgtacttaatcctaaattcctcttatcacacaccagaaaataatttggattttatttacaaactacatccaaatactcttaaggaaagagtgtc

SEQ ID NO: 6971 - DNA, 2300 bp, Homo sapien
agttcccactgctgctgggcgtggtagctcacgcctgtaatcccagcactttgggaggccgaggcaggcagatcacttgaggccaggagtttgagatgagcctgggcaaaatagtgaaaccccgtctctactaaaaatacaaaaattagctgggcatggtggcttatgcctgtaatcccaattactcaggaggctgaggcatgagaatcacttgaaccctggaggcagaggttgcagtgagccaagattgcaccactgccctctagcctaggtgacagagcaagaccttgtctcaaaaaagaaaaaaaaaaccagaaaaacaaagttcccattgttccacatcctcaccagcatctggagttgtcagagttttggagtttggccattttaataggtgtgtctcatttttgtttacattaaccatttataagaaattttgggatttaagagctggaaaaagatcttggctttgacctcctttcctctcctccctacctctgctgtccaacacatacatttcataaatgaaaaacagaggtggagagagctagctggtggcaggacagaagtcagagctctaattgctgctgtaatattcattcaacacatagtaattgcccttatcgtctcatttggaaactatacttagtttaattatacttagtagtgaggagtccaagagacacagttgatcaagctaaagagccaagtcttctgtgctcgtacataatgaccatgttctcgctaggggccttactacgcttcctacattaacagtgaatgaatatggtcttccagtgggggcagagggactggtgccctacagaatcaagagctctgaatggaaggtttggagttttagctgcaatccagctaaactatatcaaatttatcaaatccagctaaatatatcaaaattatcagatgcccctgtttttttagacagggtaactataatttgtctttagttattgagggatttctcctttctggggaagttaatcatctttatctcaggtttttctgaacatgtgggtgtcccaaggcttttctgagtttacctgacatgttcaccatttcttgatgttgacactggggggagctggtgtagaaggtctaagagtacaaataaccttgtggagtgtttttattattaatctcttagaaatctaagcctgagggttttaccttggacactaagaacattctgaaactgccattcctcgctggcatcatttgcacacatcgattctatccagaaccacaccccagcaagaacagagggcatgtctttgctggtttctttcctctgtctaccacttcctaaactctattttaacagggtgatggaggtgaatattctgtagtctaacaaatttggaaaatgcagactggacaggacttgtgcatgttagcattgcccatccccaaattcatgagcaccttgctctgaggctaccgagccctggcacctgctgttgcccctcccaggcacacccttcccttcttagccctcttacctcctacgtgtcctttgagctcagcttgagtctcctcaggactctgaatataccagataccccatggaatgagacagaggcatatataatgacatttaggacagccaaacaggcctttgtcataattttaattgtatgtgtcctttctttatctttgcatccctagctcctaaccctctgctgggcacacagtaggttctccaaggtctgggaggcagcacagggctgctgtaaaagagcacaagctttggaatcagatggacttccatgttcaattcctgagtcggttacttaaccataatttcttgcttaatctgaacctccatttccacatttatcaaatggaaataaaagatcacccttagaagtgcaaaacattaaatttaaaatgtatgaagaaagtgcttagcccaatacacacctgacgctaataaatggtagctattacttgatgcaagcctaatgaggattacagtggcacaatttttttcccaggcacttattaccccattacatttaggagacagacaggggaggctcttaccagctttggtaatgagacacgcatcaaaatcagatgaacaattgacggctgttttgcagtcagcagttgggttaggacagttgtagcactgcaggctatgacctagaatcaggaagaaagtcaggatctcttaaagcagcactgacttgtcccctggcagcccaccatctccattaatatgggcccaaagtcagcaacttgtggtatacttccactcccgcacaaatgtatagcag

SEQ ID NO: 6972 - DNA, 2300 bp, Homo sapien
tccaggccatctgtcactgggccaccccctctcctcagccacccctcccctggttgctggaggaaattgtgtgcttctgagtcaacttctataacagtggaaacacacatgcttcattgtaaagatcaagtgtggttgtctgcctgtgtcatgttggtataatatcttggccactgctggttttttgttttttataaatatggttggtggggggagcagaaaagaaagtggcaatacagtgagcaatttaaaaaaagatttccacaccactgtagcatgtcttagaatattaacagcaaccatatattcactgtttattgtttactggggactgtgccagagcctgtctcatttaaatccgtccagccattccgggaggtcggtactgttacctcccatattacagctgaggaaatgaaggcaaagtagtaacttggcgccaggacacactttaatatgttctccctttctgagcagaaagagaagtcatggcaccccttcttccccaccttccgtgattctagccagggtgcactgtaatgtggttcacctgtgttaaaacactatattttttctataattattttttatttattcatttttcttggttccttctttttttctgtctctgctgcttaagttggaatattttctagaattttaatagcccagtgacatcctacttccagcagtctgcatttgtttatggagcaagcttgggaccatcagcttctctgtgacaagtcttggggtgcacttcagccctttctcagagaattgagatgtgaagctcacatgcccacagatgagaggccttctttgctgctgcccaaaagggtctcaggaccctgcaggggaactttcctctgagctctgcctcttatggcccaggggaaacctcgtctaccctggcttagtggctaaaatatcaaaccattgtccactgacctattgcttgtttttttttgtttgtttttttcagggggatggagtctcactctgtcgcccaggctggagcgcagtggcgcgatctcggctcactgcaacctccgtgtcccaggttccagcgattctcctgcctcagtcttctgagtagctgggattacaggagcatgccactatgcctggctaatttttgtatttttttttatttactttttaatttttgtatttttagtagaggcgggctttcaccatgttggccaggctggtctggaattcctgacctcaaatgatccacctacctcagcctgccaaagtgttgggattacaggcgtgagccattgcacctggccctgttgcttgtttttgacctcagtttccaccataatctagagtttccttctcttcccactcaggtcaattagaagaacatcatggttaaccaagcttggattttagaactgacagcctgagtttgagctcagctcggtcacttagtagctgtgtggctttgaacaatttagttaacatcttagtcttagttttctcttgcaaggtggggatgaagataattgagcctagttctcttaacaatcctatgaagagcttagcacatagatgcacatatatttgaacactgaatgaacatgtttgccatgaatatttttgcccacagacgttccaaccatgggttttagcctttccttctaaagctttcttaagaggccaaatgagcccgggatctagccaccacaaaaatccatgtctacaggtaaccttttaaaatggccctcaaacatggccagtctcaagaacaacacccttcatcttagactcttttcatttcatgcgtgtgaatacatgtctggcacaaggaagggaccaaagaaaaattgcatctttgcgccttctccttgtggcttccctctcacacgggcatgacagccacaggctgacagtgggggagaacaaacaaagcctggtggatggggccctgcccacaggccccagggctgccgccagctctgctgctttgtagccaggtgtccttgtgtgagtcacatcacctctccagacatctgtcttgtcatctgcaaaaaagttggggaggaggttggtttttattttattttattttatttattttttagacatggtctcgctctgtctcccaggctggagtgcagtggtgcaagcttggctcactgcaccctccacctcccaagctcaaatgattctcatgccttagcctcctgaatagctgggattacaggcatgtaccaccatgcccggctaatctttgtatattttgtagaggcgaggtttcaccatgttggccagggtggtctcaaactcct

SEQ ID NO: 6973 - DNA, 2300 bp, Homo sapien
tagcactaacagtggccacagctttttgagtgccatctttggccaggcattgtgctatgcagtacatgtaactatctccatgcttactagccaaagcgtgatcagaggttaacacatagcaaagaggtgacagagccagaactatctggccttgttcagaggcctccagattggactggaatgcctgtgctctgaaccctttcattgtgttcttcctgctttcttagcaggccacttctttctaaggtacttcaaagaacagctccccatcaggggccctgtgtgttgtggcagtgtgatttatgtcaaggaccattccaagggaagtgtcctgaaccggcagctcctgccagcctgacacctttccagtgcctaacccgagtcaggagattccttccttcctccttccgtggggatgcctgacattgtagctacattgggtttttgtttgtttgtttggagagaggaccttgctgtgtcacccaggctggagtgcagtggcacagtcacagctcactgtagcctttacctcctgggctcaagcgatcctcccacctcagcctcccaagtagctgggactacagttatgtgccaccacaccagtctaatttttttttaatgtttttatttttgtagagacagggtctcactataatacccaggctccgatcatgctatgcttaacttttaggaagtgtctggagctctctgttcggggacctcagaccaataccttcctctccctgctcacttgtagcagttccttgtatactggagccctgtctaacctgagtctataaatcacccttcctactcagaaacccctgaaaatggggaaccaagcaagccgctggcatgtgctggagcccaggtctcctgggaaggtccacatgggggatggtgtcccgtagcaggctgtaggtttcagagcccagcgggtggtggggagccctcaatttgtaaggaaaggccagatgacaattgtctttcttcctggttcctcacatatcataaaaccacctctttctcatctccaccacccccatctccaggcttgactcactgattgttttcttttttggacaatgtcagaccctgcccttttcctggaacttctcagtcctccactggcctgcgtcagcaaattcctaagtagcagatgaccttcaagatgtgtgagaaggaagggacaggaatgattgtcaggattgtcagttccccagggaactctgcatttctgacttagggagggtagatgactcacccttccaagaacccatctgtctgtccgggcctgtggggctctggagaatagaatatggagtaccctggtttacaggcactgccacctccttatttcaggatgggttcagggatgtaggattggagttgggagatttcttagttctgctatggatgctttgtacttaggcaagttcaaaacctccctaagctttggcttctttactgggtaaagtagggttggaggcatttcaggctttccttcttctcacctgatgctatcactacacatctaggcattcacgtaatggaaacttacaaagttgctcaatacctctcttcatgtccccaaagagagcaagcaagtgtccccattatacttcttacagtgaggagccagagcttccaggtatgctaagccattgctccctgttccactgctgaatgcatgctggtgccttccagagtcacccctttggtctgattcacttagtgctgtggctccgagaagtggccctctctttcagccagcagcttggggtggggccagtagagtgggaaccacagtggctatatgagtcaatttgctcatattgtcatttgactcactgaccctgatggggaagatagtgttattcccacagtgtggtagtacacactggggcttatagggactgagcctactcaagggtatatggtgctgtgggtcagagctggggcatggcccagggattcagtgtgccttgactccccctgtaaatgttcctctcagaagccttcttggccttccagcccttggtttttgagacaaccagcagtcatttgttcgttcctgacattccttcctgtcccttccttccaggttctgtggacaatcacaatgggaatccaaggagggtctgtcctgttcgggctgctgctcgtcctggctgtcttctgccattcaggtgagtgctccagtctcaggacatggatctaggctgccttggccatgaactcccttcttaagcctcagtttcagccccagctgctcctccaggcctggctttggttctttt

SEQ ID NO: 6974 - DNA, 2300 bp, Homo sapien
cctaggtttctgtcttcatttatgaaaaaaattcaggaaaagcagtcactctttaaagatgaattcagatttgtgcacattaagttcaagatgtctgtggaacatataagtggagatgtccagcagtcagctggatatgaatatgaagatagggggagtggtcagggatggagacagacttttgaatcatctgcaaacatacatcccaaggtaaaagagtagatacactatagtctcccagggagcacacacagccatggttctcagtctaatcctgggacaccaaattattagtgggtaaaggaaaagaatctcaagaccgaatggtcaagaaaccattctagggaaccaaactaggagagagtggcatctcagaagccaagcgtgtcaaggaaggaatagctaacaggatgtgtgtaaggtatgtacacaaaagagctttggaatccatcttgggaaatatacagtattagctgttttaaggagacatgctttaaatatcaaagcaagtcatcctgatttaaaaaactcccacttgtatagaggaataccaggatttgagcaccaccaaatggaactcattccctgacatcccaaagccatcagaataacagtagaagcgtcaagacagttactatatgattttccctgcaagacattcagtaatctatgattccccctgcttaaattttatctcatgccttcttccctgaccagttcaacacaagcagccctgagatgtaatatcttctcaccctgaccctcaaagtgtgtctcatgctttctaacagaggccatcctcttggaggaagacttgtacttttggcctgtagccccaccctccctcctatggcgttcttacagtcagttctgcagtgagtgggacactttccaaatataatagcaaatggaaacttctaattacatctgcacataaaactaatgttccaaatggtggttgcggttctggtgagtgcttataattttttgttacctcagcatccatttttgaatatgtttaacttttaataacagaagcaagtctcagtcaccattgacagtttccagtactataccccacgcaaatggctctagctggtggccagagataaacatgcagtgatgtgataacagggcactactgcagcttcaaactctggttcaagttcctcccacctctgccttttcacctgcttgcttttaaatccaccagttagagctctccagaggaaacctaactggataaagttgctggcccaaaggtccgttcctcccttccctctccctgttctccctgatctccgtgtgtgtgtgtgtgtgtgtgtgtgtgtgtgtgtgtgtgtcctctaggcaagctgtgtaccacccagggtccgtaagtactaaaaactcttaaactttcacaccgctgtgttattgaaaccatgcctacaatccagtccctgaggcgaggccaccctgaagggacagactcatgcaggcggatcccctggtcttgctcttctgtccctgcctctggtggctgctggggaacagtagctaccagctaagttgatagagacactcgaagaggttcattcaaaacactggtccccgagcagcccagtaagcttttaaacgcataacattttgtttgggtctcaaacaagtcacaaggcacggatacggatgcggctgtggctgatggctatttggatgctgcccaagcctcgcagtaggaagcagcttcagactgcagcagggccgcatagcccgatagccaggccctggggcacccagggcaccagcaagacgcacagaaacgttttgaaaaacattttaatatacttaaaaaaaaagtaaaagggaaaatcagaagtctttggaagtttcctactgtttttatgtcccatagcaaatccgaggaggacgccccaaactttcagttccctggggttttgaaggtgctcattgggtcctggccacccggccttctcagaacctgggccaggaggctgagctccgcgcgggggtggagggagaggaggaggttcctgccgaggtgcggctgcgcggtgcgggagccgggagcctgggagggcaagggcatcctgaggggcggggccggggggcggagccttgcgggctggagcgaaagaatgcgggggctgagcgcagaagcggctcgaggctggaagaggatcttgggcgccgccaggtaagaaggcccgaaggcctgctggggtttgggtgagccgagccgaggtggcggcggcagtctgggcccgggcggagggtctgtgggggctacccccgtcctc

SEQ ID NO: 6975 - DNA, 2300 bp, Homo sapien
agcagagaaaccccgtttcaaaaaacaaactaacaaaaccataaaaagcatgtatttagtgctgcgcattgttttttctttttgcatcaggctctaatatggcttacatggcactgtgggatcctgtttttgtttaagagtttggtattttgttcactgtgaattttttttgcattaatttttatttttaaaaatattgcattaaaatgttatttatttgattattcagttttttggcacctcttcttaaatttgtgccccaagcaagtagctttcttgcctcaccttagttctggccctgacagtttggtagcttcatactttgtcttctgcattaggtcatagctgcaccaagtccaagtgcaataggacagcagaagcaaatgcagtgtacctgaaactcctaccagcttttggatttaaaacaggtggcccatctgaagtagaaaatggagacaaacataaatcaggatcaaatacctttacaagcatttgtctatgtaaaaaggtatggttcccttgtaaacagaaatgattattctgtcttcattcatccattcaacctgaatttaaactttctagttgttgaataacttgctaagccctgaaattagaaagatgagtcagactgagagtttacagtttgacgagagagacacagaacaagtacttgaaatccaattcaataaatgttcttctaagcatatgcataaacaatttggaagcacagagatgtaggcagagttttttgttgctgttgttctgttttgttggctgggtggcaggggttataactattaagcaaaaccataaatagaaggcattaatggtatgaagaatggaggaaatggatttttttggggcggggcatatcacttccactcttccaaataattgagagaaactttctccaggatatggaaatgtttggagaacttagtgactgatgcatgtataagcttggaaaattaacatttattgagtatctggccaggcactttacataaagcgttatcgccatccttagttcaccagaggaggggtggttttagagatgagggacagtctcagagaacttaggcgtaactacgccagcatttcactagtagtgaaataaatgacgggcgtgtgaagtccaggtctgtctggattccccaaagccccttacaccatactacctttggaaaagcaatggaaaagaagaaatcaggcaagtgatgtatggacccattatacttcccccactctcattttaatatcaccttggcaaagctgaagagcagacatcttcgtgcctccatcagttatgccctctgggagtctcagttcatcccttcacacgcgggatacttaactctgcgggatctaaaccctggccaaaataaattttaaagctggaaaaaatccacactgtaccctttgcattgccctaataggctgaaaatagccatgataaccaaattaagggacagcggctgagactcagactcactccttgtacacattttacttaggaaggcggggaggggcgtgaagttaagccctcaacaattatttccttaatttgggagaagggccttcagctggcgtccctggctgattctcagctctgctcttgctgagtggacaagtctcggagcggccctgctgtgtgcgggggacaagcggggtggggaaggctgagcggggaaaacgaggggttctcgggttggaaaacaaagagaaggaatggatttggggaccaagggcgtggaggagtgtcagattttgagcgaggcttcctgcatactgagtgtaaaatttcgcaggaggagttgggcagaccgaggcagatttggcaacaaaagggtcccgggctgggcaagtttacgaaccgggatgcgagaacagagctggagagatttgacgcggagcgcgaagaaagcgggctgaactcgcactgcgccgctggctcccggctagcgggcggggtctccagggagccgcacctcagcccaccctgagggcggggctggcccggcggttacataacaaacctgtgagagcggctgggggcggttcgggcgctggtgggggcggggcaggggcggggccagggcggggccagacctgcaccgggccaggcaagatggcggccatggagaccgagacggcgccgctgaccctagagtcgctgcccaccgatcccctgctcctcatcttatcctttttggactatcgggatctaatcaagtaatgggacgacacgcatggcaggggtgggggcatggggagaggaggcggtgaggcagggggaaagg

SEQ ID NO: 6976 - DNA, 2300 bp, Homo sapien
gatgggttagaatccaggtagtctgactccagagctactaccgcatactgcctcctcagattaaataattttcctaggacatgctaactgataagtaagagtctaaatcaaacccaggcagttgggttccaaaattccagcgtttaaccaccacattgactggttataagtaggtaaactgttcatcacaacctatatatttattttcatttctgttagaaatgaaagtagtgtggtaggttacatatttatcacatagtttaggcttgcctaaattctaagtattttcttttttaaattaaaaacaagggtctatcggaaaaaaaaaaacccaacttttttttttttttttttttttgagacagggtctcactctgttccccagactggggggcaatggtgcgatcatggctcactgcagcctcaacctcctgggctcaagcaatcctcccacctccgcctcccgagtagctaggatttcaggcaagcaccaccacgcccagctaattatttttattttttattttttgtagaaacggggtctcactgtgttgctcaggctagcctgggtctcccaaagtgctgggatcacaagcatgagccaccgagcacagccgaaaaagtctttttgtatactgaagtctccactaggacaaaaatttgctcttaaggcttcctttgggacacacacacacacacacacacacacacacacacacacacagcttttgattatacccattagggacccaagccttgggacacagggaccagaaaatgacaagagcatgcaggcagtagtaaactctggttatccttaaaatgggaacagaaatgtatgcctatgatccagactgatcatataaaaccatggatcctgaaagtacgttccctctttacaagccttaatgactggcatcacgcacaaataggcctttcagcttctgaacgcagatattttcaaggaactctgaggcccaggagagcctaagtttttctccacggaagggcaaactactagcctcccccgcttcccctctgcgttcctgcctctttctagaaggaggctgagagggggaagcctgaacccccaaatcaagtccgccttctttctctgtgcctgacccagggcaaaataatctctctgatcctgttcttgaccattgaaaaagcactttctctggtcgggatactactggcactttacatggggggcagtttaaccgcaggagtccgctttctgaaaggtgcagagggaggggattccgccaccagccgactgagaggagccccggccccgcgtggtccctcccagccaccctccctctgggattagctgccctggctctgctctaggcgtccccagcccgtgcagtcccggctggcgcaccaccatcgcctctgcagagcgcggccgcagcccggagcccgcagcccggagcccgcagcctggggcccgcagcccgtagcccgcagcccgcagagccgcgctgtccggggcatcccagtgcacggcgtccgtggacctgggacctcgaacctgggacgggcggaaaatccactgggaacacttgcatttctgtaggtgcttatttcacattcttgtcttttcttgcttgctcgagctgttcgtgggttactttctgccttagttaaaccaaaagggaaaggcggaagaggggaagccctgaagaatgatttagtggttgcccagcctcctttccaaggagaggtgttcgctgagcggctctccccgtccccgacactggcccctttaagaagccaagtcagtcctgatgctgctgtttgtattgctaatccccaggagccccgtttaaaaaaaaaaaaaaaaaaaggaagaaaaaaggggaggtggggggaccgggcagctgtctctttaaatgtgatttccttctattgtatttgaatcgtgatcaggaaaaaggaaatgaaaccagagacagagggaagctgagcgaaaatagaccttcccgagagaggaggaagcccggagagagacgcacggtcccctccccgcccctaggccgccgccccctctctgccctcggcggcgagcagcgcgccgcgacccgggccgaaggtgcgaggggctccgggcggccgggcgggcgcacaccatccccgcgggcggcgcggagccggcgacagcgcgcgagagggaccgggcggtggcggcggcgggaccgggatggaaggttaagtcctgagcagcagcagcagctgcagccgcctggagccaggctgcgcgccccggcccccgcctcggccgcggcgcgccc

SEQ ID NO: 6977 - DNA, 2300 bp, Homo sapien
tttcatcaaatttgttgccattctgggtgtttctccttctctccccgactttttctacttcagatcaaagaacttcccctttttcccacttttggatttgcgccctggaggacaacgcaaggttaacttccctcccacctcctcttgtaggcacacagggtgccccttagccagcgaaatctccgcgcccgagatcctctcacaatttcaggctggtgaattgtagtaggagacatggtttagtttgatgtggttaagtcagtcatcatggcatcttcgtaccctcagccccaaaccgctctcctactcatcaccctcactttcatttctttggattatctttcatcggcttaccaccagccttcacagcctcacccaaggctgaagcagggctagcagggtggtgcgtttccttccctggttgagctggtgactgctgtgggtaagcaggtccaatgtgaactcaattttacattgagaaagagaaagcaagagtgagtgggctgctaagactgttgcttcatggtttcccctaagccccagaaatagaaaggcagacttccgactggcagagcccgtatgctaaccaccagaccacactgccagataagaaaaatgttcgattgtgtcatacttccctcattggctccagtgtctgaaaatggccctgaatttcagagagtcttaccatgacccagggatttagagaggatcgaagagggaggacaaaggaatcaggcaccttctctctctcttttctggggtaaatttattttcaaccacaaaagtaaaggaaagaaaaagtcacaacagatgagttatgagctaactttctgatttgcacatgtaagagaaagaaatgaactggatatcattagacattgagaaagggagtctgcaagctagcaatgtatcttcggcctttttgatttacacgtgtttatttatgagtacctactgtgtgccaggcatgatgcttggtgctgccaattcaaagagaaataagacacctccttgcaaagtgagaaggcagaactagattcagattcacctagatttcaactcttgtgctcaggccaccaccaccaccatggaaacaattttgcttgactctcccggcgcagccgcggcaggcgtgtgtgttgtcagacactgcaggaagagtgatggcctgggtgttgacaggctcctaattggaaggtaggaggtgccaccagagatcagctataaaagatatctttggactggggtgggctgctaatgcttggaagagacttgtgggtgaggcccggtgagctgtcacctcggaattgggccttgcccagcagacagacatgcatgcgggggaggtagctgacagacaggggcgcatggggaagcagccattccagagaactgcaacagcagattgcaaaccaggacttcaggactcagagggggacaaggaaaggagagcctatagtggccccaaagcccagggtcagaggcagggccaggagagcagctgacaagagctttatggtaaggacaaaagagaagacagccggagtctccttttattcagctcataaagacccaacttctgtgcacttataactgttcagaccctgaggggttcaaaaaaagaaccgtgttaggagaattcaatatttaattaagagatgatcagatccgtgcaccgaaattattgctgggtaagacaatactgtgtgtgttacatagcattggaacttaggaaagctctttccttgtgttgtttaatttaatccactcaacaaccctgcaaagtgggtaccattgtccctgttttttatgaatgagggggtgaggtgctgagaagctgtgtacgttatttgagtttgtctggctagtcagtggctgagccaagttccaatccaggtcatgtgagcctctgaactttctgataaaacctgcagacccccttaactgggataatatagtcatgcattaagcaagaaggagaagtaaatacaggctgatggtgtaggggagaaattcaaagggagaaggcctaggagggagagggagctatgtgtgaacagaaccaaagatggcctctgggaattggaaggtctcttggaattcgtccaaactgaggatcacaagtctccacattctgagtaggaggatgagggtctgagttaggatttgggtcctgcagggcttgctaaggaatcccctgatggcctaggattccacgcagagcacatctggtgtgagagagctcgctgcaagggtgaaggctccgccctatcagatagacaaccaggccaccaaga

SEQ ID NO: 6978 - DNA, 2300 bp, Homo sapien
tgtaattacaggcatgcgccaccacacccagcaaatttttttgtatttttagtagagacaggatttgccatattggccaggctggtctcgaactcctgacctcaagtgatctgccagccttggcttcccaaagtgttggaattacaggcatgagccccttcacctggcccctttgtagttttaaaccagggattggcaaacactttttttgtaaaagaagagatagtattctaggttttgcacaccctactgtctgttgcacacccaagtactcaactctgctgtgctatggcagagaggcagtcatagaatggatgtgcatagatggattggatgtctcccaataaaactttagacattggtcaattccgaggaacaaaacagtgatttctgaaactttaatgtacacacaaatctcctgaagatcttgttaaaatgtagattcagttaagtctgctatgcagtccaagatagtagtgatagtggtagtgagagaggttgggctgaataaactttgagttgcaaggagctaaaggattatcatctccgtttctagcctctaggcctggcataattgctcagcgtagtgctaaggatggtttaggtgactaaattttgaaactatgactccccatctaatgcagcaaaagccaaagtccttaccgtggtctttcaggccctacaagaccagccccctttaatatgtttgacctcatctcctactctctgctcttgccactatggtttccgtgctgttccttgaacccaaaaagcacactccgtctcagatcttagtacttggtgtttcctctacctggaaaattcctcctccaaggtagctgcttagccttcttcctcacttccttcagtactagctcaaatgtcagtaaggctttccctgaccaccgttttttcttttctctaccatttcactatctgacatgtatttacttgtcttccccttacttagattgtaagctccatgtaaatatgttttgttcataatccctagcacttaagagttcccagcacacagtaaggtgcttaataaatatttgaatgaatatataacagactttgcagctaaccaggatatcttgaggtcggaggctgctgttgtttctccaggctccctcaggatgcactgttgccagtcagcgttactcattttattccctagggaacagtgggtttggtagaactctcttctaaatctctttttcatagaatttaaattataaattggtcatttactgttgtcacacaatattgcgttgctgaattttccactgattatattcattttatttcctcccagaacttggtttcttgtttttctgctcactgtccacacccactccaccccaaggctggaataattctcttggagcaaaaaaatcatctttttctttgtatttcattgaacgttctctttacagtgttaggtaaacctaaaaaaaaaggaaacaaaagtctaataattcgtaatactcaggcctactggatgtataacatcatagggtagctgaagactctttgtgaggccagagctttaggatttaaaaagccaccaaccatgaccgtgtccgacacgttctacagagaactcctaggttactgggtgattgtttggtggggaagcggcgagttgtctttttttcaaaagacgttttggggtatggagtttgctcgctctgcatacagaaggaattctagaagctgggatcgcaccacccaccccacgcaccccttacttgcagaaacctttgccccccaacccccacccccaccccaaataagggctcttcaaggggcagttgccagctccagagccagctgcttgacacctattgtccccgtttgggcgtcaaacgatttcgcctgaaggaccctagcgtcgattgctctcaaaactcaaggggcctttccttcggccttgccggggccatccccacctgcgtccaggaggcgccccacagcgccggggccgggggacggcggagaagctagcgggcggcctcttccgggcaggcgttcgcgccgggcagcccgagcggccgcgaaggcccccgctctccgcttctcccgcccctcgcgacccagagggctgctggctggctaagtccctcccgctcccggctctcgcctcactaggagcggctctcggtgcagcgggacagggcgaagcggcctgcgcccacggagcgcgcgacactgcccggaagggaccaccacccttgccccctcagctgcccactcgtgatttccagcggcctccgcgcgcgcacggtgagcgccac

SEQ ID NO: 6979 - DNA, 2300 bp, Homo sapien
ttcattttatttcctcccagaacttggtttcttgtttttctgctcactgtccacacccactccaccccaaggctggaataattctcttggagcaaaaaaatcatctttttctttgtatttcattgaacgttctctttacagtgttaggtaaacctaaaaaaaaaggaaacaaaagtctaataattcgtaatactcaggcctactggatgtataacatcatagggtagctgaagactctttgtgaggccagagctttaggatttaaaaagccaccaaccatgaccgtgtccgacacgttctacagagaactcctaggttactgggtgattgtttggtggggaagcggcgagttgtctttttttcaaaagacgttttggggtatggagtttgctcgctctgcatacagaaggaattctagaagctgggatcgcaccacccaccccacgcaccccttacttgcagaaacctttgccccccaacccccacccccaccccaaataagggctcttcaaggggcagttgccagctccagagccagctgcttgacacctattgtccccgtttgggcgtcaaacgatttcgcctgaaggaccctagcgtcgattgctctcaaaactcaaggggcctttccttcggccttgccggggccatccccacctgcgtccaggaggcgccccacagcgccggggccgggggacggcggagaagctagcgggcggcctcttccgggcaggcgttcgcgccgggcagcccgagcggccgcgaaggcccccgctctccgcttctcccgcccctcgcgacccagagggctgctggctggctaagtccctcccgctcccggctctcgcctcactaggagcggctctcggtgcagcgggacagggcgaagcggcctgcgcccacggagcgcgcgacactgcccggaagggaccaccacccttgccccctcagctgcccactcgtgatttccagcggcctccgcgcgcgcacggtgagcgccacccgggaccgagccgctgcaggggaagagggccgctgcgcccgggtgtcctttatctccggacccgctggagcttccgaggggcttgcccccaagtccccccaccccaccccggtcatttcccatgcccttctctgcccccaagccccgacctctctctttcctcccttctccggaagccggcaaaagccggccctccccggtagggaccgttgcagtggccgttggcggccggcgcggcgatgccccgcctccggcgcgagcctcggagcccccgggctggtaggccgagccggcggctccgcgggggaggggcgggtcggggggcggtgcgaggcccagccgggcgccccgctggcgggtcgcgcgcgcgcccgcgcactcttcctgccctcgaggcgcgccgcgccccctcccccacccgctcgcgtaggctaccgctcgctgcgcgttttgtcccgcgtctcgccccgtccgtctcctgactggccgctcttgtccttcctcccgctttttcttctctctccttgcggtctgaagatgccctcggccaccagccacagcgggagcggcagcaagtcgtccggaccgccaccgccgtcgggttcctccgggagtgaggcggccgcgggagccggggccgccgcgccggcttctcagcaccccgcaaccggcaccggcgctgtccagaccgaggccatgaagcagattctcggggtgatcgacaagaaacttcggaacctggagaagaaaaaggtgccaggagttggcggggaagggaggggtggctgcggccgggctctgcggcccctccgaccctggtcgctggagccttcgcttcttttcgtctcgggagcgttactaggtcccctcctcccaccccctggcccacacgccccgtctccacgttcagcgggagcttcgtgcccagaaaacgggctcttggaagaggcacttgtcacctgactcggacgcggcactgtaccccaggcctctttattactcttccgctgtgggtccggctttttggcctttaggagtgggacatgtgagggtgggggcctgtcgtcaggacttcactgtatggtgcccttctttccgtctctgaggcccgatttctctgacgagggcccaaaatgaagaggtccctgcgcggggggctccgggttcaaccgaccgcctcgtggagttggggcggcctgcgtcctgcagccttggggtctgtccgctcggttaccatgcactcgagacctgtcgagcgtcccctcttcttccgtaggagagaagtgtgtttagaatc

SEQ ID NO: 6980 - DNA, 2300 bp, Homo sapien
gtttagacataattctaaaatttagtgcagatttctccatcttagaagtacttgtggagggcttttataacgagacttgggtttatttaacgtcgagcttcaaaaatatatatatttttgcaatttttaggttttatattatacaaatttaaagagagatggtaatattaatttctcccttctttagcagttgtatctatttcttagccttatgcgtcttagaggtaacttgtttttttaacagtcaattttgtaagcaggaagaagcttttatttctttacttatgtctaggttcctttggtatcatccacaagtgaggggtacacagcatctcaacccttgtaccagccttctcatgctacagagcaacgaccacagaaggaaccaattgatcagattcaggcaagttctgttaccgggtcacatacatttgatgaggcacttactcatgaattgaacagatgtacattaccattaatataatgattcttctttttggacctactttgctttcatgaaatatttgagtttgttaatacatataagtttgagattaatttaccactttagtacatctgttcactttttgtttggctaagtttagtttaccgctaaagtgcatctattcactttgtgtttaggcaacaatctctttaaatacagaccagactacagcatcatcatcccttcctgctgcgtctcagcctcaagtatttcaggctgggacaagcaaacctttacatagcagtggaatcaatgtaaatgcagctccattccaatccatgcaaacggtaagcaaattaactaacattaattgcctagtatgtaatatgaatcatggtagattttcttttcttttttaaaggtcttcatttaactgtgcttgagtctgcatctttcattaactgtagggtatatttaattgaacataaactgattattccagagattaactgatactaacggatattctagagataaattttagccttatgagtgatgtgcctgtatcatcttaatttgtagttttacccttttgatttgattaacaaaagcttaaacattcagagaaatagactaatataacatccatataatcattacctagatttaatagttgccctgtttgcttaatcttttattttactgaagtattttgaagtttcagatgttatgctttaccttgattcttgagcaagcacctttagagaatttctagaaaataataataatactataatctgtggggtgcagctaaatcggtgctgagaggaaagttcataagattaaatattaaaataacttttgattaatatgttaataaaaatgaaaaaacattcaaccctgttaaagttcatagaacaaacttctgtaagtggtactgcatccaggagtttgtcttatttatttattttttgagacaaagtcttgctccgtcgcccaggctggagtgtagtggcgtgatctcagctcactgcaatatccgcctcctgggttcaagcgattctcatgcctcagcctttggagtagctgacactccaggcataagccaccatgcccagctaatttttgtatttttagtagagacggggtttcaccatgttggccaggctggtcttgaacttttggcttcagatgatctgcctgcctcagcctcccaaagtgctgggattacaggtgtgagccactgtgccaggccagagtttgtcttttaaaaagatttctcatatatgtaaaagcatttccaaggctgctgattgcatgtctttttattttttttaattccctacttccatttcacagcatattatactcccctttaagtactatatggtatatatgtctttttccacattgaatcacttggagggatttttgtatgtgtgtgtgatgtttttgtgtttgagacctctgtgatgtctttatttatgtctgaggtaaaaccaccattgagtttggccatgttataaaccagagaataaaaggatgaactaatcatttactttatttactaacaggtgttcaatatgaatgccccagttcctcctgttaatgaaccagaaactttaaaacagcaaaatcagtaccaggccagttataaccagagcttttctagtcagcctcaccaagtagaacaaacagagcttcagcaagaacagcttcaaacaggtacgaaatccagtgtcacctcattggctccttgctttccagcacagttattgacagtgttaggacagtttagacttcagagtggtggtgtccaagagtttctgttttagtagcagaccatatgaatttt

SEQ ID NO: 6981 - DNA, 2300 bp, Homo sapien
cgaggcgggtggatcacgaggtcaggagtttgagaccagcctggccaatatggtgaaatcccgtctctattaaaaataaaaaagtagccaggcgttgtggcatgcgcctgtagtctcagctatttgagaggctgaggcagaagaatcgcttgaacccgggaagtgaaggttgcagtgagcagagatcgcgccactgcattccagcctgggcgacagagcgagacttcgtctcacaaaaaaaaaaaaaaaaaaaaaaaaaaaaaaaaaaaaaaaaaggctgtattgtttggggtggggttggtggctcacttaataaagttaccatttaaagaacattcaatgcaatgaacaacatatatggaccaagagatggtaaggaggcttgttggagtggcccatgtgagaaatggattccaacttaaggtgcggatggggtggtggtagtgaatggattctatggattccctatctcactggtcactactcagtatcctttgctgatttctccaggtcttggatgtcagacttcatctctagctgtgttcttccctgggtgatctgatccaatcccatgattttgaatatgatcagcattttagtcctgaatatttctaggccccaaacctctcaaaactcatattcaacatcttgatatgaatttctcaatattccaagtcaactccttgattacccaacaccagttgttcattcatccagttgctcagagcaaatgttttgggtgccatcttcaatgtacttttataacctgcatctaatccttaagtgagtccacgtggttctaacttgaatatccagagttatcttatacttctaactactaccacaactaccatcctagcacaggtgactacaatagcttataattgttctcctttttctacttttgccttcctgtgatttagtttttgcataacaggaagccttttaagagggcaaagcagattttctcatttccctgtcccccacaaactccagtggtttctcatcatgactagaattaaattctaaatctggtccttcacttgcccactgctttggccacactgactgctttgccaggactcccccatcttggagcttttgtatgtacatctttggcacggggaagtttttcactcatattctcagggctcattctttctaaatttcaggtccttgttccatccagtgtcaccccgtcagaggccttcagtgttcgtttctaaaatagtatccttagtcactttactcactggatacttctgcttaatagcatttaaaacttaacctagaattaaccacgaggggcaggaacattttggacactatcccttgtgagcagaatagtgcgtgggcatattcacattttgctgaatgaactaaaaaatttcatgatggatgttggattaaatgggtagtgctgctgatgacattaaaagtgtatctggggaaggggtttggattcagacatttgcggtatccaggaggaaacatcaagcagttgataatgttttttgaagttcagcgatctgccccaaagtcaagaatgcaacactatgtataggttgtccctgtagtcatgttcttggagttcactggaagcccagggggagtaatttcatttgacgaccatatacaggcctaatgggagcctgcaaagtacagcggccgcagtcatgggtagattacaggattcccatctgtaagatcagtactgtgggggtggagggccaagcgaaaccaataaaataggtctgttggccgagtttcctcaacttaacggggatcggttaaattgaacacaaatcgttggatccgtcgcgtttcgcgtaaccaggctgacgctgaaaaccctggacctacgtgggcaggccctggggtgcggacatctattttgcccttcttagccgaggtactttagctgggatatgaagagtgaagaggcaaaccgcagccaacacccagctaccgcgagcagtgggactaaaatgcgcaaccgcagtggacatctaggcctcagctccgcttctggtggcttacgtcattactcagcgacagccttgaggaaggtcccttctcgctcgccatctctgcgactttaatgcgcttgcgcacgtgctgtctaccagttcctgagagggacgcgtgccgcggagccaggcttactacgtgacccggacaccaggcatacgctaggggcagtcagctgtgccttctctttcggagttgttccgtgctcccacgtgcttccccttctccactggctgggatcccccgggctcggggcgcaggtacccaac

SEQ ID NO: 6982 - DNA, 2300 bp, Homo sapien
ccgcagtgcctggctgcaggtctgggcattatacttagggtaatctgattccagatccttccacgttcttaaatccttcactgtgcacattcctttatactctttattcagcagtcacattcaggacttggttttgtttgccagtgcacctaaaatggtgcctgccacatagatgttatgtgtagatagacgaatgagtgagcgaaaaataatcatctccttcaaggccttccccatccaggccttccatgacagcttcagcccatagtaatctcagcccttccttcatctgaccggtccctcagtatagctattttttttttttttacatctaattttacctgtgttcttgttcctcatctcattctcttaaataccttcttcaagaagaatgcaagcttgaagtcaagggccttgtggtactacttctggggctcccacagtagctagagcaaaaggcagcccccattaattagttgttgattgatttttgcgggatctttatgtggccggcaacacaaggtttacaagttgggaagattggcgaactgggaagagctcaggctttggagtcaggaagacttgagtgtgaattctgtctgtcgtttttctgcctcgggatatttgaattctttatactttctcctttacgtataaattggggtccttgacagtgacttagtgttttatagtaagacatatgctaaaatctgtttggattggaaggttagaagggacagttaaggtatggtaagtttcagtaaatgagctttatgtttataatgcagtaggtaccagagtttctaagtagcatgtcacttttacatctaagtagcatgttacttttacagtgatatttctgatggtttttttgatgtatttattgggatgatgcagtattttactgtaggtaatcacagaacttttttttttttttttttgagacggagtctcactctgtcgcctaggctggagtgcaatggcacaccatctcggctcactgcaacttccgcctaccggattcaagtgattctcttgcctcagcctctcctgcagctccactaccactcccggctaagttttgtatttttagtagagacggggtttcgccatactcttgaattcctgacctcaggtgatccacccgcctcggcctcccaaagtgctgggcttacaggcatgaaccaccactcccggcgagaacttttgaggtctgtctgtacaaaggcttcaatatcgttttccctaaaatgaggaaacagttggacacattacatcatggaattattcattgatggttattgatttccctgactttattagtaacacgtgaattttttaagattccacaaaaacaaaagaacaaaataaaagtcccaccatccagaagtagctactttatactttggtatttccttccagtcttttttatttttccctctgttatgtgtatgcataagaaatgttatcatactttattctgtcatgatcttgtcataagcatctatatccatatccttagttgttaaaaatgcttggcccagcatggtggctcacacctgtaatcccagccctttgggaggctgaggtgggcagattgcgaggtcaagagatcgagaccatcctggccaacatatgcgcctgtagtcccagctacctgggaggttgaggcaggaggattgcttgaacccaggaagcagaggttgcagtgagccgagatcatgccattgcactccagcctggcgacagagtgagactccgtctcaaaaacaaacaatgctttggatatttggatatctccttatgtattttagtcattcttctacttttttgaatatacaagtttctggcttttaaaaaatatttaatagaggtgaattacaggctttccaggctgagggaaggttttctcacctcccaagcctaaggtttcctgagtttaaaactagaggctgatgtcttcctgtggagctcgtagagggttaagtaagacaatacttatagatatgcctagcacagtcccaggccccacaaaaggcagccagctaatgttccttagacaatctagtgcgcatggccagttgtatttctttctcttttagtaataatttttcaccatgcatcggaaaaaggtggataaccgaatccggattctcattgagaatggagtagctgagcggcaaagatctctctttgttgtagttggggatcgaggaaaagatcaggtatggcctggtaaatgcttcctgaattactttttatcttgtccaaagaatcagcatgtttaagcactctgctgt

SEQ ID NO: 6983 - DNA, 2300 bp, Homo sapien
tacaaggtaactgcagctagcccttgtgtgaatggtagcagggagcttcagcatttggcagtccccttttacttgatttgcatattttattacccaatggcttaggtgactgttccattgggacattgatgagttccactgatcttgctgtgtgtaggtatagagcatgtagctccatgcagtaacgggacagggtggaaagctgtgtccatttttaaaggagtgctttcatttcttgcctgcctactaaactgataggatgaggtgacattgcagttgtggcccggtggtgcagtttgacctgagaccagctttatagctctgggctacttttatggaacagtgaatttgagggtttagaatatctgagactcttaaaaacaaaagggttggttaaaaaggatactttttgaatgtctagatagtatttttatgaacagcttttaatggaaggcttgaagagttggtgttagaagtggtgacagtttttcctgaaatagcagcctcttatctgtaaaaagttcacttcctagctgtgaaataagtagtgctaaataaattctcttcttctgtccagcctcagtgctcggggtgagaggacagtaggcatttgaggctaagttccacttaacctgttatgaagagtctcaggcttgccaaaatactagaaaggtgctttgctggacttctgctcctcacttggctttggagaaggccatactgcagtcatcctgtggttctgaatcgaaccttttgcgtaaagggcaagaggaagagtgcttctcactgacccgtgtttggcttccacagaactctcccaatgatctccagatgctctccgatgcacctgctcaccatctcttctgccttctgcctcccgtgccccccacccagaatgcccttccagaagtgcttgctgttatccaggtataggagcagaggcgtccttgtggcagtgatttggggaaccactgaggcatcaggaattagtggcttaataactgcattgtgggagttttgaaactgtggagtcctggtctggaaccaaggggctgggtctgctgagacaggtgactagggtgcactggaagaggttagcgccactagacacccaaagctccactgttgacggacggggaaaagccagaaccgaccgctctcttattttgactcacagcttcttccacaaacagacttgtttgttttctccctttattacaaaagcaatacatggtgcattttgaattagaggctacagattggggaacaaatttttaatgcctagcatggatgtatttatgcatttctatatcacttttccttttcatatacatagtaatctgcttttatttttaggcagtgtataaaacactcataatctacataagttttaaagctgtgtagtatttcattatatacatgtaccatgatttgttcaaccattcacctgttagacattttagttattttgaacttgtgctgttctgtacagagcctcatgagcatcctgtgtcttgatggccttcacacacgcacagcatacatagagactctcttctaatgtggcttttactttttgggtcaggaggctgtcagtcttctgccctgtaacatggggcctggtaattaagctcctgttaagaatggatgtgtcaggccaggcgccatggctcacgcctgtaatcccagcactttgggaggccgaggcgggcggatcacaaggtcagaagatcaagaccatcctggctaacacggtgaaaccccttctctactaaaaaaaaaaaaaaaaatacaaaaaataagccgggtgtggtggtaggcacctgtagtcccagctactcgggaggctgaggcaggaaaatggcatgaacccaggaggcagagcttgcagtgagccgagatagcaccactgcactccagcctgggcgacagagtgagactccatctcaaaagagcggggggaatggatgtgtcagtgtcagggttaaacctgaacatgggggtggaaacaactggcctagttcgagaaacaagctatattctgtgagtgggctctgtatcagagttggcctttctgcctgcactgtcctgcttcccccacaggtgtgccttgaaggggagatttctcgccagtccatcttgaacagtctgtctcgaggcaagaaggcttcaggggacctgattccatggacagtgtcagaacaggtgacgggctttccctggtgtgtctgagggaagctggtggtgtccaaagatgtctgtgttgctaagttactggtttgtgtctcccacacagttcc

SEQ ID NO: 6984 - DNA, 2300 bp, Homo sapien
cctctctccaagcctcaactcccacctctgtggctttggtgctaatgatccttatctaagaatgaggtgacatcacctgaagtacaaggcgtagtggccaccgtgagcacttggtggatgacagcaccgtcactgtcatcacaaggccacaaacccccagggccgggccaagacagcagtgagtcagcctcagtgttcttcaccgtaaaacagagacgtcactcccacctgcagtcaataacccaaggatactaacacaccacactactgtcaatgtgtcgctggggaatgccgtcagttctttgatccacagtgaggttggggtaagaagctgtctctctaattaccagggacaggactagtttatgtcatgaacttcccacagcaatgttaagttacagccccactgacacatgctggggaactgtaaaacagtcattatgtgcctggggatgtgcagcggctttccagtgctctgtgtgctggagagcccctcgtgataggaccgggttcgtttcaagcttccgtgcagacaaggaggcctgtgtgtccttgagtgcctggcatattctctggccatccaagccctcctggccacccctccacaactaatgagacctctctagcaagtaattcttgagcccactaagcaacaaggctactttgggtgctgggcccatacttccaaatccccaggctgggcggtcaactttcagagcttgagttccctgcatttgggccgaagccattcctccacctcatctcatgagaacctgaaactccactctgacctgccagcaagacctattagaatgaattaaagctttcattctatggccatcctgagagggccactccatgcccaggaagggggcaggcgggagggggcgggcggggtgctctgcagacagcgggggcatcccgagagagtctgcccagaaaaggctgtggtctgtgccgggagcgctcagctgtggtgcgtgactgcctgcccttccctgcctggaccaggagtcccctggaagctgcacatctggatcgagtctctgaggacctcgttctcgcagtcgcggtactcggtggtgcagagcctcctgcgggacttcagctccatcagagaggaggagtacaacgaggagctggtgaccgagggcttgcagctcatgttcgacatcctcaagaccagcaaagtaagtgtggccagtggccagttcccaagcccacggcccagactcagaccacgggacacacagatggacacacaggcagacacgtggacagacacagggaccccctcacccaacgcacacacactcacacgcctgccctcagcacccagggacccccccacccaacacacacacacgcccgcccccagcacccaggcccccccccccactcaacacacacatacacacacacacgcgcgcgcgtgcacgctcgcccccagcacccaggaacccccccacccaacacacacacacacagcacccagacttagacttgcgctgcctggctgtagagggcaggggccatgggctggaacctgaccaaaaaagccatttcgggaatcactgatgaaggaacaggcatctcttgccaagccacatccagcaggaacaaaagatagcggctgcactactcctggcctggacttttgaaattagcctgacgtatctgcatctgtgaacagccagccacagcgggcagctcacaggccctctctcctctccccacagaacgactccgtcatccagcaactggctaccatcttcacccactgctatggcagcagtcccatccccagcatcccagagatccggaagaccctgccggccaggctaggtgaaggcgcgccccctgcgccctgcatcaccacacgtcctccccctcttccctttcctgcttcctccccactttgtcatctttctccatttccaagcgccaaggccccagcctcagtttctctgttcctcacctctgtgtcccacccccaaccccagacacgcacctcacagcacactcaagcaaaccccagcaggggactcctcagccatatccctctgtctccccgcttttcacagatccacactttttgaacaataaggagatgtcagatgtgaccttcctggtggaaggaaagctgttttatgcacataaagtcctgctggtgacagcttctaacaggtaggcagcctcagataacaaactcccagcccaggggcacagaagcaccttgtttcagattccaggtgacagagagtgactcgctggggctgtaccctgcagcctctgcccct

SEQ ID NO: 6985 - DNA, 2300 bp, Homo sapien
tatgggtttattggtatgtaaccccatcctaagtcaaggagcatttatatttgtttgccactttttaaaataaaagcattctttgccctcaaggagagaagaaacttttagaactctggagatgacccgagcttttggagacctgagataggggttccgagggcagcccaggctgactccctggaggtggcttacttcctagccaaggagagagaatggacatcttttccctggcgggagcacttagctgcatgtcaaggggagagaccacagtgaccgcacaggcgggacgctccaagagccccgagggagttggggtggctggaggcctggccgcctgcccctggctgcctgcccgctccctggcttaatttgtaaggaaggacaagagtggcatcgggaagggctgggaacaggcaggagccgggaggctgacttttgggctgtcatcagagagaacagcatgagtgagggacagggctccagggctgccttgttcctgtgatggagcagggaaagagctccgtccattctgggcagagcaggtgggtgtcccacgaagtcatgaagccacaggctgccatccgggcccctcggtggcggggaggtctgttggacggcgaagtggtctcctgagggggctccaacacggagccttgccagagctggcagaggacagaaacgcgtccccgccccccagctgaatctgagccgctcgccgagggcaggggcgggcgcggcctgagccgcagtcagggcccagcacaggctgtgcacatggcgtcccctggtggcacagagcgggcctcatgagcggcgccccgggagtttgcagctctaagcctgccgccgcctttccctgcttttgtgggctcttagtgatactcggacccgctaggaccattcctccctgtgggacttgaagccgctactctttttctttcttttttttttttttttttttttttttgagacggagtctcgccctgtcgcccaggctggagggcagtggcgcgatctcagctcactgcaagctccgcctcccgggttcacgccattctcctgcctcagcctccagagtagctgggactacaggcgcccgccaccaagcccggcttattttttgtattttttaacagagactgtgttagccgggatgatctcgatctcctgacctcgtgatccacccaccttggccgcccaaagtgctgaggttacaggcgtgagccaccgagcccggccgaggccactactcttttctgagcaccaaactgggggcaacctggcctggcacacgaagtggtgtcagcccacctcagtctaggtgccagatgaggaaggagtggtcattaatgttgtacaacagcctaatatgcatcatcccatttggcctcatgacagcctccataaggaggtatcacacgtgtgctacagatggagaaccagactcgagtgtgcttgtcggaggggatggtgacctgaccctgctggtggcagccctgggtttggacctgggtctgtgagactcttagctgtgcagcctctcccctctgcatagaagaacacttggcgaccctgactgaactctttggagggggaaaggtccccaattccacacactggggaactgctccttccctgggccacctgagggccctcaggttctgctaatggcccatgatggaaattccttctgtgcattgcaggtagtcggggtctctgtgagcagaaagagcaggtcccttgcaaggggtgatcagccttggttgccacttgtgagcatgtgtgtgcttaaggggtcccctgctgcccttcagggagcactctctctaggcctgaccctctgctgcccagcagggagccccccaccctaggactgaccctctctctgctgccccacaagaagcaccctcccaggcctgaccctctctctgctgccctgcagggaccccaccccaggcctgaccctctctctgctgccccacaggcccttcatgctgctgccgcccctcatggagtggatgcgcgtggccatcacctacgcagagcaccgccgcagcctcaccgtggacagcggcgacatccggcaggcagcccggctgctgctgcctggtctggactgtgaacctcggcagctcaagtatgaaccagggaggagggagggccccggcatccatgacctgcccccagcggctcccctctgctcgcttcttccccagatggctgggcgggggtcagagagcaggggctgcagcacatttgagctgttctaagggtgtcctctgcaaaggccaagcctg

SEQ ID NO: 6986 - DNA, 2300 bp, Homo sapien
aaaggccattaatttaagaaggaaagagacaaaccagacatttctagttcatatccaactcacggcccaaggtcagaactgtgtaaaatgcaacacaaaggagccattcaggagtgggggaggctgacttggggagagcgaatgcacaatccccgccttgagcctgcggttccactggagggggcacaggtccgtttgcgcacgtgcgtgtgagtagccacagggcagcggcgggacatgcctgcaccgggcatgggactgctgaaccaacagcgctctggcggaccgtttgggacacccgcccggaggcaggttggcactggcgctgcctggaggtcagccactcattgtaccccggaggaactgggtcccgcgggggcatacggctcgcccaccggcacgcgttaggaggcgaacacctgcatccagctaggtgttccgagctcagcccagggcgagggactgctctgccaccttcttctcattcttcctgtaagaacactgtctatctcggacaaaaaggacccacctgacagcaagtggtatcgtcacacagaggtaacagggaagtcacggatcctcttgagaatctgacaaaagttggtgccccttccccatagtggcactcagaaaactgcaggtgaaaccacaaatgggcggaggcactcacaggcttcctggggcccgtccattgatcagataccaggttaagaaattctgtccttattggagcctagacggcagcgcaaaggaaccagacggacttggaaagagaggcagggactccctcctccctccaaacacagccagcgtttcatctcggattgcgggaggggcctggcggaaggtggaggagaggtggagcgcctggatggggccctccccattctcctggccccaaccccaggacgcctggctgcggagggctcgaaagcgagcagcgaacgcccaaagcctgggtggcgggaaggtggcagcgccctgtagcttttcctttgcatttttctttaaatcgtgagctccggagctatcgtttcgaccgctgctttccggtctccacctccacctcccagttggctggctcgcccttcccccacccccccatcccccccatccccccccatccccacccccatcccagccgcgtgcccgaccctcggcctccagccccgcctccttcgccgcggggtttaacccgaggcagagtgaaatctgcatagtgaccgccccctcggagatcattggtgcagccccgcccatcgcggccggtgattggtaagccgcccggggttatttgcatgtcggacgcagccgggtacccagctgtgctgccggccggcgcagcgcagaagtttgcagagcgctttctcgccggctggtcccggactcgcgctgcgccctgcgccctgcgccgccgcctcctccttctgccgccgccgccctgttctcccgggattccttctctgtggaggactgactctctgcttgtgggaattagaggtggacaagggggagtgccggggggtagcgacggggttctttccagtggcagctgcgagtcgggacgccgggagcgtggggctcctgctggccacggatctcggccaccttcccgcggcctccgggcaggcaatgcggccgccgagccccgcgacgcagagaggaaggagggtggcccggagggcctagagcttgtttctgcccacttgggaaagagggcatggagttgtgagtgcccctcgctcggcgacgccgccctcggcaggctccccatggccgggacgtacagctcgactctgaagacgctggaggacttgaccttggactccgggtatggggccggggactcgtgccgctcgctcagcctctcgtcctccaagtccaactcgcaggcgctcaactcttcggcgcagcagcaccgcggggcggcctggtggtgctactccggctccatgaacagccgccacaacagctgggacacggtgaacacggtgctgcccgaggaccccgaagtggccgacctcttctcgcgctgtccgcggctccccgagctggaggagttcccctggaccgaaggagacgtggcccgggtgctccgcaaaggcgctggcggccggcggctgccccagttctccgccgaggcggtgaggcgcctggccgggctgctccgcagggcactgatccgcgtggcccgcgaggcgcagcgcctgagcgtgctgcacgccaagtgcacccgctttgaggtgcagagcgccgtgcgcctggtgcacagctgggcgctggccgagagctgcgcgctg

SEQ ID NO: 6987 - DNA, 2300 bp, Homo sapien
ttaatttttttgagatgaagcctcactctgtcacccaggctggagtgcagtggcacaatcttggctcactgcaacctccgcctcttgggttcaagtgattctctcgcctcagccacctgagtagctgagactacaggcgtgtgccaccacgcccagctaatttttgtatttttagcagaggtggggttttaccatgttggccagactggtctcgaacttctggccacaagtgatccgcctgcctcggcctcccaaggtgctgggattacaggcgtgagcccccgcacccagcctcctatgtaacattataaatttattgtcattacttgtaagcctgccctttattttaaaatacaagatatgacaagatcagaaaccagtcttgtttctccatttctttctctagaaataattctttaggaattcaaatccatagtaacaaaaacaaaggaaaaaaaaacatgcttttttttatataatgaataaaggttaagaaatgactccaggtctcttatttattttgttgatatttgtgttggttagttaagaagatgatttgctcgattatttcaacatttatttattcaacaaactgtggactttggagatgaacagctgaagctagaatcctgactatcccttaatagctgtgtaactttgggcaagttatttaacctccctatacctctgtttcctaatctgtaaaatgaagataatattagtatctaactcatagggttgttgggagggttaactaagcaaatatacaaaaagctgagaatagtccctggtatatagtaagtgctcaataaattatggatgggaggatcctgacccacatggagtttacagtcttggcagtatggatcgggcaggtagaaaaagacaccaaattacacagccaacagcatctttataattgtttttaatataggaaaagtatagggtgctaaagatcaatttgtggctttcttttccaatgaactgctaaagttccacttttatgcccaagattcttatcatacttttgtaagatcaagaacaacatgtgaagtttccactattatatatccacccattatatgtagttgtactggaaaaaattaaaagctgataacttttaatttgaagatgatggtatatactatgtatatatattaaggtgcttaaagataaatcctagcacctgaggaggtgtagaaatcattcaaactctttgattacaatgacaaactagtcagtaacttactaaatattgtactatatattactaagtattttactcttcaacatagctttttaaagacacaaagcttttcaaaattcctgcttacctgggggtaaaatttggggaagcagatttctccagtgtttaaagaagccaatttggcagtgtaccagagttgaatacatttttcccatcacaagggaatacatttttcccatctaagttaagttgtttttctctggtaaaggaggaaatcaacacccatctgtacggagataaacgtttcagagtgtttttatattaaataattagtatactagtctagtaagtgataatccacgaataagttaagaagagctaagaaagaaaaagaaaagcatccatccatcctttggttgcaaataatacttacattagcgtatggcaaaatttaattttgtacagagtaatttaacccaggattgctgactttttaagagctgagaaagcatagctatggagcgcaaggccccacccagcagggtctaagtattccgtctgcaaaactggcaggccaccaacggccgcgtcccagggcggcctgaaggatgctgataaccgggagccccgccctgggttcggctatcccgggcaccccgggccggcggggcgaggctctccaattgctgggccagagcgggacccttcctttccgcaccctcctgggtatctccggtcttcaggcctccttcggagagccctgctccgagcccattgggcttccaatcttggcctgcctagcgccgagcagccaatcagaaggcagtcctcccgagggggcgggacgagggggtggtgctgattggctgagcctgaagtcgccacggactcggggcaacaggcagatttgcctgctgagggtggagacccacgagccgaggcctcctgcagtgttctgcacagcaaaccgcacgctatggctgacagccgggatcccgccagcgaccagatgcagcactggaaggagcagcgggccgcgcaggtacactctgtgctccccgagcgggcccgaaggtccgtttagaaagcgggg

SEQ ID NO: 6988 - DNA, 2300 bp, Homo sapien
ctcttagtgacatccaaaagccctattttcttctatcctgctttcttctttatctgaacaatttaatgtaggtatatcaaacaggaaaactatcacctctttttatattcataacttggatctataatatttgacaaggaaaaattttatgaaacagttgacccattggcttgtaattgccaaaagggtcaatgtagtattacttagaataagactaagtggttgtatctaggacagccagtctagttggtagccttggagttatgccagcctgaactcaaatttctactctcctagataattgtggccttgggcatagtattaaaagttctttgagctccagttcttttcactgtgaagttggcataatattaccagctatacaagtcctggaaagattggattgcttgtgggtcttttatcctagggccctaaggtagcctgagatctacatggattcatcagtctggattattctgacctaagattattcttttctaaacctaaaggattcagttaaaatcagaaaggtattgcagtgttattgtactacttaatatattagctctttgggcgatctgtacatggtgaccttcattgttttaatcctgaaggtggctttacttcttgttcagtagtaagagttcaaaccttttcactgatgagacagttgggatttctgtggtagaaatagaccagcgttcagagttgatttttgctaaggaaatctttctgcggcacttggcttgttgggaggtctttgagaataagatcacatggtcagtccatcaaagaacagtatgatatgataacaggagcacttatgaagtgacacagcttctctgggttttaatgtcttgcttggaaagtcagaatattaattttgcctgctcatagtcagagaactagttccaggtggctgtactgaagttcttttcaactctatgagctatgattctatgatttattaaaaaaaaaaaaaaaaggaataggacaggggtgaagggatactggccgagcacagtctcagtaattgatttgagctgtcatgaaatggaattaaaacattacttcatgataaaaggcaagtagtcctttaattttattaatcttttgcctacttttaagtatattttgatttttctgatttggaaagtaacatgagtgtaaaaattcaaataatagaatacataaagggaaagataggactgattttaaatatgaaatgtgtagatgggattcccttgacatttaaaagtattgggataatcaagtagaatttcttgttgataaattcattagtatcagatttgaacaatagaagtattgttgtaaagaaagttcattctttgggcagtgttactcataatccttcaatgaattactgatgaaattttgataactttgacaataagtttccattggagcttctttctttcattttgtagactgaccagggcatcaaaaacctttctgttgaagatgcggcgagactttcccaggaagatcctgactatggcatccgggatctttttaacgccattgccacaggaaagtacccctcctggactttttacatccaggtcatgacatttaatcaggcagaaacttttccatttaatccattcgatctcaccaaggtgagtcagtaaacaactatattgttttcttttttaagtctcttcttacctaattagaaaaaaaatctagtcaaacaattataataatggggaagtcatatacaaaatacagagggtaccacttcagagtgtcctaagctgtgaatgagtgcttaccagcatcttacttccacgttcctgtttgtcatttcattgagtatgtgtatgtggcttcatatattgttattaacagggaacagattatgaaaagctgatgtactttttcctggggaaactgtcagtatttaccacttactattgtgaaagatttaactaaggcactcatcttaaattcttatgttttattggatttaaaaattattttcattggcttgattgtatttgaaatctggtatttttgtgggtagctttgatttccttcagttgattgcctggtaattgtgaatatgacatcattttcaggtttggcctcacaaggactaccctctcatcccagttggtaaactggtcttaaaccggaatccagttaattactttgctgaggttgaacagatagccttcgacccaagcaacatgccacctggcattgaggccagtcctgacaaaatgcttcaggtgagcctggtggattgagatgttctgaggcaggtgtccatgtga

SEQ ID NO: 6989 - DNA, 2300 bp, Homo sapien
tgaccttaggctatttgaaatgatgataagagggagtcattcagccaaaagcaaaatattgacagaacactgggactggattaagtctgttggtatcagtgatttggaacaaagttattgcttaagttgccctattcaatttggtttttattttgcctcatagaattagggatataaaaatacttttaaggttcaaggccaatgataaattcaatggaagaaaaattgctcatagaaaaggagtatgaataatgagaatagttcaataattagatattaagattaatgcagaatttatcataaagcttttgtttgagcattaactgaaagaaatttcaagatgcttgccatctttgccttgattaacatggaacataatttaatcttagattgattacctttggcattgtagggctttcattttgaaccacagattttttgttattgttgtttatatctagaaagtctcagagctcaaagtgtttctgagataattcagaaggcagcatgggagtgggcggtactttttttttttttttttttttttttctgatcttgctttgttgcccaggctggattgcagtgacacgattgcagctcactgctgcctcaatcccctgggccaagcagtcctcccacttcagcctgttggagtagctgggactacaggcacatgccaccatgctcggctaatgttttaatttttttttttgtagagacaggtctcgctgtgttgcccaggctggtctcaaactcctgggcccaagcgatcctctcaccttggccttccagagtgctgggattataataggcatgggccactgtgcccagttggaagtgcttatttgaagaatttcccatgctgttggttttgtagaaatgtgttgctttttgtaaagagcaaatgattggttccttccctggagtgggggaatgaggaggaatagaattaattcaatatttcagttagttaacgttctagcacatttattttataatgcaatacttccttgggaataggaagtaatactgtataagacaagacactaacttgttatgcagaaggaaaaaaaaaagatattattaccaaaaacagatgtgaagatttatggttggccagagggcctgggaaattcagaactgttcagttagggagaactcgtttcataagagtagaggcttcactcttaagtagcgggaaaggcagaattttgtggtaaccatgtacagagtgctttgtacttcaaatttcagaatgaagtttacagcccattcctatgttatatgttactgcccctagtcagtgtctattgtatttattactgcagggccgcctttttgcctatcctgacactcaccgccatcgcctgggacccaattatcttcatatacctgtgaactgtccctaccgtgctcgagtggccaactaccagcgtgacggcccgatgtgcatgcaggacaatcagggtaggcctaaagacgttgggctccccctgcgtgggcagagggcacgtggagcagatgggcgggaggccaggccagtggctctcaagctggccccgcaggacctcctgcttggtaaaggtgctccccaggtgctgctaactgggcgcttttttgcccagcagtgaagatttaggctgcctgaggactctccatgctttttatctattttatatattttattgagcatttccacctcagatgttacttgtatccagtagttaaaagcagggagaaagatctttcacactggctagagtacagtaacatccagcttgggagttaggttttgaagacacttcaccaaaatggacaattccttaactcactgtgaaatcaccaagacttagacccttggaagtgcgaaagccaagagttggagtcttctgtttctctttgcagttctgctgtggccctggaggagcaggtctagctagaatttggaggggagctagaattagcagggaaggctggggagaagagagtaggggaggcagagcaagtcaaaggattcccctcccttcattttttcctaagtgaataaagttaggtgaatcaacttaccactttttgttttttggaactcatttatcaaacttaggatctttttcttttaactactttttttttggtgtcgtatacaaacagcctctggttctaattactttttctaataagtcaagcagaatgcttgattaaagttttttccttttactattccacagtttaatatagatcttagttattttcttttcccatttaggacacgtgttttagtaatatagactgcatgcatt

SEQ ID NO: 6990 - DNA, 2300 bp, Homo sapien
tgagaaccatttccccccctccaaggagccgtgtcacactgtatgtcaccgtcatcaaaggggctgtgcgtaaacctgaaaaaccaaacggacctgtctgtaggtgtcacttatatcacaaggctacaggtgtctttatttccactgcacgctggtgctgggagcgcctgccttctcttgccttgaaagcctcctctttggacctagccaccgctgccctcacgtaagcgccttttctttgcttttttggatgaatcgtaaggggtgtcagggctcagaggctcggcctggggcctgggtctgctcgtccatctccagctccagggccggcacctgcgctgggtgcagtcccagggcctccgggagctgtttgacacggatgtgacggcttgcctcagagagacctgcttgcctccgcaggccgtgtggccaccagccctcctcacagccaccactccctctggatcccttagctgaaccaaggggaattaagagaacgcgcccaggcgctcagttctctatcctccctaaagcttctttaggaagggaagctggattttactcagaaaaatattcagcttcaaggaaagccccccacctacccttctcccctgactgaattcctttccccaccggcctgcccactgtcccccaccccctcgatacagagaactcccttattatagtttggggcattttcaggaatttgtacaaaacagttttaaaagaaacccatttgccctctgacatctccccagaagagaatgcttccagaaaagcaatggttagcgtttttccactgtgttctcaggccttgtcagactctgcagtgtgtggggtttctgtggggttgccccctgctgacagcgacaggtagcacaagctccctcctcaggctgaagccgggcctgcgtgtggatgccttttgtacgcccgaaagtgtgtcagacatcactaggtgcaatcgcttcatgttacagatgaggaaactgaggccagaaaggctagatgacttagggaggcagctctgtggttcagtctagtccagagacccagggaaaggggtggtttgcccatccgagtgaacgcttgattctgttgtcttcgtgttctctgcaatactgtttttcataatctaaggtattctcgggccggagttttcagtttggtcatctccctttttcagaagtcaccagagtggcaaatttttagatacattgttgatggctgatttttccctctaaaacaggattgaatatatgtattatgccccgtcctttgcatatatcggattgcatgatttaaaaaaaaaaaaatccccattttagagatgaggaaaccgtagttcgaagaggggcatgaatatttatataccacatctatatgaaaaaaagcttaagaatttcagcagtctgggtagtaagaaatgtgccccacgttcgcagcagcagaggtaggatttaacccctgatatatgtaatccaaaactggtaagctttgcatcgaagcctacagcaaactacatggcatacctttttggatcttcgctgcaccttcagaaaaacagctacaaacaaacaaacacgcaaactccctaagcgagctaaagaaaaatgaggaatcacttgacaagaggtcagcaaattggttctcacagttgctagggttcctctcagaagaacaaaccctcaagcacccaaccctcaatctttctttagcagtaagtgttgaaatactccactgggttctcctcagtgggccccttcttagggaggtccaagggctgggaaattgaccctcccttgctcacaagtcttgggacggagtggacatttgggtatcactgaggctttaaggaaggaaaaccgattttcttcccaatgataccactcagagggtggggttgaggaagcccaatcttggccacttttttctatattttgcaccctatggcctagttctgcccagtgatgatttggcccgtaaacagccaatgtgtagatgcttaattgggccaatttttggtcacatgcccagagtgaagttgatgatcaccaccagagtcaggaaggaattttcctcctctggcaaactggccaaggctgagtggtttgctccttcccctctctctgggaggctgagcaggggtgccgggttgctcaggccatgggagccacacctgttattgctgcctctgatttgtgtgacactgagaagcccacaggcctgtccctccaactcggtggaccctctctgtgtgcatttggtgtgtgagccagctctgagaagggttcagaagc

SEQ ID NO: 6991 - DNA, 2300 bp, Homo sapien
ccattccaatcaaatttaagtttaaagtgatagttacacttaattagagtcaaattcttcttttattttgggtttatcttaatcatcccttttatccactgatccagaagcctgcaatttcacacacgggcacccagaaatgctatattattcatttgggaccgtgagacaaacagagttcatggtcttgtacatccattgtcagaagacttttatactcaaataattgagtcagttgggcagccacagcccctggggaaaaaattgagccaaaagagtatagaaaaaatataatttctccaaaagactcttttttttttttgagatggagtctcactctgttgcctcggctggagcgcaatggcgttatctcggctcactgcaacctccgcctcctgggttcaagcgattctcctgcctcagcctcctgagtagctgggattacagatgtgcaccaccacgcccagctaatttttgtatttttaatagagatggggtttcaccaggttggccaggctggtcttgaactcctgacctcatgatctgcttgcctcggcctcccaaagtgctgggattacaggcatgagccactgcgcccagcccaaaagactctttctaaaaacagtatcagaataacatgttttccctaaaaacctctccactgagaagaatgtatatgttcagaaagaaacactggtaacatttcagaaatcaatgacaagataggccagtgcccaacaatggaaaacacagtgtgtgggactatcacagtgcacagtcccctagaaaccaaagaggaagagaagtacagaattttaaagcttgaaagaggcccaaagaccatgtaatccagttacttgcaaaccctttctaagggcagattcttttgttcaaatgaaatcttacccggaagatttatataaaagctgagatgctcttattgagtcaggaaggaacggggtggtctagagcctaacccactctactccactcccatcctctcacccgcaaaagtccttgtaagggctccagggagcccctggggttcctcaagtcacagtttgaaaaaaatcactatttcaatcccacttcctccttttgccactggggaaaaatgaagcccagagaagtccaggttacccagccaagataggggtctaggcagtcacctatcttccttcaacaatttttccatgatgacaccccgaatcctctcacgaactgccttttgtttctgcagactatatgcgtatttgtatttgtgtgtttgtaaccatgcccggtgatcccaagaaaacataacaaaccagtccttgctttcgctttaaagcttggagtctgccatttgaatacaacatctcggctgcccaagatggctagaagcagaatgcaaaaaggcacagggttataaatacctgtctcatagatgacctgggacactgtgctttgcagcctaaattaggcagagtttctgttgtcacgaagaagtactaaaaagcgggcagttctcagcgagacacctgagagctggcatccacatgaggagaggccccatcacttacattacactcatgaagcccagagatgttagctacatttttctaggtagcacagctaggaaatgatggacactgaatttgaatctaaaggcaactagctgcaaaacctgaggtcttaacactgggcctataatgctcttccttctcaccacatgggaaaaacggagaaagacatgatcttacaaaagcactgggctcagccagcctgggagagaggcagcgcagaccggcaccagggtggaatctctgtgtttcccctccagcttgcacagaggaaaattcctcaccaaacgcacgatccccgcacagctcccagggacaagaattttctgcttgtttactgagtcccctgggctgggagtggggggttgcagggcaggggtgagctgcgcacaaaagcaggataaaggtaaactttctgcatatgagaaccatttccccccctccaaggagccgtgtcacactgtatgtcaccgtcatcaaaggggctgtgcgtaaacctgaaaaaccaaacggacctgtctgtaggtgtcacttatatcacaaggctacaggtgtctttatttccactgcacgctggtgctgggagcgcctgccttctcttgccttgaaagcctcctctttggacctagccaccgctgccctcacgtaagcgccttttctttgcttttttggatgaatcgtaaggggtgtcagggctcagaggctcggcctggggcctgggtctgctcgtccatctcc

SEQ ID NO: 6992 - DNA, 2300 bp, Homo sapien
aatctaaaatggactaaatacaagtggataaagaaatggagatttaaccagaattcttcagctataaattacagggcctataattaaaggtgattgggactgggtcagagagccacatcacttttgtggttgcatttgaagttcactatctcttgaccacacaaccctagcccttctactcccaccctgctgtctcaggttaatctcaggcaatggtgtaaagaaggccaagtttgtttccctggagtcccacgggctctagcaataatgcttcccttttctcatgagtgccccgccacccaccccccttcaccatcactacacacaaatgccctgcagtgggtggaatgtagttacttcaggttgtgcctgatttgtctctcaagcaaaactccagcaggccattccctcagggccctgctctcagatctggaactgatagactaattggggctaatgtgataatgggaaataatgaaatttgttgtttttatcagtgtgtatatggggcggggtttacatttgcattttcacagggcccttggcaagttcacagggttgaacagttgggaagggtgggaatgtctggggcaggttagggaggcagagggatttattagaactcccctaaactgcactgaccaaagcctcaagcccttcttcaagacctgcccagcttccaagaccttcccaagtccacccttgttttcccactgagtcttttacactttcagaaacctctgaatttgtgtagaaactagaaaaaataagtaagaaaagactaatactactgcacactcactgttcccccttaatataataaccagtttttattctattcagtcagcctttgaccataagcagacctttttttttctttttaacacaagtaacttcttggttttgatcacaaaatctttatctctgccaaatctcaacttcccttccctctcccacaaaagggaggcccgttgagtcaaagaaatctgcttagacactttgctcatgccaggccagtgtcctggaaggttcaacagagaaagttaatggttgggggatggtatttttctttgctaggagcagtcattcacccgtatgggagaaggtacatttgtgacccagtgaagcaggtacaggtaactccccatatgtcccttggcccaagggaatagaggttgcctgggtatttgaatccgtagatcctccctaatattccaccttcttcttgtccaaactgtgcttttttatttccagtttcagcattttggtcttctcatctctaactcttatagggagtgtcaataaaccttttaaaaaagatcatgtaagtgtcaagaggaagtgaagaacctagataatccaccaaccggataatcagctcttgcatatttgagagttgactgcttgacctaagcatctcctcataaggtaccctccctcccaggaccttccctttcaaacctctcaaggctcttacctggggccaggggagataggcttttcaaagtccattgaattgccaagagtctctgtcaagaaggcagtcatggtgcctggagagggaacttgctgggagccccttcagagcctggtacttatagagctagggaaaagatcttgatgccaaagcagggtggactaaatacagactaataaatgagacaggtgctcaagagggcccctccataccatcatctcctccagatttggacttctactcactttgcttttacattccctcttcccgatggtgtctttggtgagcagggtgcttttcacctgaaacagcctctgagctgaaaagaacagtcaccaccaaatcaattcctcatccattaacaggttgtctctctgttcttgagacacaggcattacctggttagacctgttttgtttgaacactaacgtgtgagttggccaaatgcaaatgagccagtgtttgtaatcctttattttatttttttaaagggctgggtagccaatcagaagagggggaagtgacttagggaattcccggttggtggcttattgcttaacatcctacaaaatgatttaaaattattgttatatgcatttatcttcactctgatgagggctcagacttgataacacccgtggtgccccatccctataggagctggtgagattgcagcctgctgcctcccctccaacagccacagctattggatttcccacccagaatctttaggtaaatgaggtaagtcctgatttttaaaacttcttttgaatctggaatccaaacacttgagtggaaagagaagcctgctttaaactggaca

SEQ ID NO: 6993 - DNA, 2300 bp, Homo sapien
ccttccctctcccacaaaagggaggcccgttgagtcaaagaaatctgcttagacactttgctcatgccaggccagtgtcctggaaggttcaacagagaaagttaatggttgggggatggtatttttctttgctaggagcagtcattcacccgtatgggagaaggtacatttgtgacccagtgaagcaggtacaggtaactccccatatgtcccttggcccaagggaatagaggttgcctgggtatttgaatccgtagatcctccctaatattccaccttcttcttgtccaaactgtgcttttttatttccagtttcagcattttggtcttctcatctctaactcttatagggagtgtcaataaaccttttaaaaaagatcatgtaagtgtcaagaggaagtgaagaacctagataatccaccaaccggataatcagctcttgcatatttgagagttgactgcttgacctaagcatctcctcataaggtaccctccctcccaggaccttccctttcaaacctctcaaggctcttacctggggccaggggagataggcttttcaaagtccattgaattgccaagagtctctgtcaagaaggcagtcatggtgcctggagagggaacttgctgggagccccttcagagcctggtacttatagagctagggaaaagatcttgatgccaaagcagggtggactaaatacagactaataaatgagacaggtgctcaagagggcccctccataccatcatctcctccagatttggacttctactcactttgcttttacattccctcttcccgatggtgtctttggtgagcagggtgcttttcacctgaaacagcctctgagctgaaaagaacagtcaccaccaaatcaattcctcatccattaacaggttgtctctctgttcttgagacacaggcattacctggttagacctgttttgtttgaacactaacgtgtgagttggccaaatgcaaatgagccagtgtttgtaatcctttattttatttttttaaagggctgggtagccaatcagaagagggggaagtgacttagggaattcccggttggtggcttattgcttaacatcctacaaaatgatttaaaattattgttatatgcatttatcttcactctgatgagggctcagacttgataacacccgtggtgccccatccctataggagctggtgagattgcagcctgctgcctcccctccaacagccacagctattggatttcccacccagaatctttaggtaaatgaggtaagtcctgatttttaaaacttcttttgaatctggaatccaaacacttgagtggaaagagaagcctgctttaaactggacagatgaaactagaacagactcttggagacggctggcaggaagtgaagctcaccttacctgggcttacctcactgggtcaaatcagaattttattttggagggcaggttggctactttggatattatctgtgaatttcctgcattgtctggacttctaatctctgtgaatttaaaagccccctcgtttccctatgcctgggtggcaaaaccattcccctgggttgaattcttctggaacaaataggcagctagagataggtggctctgatatagctcagagaagaagtggttggctaagtagctgttagggctcagagtacacggtctcgctttctagagatgtcttctgctggtaatttttctgacttatgagctacatggaaaggccaatttgtttttaatatgttccaggactggaaaatggctagaaataggcaagaacatacacaatcacactggaaaaagtggccaggcagccaaggcaggcagaggtattggggagagctgaatatctacaaaaacaaaaattcagaaaaaacaaaaatcaattttggcaaagggcttcactgtataacaaggggacaagctaaccctttgtttacaaactaaccctttgtttactccattttgtccagaaaatacaacaatcagttttggcaaagggcttcactgtgtaacaaggggacaaactaaccctttgtttactccattttgggagactatgatcagacaggcagttgtgactcagcagcaacaaatgccttctgagacagggattcttttgattttgcttggacattgtggagaagtgttagccccaatgtggactgatctgggaacagtgggaaattaacttcttgttggtaaatatcaggctgaggtgagaaagcgacattttcaccgtccatctttgctgatttaccatgctcccaggatggtggga

SEQ ID NO: 6994 - DNA, 2300 bp, Homo sapien
ttgctgtttttatgtatttgtacaaaaccagacaaatacaaatatctagaggggctcatgtatttaactagatatgcaaatccagtgtgagtagtggaagctgtggtaacctggccagcaccctctgtaaaggtggtgttcactagtaaccgcaatccagatcccatgaaaaaataagggcccaatgtcaccatgtgttctgaggttttaaaagaagctgaaatgattctggattttgaaatgttggcttggcagggcgtggtggcttacacctgtaatcccagcactttgggcagcttaggggggtggatcacctgagataacgagttcgagaccagcctggccaacatggtgaaacccagtctctactaaaaatacaaaaattaactgggtgtggtgacatgcgcctgtaatcccagctacttgggaggctgaggcaggaaaatcgcttgaaccaaggaggcagaagttgcagtgagctgagatcacgccactgcactccagcctgggcaacaagagcaaaacgtgtcaaaaaaaaaaaaaaaaaaaaaaaaaggttggctcaaatttttcatgaacattgagtgcagcaaaaaaaaaacatgcctgtccaccaagctgtctgtgggccatgtttggtttgagaatcctagtttattctcgggtcccttaaggctctctttgatgctcattctgatgacattacactaagatttactgattgagggtacggacacttctccatacacacttgcccaggaacgatctccagttacctgtcctgtctccaagatcttctctctctcatccaatcttgcctatgcagcattctattttcagagtcgtctttgctaatttggggaagtcacttattcaaacaagaaagtggttgacaaatgtttagcaatgaaatctcccgcgagttactactttttaattaggattttcaaccctaagaaagatatagataggaggaataagatagggggaataaggaaactaattttgaggggtttccctgcctcttaggtggggtttatcatattgtgctgaaactgcttattcgtctagttctccagaccctgggccatttatcttacgtatccctatctctgagcgtgtagaaggcgctccataaaactgttggtttgtgtaaatgaccgaaaactacatgcagcgtgagggtggatttccctttgacttcggcttaaggaagaatcgttcccatgatcatcccacaattcatctaaacggagataggcaaggagcaactgctcaaaggcaaagcgctggcagctgaggcacagctccggttcggcaaacgtctcccgagtgccaaacgtccccccaaacgcctaactggtcgtcagggcgcagaaaagaagcttggggggcgcggtcttcgccccagctccacttcggtgcttcacgattccttctctggcctgccttcctgataaatacccggtgaggtcacctaaacgctctcctctctcagttatttgcttctttccaacgtttggcgcccagctcccgccatcggagcgccccgcccgagaccactgatctcctggggcctcgcagccttgcttccgaacgccaaggtcgcggtgcgccggggtagcgaacggccaggcccgaaaccccgccccgcagctaaacgcccggcccgctaccctgcgcccagctccagccgccgggtcccgcctgggcctctcctcctgggaataccgggcaccggtggccccgcccctacctgcgcgccgcatctccgggaacaacagtctccctcccgagcatcacagccagacatggcccagaccagggacccgcgcggcctccaatctccgcacggctttgcgcgcggcgcttagcctgggatacggcagcgaggccgcaaatgcaatcaggcggcgctgagggcagcccgggggcggggcgaacggggcgggggccggggtctggtaaggccccgccggctgagatatccagcggcgcacctgacttcccgggaggcaaggccaacgtggttggaggcggggctgggttggggggcgggggttcaagtctgagagacctaaaggcaccgctagcgtctgggggcgtggccaaccatgcgggaggcggggccttgatgctggacatcaggctgtgctgcgggcagccagtgagaaggccgtcaagatggcggcctcctggaggctgggctgtgatccgcggctgctgcgttatcttgtgggcttccccggccgccgaagcgtagggctggtgaagggggctcttgggtggtctgtaagccg

SEQ ID NO: 6995 - DNA, 2300 bp, Homo sapien
cattaaactgggcctatgtatacttttttttttttttctcctgagacagggtctcactctgtcacccaggctaaagtgcagcggcaggatcatagctcaatgaaacgtctaactcctgggttcaacggatcctcctgcctcagcccctggagtagctgggatgccagcacgcctggctttttttctttctttttttttttttaagtagagacgggggtctcactttgttgcccgggctggtctccaactcctgggctctagcaatcttccagcttcgcctcccaaagtgctgggattacaggcgtgagccactacgtgcacatttttgtgtgtgaccatttatggtacttcctctgtacagagagtctgtaacattttcaaagattctcaaaaggatctgcttgataaacaagattaagagcactcttcctagattatatccaatactaaacttttaatattccatgattttctaaggcagtgagtctcaaagctcattccattaaatgtcaaaataaaacatcaaaactcatccaacatttgtaaaatgcagattcctgagccccacaccagaccagaccgaatctctaggagctggaaaaaagtttaatttcaacaaacttggaggagggaagagaaggaattctgcacacactgttaaagcacctctgctccaaggaatatgttatgaaacattacaccaaaaatgaaataaattgttcccattaaggaacctttaggaaccccaatacactcatcttaccatatgactttgtgtgattttttttttctgagcctaaggtagctcagaatatgaaggcaacgtctactagacctatttaaattaaaattcattctgtagagtgccaggaacgatgattggcaggtaatacgtcacactaaaaaacgtcagtcctattctccatccccgcctccctccaaccttctcccaaaataaggaaaaataatacccggcctgccattttgcatactgttaaatactgcaagaattgtgttaactgcatcaatatcattactaaacaacaattttctataataaatttttggtatgatttatctcctaaatgtttgctctttcaagcgaatatttgcttgaaacattctcctggacctttgtctatcgtgatgccgtaggaatttacaaatttaagtcttccacgagtcatggcgtggggtaaaactcgactggcctcaatgaaaacacctcctaacagagagaggcctagagaataagtaagaactcccaacagtggcttttcaatctcggcaaccttgggcagctttttctcgtccgagacgtttgacaaccctaaagaaacctgagccttgattggaaagggggctgagggaggagagtttgggaaccctctctgcgcctcacaaataacccaaattccaaggcaaggtcacaaagccatacaaaccagggggcctagggcagagtcgagttctctcagctgccaagaaagcccttcacagcatgcattaggccaagtcggcggaccccaaccggagaaagaggaaagggaataaggagcccgcgcaccttcacacccaaaagcaggccctcaatcataactgcccctgtcccaggcccatcactcagctacacagagaagctgagcgagccccggccactcaccccgaagccactgcgtgctgtgaaaccatctccaattagctccgcggcttacagaccacccaagagcccccttcaccagccctacgcttcggcggccggggaagcccacaagataacgcagcagccgcggatcacagcccagcctccaggaggccgccatcttgacggccttctcactggctgcccgcagcacagcctgatgtccagcatcaaggccccgcctcccgcatggttggccacgcccccagacgctagcggtgcctttaggtctctcagacttgaacccccgccccccaacccagccccgcctccaaccacgttggccttgcctcccgggaagtcaggtgcgccgctggatatctcagccggcggggccttaccagaccccggcccccgccccgttcgccccgcccccgggctgccctcagcgccgcctgattgcatttgcggcctcgctgccgtatcccaggctaagcgccgcgcgcaaagccgtgcggagattggaggccgcgcgggtccctggtctgggccatgtctggctgtgatgctcgggagggagactgttgttcccggagatgcggcgcgcaggtaggggcggggccaccggtgcccggtattcccaggaggagaggcccag

SEQ ID NO: 6996 - DNA, 2300 bp, Homo sapien
tggtaaattttatgttatgcatattttaacataacaatgataataattttaactaagtacgttgcctccttatttcctacagggtcaagttcaaactccctggcatagcttacaccttgtagtccccatacctgtaacctcatgtctgctatcttcccccagccccttcatctgatctatgttcagatcagctcacattgctctctattctctggacaagccatgttctttcacttttctatgctcaaacacaattttgcttttagtaatgatagcaaacacttatttaaagtgcttactgcatgcatatgtagacataaatctacggcttaatacatgcagggcttttgagtcatttaatcctcaccaattctatgaagtaatagaattgtaatagtaataatagatactattattaagcccattttatacttgagcaaattgagctaattgccttaggcaaggtcacacaactaagaagcagccataatagggtttggatctaggtgttctagctcctgaatccatgctgttcgtcactacactgtactgcctgtggatgacttacttgtccctgtagtttcatctgaagaattcctcctccttttcctttgaggcctgcctcaaatatcacttcccctgtgaagactgcctggtgttctccaggagagagtgtgactcccttctctaggaatggtagcaccccaaacacacacattttgcagcatatttcaccttgcatggtaatggcctgcttgtgagttttattccgtaccagagggtgagggctctgaagatagcgccaggtcttatttacctcgataccccacaacactcattacatgtctgatgaatgaatgcatagggggatggctgggtgcatttctctcaacttttcaatttcttgaaataaataacaaaatcttaccttccctcagaagtcctggcatggttcctttcatcttgccacagccactgataatcactttcattttctgtgtaactcaccaggcaagaagtccatgcagatttacttttagtagttcacatgacaaataaatactgcgtttgatttccaaacattaaaccatagtatattatagatagatatagagttatcattcaaagtatgatatttcaatctcaaaaggcttcccctgaagaatattacaaactcttcctctctttaagatctgctgggtaggaaagatgggagaaaatgaattaatgtttacacagaaaggaggataatgggggcaaaaataatagatgaacgtatgggtggatgagagaatggataaaatgataggtggatatgttgatcttggacagatgggaaatgagtggatatatcaataaacagatatgtgggtggatgggtggagaagaggatggtggatggttgtggttttatgaagagatgtgaaaaaggaagtgtggaatgatggatgagaagttgtatgggaagatgaatagaagaataggtggttgaataaattaaaaggtgtgtggttggatgaatgaatgagtgggatgatagatggacctaagtggttagtggatggacaggaggatggatggatgtgagagccccagaaggacataaggaaagatgggtggatagatggatgggcggatggaaggatatttaggaggatgaatgagcatgtgtgtggagagaggtgcccattcacactggcttgaacacatgggttagctgagccaaatgccagccctatgacaggccatcagtagctttccctgagctgttctgccaagaagctaaaattcattcaagccatgtggacttgttattgaggggaaaaagaatgagctctccctctttccacttggaagattcaccaactccccacccctcactccccactgtgggcacggaggcactgcgccacccagggcaagacctcgccctctctccagctcctctcccaggatatccaacatcctgtgaaacccagagatcttgctccagccggattcagagaaatttagcgggaaaggagaggccaaaggctgaacccaatggtgcaaggttttacggttcggtcatcctctgtcctgacgccgcggggccagcgggagaagaaagccagtgcgtctctgggcgcaggggccagtggggctcggaggcacaggcaccccgcgacactccaggttccccgacccacgtccctggcagccccgattatttacagcctcagcagagcacggggcgggggcagaggggcccgcccgggagggctgctacttcttaaaacctctgcgggctgcttagtcac

SEQ ID NO: 6997 - DNA, 2300 bp, Homo sapien
ttacacaggatcaagtagaagaggatgatttctagctctctattggaatttcagattaatgtctacaaaactcactaaagtccttgtattgaataattctttacccaactgatagcagttaggcttcattttcaatgccattaactctgagagcaaacgacaggcttttggtctgccaatatattaaaagtgtgtttctgaggaaatttcaatgagtcattcgtttatataacaaatacttgttgagcatctactttctattgggtactgttatagggattagagataacagctgcaagcaagtaaaaggcccttgctttctcagagctttcattccaggaaggagagaaagagagtaaccacacacatcaatagatgaccaggctgttgtgaagacacaaaagccaaatgagttgagggagagactgggggttagacaagggtgtttagggaagcactctaaagtgaggtgacgtggagttaaaattctgaatgataaaaaaaatgaaccacctatgtgaccatttgaggatggaacattccagacagagaggaaggcagatacaaatattctaggatgggaaggagctcagaatgtctgagagaattgaagacaagctttgtgcttagagcagagcaagctactttgaggttagagagggagccaggagccagattatgttggttttagccataataagaacatttatactgggtatgaacataaactcttggaggttgtaagccagggagagatcacttgattgtgaaaaaatgctcataacataagattaagtggaaaaatgactcttaaatctagaactgtatattcagtaccatttcaattatgcaagcatatgtgtgagtatgtatatttgtgtgtatgtgtgtatgtgtatatagatacatactttatgtatatatgcataaagtacgtgtgtgcatgtgtgcacgtgtgaatgtgtgtattcagtaaacaaactggaagaagatatagaaaagtgtttgctgtagtttttgtagtggtggacttattttccttcattgctttcctgtgttttgtaagttttctgtaagtttgtatgacatcaataatcaaaattaaatcatttgctttttaaaaactttgttgcagagcaatcaatggagagaatgtaagagtgatattattttaccatgtcttttctcagatttgagcttaatatcatggtgctttggaatgctggagtgaattttgaaggctctggctagcagagaagtttatttggctttttgtttgtttgttctttttttttttttttttttgagatagagtctcgctctgtcacccaggctggagtgtagtggcatgatctcggctcactgtaacctctgcctcctggttcaagtgattcttctgcctcagcctcccaagtagctgggactacaggcatgtgccaccacacctgactaatttttgtatttttttttttttttttttttgaaacggagtcttgctctgtcgcccaggctggagtgcagtggcgcgatctcagctcactgtaagctccgcctcccaggttcatgccattctcctgcctcagcctccggagcagctgggactacaggcgcccgccaccacgcccagctaattttttatatttttagtagagacggggtttcaccgtgttagccaggatggtctcgatctcctgaccttgtgatccgcccgcctcggcctcccaaagtgctgggattacaggcttgagccaccgcgcccggcctaatttttgtatttttagtagagacggggtttcgccatgttaaccaggctggtcttgagctcctgacctcaggtgatccacccacctcggcctcccaaagtgctgggattgtaggcatgagccaccgcgcccggccttatttgactttttaaggagtctgtcctaaactgaacttattactgtctccaaattatttatgcaaaagaatctaacatttctatttcttcccatagatttgaatataacctgccgctttgcaggtgtattccacgtggagaaaaatggtcgctacagcatctctcggacggaggccgctgacctctgcaaggctttcaatagcaccttgcccacaatggcccagatggagaaagctctgagcatcggatttgagacctgcaggtaagagaccagcacccgaccactggggaaagctggcggcctgggaccaggcagctgggcttagaactggaaggctcctttcccacagctgaatggattattgcctaaggagtcaaccccacgtattaatttggccaa

SEQ ID NO: 6998 - DNA, 2300 bp, Homo sapien
tgatatgttgtatctttgttcttattagtttcaaagaacttcttgatttctgcattaatttcattatttacccagaagtcattcaggagcaggttatttaatttccatgtaattgtatggttttgagtgagtttcttagtcttgatttcaaatttgattgcgctgtggtccaatagactgtttgctatgatttcagttcttttgcagtgtgatttataattggcgtaaatgtctgattatatcactttacattcctcacaataatattgttttgccttttgtcctctggacctccatggtgctgatgactaaaaagcagtcccttctggaaaagaaaagaataattaaattagtagcctcaggcctttgaaaccatgcatttgctattttaattgcaggcagcaaaattttatctttcaatccaatgatatgtttcctccactacatcaaagatgaatccaattgagaaagaactcaagattatctagtacctcagctgacttcaagatcacagttgtagtgacatagccttacctaataacccaagcagatgttgcaacaaatgccaattctgggtattaagatcaccaaaatctcttctgttgagtgatgtccaagtagtgtctattgcaaaatatttattctgttcaatagtatgacaaacttcactctatttctccctatttatggataacaagtggaaagcttttgcagcaattgtgtgttctggagacaagcacatggtgggtggtgatcttacaaatacgggttcatcactgattccacctccacacagataggaatgatgtcacaggtggaagaagagacccaaatcattctgaaggctcaactactttactggaaggttatacctctcattacccacacacgaaggaaagcaggaccttcatcccagtgacctcagctaagactgggtcctttggagttactgcagttactgttggagattccaactctaatgtcaatcgttccttatcaggtaatttggcatttattatctagtttgctttctctatatagagaaacaatatatagtttcatattacagaggacattttctgtgtagtctgggattggactagtttgtgatatggaaatatctttcattattggttatcaattctagtgcaaataaacttgggtatattttagataaaagaatgcttccttttgccagtgttttttccatttgtctgtgtttgcatgtgtgtgtgtgtgtgtgtgtgtgtgtgtgttgtgtgtacaagttggctgttatgatggaattgctttctttgtcttatcttgtgatatatgaagttgaaccacatgaaactgatatttttgcaggtgaaagtagtcgaattttagcaattccgtttaattcgactaatatactctacttattttgtaaggttttatcctacaggtgaataatttctatatactagtatctttgctctgaaattattatcttgttttggtaatagattgatcagttttacttttggtgatggataaacctcttctagttctgatgcacacttaaaatgttcatgatttaatctagtattaatgaatagggaccacttctcttattgtaatagtgaagagaggaacgaagataatttattcaatgaagtttgacacggacctagaataagtctttttttttctcaaataagtagtcatctctgcttctgcttttctttgcttctccatttgtattaagaaattaacagtgaagaaaggggaaatggaaaacgcccactgtagtgaagaaataaaaaacagattctgtcttcctagtactagtttttcaattgctttgtaacacaatcactaggcatattcaagattagagactttagatacataattttggagcagagatcttctctcctccccccaaaaaagaaaaagaagaattcatatgtgtgcatatatatataatttttttttttgagacggagtttcactcttgttgcccaggctggagtccaatggtgcgatcttggctcacctcaacctccgcctcctgagttcaagcaattctcctgcctcagcctccatgagaatccaatatgtaaaacagatgacggttgtgatgcagggacagaaaattcagaatgccacatgcttggcctcatttctctgggtggcctacccaagagcttcaagaaaaacagtttaagaaaatgctaacttcagcaatattggcaagacaaagccccttacactccttagttctttattcagcattgttctgctctcatttattaaaaattccaagtaccatt

SEQ ID NO: 6999 - DNA, 2300 bp, Homo sapien
aacataataccaaagtgaaagaagatagctcttcatctacaaattatttttaaacacatttaccaggttaaacaataactaatttttcggaagagaagagtacccaaagtcaaatgccctaagacgaagagatgcttatggcatttttttttaaataaagaaaatgcaaagttagagtggttctgaaggaacctaggatgaataaggtacagacatgattattctaatggtgcagacaggattgagagagaaggggggaggggagagatggagaaaggcatggatggaagatgacgtttggattcagattttggaaaggagagtaaaggaaggaggtaagcagagatttattttttaaattttattaatgtgttttcccctctttttcttgttatttttctcatctgtctgttcatacttggatattttgtccaataaactatcttctaaggactctgaaaatgcactgaatatttttggagggtttactgggtgccagacgccactttaggagttttacatatcctctccatttcatttagttctcttagcacagagaagtgggagaagatagtcccattttacaggtgggatgaagagagagatggaggaatttgccccaggttactcagctagaaggtggtgaagaactcaagccttcggatatcagcgcctggcatttaactaccaatcggtcctgctgggactccggctcctctggcaccatccccgggacctactcagagagtttgcacgtggccggtcgcgttccatcgtctaacaaggtccagcacagcgcaaatccgaagatcgtctaccccggggaaaaagagagtctgtttaattctcctgtggccctccaagtgagttcttttgggttccattgcctagacgaggaaagtgaggctttgcctgctctgcgctcacagggtcggcaagtagtgggaccctaggttcctgcagtattccagagataatcaaagctgcacaggtctcgtcatttttatgcaaaggcgtccggaaggctcgaactctcccttgcacaagcccatctgtctctgtgcgccgcccccgggacacggaagcaggcggcgagcagcgccgagtgggtggagaaccgtcccccgccactcacccctcggccaactctccgcgccttctcagccggcacccacgaggccgacctctctcggcctaaaaaaaaaaaaaaaaaatcccggcctcccctgcaccccgcccgccgcccccagggagctgcattaatattaatctcgctgaataattgaaggccagagatttattcgagcttcggcgggggagggagcgcagctgggccgcgtttaggctgcaccacccgcgtgtttcagccgctcgactccgctggacctgggacccccagacgtgggaggatggggtgggtgtgcctgcctgtgagtttgggggtgagtgtgagctgaagcgggtgctccggggagtgaggagggagcgccaggggctgctccagggaggcggagacggaggggcatcccgggtctccgcgcggtcgcctgcgcttcaccccgcacggggtgacctggggccacgcgggcttcaggggaaacaatagctactccttagatcctgggctcctgccaccggctgcccaagccttcccggacgagcggcggggcctcttttcttatttggctaatttatggcgagaggctggggggagggatggcagaggagggaccgcgactggagatgggggcggggggcggcggttaaaggagttgcccgaggcggcggcgcgggtgatgtcagctctcgacgaaaatagagagggatcgcctgcaaatccccagctccggcggggctaaaccttgcaatccctccctggccggcgccgagccagagcgcagcggcctccaccgcctccccaggcgcgcacacacccgcacacgcgcacgcacgctcaccgtcctctgccaccactctctgctcccgccactcgccgcgcccgcgagccccgcagcaaagcacaggtggcagcggctgcaggggcgcatcgccggcgtgcgccctcctgcagccctgggcgcatcgctctctcggggaagccaccctcggagcccccggagctccccgccaagcgccatccccgcgggcggaggggagcgcgggtcgcgcgccgtggagagccgggacgcggattagcgcccgcaggagcctcctgcgcccgttgaggcgctaaagggcttaccccggaggcgggtggaagggcgggcagaggctcctcttaaataccgctcccggccgca

SEQ ID NO: 7000 - DNA, 2300 bp, Homo sapien
atgcatggaccagaaatctctgaaaggtggcctgagtattactattttctaaaaggctctctcagaccattttaatgggcacccagtgttgaaaataactgctccagtttgttaaaaaataattggtgtgaatattggcaaaagccctctggcacaaagaaagagaaccagtttcttctagctaatgtttgttagccagaattatctgtggcatagtccatgtgacttaatagacctggtcttccagggcagctgaatgcaaatgtttctcacgtgtagaacgggatgtcagggcttacagagaaagtgggaaactggaatgatgactccatctaattcggccatgctggatgattcacctggattctctcatgtcctgagcattgaaaacataatgaagagtttttaaattgaatgtttaaaagagtgaaaacaactccatccctttttctgtttccttttaccttgtatttatgtaccaccaggtaccttgctcttggcagtgagcgtgaatgaatggcacagctcagcccctgaagcctgtgtgcagagattgagggattgtgatggagtagttcattcatgctcatgttaaggggggtgctaatagcagactagtgctcctgcgattattaatatctaggtctgggacagattgtgatggcttcttttccagttgccacctcagcagaaagggaaatagaaaaccctaacttgtaaagttagacaattagactgtaaagtttgtatatgtgacaacttcagatacaaagacacacacttacccttgacggggcttaagaggagagtgtcaaacataataccaaagtgaaagaagatagctcttcatctacaaattatttttaaacacatttaccaggttaaacaataactaatttttcggaagagaagagtacccaaagtcaaatgccctaagacgaagagatgcttatggcatttttttttaaataaagaaaatgcaaagttagagtggttctgaaggaacctaggatgaataaggtacagacatgattattctaatggtgcagacaggattgagagagaaggggggaggggagagatggagaaaggcatggatggaagatgacgtttggattcagattttggaaaggagagtaaaggaaggaggtaagcagagatttattttttaaattttattaatgtgttttcccctctttttcttgttatttttctcatctgtctgttcatacttggatattttgtccaataaactatcttctaaggactctgaaaatgcactgaatatttttggagggtttactgggtgccagacgccactttaggagttttacatatcctctccatttcatttagttctcttagcacagagaagtgggagaagatagtcccattttacaggtgggatgaagagagagatggaggaatttgccccaggttactcagctagaaggtggtgaagaactcaagccttcggatatcagcgcctggcatttaactaccaatcggtcctgctgggactccggctcctctggcaccatccccgggacctactcagagagtttgcacgtggccggtcgcgttccatcgtctaacaaggtccagcacagcgcaaatccgaagatcgtctaccccggggaaaaagagagtctgtttaattctcctgtggccctccaagtgagttcttttgggttccattgcctagacgaggaaagtgaggctttgcctgctctgcgctcacagggtcggcaagtagtgggaccctaggttcctgcagtattccagagataatcaaagctgcacaggtctcgtcatttttatgcaaaggcgtccggaaggctcgaactctcccttgcacaagcccatctgtctctgtgcgccgcccccgggacacggaagcaggcggcgagcagcgccgagtgggtggagaaccgtcccccgccactcacccctcggccaactctccgcgccttctcagccggcacccacgaggccgacctctctcggcctaaaaaaaaaaaaaaaaaatcccggcctcccctgcaccccgcccgccgcccccagggagctgcattaatattaatctcgctgaataattgaaggccagagatttattcgagcttcggcgggggagggagcgcagctgggccgcgtttaggctgcaccacccgcgtgtttcagccgctcgactccgctggacctgggacccccagacgtgggaggatggggtgggtgtgcctgcctgtgagtttgggggtgagtgtgagctgaagcgggtgctccggggagtgaggagggag

SEQ ID NO: 7001 - DNA, 2300 bp, Homo sapien
tccccttgttgaaacctttcagaggcttcctatagacttggaataaaatctagattccttaccacacaagatctatcgcaggctgccctcactggcctcagatcctatcactctcccattcattcaccaccttgcagcatccctggctttctttcagtttctcgaacatgtcaacctcatcattgctccagggcctttgcacttacagattcccctgcctggaccactctgccccatgaccttcacaaggctggctctactgcatcatttaaacctctgcccagctagcacatcctcagagggggcttctttgaccacattgtgtcagaaacttaacaccttagtcactttttatgctcttacctggttaatttgattcacggcactcagcactctaaaattaccttgttgtttagtctccttgcttattatctatcttctaacccagaattaatctccatgagggccggcacgtgcctagctggtagctggggcactgctatgctgacagcacctagtacagtgtctgggacagagctggcctccagaaatatgtgttcagtaagtgaacaaatggacaaatgaatgcatgaacgcaaatatagttgcactatctcttcagcttcggaaaaaactgtggcttctgtcaggtggtagcttctcccttactctgaagacaaagatatcaaggccaagagaaggagctgattccttaacacacacagtgagtgcatggtggcatctgcataagaaatcagctgtcctcttagatgttagagcaggctgtacaaaatgcgattcacaggacctacaccccaaaagctctgtgatcaaccctttgtgaagtaaacactgatgaaactcggttattggatttctttgttaatagtaccttttagaacacttacaatcaatatactgattgtcactatattccagtgttccctaatgctggcatgttgggtttttactgtaggtggcagaaatatccctactcccaacattttaggcagcagttatgggcctttctatttctattttttctccagagtgtggaggagaaggtacagacatacattttgtgaacttgatactcatgtattcccttgggaatcctggaaaaatgcttttgcctctcttgccctgggatgtggctgctgcttttcttgtctcttggaatcgggggcttaatgtcatcttctgtgtttccaatctggtgtatctcagtgttttcaaacccaagaccccttttggataagcatggatgtgtcaggtttccttaacccctgaaattctgacttggtgctactttctctactctttgggtgagaattatcgttgcctagaagataattaccttctgattcttccatcaaacggaagagtgtgcagaggttttttttgttgttgttgttgttttcccctttacttagtcttgcaaaacaatatgagctttttttcattctccaactataaaattacaataaagtatccattcagtcgtatatttggcaatatctgtagcatctccataggccaggcactgcgctggacactgtgaaaactgtggaacgaggcaggtgttcctctctgccttcaagttacttgcaggccagtggagaagacaggccacacatagacacacaaaaagtcaaggaggtaaatataagaggttgaaatttatgtctacagtatgagaaaaataagggatcttctttggaaagagtggtcagggaagcctctttgaggagagaatatttaagcttaggcctgaggataggaaggaaccagccacacagactgggaggaaaaagtgccctggaaaagagaccaacacatgcaaagagtctctgcatggattatggcaccttgctccacctgggcaggcacttgcatgtgcacatacatgcaaacagtgcacaaatacatactcctctgctaagagaaattcgccaacctctgaggaccattttcctatccgatcaggccagtgacaccatctgttcctcaggcctgttcctcatctggccttgaatgagcccagcggtctcaggactgtccagggcccatctgcttccctccgtcaccctgtccacccacagatttgtcatgttgagcctggagtttgactacatgtgccagtatgactatgttgaggttcgtgatggagacaaccgcgatggccagatcatcaagcgtgtctgtggcaacgagcggccagctcctatccagagcataggatcctcactccacgtcctcttccactccgatggctccaagaattttgacggtttccatgc

SEQ ID NO: 7002 - DNA, 2300 bp, Homo sapien
ggtggtatagactgctatccttcaggttcatcacttagagccccattctgtcagggggatgcaattcatgtagggatgaggctgcttggtattgactcagagaggtgtgtgtggtgggggctgggaggtggggagagggaagatgaaaagaaaccccacgtgtcatgggaaggaccaggtggagatagttgaatcatggggacagttacccccataaaagttttcattttgttctctagatgttggtgggccctggtggtttaggagtaaggtgtgctgagctcgaagcaaagtcttgggaagagaagtcaccctggactattgatgaaggcctggagtaaagattaagaaatggaagtggaagggaaaagataaggggagaaacctgaggaaggtagaatctgtaaagctcaggtgccgtcagctggagttgaaacagactcctgagaggctcttatgcctacagttatttgggaactaagtcatcttcttcccactcccatcaccaaaggaccaggactggttggccagcaacaaggtgaacctcccttcttcgaacctctgccctctacctcttaggtatatgctgccctctggtattctgctcctgtttaaggctactcttggtgcttattttaactgatttcatctcgatatggaagttgagtgtaggaacaagactcataccatgagatgttcttgggggcagtctcaggtcagataatagagataatgattaatatttagtgtgcacttaatatgtggtaggctctgtgctatgggccttacatgcgtaatcttattaaattcttccagtgatctacaaagtaggtttgattattatttccattttatagatgagaagactgagattcagagagttaacttgcttaaggtcacacagccagaaagtggtgaatcaacaaaattagaacacaggcctgctgagttcttgcttccagtcacttcactgcaataggcccccagaagcagggctggagttcagaaattctttctagtagagcacctgtgtcagggctcctgaccttctgatctgtcctgagctttacagattctaccttcctcaggtttctccccttatcttttcccttccacttccatttcttaatccttactccaggccttcatcaatagtccagggtgacttctcttcccgagactttgctttgagctcagcacaccctacttgtaaaccaccagggcccgccaacatctagagaacaaaattaaaacttttatgggggtaactgtccccatgattcaattatctccacctggtccctcccatgacacgtggggtttatgggaaccacaattcaagatgaggtttgggtggggacacagcgaagccatatcaaatggtgaaatacaattctgcatatgtagcatcctaagaagctctatagcctagtggctaagactatagcctgtgggcctaagctgcccgggttcaaaccctggctctgcccctcactaactgtgtggccttggatgagttattgtaatcctcaatggttccgtttctctaattgtaaaatacagaggctaggtttattgtgaggaataattgagttaatacatgtaaggtacatgacacctggcacggaggagtttattttaaaaagtcacctattatgaaacatccttcttcctcatttcgagatgtcacttgctatcttgtacctaaactgagcccttttggtggaggcagtgagggttcttgtgtgttcttcgccatccctgcctggcgtgtgcgcaggagctatttatgttgctgaattcaccatcgtggggatcacaggaagaggaaaactttttccagtagctcaggagctgcttatgtcgctgaattcaccatgacggggatcataggaagaggaaaactttttccagtagcctgtagttgcaaaagataataagctttccaacctgtgatcacctggagcaaacggagaggaaaggagataaacgaggagtgttgcgtgcggagtggagggaggctccctttctcctcccatcaccaactcctccttctcctcaggccaggcttttaatcaggctccccgcgtgcagtcagagagggcaaagccagctcccgtctcagcctcccgtaggaagatctcccggcctcacctgagcgccccgcagccctgggtacctctgctcccgcccagggtcctatggcccctcctcccagcacccaacactgggaccccacctgtacccaggctggcctccctcccccgcagcttcctttgcagccgccgtccgcgggtctc

SEQ ID NO: 7003 - DNA, 2300 bp, Homo sapien
gatactctacttatgcccactaggtggcgatcttgcttatagtttgcccacgctgaaagaggctgcctttcaaataaatacatatatatcccagtagaagttaaaccaaaagacaaaaaaattaaatttattgagtgcttatttagtgtaatatactatgttaggtggtataagaaataaaaaaataagacatagtccctgcctgctagggaaagatgaggaggggcttacataggccaaaaaaataagacctttgaatggattaatatatttcgatgcaaccatatgggagccatagtaatctcattatcagataagagttataaaatggcatggtatagccaccatgtggttgggaacagattcaacagttcatccagtatgtacttaaccacaccagtgaaaacacttgactgtatcctgggtcagtgctgcaatactccaaatgtggttttttgatgcctctgctcagccataaacataagagtgtctgctttatcaccctggaacgctctatcaccctagaacgttttttctttggagaataaaacataatcagtgccaactgatgaggtagtccagttgaaaacccccatgtgcacctgatgggaagatgaaaggagagaaaagatacacaccatgtaaggaaacagatttcaaactctggcctttgagaggtggattccaccatgcccctgatcttgtgtctaccctgggaatctcagtgtggatctgggactcattctgatacagagaggtaagggagggccgactggcatccaagttttcctggtaaatgtaacccagaggtggctggaagatgtgttggggtgaagaggttgttcattttgttttctttgctccttcaccacctccctcccccaccaccaccaccatttctttttcccttaaatcgtaaaagcagtaaatcaaatgcagtatgggattgaggtttttttcctttccatttgaaaaatccttttaattgaaaaatcacatttggggaacaaagtggtcaaatgacagtgaatttcaaacttgagaatgctgacttgattaaaaaaaaaatactgatctttcttaatggagggaaaatcaagtgcatgcggccaggagacctgagtttgacttttagcttcgccccttgctaattgtgcaatcctgagcaacacccatcccttctctgtgcctcagtttcctcatggacaaaacggtatcatttctttcgaaaagtcgtccctgactcccctctccccaacacgaggttggatggctataatctctcttagcaacctgagagtcccactggaatgtaaatttcagcagcactgggacccggatctgtggattttgcttctggtaagcagaaccagaactgaggggcagtcgctgtgttgaatggatgcatgaatgaatgggagatggcctaggtgttcaaggggcacgtgcacagcgaggcttcattccctgggagtccgttgggaaaggcagagcggccaatactgattggtgctgatgtgcgagctcggaaaagggagtgtcggttcaaagttgttggctacagcgggttcctctttccgctggaatcacatcctctgtggctcggagacattcccagagatttacataaagcagcgtgaatcacccagacagaaactgagaaagcaaagggaccctgcctgatcctagcctggcggagctcggaaagaggtggaaatctgtctgaagtttgcaggagacccgcgctgcctaggcaaagggacccggcgaccaagacacccccgcgagggcccagggcgcgtccctcccgccaggccccagactccggctctgcgccaccccctcctacgccccggcgcgggcgcagccagtccggcttcctccaggcccccaagtcccggaccgagtgtggggccgcctctccctctcggaaggagccatcgccgctttaagtggaagaggagaggaagggggcgggggagcggggggcggggagcggaggcggaggagggggagggggatccccctggctcccacgtggtccgggcgcctgtgaatcgcgcccaccggagggtctcacagcgaaatacaaaagcagctgggaagcggcggggactcgagttcccagcgccgggcggagcgccggacagagccccgcagcgccccgcggccgcgatggggccgaagcgcccgaagccccggagcccacaaactgccgggcccgcctcgccgccgggacccgggtgcctgggctcggcttgaagcggcggcggcgcaccggcacagccgcgggagcatgg

SEQ ID NO: 7004 - DNA, 2300 bp, Homo sapien
ttaagatattaaaaaggccaggcctgtggctcacacctataatcccagcactttgggagcctgaggtgggaggatcacttgagtccaggagttcaagaccagtctgggcaacatagtgagaccccgtctctacaaaaaataccaaaacaagtagtggggcttagtggctcacgcctgtggtcctagctacttgggaggcacttgggaggactgcttgagcccaagaggctgaggctgcagtgaactgtgattgaaccactgcactcctgcctgggcaacagagagagaccctgtcaccaaaaaaaaaaataaataaaaaaaataaaaattattttcattgaataaaagactttctaaatgtgagaacgttatgtttgtaaaggctaagttgtttccttttaagcctgggggaggacaggagtagaaataaccaagcaaggcacacttctcattaggtatattaacgttgatgtttgagttgacatttgttgaattttttttttcagaatggtgcttcaattcatgtttcaaaagcagacacagaaataatttccagagaaatgagctgggggaaaacagaaatgtgtatggaattggaacaaaataaacctgatttttttcaacattgtatagaattgttctgaggttaaaaagaaaggtttctaaaaaataaatatctaacaaaagctgcacaaagattaggcatacattatccatggagacattaaaaactattaaaaaggtttttttaccccacctcatcccctggtatgtttgaggaaagcatctggaaattctaactcaaaatcatctaagggaatcaatgtaaaacagacaccattccatcccctttcatccttcttaatacacctcagcctctcccttgactagataaaaacgtaattttccctctcccaaatacagtgcaaaacaaaaactcttctgtgaatggagagacatggatatggggtagaggtggagacttgcctacattaccagcagccagccgaaaatgccctgtgtgtgtaaaatatgttccttcaaaggggcattgtgagcactaaatataatttgtgccaaaaataataatgaaagcttagtgaatactctacagtgcaggcatcgttacatttaatccacaaaactaccccatgaggtagatatttaccgttcttttcacttaacatcttttttaaaaagcggaaaacagaatgatgaattaacttgtccatggtcataaaactgataggtagtggcaccaggatttggggaccatcgggcagaggatcttccaaaaccggcttttaaagagccacaaaaagatgtagccgggttcttggcactacagtactgctttataaacaacagttcccttcttttctcttagagcccagtgggaatctagagggacaccttacataaaggaaaatgactgcaacctggacctgtcactcgacaaatactgcctctccccacctcacttcacctgacgtctctgcccaaccgaaggcagctctcagaaaaccgcacagaggttaccaccccagaaattctgagatcctaggaggtagcaatgcaaatagacaaagcacagtattgctttggatcgaaaatatttgtttgctcatcctaactccaattcccctagcctagaacaaacatagcccttccgcactcaggaaatcccaagaggtcaggttcagtctggtaaacaacactgtccgggcaccttgcagaacactggggactgtgacgggcggcgacaaattggcacaagagagactgaaatgcacagggacaccagcctagtggccgtgaaaactcaagttgacacttccagggagggaatgggggaggtggagcccaattcctgcttctggagagagtaagagacttcctccatcctccttctccctcctcctcctccaaggcacgctgagatttggagcggaggagctgagccccgcgggaaaagcagaaaagggtcattgccactttaaatgactcaggaagtaaaaggaggcctcctgacggggaaagggaaagtggaaccggggcggcgcgggggccggcggctgccgcgatctctccctggtagcgggaggctgagcgggcggcgcgacgcgggggccgacgggggcgccgggtggccgcgccggaagtgccttgcgcggcagaggaagcgcagggacagagcggagcaggccgagccggcggaaagggtctttgctgctgcgcccgggcaggggctgccgcggccccaggtcccgcttcgagacgcggcgcggtccaggcgggag

SEQ ID NO: 7005 - DNA, 2300 bp, Homo sapien
tccatcccctttcatccttcttaatacacctcagcctctcccttgactagataaaaacgtaattttccctctcccaaatacagtgcaaaacaaaaactcttctgtgaatggagagacatggatatggggtagaggtggagacttgcctacattaccagcagccagccgaaaatgccctgtgtgtgtaaaatatgttccttcaaaggggcattgtgagcactaaatataatttgtgccaaaaataataatgaaagcttagtgaatactctacagtgcaggcatcgttacatttaatccacaaaactaccccatgaggtagatatttaccgttcttttcacttaacatcttttttaaaaagcggaaaacagaatgatgaattaacttgtccatggtcataaaactgataggtagtggcaccaggatttggggaccatcgggcagaggatcttccaaaaccggcttttaaagagccacaaaaagatgtagccgggttcttggcactacagtactgctttataaacaacagttcccttcttttctcttagagcccagtgggaatctagagggacaccttacataaaggaaaatgactgcaacctggacctgtcactcgacaaatactgcctctccccacctcacttcacctgacgtctctgcccaaccgaaggcagctctcagaaaaccgcacagaggttaccaccccagaaattctgagatcctaggaggtagcaatgcaaatagacaaagcacagtattgctttggatcgaaaatatttgtttgctcatcctaactccaattcccctagcctagaacaaacatagcccttccgcactcaggaaatcccaagaggtcaggttcagtctggtaaacaacactgtccgggcaccttgcagaacactggggactgtgacgggcggcgacaaattggcacaagagagactgaaatgcacagggacaccagcctagtggccgtgaaaactcaagttgacacttccagggagggaatgggggaggtggagcccaattcctgcttctggagagagtaagagacttcctccatcctccttctccctcctcctcctccaaggcacgctgagatttggagcggaggagctgagccccgcgggaaaagcagaaaagggtcattgccactttaaatgactcaggaagtaaaaggaggcctcctgacggggaaagggaaagtggaaccggggcggcgcgggggccggcggctgccgcgatctctccctggtagcgggaggctgagcgggcggcgcgacgcgggggccgacgggggcgccgggtggccgcgccggaagtgccttgcgcggcagaggaagcgcagggacagagcggagcaggccgagccggcggaaagggtctttgctgctgcgcccgggcaggggctgccgcggccccaggtcccgcttcgagacgcggcgcggtccaggcgggaggcgactccctaggaagggacccggggcgggaggaggaagtgaggccgcgcggaaggaaggcggcgagccccggggccccgaggccttggccgcgtcacagcacccacatggcctctggagtgggcgcggccttcgaggaactgcctcacgacggcacgtgtgacgagtgcgagcccgacgaggctccgggggccgaggaagtgtgccgagaatgcggcttctgctactgccgccgccatgccgaggcgcacaggcagaagttcctcagtcaccatctggccgaatacgtccacggctcccaggcctggaccccgccagctgacggagagggggcggggaaggaagaagcggaggtcaaggtggagcaggagagggagatagaaagcgaggcaggggaagagagtgagtcggaggaagagagcgagtcagaggaagagagcgagacagaggaagagagtgaggatgagagcgatgaggagagtgaagaagacagcgaggaagaaatggaggatgagcaagaaagcgaggccgaagaagacaaccaagaagaaggggaatccgaggcggagggagaaactgaggcagaaagtgaatttgacccagaaatagaaatggaagcagagagagtggccaagaggaagtgtccggaccatgggcttgatttgagtacctattgccaggaagataggcagctcatctgtgtcctgtgtccagtcattggggctcaccagggccaccaactctccaccctagacgaagcctttgaagaattaagagtaagtattgggccttcagagcataaacctaggggtcaggacacctgggtttcaactcaggtggc

SEQ ID NO: 7006 - DNA, 2300 bp, Homo sapien
cagcttgtctggaatatctcctggccttcacaaggcaccagagttagagacacccaacagaaagtcgtaataagagaagatgtcacagaaatagaaacaaaagcaaaagactgcttgaagtcagtaacagactgcactaagtgtctgtgcttgttaactattgtaatctccaggtttaaatcattcatttatgttaataagagctgtcacttagctctttctctgggccaggtactctcctgttgtttttcacattatcataatagtaacagcaccaatactatcattccccactttgttgctcaggaatcaaatttagagaattaagtactgtgaccacggttacaccctaataagcgggaagccagaatttaaacccaggtctagcagacttcacagcctctttccttaatctcttctctcctagctgcactgattccatcttgtattggtgaataacaacactgatccccctacaactacccccacacatgtacagtatggccttggggcaaaggagtttgccttttgcaaagaaggtcttgctttgtatagcctgtaaaatgcaatgtacagtgagggaaagaaagtctaagggtagcagtcaaatcttctggcctgaaactgtacttttggaagggagaactgttagacttgctttatcttctttattccaaggccataaataagaaaatcaacgagaggcaaaaccatgtcttcttttgctatagcgttagaatcctgaaagtcagccagctctgacactgagtctgtgatttaattaaacatgttgaaggctctccaacagcttgacgtcaggccagcttcatattcttggaaagggacaacagcaaaaggagcttatctgttttaaagttcacttactgagttcagctgtcacggccacagcataccatttgccttataaaaatggcccacaaccttcacaatattttaggattcatggcaactcatttacctagggcttagccacctgatagctttacctatccctatttcctgaacacaaaatctaaaccagtggtttgacaatgagtaactgagacagaactagaaaaatctagaacctctgctgaacccatcaaaagtgactgagaattaagaagtaagcaaacaaggcttccaaccaattgaaataaataccatgaagcaaacgcataagacaaaggccatacatctagtcatcaggcacctcctcagaacctatttgctcttccttcacacatatttctaactgtaaaggaaagaaacagacttttagaggaaacaagaaggaaaaaggaggacagcaatagagaaaatggaaattttgagtagactgcaaagctccaaagccctgatatatgggttatttagtgtcaaaaacagtctatacacatctcaatctttaagagcctcactgtatcatgggacaatattctatttaaaatgatgaccctgtgcaccatacataaaaaaactatgcttagaagacaaaaatatgtatatcaaacattttagaaatatttacatcccaatggttaaaaaaaaaaacttttaggaattaaaaggaataaacctttgaccatccagaatatttagctaaatcaaacagtgtatatccccctagctgacttttattgtttcatgagcctctggtgttcagagagtttttttcacagctttgtaagtgactttcatgctacagtgctttgcatataatggcatgaacagtggaggtgccaactttccaatgtgatgaataaaactaataactagaatacagatcaaattctgttacaacaaatactgctaccataaaagtcacttaagcatccctgttagttctaagcccctgtcgattgcccatttattttaggcaatagtcattcaacaaaattggagcataataaaaagaaactggacctcagcgcaagttgagtgttacacaatttaacctgtaataacaggttctcacttgtatttctccagctctttgctgtaagaagaataaacgttatgtagatataataccagcgtgacagcttgtggttggtggtttctagaagaaataattcagaagcaaaagacacatgaagttatgtggcagttcctcactagggaatttggtctccagggccacttttgaccttaatccatgttggagccatcaatcaaagaattgcttgcatctaataatggtgtaatgccaatactaagccctggaacgaagataggattcatttctcatggattattgagcactctggggtaacctggccctgatctgatgacgctaa

SEQ ID NO: 7007 - DNA, 2300 bp, Homo sapien
accagcctggccaacatggtgaaacccccgtttctactaaaaatacaaaaattagctgggcatggtggcgggtgcttgtagtcccagctacttgggaggctgaggcaggagaatccctggaactcgggaggcggaggttgcagtgagccaaaatgtgccactgcacccagcctgggcaacagagtgagactctgtttcataaataaataaatagataaataaataaataaatacaacagttgaccttaaataaggttttacattagtccaaatgatttcaaagacattaatatatttatatttaaaagtgtgtgtgcctgtgtgtatgtgagagagagagaacgagagagagagtcagagtcaaacttgcaaagtaaggaagttgatgtgtccaaagaaacctaaggaaataagaactatagcagtgggtcagttgcattatctttccgtatccctaatgtttggaggcaaatgagcagctgtaggagaaattatttgcttatttgcctcctcagatattattatcaaaggcaggaggcctcttcccaacaagcttcccggaacaatgcacatacccacatgcacaggacattttgcataaaattttaagggctttaaaattctttgaagcccatgggacgatctccataatattcatcaatcccaggataaaagccccgaatgccaaatcatttagataattgatttatattttccatgtgtactatgaactatggaacttaacctttcctccctcacatcacattttctcattaccttgaacaatcattggtatttttaaattttgacctgatcctttttagcctttatgtttccagactacagcacgcaattacagagtaaagtaattgaatcttaacacccttgagggtgtctccagggcatcccaaaatctgacgcaggcatcccttttataactgcccctgtacccataccttcccctttctttcagccaggtggagtttgtgtaaataaactcaacccttttgaggggtggattttagggatgcagttctattgttttgacaaatgtatacagttgtgtaactacctctataatcaagattagaacagtcccactgcccccaaaagttttaatttattgatccatttatcaattgatggacacttgagttgtttccagtttttggcaattatttgcgttagtcttttgctttttttgggtgggggatcagagagagtggagcacagaagtgtcatccccttcttccaccatctaagtcttttggggcttttcaccagtgccctctggaagcaagtgcattggtgcagctatattttttgcatttgggtatctgcctttcatgaccttttcctttttttaattttattttttccaaattgggtcccaaacgttcaacaggtcaaggtggacactatgcagacaaaataactcatgtggtccacgctgtgtgcatggtaggtgtcagctgctcttaccggtggctcccggatcatcagccttggaatcagccaccatgttgttaaaaatgcagaatctcaggctccacgccagatctactgaaccagagtcagtattttaacaagatcgtcaagtgtgccggatgcatattaaagtttgagaagcactggtattccacactcgctactaaaaatatactacaattttctcataagatttgaccctttattttaactttttctctctcggtagtaaactcactttgtagtttgagtaaagaactcaagttttggtctgggcgctgcatctcgctgggtgtggaagcaaaggcagaaatgagagggacaaaaggaagcagagaacagagcccaggctgttagaagatcctcgcggccagacctgggaggctgaaaggctgagagaccgaaaggctgaaccctccgccgcgctcggcggcccctcggagtcaggacacccagggtaacatgcgggtggccacgcgcagcccaggcgcttgcaaaacttagcggagccgggccggggccgggcccggggaaggcgggagggaggagggccaggcgggagggcggggacggcgcggcgaggggcggggtcagcgccgaggccgcgggggcagcaacgacgccgggcagcgggagcggcggccgcgccatgtggctgctggggccgctgtgcctgctgctgagcagcgccgcgggtgagtcggggggcggccggcgaacttcccgcggggcgcggggcgcggggcgcggggcgcagcggccgggtgcgatcgcgtcctctcccgggcgcgggccgctctccgggcgtgggt

SEQ ID NO: 7008 - DNA, 2300 bp, Homo sapien
ttggaacttctgtcatggtactggtgaactcttctcaaagcataaactctggacagtcctgggttcaaattccaactctattttttatgactttggacaagtttctaaattttggtggacttcagtttccttactgtggcatcctgataagtaagcaacaacaagtaagagggcccaagtcggggagaacaattgttccaagaaatggctaatcacaaacccactggcccaacatcctttcattaaatacctcgttccacaagtaggcccctagtctagcacgaccctataaaacttttctccagcccctgtggctttgcagatagccccttcgctgctgtgctgcctcttgcacccatgcaacatatttttgtactttcgctaacaaatctgcctttctttacctatgactgtctcggtattctttcaccacccacaacatcagccccaaccagttgtatccacagcacttatcagtaaattggaggtgatatctactaccttgggctctagcaaagattaagtgagataatctatacaaaacagtatagagcatagaatacagtagatgctcaattaatggtaatgcttatgctatttatcatcatcctcatcctcatcctcatcctcctcatcatcactaagttcatagaatttaaaaactgatccttgggctgacagaaatttttttctgatgaccaaagtttagaaagcttattatgaaaggtctctataaactggtatgaagtgatttctaggacatactgataagtcaaaaaagtaaagtagaaaagagtatctatagtactgatggcagcagtgggctgttcagagtggccgctgccatcacaccagctgcagtaaggaagcgtgagctgtggcagcaggagtggctgcaggagcagcagtggcggcagtaggtcccctgtgccctgcgtccctgagggagccaaaaaccccaccctcacacggcctggtaggatccgctcccagacctgaagcctctgccacagtcttaacctcgctctccgctgtatcccaggggcctgcgagcacccagctgatggcacagctgggacttatgggactggccctggaagcgtcaggttcatttgtgtggggttgactggggctgccgtaccacctgcaccttgcccgccaccctgggagccactgtgacagggccaagctgaatcgtccgctggtagggaagcagtgtggtcggtcatggagaggcaggcagagaggggcactgaggcagagctgggcccagggcagtgccacactctacagtgtcagcagaagcatggagcaggcaggagtcccacccttctgggcatggctgcagccacccaaattgcagctgcagatgcagacatctctgcactccctgggccccccttactcccacaggctcagaggtgtctgctccagctccctggcctctccctgctgtcagcacccactcagatcatggagcaaagttgaggatgagcctgggaactattgcaacccagccggatgtgtgcacgctcagggcagcactgacacacaagtcccctgccacttcagccgcctccggactttgggtgaagacaaacatgggagggagaccaagggggtgctgaagacagcttggcactgccctgcaggtgcccgttggtacaaacctgggcaccatgaaaggcagcaggaggcagacatgctcctaggcagaaggggtaggtcccaggtgaagcccaatcttcaagccagggaaggcctgaggcctgagggccaggctgtgggtcccgcagactggagtgggaacttttccaggcctgcccatggattaatcagcatgcacttcctcccctctgaggctcataaaaactccggactcagccagacttgaggagacaacaggacaagctgcagagaggagctaccctctctgctgagagctgaacactcatcaagataccctggctacggagaggagctgcccactgtgagtctcctctgagctgttctattactcaataaagttcccctttgtcttgctcaccctccacttgtctgcgtacctcattcttcccggatgcaggacaagaactagggactcactgaatggcaaggctaaaagagctataacacaaacagggctgaaacatgctgtttgcccaccatgtcgcagcagacaagaggagagaagaaggaagagaagagctgtggccctttggggagcccagacctaggagcaaccccaagccaggtttgtgatacactctttagggctctgtggttgctgaagtctccaa

SEQ ID NO: 7009 - DNA, 2300 bp, Homo sapien
cagtgagccgagatcacaccactgcactcccacctggtgaaagagtgagactccgtctcaaaaaaaaaaaaaaaagtttctactagcagctggagaagtgtcaggtcttcattttcttgctcacatacctttgcttcattggtgttgtcttcattttatagttattttcaggaatctttttaagctacatatccatattgtagtgtttgtttagttaaaactagaaatgtaatgctgtatctacataaccagacacccagaaagttaccacttgtaagaaaatgaagaagggtgcctctagcaattaagttttaaatattagtgaagcttaacttctttattttttaaaactaaaggttgtaagattgttcctgcatcccaatgcaggattgtctgaagtatccaacagaacctgctccttaaagtaccaatgtaaacacacgtaatgttttcttgcttgaatgctgagagttagggtatcagagaggtgagtgagccttggcttggccttctttgatacctacccaaggcacttgttgcaaatggagactgacccaggcctctgaggtatctcctgtactctcccttactgctaaatgacccaagggctggtactctctagtgcttaggaaagagcctctcttcagaggttcagcagaactgagctcagcctcgcaggttcagggctcacttacagggatatgggaaaagaggcagctttgactttctgggctgtgttctcgtttcagatccaagaagatcccagcctatgcggagacaaaccctccatctcagctgtcaccgtggagctgagcaaagaaacactggacaccatgttagatggcctgggccgcatccgagaccaactctctgccgtggccagtaaatgatccagccagctgccagggccactgccatgacccagctgctcatgagtgataaatgtctccccatatgcaggctgcccttgcagctgcagctgacaacaggcaggatggtggggacagcagggggctactgccatccagaagttacagttggattgggaagaagcagccagatcccccgctgttctcactcatcttctttctctttctgaagctggagagcagaagcccccatctttgaaaagctcctgagtgcaacttaattaccaccatggcagggtgagggaacatttgcatcgtcagctgcctctgcatagctgtttgagaaattcaggcccaaatcatgcagcctatccaataagtaagtttatttccaacattagctctaattagttcatttccaatcccagaacacatggagggaatcggacaggtgatgccagcagttcctgctcctctgtcagggaagccaggcagagcccacagagcatggtccatccagagtgttccctgagccccctccaccatactggaacccctcttcagtgtaggaagtctgaaatgggtgctaattcccttcttcatgaaaccagggccctcttccttcatctaatgcagccactcctaggtgaagaagtgggaataattggaactaaacaacagttctaaaacttccatgatttttgtagcttcttttgtccccaagttgaagcttttggccagtaccttctctagtttttaaagatgatcccaacttcctaattcccagctaagcccttgacccatggtgtgacatgaaatcaggcaattgaatcgcaccactttctgtgttttcacctgttacgtagaacaaaaggaagcaaggtggccaggcgcaatggctcacgcctgtaatcccagcactttgggaggccgaggcaggcagatcatgaggtcaggagatcgagaccatggtgaaaccccatctctactaaaaatacaaaaaattagctgggcgcggtggcgggcatctgtagtcccagctcctcgggaggctgaggcaggagaatggcgtgaacctgggaggcagagcttgcagtgagccgagatcgtgccactgcactccagtctgggtgacagagaaggactcgtctcaaaaaataaaaataaataaaaaggaagcaaggctaatcatcagtatgtgcttgttacaagagctatgatgaaggcactccttcgagtttaaccaaatgagatcatctctgtcatgtgcctcacgcctcacagggactccatgtgtgaagattcccccttcactcaccagatcatctccatggcaacagcttgcagcctgctcttggagtgctttgttttggcagcttctctgctagtttgtgtatggagtgaatggaggaggtaaatccacagattaag

SEQ ID NO: 7010 - DNA, 2300 bp, Homo sapien
ttttacagaggtggaaactgaggcccagagaagttcaagaatttgtacacggaaaagttaataatgtgtagaattaggattccaactcaggttgaattctaaaacccctatgctttgctgccaccatgcattagttactattgctgtataacaaattacttcaaagcttcatagcttaaaacaacaaacattgataatcttaatagtgtttgaaggccagaaatccaggcgtggcttcgctgggtggtgctggctcagaatctctcatgaggttgcagttaagctgttggccaagactcctgccttcttaaggctctactgggcctagacaatctgcttctcaggtcagtaatgaagttgttggccagatgcttcagttccttgtcacctaggcctctctgtaggactgtttacaacatggcagtttgctttccccagagcaaaggattcaagtgaaagagagcagggcacatgagagagcacccaagccaggagacaggaacttcagtctttttgttagttttttggtgcagtcttgtataacctaatctcagaagtgatatgccattcacacccaccatttgctattggtcatgcataccaatcctggtacatggtgggaggtgtctacactaggttgtgaacaccaggaggctgggatcattgagggccatcttgaaggctggtgaccacactcctcattactctaaagtaagacaagaaggcacaatcctgcaaataccaaggcaatatcctcaaataagtcacaaaatttcatcttagtctaatcacttttttgggtggttgtttatttaacaaatattcaattaacccaagacaatgggcccagccctatagatacaggcaggagttaaacctagaacctacattgagttataacagaaaccaggaatcaggccatgagggttcatggaaaagagaggccaagaaagagagctagaatcaggaccctgtgacaaaatggttctaaaatcttctaatccaggaatgggttcctccttagacaatttgatttttggtttcctgggccttgacaacatccccacagaaaatggagtcggggaaggggaagggggaggagaggagacaaaggaacaaatgtccttagcagcttaccaatttctggaatttcacaaatgggcattctttcttaagctcgaatatatcagaacccattttttgagctggaatttgcttaaaaaaaagtggagggtaggaaaagaaaagagccacccaaatactaaaggtagataaaggaaatgtctgttttgatgtacggtctctgagaacagggcaaatcagagtccagtactgccagtgcaaaatcactctttacaattatattcattataattacctttttgaataaatgaactaaatcatttccattaacctcctcccccatctcacccccgtataacaagaacctagctaggtagtagctttcattccattcctctcttgtcccctctcccaaacacttcctcacctgctcttgtaatcagatcttctctatgactatgggaaagttactaaaaaccctaaatgattatttcccaatctggataatactaataataccagctccaacctactacataggctgaaaaactatatacgcagaagtaattttacattcaagacaggatgtgtgcatgtgtgtgtgtcaattccaagaagcccgatatgcacagcctcattttcattccaaacactggtacgccgatcactcctgaacaactacgtttccaaggcgcctgccaagcttgcaggtgcattccccaagtgcgccagcccacccacatgggtcaagggaaaacctgtttccctgacttggtaagtagacaagtcaagccaatttcctccccgagtaaaccatcctccgccctggtccccctagtcctttggttctagagtctcggggtttagtcatccagccgccgcgtccgtcttgatccgcgctcactgccgcagcaccacaaccgaaacgccttcccccactctgaaggactacagcccccggcaggccccgcgacaacagcgacagccacgtgacctcgcttccctgggtgccacggtcatgtgacttcggcaagatggctgccctgacagcggagcattttgcagcactccagagcctgctcaaggtaagtcgaaggggtggggacagcgtgaggtggccctttgtctccgagactttagacggagcaggaattgggaacaaattgaccctggtttggagccacaactctgctgcttgttctctgtgtgatcccagg

SEQ ID NO: 7011 - DNA, 2300 bp, Homo sapien
atttgaggtaactgatgaaggttatggaagcttaaataaactcctattctcccctttggtttcactactaagtcctggctgccttctttgtcagaggaatgcctgcaggaggtggattaggcccagggtcctgcagtcctttaaggagagcccttgccaccctcctgttattcccctagtttcccttttcctcacctttgtctcagtccagagatgagggtgggttgcagggggaaagggctgatcaatctttttgactttatgccccctttgtggctttgacgtggcctgatcagctcaccagtcgtcttagtccatatgggctaatataacaaaataccataaactgggtggctttatcaacaacagaaatgtgttgctcatagttctggaggctgggaagtccaagaccaaggcattggcagattctatgtttgatgaggacggtttcctggttcacagatggtgtcttctcactgtgtcctcaaatggtggctgtgggcaagggagctctcttgggcctctttataagggcactaatcccattcatgagggctccacactcatgacctaatcaccccccataggtcccacctccaaataccatcacctgggggtgaagatttcagcatatgaatttgtgggggacgcatacactcagaccgtagcgcaagttggggacaaaagctctgagtgtcagcagggttgcactggcttggaaatgctggaaatctggaaatttccagatcaggcatcacaaactgcatgatctagggctcacattgcattaacaatgttgtgtttggtccacagtgtttcaaaattggaaaactcgacataaaaaatccagccttctggcttttctttaaaaatgtgcaggcccaaccatgctgtttccacctttctgcattgcagtatttggctgaggctgagccctggctgccctctgaagactggtgtgagctttcaaatccccacagttcccgccacacactgttgcatcacagtgggccctctccacacatttgtcacctgtctcatacttgagaatatttattagtgcccaattccttcagggacctaacagggtgaacttaggccatagtaggtaacagggctaaatacagacacttgggatcctggctttccagccatccccataccatctcctcatgagtacaagcaagtttcaggtgtaatgtgggcatctaatttgtgatttgtggttcttgatcacttttatgggccagccactgttctaagagttttgcatatattaattcatttaatcctcctaggaacccaatcataatcccggtttacagatgggaaaactaacacccagagaaaacacttgctcacagtccatgggtaatagttgcagagtcagaatttgaagtcaggagcgaatgaggtcattttgcaaggttgctcatgacctagtgtctggttcattatgggggttcagtgggtgcaagctttataatattcatctagtcttgccaactgctgctaacgtgctgcatggctgaggtttagtcccagccagatgtcccatcacaaaagttaggcattgaagtggatgacatttgtgtttagagaaatgatatgtctcattcttttcagctctaacttggggtaagtttctgaaagcaagtaagagaaaaggagagggacatttgtgatctctcatgtatagaagactaacaaagaggcaggtggtcacacctgaaggcacgtcccctgacccttattacataatgccatgggctaaatgtccaaaattcctctcccagctctgattggcctggctactatgatgagtgaagtccaccagggaagacactgtggcctcgtttctcatcctcctgtccccaggagtaacacagaagcagctagtaacacaacagcattgtcctcacatacacaggcctgctttgtttccccaccacacagagcagccgctgtaacaatggccccgaatgacactttaccctcctttctccaatgttgcacttgtttttttagtctggaatgggctaaacaatgatttcctgcagggggtatcagctttttatattttctgcctgcttctctgtcagtcttcaggccccaggtcagtgagtggcaagccaggcccagagatctctgcgcccgttggaacatccccttctcgggaggctggaaggccatggtcattcacctctccccagcaaggtgggacctgccctggaagaagaaaccagaccaggtaacacaagagagacaatgagagcttggggctagggggtggggttgca

SEQ ID NO: 7012 - DNA, 2300 bp, Homo sapien
tatgtgccagacactattctagaaacttgggcaatatcagtgaattaaaaacatcagatttgtttaactgaaccgatcccttatagagctgatgttctaccctgaaagtaggaggtggtaaaagacagataataattttttcctccttccttccttccttccttccttccttccttccttccttccttccttccttccttcctctctctctctctctctttctttctttgtcttgctctgtctcccaggctggagtgcagtgctcactatatcctccacctcccaggttcaagcaattctctgcctcagtctccagagtacttgggattacaggcacccgccaccatgcccggctaatttttgtatttttagtagagatggggtttcgctatgttggccaggctggtcttgaactcctgacctcgtgatctatccgcctcagcctcccaaagtgctgggattacaggcgtgagccaccacacccggccaaaatttttttcttaaagtaaaccatacaatgtgttacaaggttatagatgctattaaaaaaaaaaagcagagttgaatgagggagactgggagggaggggcgaattacaactttaaataggtggaatagggtaggtcttattgaaataaaacttgaaggagattgagagagttagcaatgtagaatggatgttcccaaactgatctccctgcagccgggtagaactagttccctttccacttcccaggccctagggataatgataggaaaaataatagcttaatatcctttgaatcccagcagggattctaaacactttttctgtatgaattcactaaatcctcatagccaccctaagacagagctactacttttatccccattttcatatgagtaaactgaggcacagcaaagttaagtaacttggctaataaccagagtatgggaagaagaggagctgctgtggagaccttgccattttggctccaggctttggctcttaatcccttagacgagcctcttttaagtctcctccctgctcattgtcctctcagtttcttgccaggcacggtggcttatgcctataatcccagctctttgggaggccgagacatgtggatcacttgaggtcaggagttctacaccagcctggccaacatggtgaaaccctatctctactaaaaatacaataattagccgggtatggtggtgcatgcctgtaatcccagctactcgggaggctgaagcatgagaattccttgaacccggggaggtggaggttgcagggagccgagatcatgccactgcactccagcctggatgacagaggggaaactgtctcaaaaaaaaaaaaaaagattttgtttcccaggcatgtgtcccatgcccagtctctttcattgtgtgtgattcctgggatgaaatttaaagcccttcatcattctagggcttctgttgaggatcttttagctttacctaatatcgcaggacaaatgagacacccagaacttcttcaacccgctctcatgcccacaaccaccgtaacacataggttttgtagggtcgcaatgaccaaatcaaaaaatgaaaatgagtcttgctcagttttgagataaaaggacatgcacatctttttcttcagcaaatgtcactgtggtttcaaagcctatgtgtgatgtgcgatcgggcagcatttttaaagtatttcctgctcaaccatagggtgaaatgatgcaggtagtgagtcctgcaaacagctgcactaaattcttaacacctgcaaaaaacaacaagaacaacaacaaaacaaaacccaacagttttcaaaataattatgcattatttttaatttttggcttgttgattttctgtggtttcaaactctgaaggaccctctaattcatgaaacctgcagttagaaaatgagtttgggagctttaaaagaatttgcaaacaagggaaagatttcacttgcattatattttcatcaatgcacttaaaacaacttctggaatcgccagagttccaggctccactcctctcttcagctccgccctgctcctttttaagtgagccccagaatcacctcttggcttggcagtttcccattgcggggcagctgggccgggggcgggggtcggctgcagatctcccgttgtgtgagagaaacgcaagcacggagctcccttgacctgctgcatcctcctcggcaattttttttttttaagtcaaaaagcttggatttcctgaaattgttgaactggatgtaagtgcagggcccccctctccgctctccccagcagggtgagagt

SEQ ID NO: 7013 - DNA, 2300 bp, Homo sapien
gataccgtttgtctttatacatctatatcctgcctttaagcaaatagagggaggacagagagcttcctgtatctgcttcttaactgccttcagttcataaatccttatgcccaagaggcatattttgtggtggcatattttggtgtcctatcccaggaacaagagtcaattgggaagtttgttcagtgaggactcactctaagaggggatagctttagctttctagctaaaataagaataatgcacacttttgccaaattataaagcaaagactcaaggttttattcttgtacctaggacagtccctgcctctagagagttgtcgcactaggggcggggagggaaggatgtgaccctcttttggttaattttaaattatcatttcagcaaatgtgtactaagaccctgtcctggcacactgggaggtgctatagctatatctgtaaatgaagccaacccatccctgccctccagagcacacagcccagggaagaagtcacaaacaaggcagtgtctcatcagtgtacacatgttctgagggggaaagtacaggggccacgggtcccagggcacagggatttcatcttgactagggaatcagggaagactacctggaggaagtaatgatgtctgtgatgggacctgcaggatgaatataagttagctgagtaaacagagagggatgactatccccaggccaaggggaggagcttgggagggtttggaggacaggaggtgagcaagaggaaggagcgttagaggaactgaaagggcttcagagttgcaaggaagctgatggcaaggggagctactggacacagacctcgtcctgggtatggtgctgggggtgctggatgctggaccatggagcagacactgctgttcccaggtttacaggggaagcaagtgaggattaaggtaacatggagccaggattccaatgcctcaagctgtggatactttatcagctgccccacatgctctaccgccacccccacccccactgaccgctgctaactttgaggaggtgactttattaggggacagcccaggaggtgttccttagcccaagagggatcctaagccagacatttcaccccatgtctctggatactaagaagctaaaatggtcacagcagtgcccatcctgactgaggacactgctttccagataaagagaggtctctcagggcctccgtctaccccttagtaaaaggtttattttgcctgtgggaggagagcattgagatcgctggctgaagtaaaaactaaggagttgggttgggggtgataaacccctttacctatgggagggctttgccgtggctcacttgggccggaggataggtaggcgtggtcgtaggcagcggagggtgtgggggccactcatcccttcagaagccaccactcacgctggattactgaccagggttttggcgcgtaactcattccatcctccaaggtactgttgtgctttcagtctccaggtcacccgcagggtaggtgaccagagccagagaagcggtttattcccggggctccgcactgcacccacgcgcccgcgcctgtgtttgactgcacgaggattctccggaggtgtcccttcctgccagccaggcctcacccctgggtacgcataggtcagaggcccacgatgagagtgagagagaacgtgccgctctctccaaagcagccacttttctgcaacagtgggagttgctgagggaggaggaagaggatagtgaaacttttttttaaaaggccgactcctcagaggctggcctttgccccatctttcaagtccccgaagtctccaggctgtttccctgatgtttgcagggccctcccgagcacacactcagcagcacgctcgacttctcccacacaaaggccctggcctcccacaggcctccctccattgtgtctgcctgggggagggcccttctccttcaggatactgtagcttctctgcgtgacaagccagcattcacggctttcaggtgccagcctggagagggacacccaccacgggcttggtgtgctggggtcacaatggccttattatggcggtcgctccggtggggcctggccagggagcctgggagatcaaaagcctgggaaccaagtccccaacaaaggacccgaggacggccttatccaggctttgcatctctctgggggtttgaaaggagctgctcttgctggctccggtgcaggggatgaatgccagtgaatgccagtgttcagcagggctcctggtgagtgaggagggaataaagcctccccttggcctcaccccg

SEQ ID NO: 7014 - DNA, 2300 bp, Homo sapien
agtccaatgcaggtggattgactttccaaggcaactgcccttcatacatcaactgagtgatacatctcttccctcttgtagttgccctttgctccttggttgcacacaggggaaacagtcttgcaatgaaaataaaacgctttgacctaggaatgatatgcatccttctcgtcatagctcacaggccagaactagtcacgtggccctgcctgattgcaaagggaaatggtatttgtaagtttcctgtgtgcccaaggcatggatgagcactaaaactctctcctatattgaataaattggatttgaaggagtaggaaaaggccccttgagggcacttatgaaaacaatgtaaagaaacatacacagaacacctaatctttttgaaagcctggtgctggagtctctcacaatagatttttattattttatactgacaaaagcctggtaaggtagacattatccccttttttatagtttttggtcattgtagttcatggaggttatgtaacctgccccagagctcacactaagaagtggagggaactctgattctcttgctcttccttttctccagctctcaatttcatataatgatcttttcttccatcccataagagatttaatttttaagaggagcttctagggagggatacacaaaggctggcaatgttttattttttaaagctgggtggtgagcacacagatgtttgtgctctttttatgtcttaagtgtttcaaaatacaatcttttaaaagggggttgacagaacctgagaaccagtgataaattcttcttaaaaagagaagcatttttaatgaatattggcagccagaaagtaggacatatagtattggtaacatttattgagcccatactatgtcctagttttgggtttatttgtttgttcgtttgttccttgagacagggtctcactctgtcacccaggctggaatgcagtggtgcaatcatggcttactgtagccttgactgccagggctcaagccatcctcccacctcagcctccagagtagccgagactacagatatgcaccaccacacccaggtaatttttaaattttgtgtaaagatggggtctcactatgttgcccaggctggtctcaaattcctggcctcaagtgatcctcctgccttagcctcccaaagtactgggattataggcatgagcctatttgtgcctggccagatagttttaaataatttctttacatattttatctcatccttccaacaaccctgtgaggtagatactattattatccccatgttaatacgagatgagaaaactgaaacaagtacagattaagtattttacctgaatcacacatttattgtaggaaaaaccggattggaaccaagcattctggcttcaggatacatacgcatgactactatcctggaaaacctcccctaagaggtggacgatgaaccaaatatgcagaggtggatgaaactcttttgtgcttctccagcaaaacgcgtggtacattctctagacgtttatgaccagttaaacagggaatttaaaatagttttcccatgacagagaaagacaaagcgctggtgttcttggcaggaaattcaaagaaatatttaaggcaagggctgactcccttggaccggatgaaggggaagagcaggtaataatagagggttctatggatcgcagaaacttcctgggcaaggagggtggagctggggaggggtttaagaattcctgaaggtcaagcgatctagcccagctggggttttctcctgcttggagaggggtgctataaaagcgcagtttgggattactactgtcgccactgctcaccaaattaagttattccgggagggatcttctcgtcgccatcctcattccaacacacacccattgacacactcgggttcggctgtgcggtgcaacgaattcccaggtgggacacccgagcaggaagaaagccaggctgcggggctgggggcgccgcccggcccgcgccacagtccgcctggaggatcaccgccagggggcactctctccgaactcggccgctctgtctcctccccggcgcgctccctgcccctcgctccccgcagccagcagagaaggcggaagcagtggcgtccgcagctggggcttggcctgcgggcggccagcgaaggtggcgaaggctcccactggatccagagtttgccgtccaagcagcctcgtctcggcgcgcagtgtctgtgtccgtcctctaccagcgccttggctgagcggagtcgtgcggttggtgggggagccctgccctcctgg

SEQ ID NO: 7015 - DNA, 2300 bp, Homo sapien
gttttacacagctgaaggtagagttgggaaggtaaaacttccccaaacatttggaaataagatggctctctacaagttgaattataaaattatgacacaattcattagctcaaaatacacttattgaacaaccattataagtgtgtgtggcagcctgccttgaagatggtatttatgcccacgtgtagtttgcttccacaatacatagggctgcctcatgtaacagtatattagtctgttctcacacagctgataaagacatacctgagactgggtagtttataaagtaaaagaggtttaatggactcacagttccacatgactggggaagcctcacaatcatggtggaaggcaaaaggcatgtcttacatggcagcagacaagagagagaatgagatctaagtgaagggggtttccctttataaaaccatcagatcttgtgagacttattcactactacaagaacagtatgggggaaactgcccctgtgattcagttatctcccactgggtccctcccacaacacgtggaaattaggggagctacaattcaagatgagatttgggtggggacagagccaaaccatatcaaacaggatattgtggaaatgacggaatgtgcctccctagactgggctatagaagacattgtagcttctgtcttgctctctcttatttgctatgagggaaaagccctgccctgtcctgaggacacccaagtagccctttagaaaggctgctgagcaactgagccctcttgccaatagccagacgattgctgaggctttctgccaaagccttgtgagtgagtcatcctggaagtggatcttccagccccagtcaagccatcagatgacatcttgactgcaatctcacaagagaccctaagctggaacctacaaaaactgtgatataataaatgttgtcttaagctctaaagtttgggtaatttggtacacagcaatagataattaatagaatgtgttaggcactgttcttagcccaggagatacagcagtgcagcagtccccaaacattttggaaccagggagtggatttttggaagacagtttttctacagagcagagtggggcagagggatggttttgggttgattcaagtgcattacatttattgcgcactttatttctattatcattacattgcactatataatgaaataattatacaactcaccataatgtagaatcagtgggatttctgagcttgttttgctgcaactagacagtcccatctgggggtgatgagagacagtggcagatcatcaggcattaaattctcataaggagtgtgcaacctagatccctcacatgtgcagttcacgaaagggtttgtgctcttgtgagaatctaatgccacagctgatgtggcagaaggtggagctcaggcagtaatgtgaggatggggagtggctgtaaatacagatgcagcttcattccctcactcaccactcatctgtgaaggagagatttaaactaaatacctgagtgatggtttctgcatgcaaagatctttcagcagagtggtccatgcagagggaacacctattgcaaaggccctaaagctgaaataagctacatttataatccagagccttaaagtcagtgtggttgaggcagggagaaggaactaaagcagcaggcttcagatcagagtgggcatactcctgaggggacacaaaactttccagaaggtgtctgtgcccagctgttttaaggaggtgacacaacctggggagactgtgtgttcagagaagaaacgcaacctggtacatgcgatctggacaaaaacacctgagagtcagaatctttcttgtgccagaagcaagaataagaatgtagatacgctaaccttttatgaaagtatagaccaagaaagaatgaggtaattaaaaggcgaaagaggaattcgatatgatgggacctaggcaaggtcagagatctagtgtggcagctgtttggaggaggaggtgccttggatcaaaatctccccctggttgcccattttcaaaggcaggcattttggagatggcctgatgtcataatctttgagttgttaaatgttacaattgctaccagcagttaatgaagccaaagaagcacatgaaaggatatttctgaatacaggattctggccttaaaatacactgtaagtgtcctaagtttctcagcagcccccaccattccaccctcttctccatcctccccactaccgtactccatcaacatgagggaaagtgctcagagcagtggaggggcagggcagtgggagggggtgaca

SEQ ID NO: 7016 - DNA, 2300 bp, Homo sapien
acagaaatcttggaggtgaagaattatataaattgaataaaaaatataatcaacagcttcaacaacagactagatcaagcaaaagaaagaacttctgaacttgaaaacaagtcttttgaaataacccaatcagacaaaaagagagagcgagagtaagaaaaataaaaaagaatgaagaaagcctatggactttataaaataccattatgtgaactaatgtttaattatgggagtttgagaagaagagagggaaaaggcagagaaactctaataaaatattagctggaaacttttcaagtcttaggaaatatgtacacatatgaattcaagaacctcaaatgcccgtaaacagattcaacttcaaaagattctctctgaagcactttatagtcaaactgtcaaaattcaaggacaaagagagaagtgtaaaaacagcaagagagaagtgtaaaaacagcaagagaagagtgtcaactcaaatataagggaatcttcattatactaacagcatatttatcagcagaaatcttgtgggcaaggaaacaatgtgataatatagtcaaagtgctaaaagaaaataaaaaaaactgtcaatcaagaatactacacccaacaaaactatccctcagaaatgaaggagaaacaaagtctttcccagagaagcaaaaaggaaatttatcaccactagactggtcttacaagaaatgattaagggagccctatatctgaaagccaaagggcaataactaccatcaggagaacaaacaaaagtatagaacccactagtagagcagatacacagatgcgaaagagaaagtaactaaaatttgtcaccaagcaaaccacacaaagataaacagtaagagataaagaaacgaggaagagaaatgcaaaacaaccagaaaacaataaaatgacagaagtaagtcctcacctatcaataataacattgaaagtgaatgaattaagttcctcaattaagagagatagactgttgaatggacaaaaacaaacaggacataaccatgtgctatctacaagaaactcacttcaactacaaagacacacatagatgaaaagtgaaaggatggaaaaagatactccatgcaaatggaaaccaaaagtaagcaggagtaactacgcttatattagataaaatagacttttaaatccaaaactgtaaaaacagatggcaccattatataatgataaatgaatcaattcagtaagaggatacaacgattgtgaatttacatgcacccaacaccagagaactcagatatgtaaagcaagtattagatctaaagggagagacagactccaatacagtaataggtggaaacaccagcagcctactgtattagcatttaacagattatcaaaatagaaaatcaaccaaaactggatttaaactgtaatacagaccaaatggacctaacagacacttatagaatgttttatccaatacctccagaatacacaaccttctcatcagcacatgaaacattctccaggatagattatatgttatgccacaaaacaagtctcaacaaattttttaaaactgaaatcatatcaagtatcttttctgaccacaatggaataaaactggaaattagtcataagagaaatttggaaactaaaaatttaaaatgttattgaaagaaatgaaaatagaaacacaatataccaaagcctctgggctttgtaggtatttaataaacattaagtgttacatgggagtaatgaaaaggtacccttcccctaaaaatattggaattaagttcacctcctgagacttacactataagatcaatatactataaagtttgatccataacagatcagaacagacacatgaaaggtcatattaaaaagacaaaatgcagtggtttccaacttgaacaaaacttgaggatacatattaaaatatgaaacaaagatattaaccaaagtgagagggttcattattgttacaggttgaattgtatccccttcctgtaaattcatatgttgaatttctaaccaccagtacctcagaatgtgactgcatttgaactctttaaagaagtaattaagttgaggaggagccaagatggccgaataggaacagctccggtctacagctcccagcgtgagcgacgcagaagacgggtgatttctgcatttccatctgaggtaccgggttcctgtcactagggagtgccagacagtgggcgcaggccagtgtgtgcgcgcaccgtgcgcgagccgaagcagggcgaggcattgcctcacctgggaagcgcaaggggtcaggg

SEQ ID NO: 7017 - DNA, 2300 bp, Homo sapien
agagcaattagaaaactgtatcttcataggcacccaatattttgttatgtctcatttaaaattcattaagtactttatttgtaaatattgtgatttttcctaattataaaagtatacatgactgatgaaaaattgagcaatacagaaatctatgttaaatatgatttgaagagagagagagagagagagaaagctcctcccttatctggtctgaacctcacaccttcaccattctttgatgagtccatttgaccagcttacttttccaagaaaaattgaaaaggattccatttataaattattgacctcagagaaattttctaactctgctttggaggttatgggcaaccaaccaactctgttcaccgtagactctcggtgctaaaccaaggaaagtccaaaacaaaccagtgcattttgtcactttagttttacataacttccaagtgaacctacagaactgaagcctgatccttgaacttgctgctttgttctaatactgtgggatattattattttgctctttccttcaaggggaagcatgaacatctggccttttctttttcttcctgtaagtccattggagatgcaagattttaaggagcaggaggatggggggggaaggacaccctcttgcatgtaagtcatgttatgactcctctctacttgacctcattgtgtaaggagggctcagggccacctgttgaacatgaacactgtcttcaggaaattcttagctctcacctgcctttctcgccatgttgcctcaaatatgaccctcaggtaaaggctgcatctccttggggaaaaacacactgaagctcctagaagccacagaccagtttctcctctctcccagtgttactgcagtggcttctgccttgtctttagtgagcagctgtggccccagggctgttgtgtggttaagtaggtccaaatgcgaaagagtgggagatgtaagaggagcgtcgaatgagggcagcacagaacagtgaaatccttgcacctgcctccttgacagtttttgctgagaatcagacaagcaaggaatctctcacttattagctgaacacagaaagactttggggataaagctggtctgagaattataaaggggttttgaaacagagacagaggtgtgtatacacctattcattcttgaattatccttagactattactacaaagtggctttcattattctcctttcatggtataatggagtgattaggaacatgagctttggaattccaccccaccttcactaagtagtggctgtgtgaccatgggcaagtcactccattgctctgaacttctgttgcttctttttagacataatattatcaaatgcgtatgactgttgtgaaaattaaatgacacataaaacacttacaagcctagcccattgctctcaataatggggactaatattattaatcttaggttgcaggtgatgagattgaagttcctaaagtttaagtaatgaatcaaaggcctgagtcaagatttaaatccaggtctgttgatgtccatactcgagtaatgtttaaacttacagtagttacaaggagcatcaaccttcctcagcaagatttgaccaggttgaaaggttctgagattgtttggataacatttcaagataataataaaaaaattccatagtgttgttaatatctgatgaacatctacaaagaggcagacatcgtttcaagtattttcctataataactgtcattgtataacattattgactctttgaggtatatactactagcctttcctttttacagatgtggaactgaggcacagagatatagaaccctggcaaaagctggggcttatactgactgacaagaccatttccaacccaaacattctcagggagggaactggcagccagtgccccagcaaactctcgcacatggttctacactcaggcccccctgagctaagcttcctaaagagccaggtggcagctggagctggggtctcctggcccatgattggctgccatcatttgtggttagccctccatggtgggggaggctgggaaggacagtggaagctgataaacagctcagcagcatgttctgagaaacaagagggcaaggagagagcagagaacacactttgccttctctttggtattgagtaatatcaaccaaattgcagacatctcaacactttggccaggcagcctgctgagcaaggtaacactcatacttttcatgccttgagccaaaatatttattacatttttatgtttctaactagaagtgcttgagctttttttccttcca

SEQ ID NO: 7018 - DNA, 2300 bp, Homo sapien
tttatttatcattgcattataaacacttttttctggcccttaattcatgtaactaaaagaaaacataggcattttaaataaacaaaaatgtatttttaaaatcaatgttatgattttaaaaatagattcaaaaattccatacacctgaatctgaaaggcttttgcaaaactaatcaaacaaccttctaagaaaggatttcttggcaggagtcaagatttttccagaaccttttttacggagggatttcattggaggcttttttaagggtaggactctttggggagtgtgtagagctcttgctatctccacatgctcattgcagtaatacttgttgcttcctgctgacagatggatgagtgtgcgttctgccagatccatgcactgagcatggacccagtgcccatccccatgagagcagtagatcatggcgggtttgttgagctcagttgaatagaatggtacccaagtgttgatatccacatcacaagtagggcagcatgtaatccagtagcctgtctcagactcatcttcttcatcatcttcattataggtgtcaaattcatcatcaccatcaaaactatttgcttctgcactgaaacaaaattcttcagagtcttcaaagggagtggaatcccctggatcttctgttgatgtttgactgtttgtgaatgttgtctgctcttcattagtatcatcttcagcacatttcaacatatagaaatagaatccttctgaaacaacttgtttattgtctcctggtatgccaagaaaaacagttccatttcccatgttgcttccaaaccatatcttgctgtgcttaatgtctggggtccaatctggggtctccatctcacgaatttctatcttgttgtcctctaaagagatgatgttgcagatcattcttttttgattttcaagctgatagccaccaacaataacaaattcatcattgttagtttgagtcaggattgcactggagacagagattcctcctggcaagactgtgcaattcacagctgggctacccaggggaagatcaacccttattctgtacaggttggcaggccggatattattggcaagtgaatgtcctcctaaaatatagatggtgtcatttttggcaatagagacatgaaaagatagcccatcctgaagttctggaagaatgtatgatgtagcacacccaaattcaaaatccaccaggaaaacacagggcaggcagtcagctacactattccatttttctgtggttctgtgggtagaaggcatgtatgagcgtcctccaaagagaacacccatacttttccctcggctgtacaccacattaatggaatgaccatatctggcttcaggaacatctcctaccaagtctttctctgtgcagcgaaaagtaacctttttgttgttcttgcaaacaatagacatgacataaatcttatctgaaacctcattgtttggtgttttccctccatggatgatgtattgatgcttttcagactccaagctgcctttgaatgtgcaagtggctgggtagcgaagaggagggaggtagcaggaatccttagagaaaattgtaggcttcagtttgacatggttatgctttacatccagatggaaaactccagtggggcaggatcttttgggccagcctttttgtccaaagaagaaaacttgtccatcaaaattcatcagtgagaagcctggctgaattaaggctatgttattactgactgttaccatctgcagagacatagtttctgatggtacgtagatttttgtctgaaagaattataaaataaaatgacttagagatcgcttcatataatcatcgtatttagattccttcacatgtgaatagcatttttttaagtcctcccacacgcttgcagtgggactgaatgaggaaaatccaaggagttaggtcagtaaagagccacagaacctttactgccattccatccaaggagctgggacatgttttagccacggactatatgctccctaggatttctgggaattgtagtccttttccgtaaagagtcaccatgcgtcagctgaaagaaccacatttcccaagaatccgttctctctgggatgtgtagctttggaaatctgtctttgttgctctgggagaggggactcctggaatgtgtctgtgaataaagactagccgaaggtgcgaagtgactagacgggagcaaaggaggaaaactagggaatgggaggtgagagtggctgacaccgacccaacgtccgggttgccggaaggctgcagcgcccggagcggtgtcgggcaaac

SEQ ID NO: 7019 - DNA, 2300 bp, Homo sapien
agccctgttcctaacagactgctgaccgtacctgtccgtggctcagggattggcaacccctgctttaagggcaagacctgtgtctgattttttttctaattctccacatggctttgtacatagtagatgctcaataaatatagtttactattttatatttagtttcaatgctgaggacttttggagatcaggaaccttgtatgagatcactgtaagtctaatgctctcctaatggtatagcaaggacttggagtcttaaaacccattttcaaatgtgctactaatttctagtcttgtcaagagacaactaacccattcagcaactaattgttatgctaaaaattgcctgttttttgatgttagtaaaatccaaaggctaaaacacatctaaatctatccatggtttctatttttgcatttcttattttgtatttacagtgaagacatccaatatatcaattttatgacagttgtccttatggttgctgtaatttcaagtatcttaatcattatacaacactttatataacacataaataggttagggaaataacccaatatccttttgcagattaaaaaaatcatcacagaaggaactagaagagatgacgatgcttttttaaggatggatcgacatttcaaatgatgagaatcaaccaatcaactgagctacatacatctgtttaaaaaaaaatcaaccctgaaaatatacactaaaattttgcaaaaaattagtcacttatgcaaatatatttaggtaatatatgtacatcttcatcattaggtaagatttactatgtacattctatagacattttaatccattaatccttacaataaggtagttattattgccattttagagataagaaaactgacactcaaaaaggtcacagaactgaaactcaaacccagatttgcctagctctgatcattacattttatcatctaagccatatggaaactgatcaaatgaccaacaatagtggaaggttaggtaaattaggttgcatttagaaattatgctactattagaaattataggctgggcgaggtggctcactcctgtaatcccagcactttgggaggccaaggcaggtgggtcacccaaggtcaggagtttgagaccagcctggccaacatggcaaaaccccatctccactaaaaatacaaaaattagctgggtgtggtggcgtgtgcctgtaatcccagctattcgggaggctgaggtaggagaatcgcttgaacctgggtagcagaggttgcagtgagccaagatcgtaccactgcactccagcctgggagacagagcgggactccatctcaaaaaaaagaaaataaaagaaattataaaggtagtttttgctatcaagatcactatggaatattaaactcttccttggctgaacactttgcatacattatctcatttaatcttttcccgacaactttttgaagtaaatatttctattatcctcatttcagagacagagaaacagaggcttaaggattaagatgactctacctgaaaaacagaggcttaaggattaagatgactctactacctgaaaaatagcagagctggcaaagaaaaccaggtgagcttgaccccaaaagcccattttcttaatcattacactgtattattactcagtagctgcctgatataaagttggtagagggcctcgaataattacaactccttccttctgagccttgcattaaagaaaatgagaccacaaaagagtacctcaaagttaaaatgaatagcactggtattagtggtctctgcttcaggacaaatactttctcatttgattcaaaatagtgtttatttaaaccatagaaactatatgtatttcttctgtgtttttctaaaatgttcttaatttttaaaaatcaagttttgcccagatttctttttatctgtacaaatagtgaattgtgttgccattgttgctagtagtgaaagagttaaatcctgagggtacaccctgttgggtatctccctcaaccatctaaagaaagaaaaaaaaaggtcacagtcagttactcccattagatcagtgttcataagaacatctgtaggcacacatacacactctctttacagtcagccttctgcttgccacagtcatagtgggcagtcagtgaatcttccccaagtgctgacaattaatacctggtttagcggcaaagattcagagaggcgtgagcagcccctctggccttcaggtaggtctgataccttcatttctaccaaagctaaaaaatgggagcctatgttagtaaactttaag

SEQ ID NO: 7020 - DNA, 2300 bp, Homo sapien
ctaaaaggaagtaattttattacaaatactttaatgttattttgcaatattttatatgcatcttgctcaagcctatgtactgtagatcaccaatgaagtatcacactctacaagcaattttgggaagaatatgtatctttaggaatagggatatggaagatttatgttttaactactacatataaatgtcttaaagcctagctattgaaaaattatagaccacaaatatgcaaatatgcatcagcacatgctctagggttatacaaacaacccacaaaatactgaacagataataatttatcattaaaaagttaaaaagtcagcaaatggaactcacaaccaagtcattatatcagaaaagatgcaatactaagttttcttgattaacatataatttctggccatctccatgtaacatatgtgattcattgggttgttgcattttagcctcaatatgtccaatcataaaatgtaattcagaaatattaaatgtattggttcctgataaatcacttagtagataattaattatatctactcagctgcatacaaaaatgcaagtctattcaattctgtatcattgtcaatttagatttgttttctataaattcttgcccctttaaaattgtgggacctaccaatgaggatttttagagcccatgcgcactggaacttggaaatcttgactccttagaaattagaccaggttgaggtccatctaaggaggatactcattatctcctcttcagctattttcctcctttctcatttttatcataagcatgtacctagcataaaatacgtcttccctttttccctcagtaaatgaatattttatggaaaagtctccctaattcatgagtgcagtcctgttctttgctcagccttgttactccacttcaccaacaacactccaagaacagaaatgaagacaaaacccttagtattataccacatgacacaattgtttctagcctgaccaaagttgagaatatagaatttggggacagttagcctatattccatcttgcctccaccatctatgtgaacttggacaatttaaatgctttttgtttaagttttcttacacataaaataaaaattacaatttgatttttttttgaagattgaatgggtcatttagtcaatagagaacactgcctagcacatatcaagctattattgtcaatatattactattgttggtgctattataatagcatattttatgaaaatatctatatttcatacttgtgccctaaaatccataccgtaacaaaataaaaaataattactcttggctcatgtcttagattaatcaaattggaaacataattacaacaaatacagaacattgaaattaaagaacttccttccaacaggtagagataaaatatttagtaaatatggaagattgactgctctaattcaccttgactctaaaatcaacgtttaaaaaagggtctgttatttttagtgtttagctctatggataaccgtaaactgaggaatcataatacctaaggtaaattgttcaagtgtagtaatacgtagtggaatgtttaattagaacaaaatcctatcctttcatagtgtataaaatttagatgtttaaggaactcattgtgtctaacgattgtgcagcatatcaacagtgtagttagtacttgtgatcacattacttttagtccctttttcttccagtcggtgttacacactgcagtgcagtcacacactaatgcttaataaatttaattatattattcttctcataacatttttataaaaaatacaatacaaaaaaatacaattcctatacaccaagcagtatagcacctattcacatttttgcatatctcttattgttttccacagttaactttacgtcaggggaaagactggccaaagtgtaatggttaatattgagtgtcaacttgattggattgaaggacgcaaagtactgtttttgggtgtgtctgtgggagtgttgccaaaggagattaacatttgagtcagtggactggaaagacagatccaccctcaatctgggcggcaccatctagcaagctcccagtgctaccagaatgaaagcaggcagaagaacgtggaaagtctagactgactaagcctggcctccatctgtctctggtgctggatgtttccttccctcgaacatcagactccaagttcttcagcttttggactcgggcttaacaccagtgatttgccactgaaggctgcactatcagcttgtctacttttgaggttttgggactcaggttggctccctggctcctcag

SEQ ID NO: 7021 - DNA, 2300 bp, Homo sapien
tgaaagggccttatgaaaattatacattggagaaagaaaccaatgtaaacataatattaatagcattattttgttggcccagtccctctaaggagacccagtgaatttgaaatgtgccaactatttctctaacacgagttaatggaaaagtccacatcctggagcaggggatgttggaattgagttgtcaagctgtcctggatgtcttgtacaaactgaacaggccaatttactgcaacactgcataggctgaaggctactatctcgcctttacagttgcttcctcctggtaagattatcctgctcgaccgcagcctccctcccgagtagcttttaagctactctggattctttctgatgagcctattctttttttttatttatttatttttattatttatttgagacggagtcttgctcttgtctcccaggctggagtgcaatggcccaatctcggctcactgcaacctccgtctcccgggttcaagcaattatcctgcctcagtctcccgagtagctgggattacagacgcgcgccatcgctcccggctaatttttgtatttttagtagggacggggtttcacaatgttgggcaggttggtctcgatctcctgacctcatgatccgcccaccttggcctcccaaagggctgggattacaggcgtgagacaccgcgcccggctaagcaatagtactgtgttaatcctcagcttgggaccagtgtgcttgactgggagaggctcttaacctgcaacctgaaagcaacagctttgtgtgtttggtgataattttgaatcttagtggtgatttgattttaatgtcttcctctttgtagctcaaaactcctggatttctggatgaaaacaggcaagctttttgaaaaaactgacttctcccacacagcctgaacctcccagcgtgggggttgcttttagactcagctgttctggctctgccctccaggtggcagcagagccacatctctgaagctccaatcccctcttccctgacttcaagtgttaatgcaattgaccaatcagtgctaagatgatgggaggtaattgggtaattgtattttactgatcacaagcagagaaagggaaaggaaaaggggaaagaaagaggggcagaggagggaaggcgactgcagtccgaaaggagcttttggaagctaggaccctaagcgtcaggacgtggcattggtcgagagaaagcctgggctggcaagagctgccgccggtgctgggagagcatttatttgggagaaaaagaggggagagagcagagggagggggaggaagagagttcaaaccgaagtggatggaaggggactggggtttctgccgcgcagggagccgtgagccagggcgatggcgctaagggcggcgcggagcagctgcgctcccgagaacgcgtctcctcgcagaggactagcagacatcgggaaggtctgcgccaacgggaaccaacttgtggctccaaaatgtacccaacgcagctggaaatgagatcaaagctgcagttgcatttgagaaggatgagaagagccagcgattagggaattttttttttacccgttttcttcctttttctttttttcttctttttctttttttctttcttttttcgtgtgtgttttttttaatttgcctaccaccctgtctgtcccctcacttcgccctccccatttgaaataaaagccccagtctcaacttccatcacctcggcgctcccggagccactaccggctgatggaggagaaggggacccgggggctggcaggggccaccggcgagggaccgcatcctgcgtctcccccgtgatcccggccccgaccgcggagttctgcaacacctggaggatctggaccgggtgctgggggtgggggcggggacagaggaaggaaaggcaccccgagccttaaaaagaaaaaaaaaaagtagcggggggaggaatgggtttcttcttgacagctgacggagccttgaaattttcctccactacctccgcccccgcccccgcccccgccccccgcactccatttaacgtgagattatgaaattgcagaggcggtggagggaaggagacaggatataaccggagtttggaggggagaggggaaggtggctggccgggtggctgaaatcaaaaattcaattgcgcactgggttgtgatgagaaatctaatcagatctttggcgaaggggccggccggaaggatggagagtgggggggaagttgctccccaaattcttcgaaggggaggctggggagaggaattgaccatgtaaaaggagac

SEQ ID NO: 7022 - DNA, 2300 bp, Homo sapien
gctgaaggggaaggttaacaggaaagagaagctgttcctttttccattttggccaaatagcacttacctgtccctgctgctttgcctaatagattaattcattctgatagtattaaagatgtctggtagagagctaataatcagctctgaaaaaaacaaatcattggccttcctttgctgtcaaaatccctaaaaagaaaattttcatttcaaatggcttctagcttacttcagaatcagaggatagactcctttgaagctatctagtgcagctagtgaatgtactttttaatcgtttattagtggataaactataattagcatataagggtaagagcttcaaaacacaaattaaagtcaactgcccactagtgttttgaatcaatcaatacagcattcacttaaaaatagaagcaatgccattaaccctcgagaaattcacattttcatgtaattcataacatcaaagctctccaaaaagatggggaaattacaataaatcacaatccatgtgtaaggaaaagtctttcctcttgcatgtactgacatctgagatgcacgttacagcatgctctcagtatgcaaagaacattacagatgaaatttttttaactcaaacaaggaaataccgtggagtataatgggaacagaagaggaaaaaaatagcattttgtataaacttagatatgtctctgatgttctcttaataaatcttttctcctttctgtttgatgctaccttccgttatgatttactcactttctttaaaactgtttttaaaccaagtacatattctgttctctcaaaaataaagaaaatcagtgcaaagatcatcacttagggcatacaaaacagaggaacatttatttaatctattccatatatatatatatagtactgtttaaattatcattcctaattttattgattcctatctcaaggttacatacataaatgacataaagtgaatgcccatagattaactgaaagggccttatgaaaattatacattggagaaagaaaccaatgtaaacataatattaatagcattattttgttggcccagtccctctaaggagacccagtgaatttgaaatgtgccaactatttctctaacacgagttaatggaaaagtccacatcctggagcaggggatgttggaattgagttgtcaagctgtcctggatgtcttgtacaaactgaacaggccaatttactgcaacactgcataggctgaaggctactatctcgcctttacagttgcttcctcctggtaagattatcctgctcgaccgcagcctccctcccgagtagcttttaagctactctggattctttctgatgagcctattctttttttttatttatttatttttattatttatttgagacggagtcttgctcttgtctcccaggctggagtgcaatggcccaatctcggctcactgcaacctccgtctcccgggttcaagcaattatcctgcctcagtctcccgagtagctgggattacagacgcgcgccatcgctcccggctaatttttgtatttttagtagggacggggtttcacaatgttgggcaggttggtctcgatctcctgacctcatgatccgcccaccttggcctcccaaagggctgggattacaggcgtgagacaccgcgcccggctaagcaatagtactgtgttaatcctcagcttgggaccagtgtgcttgactgggagaggctcttaacctgcaacctgaaagcaacagctttgtgtgtttggtgataattttgaatcttagtggtgatttgattttaatgtcttcctctttgtagctcaaaactcctggatttctggatgaaaacaggcaagctttttgaaaaaactgacttctcccacacagcctgaacctcccagcgtgggggttgcttttagactcagctgttctggctctgccctccaggtggcagcagagccacatctctgaagctccaatcccctcttccctgacttcaagtgttaatgcaattgaccaatcagtgctaagatgatgggaggtaattgggtaattgtattttactgatcacaagcagagaaagggaaaggaaaaggggaaagaaagaggggcagaggagggaaggcgactgcagtccgaaaggagcttttggaagctaggaccctaagcgtcaggacgtggcattggtcgagagaaagcctgggctggcaagagctgccgccggtgctgggagagcatttatttgggagaaaaagaggggagagagcagagggagggggaggaagagagttcaaaccga

SEQ ID NO: 7023 - DNA, 2300 bp, Homo sapien
gactaattgtattcatccaatttacaaactgttttgtagtttaatctagtagctgctatattacatacaatatgttgatgctatactttatagaacaaaataaaatcactaatagaaatagtattatatgcaagtctaatcttagttagtggcacagtgttttttccaatattaatcatagaaaatctaccagagttatgaaaaatggtgatttgagagggatatttggaaaaatataaaatgtaagttattctctaagttcttctttgcaccttaaaattttgtaaaaattcaattttttcatattagtcccatcaattttattaagatctgtgtttactaaataagattaaattcttgccgttcttggaagaattattttacctgtgttttcttttgtgacatctgctggcaatacctggtattacactgcactataactcacctttatctaccttctccaactgtccaatacttttccagataatagcaatttaattcaacttaaagaatatagtgagtgttctgaactaatgaaaaggtattttaatatgaaactgaatcatagaagcagaaaatttagccctctagaggctgataacttatttagcatattacacatgtattttaatttcattgcttggtactaaaagagatgtatactttttttctgaaaactttaagctcgtttcaggcaaaaatgttatatattataatgcttacgatggacaattgtcaaccaatccctctagtgacactgtcccacacagatgttctctacaatttcatagctatgtgatttaaaagtgtacattaaagtaaaactgtgcaggtgtcaagtctaaattcatgtttaaaaatgaatgaactgtacctaaattgctatatacatcggatccatggctgtgaagcagaatgcatgagcaaactttttatattaccaggaatccatttatctatagtcccatcagtcaaattcagatacttgttgccagctccaagctttatagtctggagctggtttttgaaattgctttgtatttccatttaacagccagggaagcagcatgttaaaattttcctcggtctccttggatcctatttataaagctaatttgtctccccagacattttttttttttctcttttaaatgccagttctaggcttctaaaccattaaccccccttctttatcccaagcaaaatactgtcacagacaacgccgttgcaggacagtgatgattccgatgatgatatagttctcccaggcaggatacaaaacatttcgtcttctggccggagatggattcactgccctccctgcagacacgcaggctcacacacggagcactgggaagtacacatttactgtactgcatgccgactgccttgaagaaactgtagctaaccaccttattagtattcttgcctccaccgtgtctcacttgcagcatcagagggctgagcaaatgcagtagaacagggacagacacagctctggcaatcatctcaatgcaggctgccgaatgttgggggtggggggatgcagcacttcgagattaataaccttgccataatccggggcaccctgcaagcagacacctctgctgattgacctgctactggcttgatgcatctgcctgggggagagggatccggaatctacctagtcctggggcccccctgattttggatgttcatttgatccttcacagatctgggaaggtaacagcgagccgtaccatctgcagcacacagcagctcttggaggttactactgacagttttcattacactggtttgtgtgagtgcgtgtgtttgtgtgtgtttgtgagtgtgggtgcctgctttgcatgaaagagaatgtgtgagtgtccgtgtgtgtgtatgtgttagtgtgacaaccaaagcaggtatttcgtacagtaggagatttcaacaacgtgacaatattctctaggcacttgggctcactgtctgtagcccccaccccccgcctttcgccacctccttgcttccctactcccccttctgcttttgcctttgatgagtttttggcttactttttggcggagtctcttggacacgtttttgctggtgctggaagatcagatacatggaacctttgaaaactgattatttttctccgatatgacttaaaaaaaaataaaaagaagaaaagaaaatagagtagtgcacggcaagctagaggattgtaaattttccttggtgaactttgaggatccataaagaaggtaagtcacgggactcctcagatctcagttcttgttgtcttgcaa

SEQ ID NO: 7024 - DNA, 2300 bp, Homo sapien
cttagcaagtgggattctcctacttcaattttctctttacctcctacattagtcttcagccccctttctttttggtgatttcaaaattggtgatttcttttcctcctttttggtttctttttatacagtcatatgttgcataatggtgttgtttctatcaacaacagaccacataaatgatgggagtcctataaaattacaatatcatattttactgtaccctttctatatttagatatatttagataattttctacaatatttagtacaggaccatgcctcacagttttgtagcctagtagcaataggctataccatataacttaggtatattgtaggctataccacctaggtgtgaataagcacattctgcgatgtttacacaaaattgaaattgcctaatgacacatttctcagaatgcattcccgtaattacatgaagcctgactgtatacacctttgtattcttcagctagatagagccaagttatcactgtgtcccattcacagaaactgaaatcggtgaccctgactttctggcagctttgtatgtaagcataaacagatcagatttctgctggcccatgcaattgactgtctctgagaaaggttgtagaaagtaggcataagaacagctacaactaccatacttgatatctgtagagttctcgttcaccagaatcatgaccaatgtagagcttttgaatatttgtggtaaatatttcttagctgcggtacttaagtgttctcatttagcaaaagatagcctgagatgcagaagaataaaatgccttacctgaaaatgcacacgaatagagagggttacatctcatataggtgcttaaaactatttattggattgcataagacagcaaatgagttaaagcccttggaaaactatatggagatccagctcaggggctctttccaaaagctgtcatccctctattcaagtagcacagagtacagtcatagagagtgggaaagctgagatgtccttatttcttcactctctcactgtataaacaatgacacctgccctcctttgcctaatacagttgtaccataattttaagaataatacaaagaagcaaggaaatgtgtcacattgagctccgtggccacagtgcctagcatcatccctacgttgtagtaggtatatgatggatactcactagataagaagaatgctggaggaaaaataaaaagcaaagccatgagaagctctgccaatcataccctctccattcaaatattcatgaactgatgaggcggagaaattgttctgctctgttacaaaatctgtccccgttccctcttccacacatgtaagcagcaagcacttactgtcagattttgaccctggggaagtcattcatttccactcgaaccagctgtttcaaataacttgtgcatgttgcatttaccaacagaaaattatacctttttttctttgattcactgagggatttttgtttggaaaacatttactagtatctttcagctgctatgctagatttcgcagcaagcttctcattttaaaagaggaacccccacaatgtcccaaccttcaaggtctcttgtggtgtcccgcgaaggggaacatgaagggaggtggaaggggaacaaagtgttctcctggaattagtactcgccaggggctgcttcagagtacaactattaaaaggaagcttgtagagtggggaaacaccagaagaatggagcaataagaataaggttcaaaccttggattcaaaatgttgagttattgaacctttacattgcaccttcataaaatgagaataaagatacgactctataaggtatgtagtatattgtttctaatacacaagaggtgctccaaaattgtagctactaatttaactattttttgaaaaaaagttctgccctttttaagaaggcaaaagtaaaacttaacacatcaccagagatatcattaggacaatatgggatattgtttccatggaggttatagaattgcaccaataaagacagcattatttcacataccacattctcttacaaaatctaacttgtaacagataatttacatttctagagaacaagctctttatggtacatagaaataatcctgtcatacagtgaccattcagtaagtatgcatttaataataaaatgcatagattagtgatacagaccattatgatgacaaacgatagtgcaacatttatttagtaagaagtgagtagatgcagaactttaggtgctatgaaggataaaaattctgaaggcgacactgcctttgccctccagcatga

SEQ ID NO: 7025 - DNA, 2300 bp, Homo sapien
tgagatttgtttctctaacattcactcaagtttatgccacccaagttccaattcataataagatttgcattttcagacttacatttaaatcaaagcatatgagattcttgttcatcacaaatattaagaagggggtagtggtcatgtcatttgtcataatttatcatgatgtttggaaatacttcattaattaagttcccaaacaaagcctccttctttcccctttccaggagcccattaattagaattagattattttgaaatcacgacttggtagcaacctgtgacagatatctgggttactcaacaaatcacaggggctctatgaaattgcataggaaaagcttcgcaaatgacaatacccactaacaaactcaccttttccaacagttctccaggacacatccttccatgactcagggtctttgtgagtgggtgtcaggctcttgatgtttgatgaaagatgaatgtctaacaaatgcagtgcaaattcaatggcaatcaattgcaaagtgaaactgaaaatattgcaaaaggtgtaggatttcatgaagtcgagggaattgatattggaggatggtctgaaccattggcaaaacaggaatcagaagaacccttataaattgaagcagataaggatgaggatgcctgaacttctttgagagaaaatgattaaaatatcaaatgcctaagggagtctcttcggcaaaatgaggaagcctttaagtatttttcaaaaatgactctcttatttgttctcactgagagcgttaaatatgaaataaagaataccctattgtgcaatcacacaattttgtgaaaaaattatgctaaaggaatcaatgcatgatttattctttattctggaatagtaatgacctacagcttgttatttataagtttaaatcaatttttataacttttcacttcaggttttattattttattttatatatgtacatatatatatgtacatatatatatatatatatatatatatatatttttttttttttttttttgagacagggtcttgctgtcacccagactggagtgcagtggcacgatcacagcttactccagcctcgacctcccatgctcaggcctcccaagtagctgggagcacaggcgcgtgcaccatgcttgaatccttccttccttccttccttccttccttccttccttccttccttctttccttccattcttcctttcttttctttcttttttctagatgaggtctcgttctgatgctcaggctggttttgaactcttgacctcaaggaatcctcccaccttggcctcccaaaatgctgggattagaggcgtgagccaccatgcccagcccacttcaggttttaatatagaaccccagtaaacctcgttttctctattttctatgacgttttcctctccttttaagtaagttcattcacggtagtcaattacccctggaaatcaaagcctgtctgtatacgacagagtgcctgcccacaaggagcttctggtgttattggcgaggttttccaaatgtgctgggcacaggtcagtgacgagtgagaggattcccttctgaccaggctgtaactacggtttaactggggaaagaagagatgggaaaaggaaggaggaaataaatgtcttctatgtccagtcaagatctgcaggatctgtagcctggtctggccttgctttctttggctcccaagatgaccctctccttctacacaaaccctttttcctgctgctgtcagaaacatgttgacaagactcttttgttggctttctgagggagctcatgaaaagcacgctgggaattcagcaaaacaccggcgctctaactgctcctgaatgagacagaattagaaaatggcttcaaattgaaaacttaattttcaattagtgtacattcaggcaggagtgggagggattaagggatggcagcttgtttggttaacacactttttagaagacacgcttgcaagctattagttagcttcctcctttcctccccctcccaccatcctaagtgctccttgctctgtaatttggcagccgctcgctccccggcctgctgtgctctcagtccctgaccgactcagatgcagatggcagcagcgcagccacaggaagtgggacgcagcctgtggcctccgagattggcttctctgtgtcctccttgctgtggaccccgtgacgccacaggtgagcttgccaccttaaaagacgcatgtccttctgatggctttaaaaaacacgtttggaaaagaaaaaaacaatttctttctccagcatatttg

SEQ ID NO: 7026 - DNA, 2300 bp, Homo sapien
tgacctcgtgatccgcccgcctcagcctcccaaagtgctgggattacaggcgtgagccaccgcgcctggcctgcaattttttttaacattgaattttacacttgatttcttattttcagacaggggtcgtgctgtgttgcccaggctggacttgaactcctgggcccaagtggttctccccgcttagcttcccaaatagctgggactgttggctatcacgctcagctctaatcctttttaggatgtgagatttatcctcaatctaactgagaagtacaagagccggggagttcttttgtaatcatttcccgtgtatgttctgtacaagtggatgtggctttgaaatttacagtctattatagtttgatatttcaatcctgaaatgttaacatcctttaacatccttttacacatacacacataactttgttttgtatgctttgtatgttttacataatgggatcatcttatacctgccttttaacttttctttttctttttctttttctttttcttttaatttttttgagatagagttttgctctgtggcccaggctggattgcagtggcatgatctgggctcactgcaacctctgcctcctatgtgcatataattcttctgcctcagcctctcatgcagctgggactacaggtgcatgccaccacgcctggctaatttttgtatttttagtagagacagggtttcaccatgttgaccaggctgatcttgaactcctgacctcaagtgatccacccaactcagccttccaaagtgctgagattacaggcgttagccaccgcacacggctatatatatatataatattattatataaatataattatcttaatatataaatatatattattatcttaatatatataatatatattattatcttaatatatataatatattattatcttaatatatattattatcttaatatataattatataataatatacaatatataatatatattatatatataattgtatatataatataatatataatatatattataatattaatatcataatattatatatgatatataaatataataatatattaatatatattaagataataatattaatatattaattatataattaatatattatatataatataagataattataatatataattgataatattgatatattaattaatattatatctcaatatatagatatattataattatattatataattaatgtattaattaatattattatcttaatatatattaatataatattattatatttatattatatattatatatttatatattaatataatattattatatttatattatatattatatatttatatattaatatataatgttatatattatataatatataatattatatattaatatataatattatatattatataatatataaaattattatatattaatatataatgttatatattatataatatataaaatattatatattatatcatattatatatataatttcatttaaacttgtatcttagaaattcttatcagtaagcgtacgtgatttcatttatttattattcttttggatactggacataatcaggtggccccaattctttacactggcagcaaagataagcaaattcttccagcaggccaaatttgaccccgcacttgatgagcgtggtggacacagagggttttttaatagcataggaatgttttttgcttcccaccggacccactagcctctagtgccaccgattaatattaccttccttgaatcaggaggaaaccatttgtgacttctcatatgtaagatcttctaagggcagaaacgcaattgtctttgtattcacttccccgcccacccacaccccttccatggagagcctgcagccaagctcaagctttcaaaaaggcgtgagctaattcaatcatccttgccgcttttttgctcctccaggctgtagagggcgacaaaaaccgcggaggcgcattggggtggggggtgtctactgaaggccgctcccgacgtgcgcgtctttacgtagacgtcgggggcgcagccgcgctgtgcgcggtgactggcggctgcactggcggcagctggaggtgtaatagtgcgggtagtgggtttggagaagttccgaggcggcggtggcgccggtcaggacaaggatagcggaaccgggccctgggcttgtcgctcaccatgccgacagtagaggagctttaccgcaattatggcatcctggccgatgccacggagcaagtgggccaggtgagt

SEQ ID NO: 7027 - DNA, 2300 bp, Homo sapien
ttctcaggctctcagatctagagtcaggtggatctgagtccaaacctgagctctaccacttagcaatatgatcttggccaacttacttaactagccagagcttggtaagttgtgacgattaataggaactatgcatgtacaggacccagtacgtattaaacactcaagaaatgttagatgatgatgatgtcagctttatacacaagaaatagggttgacctctatgccccaaaaataagatgctgagacaaaagggattccatcatttgccacttctctattttaaaattctgaaacactccctattgcctatgtctaaactccaagaaactcttaaaacatgccactgacttcaccttttcgtttcttgagacggattctcgctctgtcacttaggctggagtgcagtggtgtgatctcggctcactgcaatccccgcctcccgtgttcaagcaattctctgcctcagcctcccaagtagctggaattacaggtgcccgccaccatgcccggctgatttttgtatttttagtagaggcggggtttcaccatcttggccaggccagtcttgaactcctgacctcagtgatccatccacctcggcctcccaaagtgctgggattacaggcgtgagccaccgcgcccggccaacttcaccttttcacttattattctgcctgaaccagcacctgagctccaaacctttttttcacctggttggttgctctctcctgtacatatgcattcatacacccccattatcctgtattttaattgttaacctgccaataatatctcactatattgcacactgcccaatggttacatttccatacccagagactatcagagtaccaggcaaaaagcaaataagccatatatttttaatgaaatgaatgttcagtcttcaggcctttaagaaaagctgttcctggaatgaagaaaaaaaaaacaccaatgctgtggttgtttctacatttctatagcgtggtgtttaaacacttagcaactgctctcctgcatacacttgtgtagagaagtggttaaacaatattctcatccttcttttcccaaggagaaaaccaaaagcataccaaccttaaataacacacacagagggcaatcttgaaagacctaaaatgacatatctagcaagaagctggcagccaagcttgacgcctgcctgcctgcctgttggttcactagaagaaagtggttctcaaactttaatatgtataccagtcacctgaggctattgttaaaatgtagtctgattcagcaggttgcgggggagagggagaagagccgagaatgtgcaggtctaaaaagctcccaggtgatgccaatgtttctggtctccagacctagacctctagcttagacctgtgctgaccagtacgttagccacatgcgggtattaagcccctgaaatatgactagataagctgtcagtgtaacatgccgatttccaagacttagttaaaaaaaaaaaaactaaactatctcaatgatttgtacagaccacattgaattaatattttgtgtactttgagttaaataaaatgtactagtagggttacttccctctatattttacattccacacgtggctcgcattatagtgctactggacagcggtgccctaaactaacaaccgtctccattctgaagcttccactattgtgagactttaagaataaaagcaacacctctcttcccataggtggttcgaaagcacaccttttgttccccaactatctaccagaaataaaacgaaaaaacaaagatttaaaaaacaataaaattgagtcctttcacttctgcttaagcgccacctaagccactgcttttgtctccctccggttcccacgctccgagatcgtatcacccacagaaaaacaataactaaaaagcggtctccatccctgaagccaagctgggagagtagccgaaggtcgcgcttcctggccgccaaaaccgaggtggaggaaacttggtagtcagcgagctacgccctctcggctcctcctcctgctcctcctccagggccgacctcttcaagatggcgggcgccggagactagcttccgcttccggtgtgagcggcccggccgggggggcaagatggcggcggcagtaggggttcgtggccggtacgagctgccgccttgctccggcccaggctggctcctcagcctttccgccttgctgagtgtggcggcacgaggggccttcgccaccacgcactgggtcgtcacggaggacgggaaaatccagcagcaggtagcggccggggcgtcc

SEQ ID NO: 7028 - DNA, 2300 bp, Homo sapien
ataagagttctatttgggccatgttaaattcgaaatacctatatgagtttggaatttcagggaaagttagagttgggcacatagagattaattattaaataatgaatatctgaagccatggaactggatgaagtcatctggggaagagtgaagtttgagaagaagccagtctgactcctgggtgcctcccacatgtagttatcaagcagagggggaaagccagcaaaaaagaccagaaagggtatcctgcagaatgtggtgtcctaagagtcaatggcagaaagtggtcaaagaaaggagggagtagttcacagtaacattagaacatttatagatttgggggagattttatgagaactacacaaagatatttctttaaatatatatttttatcttacctccagtatgctatgatatatatttaacttatcatgatctcttcagtagttcatgtagaactttttttttttttttttttgagatggagtctcactctgtcgcccaggctggagtgcagtggcgcaatctcagctcactgcaagctccgtctcctgggttcacgctattctcctgcctcagcctcccgagtagctgggactacaggcgcccgccaccacgcccggcaaattttttgtctttttagtggtgatggggtttcaccatgttagccaggatggtctcgatctcctgacctcgtgatccacccgcctaggcctcccaaagtgctgggattacaggcatgagccaccgcgcccggcctcatgtagaacttttaattgaactttttgtccccgtttacattataatgtgaaaataaaagatgaaaatcaaaatgaaagcatttgttgatttgaaaaacaactttctcaaaaggccatcaaaaagaaaactgaaacctcggccacaagtcagttgtgaagaatgtactgtcctttaaccagcttcaagtagaagttcatagttgatctgctcatagtgttaaaatctgtaattgcatcactcaaaaatcacatacttttcttgaagatagaatacttaaggatgaataatgcaggattgtacttattgtagtcttaaaaagctacgtttaactaaattcaaactatttttaactacattaaaataactcttttaaaaataattggtccttgtgaaagagtcactgaaaatctataaaagaaagtaaaattaataatttcaaaactggtttgtaatatattcttttggagtttgatttttacacagctttatagttaaaacgtaattattccccataggatacatttttaatagtagaattgtgggagtcaaagggtaaatgtaatatacattaatatgtatgataatgtaatatacattacatttttaaagctttttacatacatgtcaaattgtcccccagaaatgctatagtaacttagcatttctatagtttaatatctaaagttaataatattcagtaagtattggctttctttttagtctttgccactttgtaaaaggaaaacttgtatcttttaagtttctatttctttgtgaagttacacattttacatacttcttagctgtttgttcatgtttttggccctttttcctttttttttttctgtctttatgtttagagtaagcctgttggtttgtgccttcactcagatattacataaatagaaaaaattctaaaatgttaatttcaggaatttcatgttagagctatttctaagtagatgaggtcttctgacttaacttctgaagtcctgaaatagagctcaacaagttgtgatcagttggtgggatttttcttatttccctcttggaataagctggagttggatggtctctatatgaagatcacaccctaatgcacgtgctcagctgatgattagaatgctcttctgacaggtatagtttctttgcactgtgtcctgttctttatcattgcttatcattcagtctggctcttcttcatcttgaatttcagaagagccagaatattaaaggtgctccttttgagtattctaagttaaactgtcttgagtcgtgtttgtaattttacttttttaatctctagaacacttcctcgtgggtactgtataacatggcttcattttactggagaattaagaatgagccatatcaggtagtagaatgtgccatgcgagcacttcacttctcttccaggtaagattcctcctcttctggacctgattttccacattcctcaggactgttaaagaaacaatacataagaaagcagtaagaagcaacattgcattatatacttttctccatccctgttcaaa

SEQ ID NO: 7029 - DNA, 2300 bp, Homo sapien
aaaaataaataaataaataaataaataaataaataaataaataaataaataaagagcgagagagagattttgattatctgttatgttgttatgtttacgaagtcagattttatagggagtactcaataactccatggatgctttctatttcttaaagtaccatctaaatatttatatgcacatgcatttgattcttttctcttttaccatgggagctagaattgggctattattattattgaactcaaagctttcatctccccactttcccttttagagtaagacctatttaaaatttgagagcaaccatgctatttgtttcctgaagtaatcagtccaattatattgcctcaaccaataccaccaacaaaatgctcattatcaacagaaaatctttattaagcccactgctaggtgtgtactttctctcactttctgtcgctgtatatacacacgtgtatacacacacacatacacatatacaatcctaatctatctagttgggaagaactaacacatgtaatgataccagatagtatataatagatgttgaataagtggtacagacagcaagtacagccagaattctgagtataaaaaaaaaagattcaaactctgaaactttttgagcactgacatgatgctcaaaagaaatgatcattggagcattttggatttcacattttttgattgggatgcttaacaggtaagtgtaataaaatattgcaaaatccaaaaaaatctcaaatctgaaatactcctgattaagcatttcagaaaactgatactcaacctgtattagaaataaaacatttattctatcttagagaaaactcatcatgtctaatcgtagatacagaaatttccagcaataactacttaagataactaagagattaggagagcatctataggaggacaaaccacaaaaacttagaactctttaatctggaaaaatccagactgcattgggaaaaaataagagacaaaaattaagaagccattttaaaggggaaatagtgatagggaccaaaagcttcctatgagtattgtaaaccagctcccagcaatatctcatgtttggtttccaagggaaaaaataaagaagaccagattcacaccctctgggattatagctctttatcttaaaaccaagcattttaaagggaagaagggggatgtttagaaatgaaatagattgaaacccaatacaccttttggactttttgatggtctcaagaccgatcatttgaaggagtgtagcttccaatagtctatattcataaaattgtatcaccactatatagtgaaagaatccattcctgttcacaaagacctagagctacaaattcgtcatattcattccttttccttttgtctttcctaccccatcccatccccagtcccattctcattatctagcaaggtttcagaaatacacaagcatctttgtaagtatatccaacattgttccaccttgctttgaaggaaggctgtatatgtttgtgttctctcatctaggttaccctttcaccctcaaaacttttctttgtaattgattgcacaacagtctgtaatccttaagtgatagttatagaacccttaagaatactttcttaagttccctcgcctctacccacacacggcacaccaattttagagtggtgagcattttagtgtaggaagaaaaggggaataatgaaccagatttctcaattagctaattattaacctaaagagactaaatcataaaaatgaagcaaagggacaggaaaacgacctatgccatttttctcatactccaatggcaaagttattgaaagttgttaactatgtattatccatgaaagaatatcgttggggcatagttcttaaaagatccaattgctttattactgagctactttctgattttctactaattttgaatattcactcgcttttttggtgtgagttaaattataatcacaactccttttccactttcaatttgattgaactttttgtttcattttctagtttggtgaggattcatcaacctccagtatgatgtctgtgaactttgatgttcaatcaaatcagagtgatatcaatgattcggtcaagtcttctcccgtagcccattctattctctggatttggggcagggactctgatgcatatagggtaagttaatagaggatgacgaagcagttttctcaaactggcaagatccattaaagcagtggccctcaacctcactgattaatatggcctctatgactgttcagattagttcagcaaacgtgtagtacatttct

SEQ ID NO: 7030 - DNA, 2300 bp, Homo sapien
gaaagcaactaccattgctcatggcttctttcccattagccctccatgggcggggacacacacacacacacacacacacacacacacacacacacacacacacacacacacacacacactctcatggcctctttcccattagcccttcatgggtgggcacacacacacaccacattcagtcttttacaagttgtacttttcactgctcccaaacacaaatgagaattcctgtgcctgttgctttgcccaacacattattcttccttgcctagaatgctgccttccctactgatcggcggggggaagcctagaagccttgtaataagataaacctgatccagatctcagatctactacttacttttgactttaggcaagttactttatttcactgagaatcggtttcctcatttctaaaatgaagatgcacatggtttttatgaggataaagtggaggaaaaaatataaagcattcaaaaaatatttcttccatttcatgtagttccccttttataagtcctgcctattctttaaaattcgagttctaactactcaaagcttattctctgaagcacttatttggaacaagtattctttgctgtcttgtatttactgtctccccaagttgtttgtcgatttcttgagagctaaaactcttaaaacaaagaatcctcaatttctgacatagtcttgttaaatatggtagcctccaatgtataatagtgtaaaagtggaaaatggaaaatgactctctaagcatgtggtccccttactctaaagtcattaagttggaaaaggttttgagtccattacattttcttggcacagtaagggagatggcattagaagtacttccttaaattgtgaaatctgaaagagagccatcagtcaagaaagagacatcttgtgtttccactcatgtggagagagcttgatttggtgaatctgtacacacagataagatgatagatagatagatagatagatagatagatagatagatagatagatagatagatcggtctatctttgagacaacattctctaaaaattaaacatagaatgtgtttgaatgttctggtaaaggagaacagctacttacacactcttaaccaaagaattgtcctctaacaggaaagttgtgattctccaatgaaaatgcattttcattgacaatgtccatggaacacaagggggaaagaggacacctgttcagcttgccagatcagctagaactaatcaagggtagtcaaaggagggacagatgtcagccagattgctgccatgttagatataactatctggtaacatactcccctacccagagaatgaccatcaggtatagctgaatagtgggggtttgggttcatattaacacaaaactcttaataggatcaaaatcctttgactcacaggtaaaagtcgccatagaggtcattcccactatacatgccgaaagttatttttattgatatgaccagaacctgttttccaaaagaaacattgcaaaacatttccaaaagttatattgcagccttaattgttgactttctgccatcatccccctttaattctttggcttttaatttttaataattcctcaccttttggtatatctcattttaagccatgatgcaaaaatagtatttttctctgctataatttatctcagacttatccaggtattaacctgtcatttctcacaaatagaaggaaagctttttgatgatatttctaacttcaagaaaatatttcatggccattatgaatggaacaaggtcttggggcttgatctttgttgttacagttgtttttctcctcctaaatacttgacaatagcctacagctgaaacttgaacttcagcgcaaaatcttgaatcacagtaatgatctggctttgggtgctgcagctcactgatttttgtgtgttctgctgaagaaaaaccggcattgtcacatttttgctcttcttgatattttaggaccttgtactgtagtactacacgagagatatttctaatgtgctatatctgtgtctcttgtcattgaggtaattgtcatgagaaaaccctggacaacagccatgacaaacagaaatattttgacaactcacagtcactggatgctgctgaagaagagccctctgagagaggaacagaggaggaccctgtattctctgttgagaattcagggagggactcagatgcccttagacttgaaagtaagttgatttgacctgagctgtgcttctggggaaaaatcaactctcaagctttaagcttaggcttttctctactttt

SEQ ID NO: 7031 - DNA, 2300 bp, Homo sapien
tatttttcaaatgaaattattaaatgtaaaagaaaattaagattttttgtgaaaattatggcttatttaagttattaatttaaacagagttaatttgaaactcttccaaaactgttcctttctgttttgttaaaatctcaatctaaacccctgcctgtacctcaaacagttttctactgttcgtaaattcctataatataaaaagcgctatacagaactaaagttctccttcctgcctattccattataactccttcagaaaacccttcccagacaagacagttctgctcttttcttggggatttgatgtaagtaaagggcccacacccaaaaggtggtacttacgaaggatattaataaacagagctttaaatttttttgtagctttaaatagcttgttgattgggaacatacacgttagagtcaaacagactcctagctctgccagttgctagccaggtgacctggacaagtcacttagtctctctgagtctctgttttctcatctgagaaatgagggttaaaacctacttcaggccagatgcagtggctcacatctgtaatcccagcactttgggaggccagggtgggaggatcacttgagtccaggaggttaaggctccagaaagctagtatcatgccacggcactctagcctgggcaagaaagcaaggtgctgtctctaacttaaaaaaagaaaaatggaaaaaacttaaccacatgaggttaaaaaaagaaaaatggaaaaaacttaaccacatgaggttaaggatgtaaagcacttagcatgggatctgaatacacaggaagtgctcttcaaatagttgataaccaggctggttcttggactgtggtggtgtggtgggggctgggaggagatgataatctttcattaacatcattactccctgctgctcttctttatagtagtggttctctctactgggtgtggacatttggcaatatctggagacatttttgttgttatatctggggaacagtgctaccaccatccagtgggtgaaggccaaagatgatgctaaacaccctccaatgcacaggacaggtccctcaaaaaattatccagcccaaaatgccaataataccaggttgagaaaccctgctttagagataaatgtttctactaagttggagttgtctttataaaatcaaaatacagaggggcaaaaattaagtttggtaagaatgttaacattgaagaatgccttaaccccttatttcatgttgatcaatcttaaatctagcaaaggactcatttattcttacttctccacctatctttactcagagatgatctttagttccattgcataatgacgagattttaattagatcatagatgggggaaatgttaaagactacaggaatgactagcacctccaaatacaccaatccaggtgaagtaatcaccagggcataaggccctttgggttctcttcctttgcaattgtgtggattcatggcatactttccttccaggaaaaaaacgtgactaccagcgtctgggatggcccagcccggacgaatgcctcaaactccgctgggtagagctgactgccatcgtgagtacctggcttgcagtttcttcaaaaaacattgagtaagtatgttaagcctctccctcctttatggcatttgagtcccattgaacccagctgactttaaggatcccctcttagcagctagtagaagagttatcctttctagagctgaattttcaaaggatgaccatgctgaccatggcccccaggtggacccaacccattgtagcaaagcagtgagtgtgccccccttcccggtgccttcacctgtcctttgtaagctatctagcagccatgtataacctgcttagtttgaattgaagactggatcctctctatagaagcacaaaacccatggtttgtcatgaatatcatgcagttgtaagggagccagagcaaatccagatttgcaaacacctaccaagacatagtagatgcctctgataactgctttttcctcactggacactcgctctcttttgctgaccccttttctaccctttaagtgttggagttccccaggatttaccactaagccttcttattttgtaatcacttctagtcagactgatctactcccaaaattccaatcaacacaaagatgtactaacagctcccaaacttgaatctccagaccagatctttttacaatgcgttcaactcatttgtctgtctccctgacctgtctgtctagattgcactcaggcaacccatgctcgggaaaactaaagtcataatt

SEQ ID NO: 7032 - DNA, 2300 bp, Homo sapien
aatttattcaaataggtttgaaaacttaggtgaaataatattttttagaaaactacaatgcagaaaaaatgctgcactgtagttttctaaaaatattatttctcagtagaaacagcatctaaatcagaaagattgccatagaagaaatggaaaaaatagttaattccaaccaaaaagcacactaggcccagatacttcacagaggacttttacaaaccgttaaagaccaaaaatttccaatgctgctatatttcagagtatcaaaaaaagaaaatgtattttacaaagaaaacatatcattgttccccaaatctgaaaaaaatgacaccaaaaaataaaactactaacctatttctcttgttaacaattcaaaagtagtaaaatagtagcaaacataatctaacagcatattttgaaaaatacatcatgactaaaaggctattctaggaatactgaattgatttactatttggaaaccgttaatatccttcatattgatagaggggaaaaaatcatataattatatccagacttgtgcaaacattggatatattcagtaccaacttagtttaagaaccctaagaattgatacttttcttagcacaataacacacacacacacacacacacacacacacacaccacttagcagaaaagccaggaccttactaggcgccttctaaatgcttttccactgaagtcaagaaccagacaagaatgtccactctatctactactactcaacatgagtttgaatgtattaatatagacaaaggcattcagactgcctactgtatctaataaaatcatatgtctggaaaacccaaaagaatccatggaaaagcaactacaaagaatacaagaatttagtcaaataacattaaaagttaatacacctgtaaaagtaatattccagttaggatgtagtaggtcaaggcaggtcagtgcattacagtaacttgaatgaaccagataaacttctaaaatcatgtttttaaagctatcacaaaactaggcaagcaacaagatatgaaagaactaaattgctagtgacagaagaacctttccaaagtgagctggtgattgccagctgtgtctccctgcctatgcccccagcacttgttgattcagggtgtgagctaagaactggccttagcgtagggagaaagccattactgaggaaaaagagaaagaagtaaagcttttagcagttgttccaggtggaattaacagattggaaatcaaacacatgaccagttttttttccaaggagcatttcgattagaactaaggccacacaggagtctgggggattaggctcaaaacttaggaacggtagagtgaaatctctccatctcacactgcttaggaaataaggagatgctgggtaacagagccagccataagcatatggctttttcccctcaggactttcatcttaatactacttggatgggagactgaagtgagctggggatctctaacaggaaaaagtcttttgggctgaggagacaaacacctacctactagacacctgaggtcattcctgttcctcagttgtggcactctggggattctgattagatctagattagttccttatctagcattaggtctagattagttcctaatcagaattcctggagtgccacagcagaggaacaggaatgacccagacagattgagtcttgccaaactgtatgccccaacttaacattatcaggcaggaatgagttgatcagtcttacgacctctttgcctaatagaattaagggaaaaactgccctgatgaagtataatatctggagccgctgtgattcttttatacagaaagaccagaatacaatttttagaaaaaaatactagatatgcaaagaagcaagaatgtatggttgataataaggcaaagtgcagacaataggagtagatttacagataatagagatattatactcagtggacaaggactttaagataactacaattaatatattcacaaaaataagggaaaagatgaagaaagtagatgaaaaaagtaccttttcaccagagaactaaaaactactttaaaaatcagataagcattctagaacttaaaagtacagtaatgaaaactcattgaatgggtttaataacagattgaacagagcacagcccagaattggtgaactagaaaaatatacagacagaaccacagagaaaataagggagtgtggggattgataagagcataagaaacgtgatggaaaaactccaaagatctaacatacatataattagggtctgggagatagagaagt

SEQ ID NO: 7033 - DNA, 2300 bp, Homo sapien
aaatttcaaatggatcaaatatttaaatgtaaaaaatgaaattataaaaattctgtaggggaaatggtgaaatatttatttcttttgctttttaagagacagggtctcactctgtctcctgcaggctgaagtgcactaagtggtgtgatcatagctcactgcaacctcaaactcctgggctcaagcgatcctcctgcctcagcctcctaagtagttgagactacaggtgcacaccatcatgcccagctgtattttttattttttgtagagacaggatcttgctgtgttgcccaggctgatctcctcttgccttggcctcccaatgcactaaaattacagccgtgagccaccaagcctggcccagtaaaatttctttatatccttggaatgaggtagggcttcctaactacaactgaaaatccagaagtcattgaagatcactaaaaaaccaaattctgtagcaatcaaaatctacatcacacaaagtaccataagtccaaagacagacttcaaactcgggaagcttatctgtaaatcataggcaaggatgatctccctaaaatataaagaactttttaccaacagacaagacaaaaacctcacagaacaattaacaaaatatgaatgcaaatagtttacagaaaagacgttcaaaaggctaacaaatatggaagaatggtcaactctactcataagaaaggaaatgcagattaaaaccacatttctcacccatcagattgtcaggggcctaagagtttagtaacaaactctgtgatggggctataaggaaatggtgatacttagatatttctggcaggagattaaattgttataatccgggtgggcatggtggcttatgcctgtaatcccagcactttgggaggccgaagtgtgcagatcacctgaggtcatgagttcgagaccagcctggccaacatggtgaaactctatctctactaaaaatacaaaaattagacaggcgtggtggtgcactcctctaatcccagctactcgggaggctgagacagaagaatcgcttgaacctgggagatgaaggttgcagtgagctgagatcattccactgcactccagcctgggcgacagcgagactctgtctcaaaaaaaaaaggacaaaggaaaggaggggggaggggggaggtgaggggaggaaattctagaaggaaacgtaaaaaattaaaaataatgtttacttgtctaccatagagacgaggatgggagagagacttcatggtataactttgtatacttcctggtttttgaaacgtgtgactgtgttacctattcagaaagttaaataaaatagaacatagatatgagatatagttctgctattcagtagttgagtgaacttgggcaagacacttaagctctctgagtcatagttttctcatttatagaagggctgtaatagtagtatcaagctcacaggattgttctaaggattaatgaaggacaggtggaacagaaagtgctgagcagagtgccagcacttagtaaatactcagttgaatggtcatgacttgtgttactgaacttaatcttggtaataaatgagtatgttcttgaaaggacaccagccttggctaacattcctttgcagaaccagacgtcctgggtcctctccagcatggcagccctctactggagggtgaaaggccaaggaaagaaggcaatcgactgcctccgccaggctctgcactatgcgccacaccagatgaaggtgagtgggactcagaaggtgggaacttctgcccctttgtcctttccattccccatggtttattctgccctttgaaccagcctccctcatgctcagccagtgaggacatattccaaggagagaatggggcaggagaccttctgactgggcttgtgccccagcaagcctatgaactatccctgctgccttcccagcttcagcaggttggaacgtggggaaggccttccagatcactgtaagacagtactgcatttagtcccctttctgctgtgttcagagccacccaacatacagcaaatgcactggcctaagtgggctgacacatagaagtcaatctgaatttagcttgtcatcaggggcctggtgacctcttagacttgttttgcttatcctcttggcttgagcttgcttccaagcacagagatagaagcaaatttccatttattcatgtacattggccagttcctggtccttgtctgacttctactttttccacaaaaaaaaaaaaaaaaaaaaaaaaaaaaccggctaaccctgtgtgacaccagacttttccaga

SEQ ID NO: 7034 - DNA, 2300 bp, Homo sapien
ctagatatttgtgggaagagaatgactggaaagctagaacacattcaaaatccaagggccagaaaaattttaagctccagcctcagcctccgatctcctgggaccagccccataagaaccatccattctagcccaacttgcaaatggagcccaagagttgaacctcggcatgggactcaagatgtctctaaagttcaaaaacacctggattacctgaaagcagaaccgggtccaggtcctgtgctgaggtctccagttttctctaagtaaaatatttctagtggagaaaaagcctgtggcctctgggcagagatttgttctatagagaaatgaaggaaatgtgcaagagagaacagttttactctggagctccctctactggctctttgatagaaatccatcgcagttattccgccctgccttgtgggtatcaagttaaagcatccgagcatcctggcaccttgaagcaaggagaaaaggtgtcctgaggtgccaaggaagatgaaactgcagatactggtttcttctgcctcttttacaatttcatctaatgttttgggggtgccaagatagtgctaagcattttgtgtgcattatttcatttaatactcaccataaaccagcattttacaaatgaggcagctgagacctgaagggattaaataagttcctggcatcaccatagactaatagacccccttagtgaccctcataattcttatgattctcctgagtgacaactcaagagaagcaagagtcaacggacaatgtgaggttggaagtggcacttgatctcatcacctaatataaagaggctctgagattgcgccataaacttcctaggtcctatagaatctcagccctgtttgtttttttattcttttaattttatttatttatttatttatttaagacgaactctcactctgttgcccgggacggagtgtgcagtggtgtgatcttggctcactgcaacctccacctcctggtttcaagcaatcttcccacctcagcctcccgagtagctagaattacaggcatgcaccatcacacctcgttaattttttctgtatttttagtagagaaagggtttcaccatgttggccaggctggtcttgatcttctgacctcaagtgatccacccgcctcagcctcccaaagtgctaggattacaggcgtgagccactgcacccagcctcctgtttgtttgttttttttttaattcagccctcgaggcaattaattacatggcaaggctttgtccaatctgcactctcactgtgatgcccaagttgaagaaagcagggaactaccacagtgactaagaagagtttccatgacagaagtgaggccttttaaaatttgtggaacatgttcacgcctacttttaaaataaaattccatgagataggtagggcagatagtgcccacacattttataggttgggaacttaagatactgagtgcctgtttccaggttttgtttaggggcaaatggcagaatcaagaccagaactgtcactctcagcttaagttctgactttttggttggtgttggttggaactcagagtctagcatgggttttttaattacataaaataaagactgtgaagctaccttcttgttttacatccagatcctttcctgagtctctctgttttgggctagttcataattgagcttccttgatattgagtcatttgggaattgggaatgacataagccactcatcttattactgttggtctctcaccagtccacattttagagatatctaggtccctgagagaatcccaaatattatttcagttctcctgtagctcatgaagccataaatatttcacctcacccaggagaatcaaagcattttcacattggttcttactggggagttgagatatgggtaagtaataggagtcccattcctgctttggctggggttcgggtctccaatttcactgccagtgtgtctctaaatctacacagtgggacagtggctacagcagacatcactcagctccccactcctgacttgagaccttccactagttgccccttcccctaaaaacagagtgatgtcataatggtatcagaatggcacttgctgataacaacacagaaataacaagggcagactttctgcagtgtctcctgagcaattggttgtcattgtcctaaacagagcagctaggttaaaaagatttatccataatgtaacctcctggccctcagctatgggtggaagcagcactttctggtttgacctcctaataccacaaactccactttgccagaaaag

SEQ ID NO: 7035 - DNA, 2300 bp, Homo sapien
attaatttttgtataaggtgtaaggaagggatccagtttcagcttcctacatatggctagccagttttcccagcaccatttattaaataggaaatcctttccccatttcttgtttttgccaggttcatcaaagatcagatagttgtagatgtgtggtgttatttctgagggctctgttctgttccattggtttatatctctgttttggtgccagtaccatgctgttttgattactgtagccttgtagtatagtttgaagtcaggtagtgtgatgcctccagctttgttcttttggcttaggattgacttggcaatgcgggctcttttttggttccatatgaactttaaagtagttgtttccaattctgtgaagaaagtcattggtagcttgatggggatggcattgaatctatacattaccttgggcagtatggccattttcacgatattgattcttcctatccatgagcatggaacgttcttccatttgtttgtgtcctcttttatttcgttgagcagtggtttgtagttctccttgaagaggtccttcacatcccttgtaagttggattcctaggtattttattttctttgaagcaattgtgaaggggagttcagtcatgatttggctctctgtttgtctgttattggtgtataagaatgcctgtgatttttgcacattgagttacaagacagggatgccctctctcaccactcctattcaacatagtgttggaagttctggccagggcaatcaggcaggagaaagaaataaagagtattcagttaggaaaagaggcagtcaaattgtccctgtttgcagatgacataattgtatatttagaaaaccccatcgtctcagcccaaaatctccttaagttttacacaattttttaaacttaccttgtgatctttctcctctgcaactttgctaacgtagttcccatgcctctatctggacttcacacttctgtgccccctggaaataccactcccccactccccaaccaaaaaagggaaatttaaaaaagaaagtaaaattttctatccccctttgaagacaaattaaaagatatagtctccttccaaaactaattgttcagcaagctgtgttcctatatttttcattcaccatacagctctgatgccatcgtctaacagttattagactccatcaggttatttgccttgaaccccaaatcgttgggaactaagtgatgtttagtgctcagctgggagggaggtctggcatttaagggctctctatgagtgagtgtaacccgggcgaatgcctgcagcgaggaaggcacagacacagaagactgcaagcctttatctggaaaagtttatggcaacaatgacagcacgcttaacaatgatatatttattatataattatatcatatatgtaaaatatatatttatttaataaagagttgaaaataaaactgtggctccacacctatttcttttctttttttttttgtttttgttttgggatggagtctcactccgtcgctcaggctggaatgcagtggcgcgatctcggctcactgcaacctctgcctcccgggttcgtgattctcctgcctcagcctcccgagtagctgagattacaggcgcacgccaccacgcccggctaatttttgtatttttagtagagacggggttcggatgttggccaggctggtctcggactcctaagctcaagcgattcgcccgcctcggcctcccaaagtgctgggattacaggtgttagccaccgcgccctgcctacgcccacttcttactataatctttccattcactagcggcttctctgatcccatttcctcttcgaacctgagctcaaaccagcctgggtctgaccggccaatccgagcgcagtcttccgcagtcgcgagtacggctgcagccaatgagagaccggggcgcctcggtggggtgagacagggcgctcactggcggaaccccgggggacgcggtgatgggaggagtgtgggaggggcagtggaactggagtcagctaatggctgacgcactacgcgcagagggaaagacgggtcaccaatagcgacacggatatggccccgcgggcggggtttaggcccaaagtggtgtcggagcagcgcctattagtgtcatcctcaccgtcacggccggcgcctcctcctggattcattcactcgctcttttcattcacgaaggtagtgaggcctagtggaaagccatggagagcgctctccccgccgccggcttcctgtactgggtcggcgcgggcaccgtggcctacctagccct

SEQ ID NO: 7036 - DNA, 2300 bp, Homo sapien
tatatattaaactatcccctttagattctaggcatctaggattttcttgtggtgaggattaatgatactgtcactgaaaatatatatgtatataaagaggaaacactttccctgcaaggacaaggatttcacactctcactgttgtagaagcacaattgtagaaacttttgtctacttctttttttttttttttttttgagacggagtctcgctctgtcgcccaggctggagtgcagtggcgggatctcggctcactgcaagctctgcctcccgggttcacgccattctcctgcctcagcctcccaagtagctgggactacaggcgcccgccactacgcccggctaattttttgtatttttagtagagacgaggtttcaccgttttagccgggatggtctcgatctcctgacctcgtgatccgccgcctcggcctcccaaagtgctgggattacaggcgtgagccaccgcgcccggccacttttgtctacttcttaggaaagaattaaaattgttcgctatacacttttggaaacagtcccaatggggaagaaaatgggtctggaaatcatgtttactactacttgtctaatattcttaaccactgaacttgcaagttatggtaacctttttttagaagtgtgttaagaggaacaaaaatttttctggtgcagcaattatcacctgcagatggcctaatattagcattgagttaactccagaaacagcctgtgagctgtgaaatggagttcagatagatagtgacaattcacagaaatgcctggtatattcatataaataaccaaatatcaagataccagctgatgcttacagataactctactaataacttagctaaaaatcctataaaaatttggtgttaaagaaaatttaatttgatctgaatataacgaagcctcttaactaatgcgtagaatattaacgatttgtatatacatactcatataaagaaggcttgaaattcaatttattgtgacttataatctgattagaaggaaagataatttcattatagatgaaggcattaatcaatttgataaaagcatgcagatttcaggttaagttttctcaggcttttcattgttattatttgacagattaaaaaaagatgttacattttatgacaaggacagagaatttagagtcagaatgtaaaaggaggagctcatgagctatgagaaagaaattaacttttgcaggggagaacttgtgtctttgctgatgaatcctctagtcgttgagcattcagcaaatatttctggcctttaatagccaggcattgaaatcagtgtttatgtcaagttattaaaacttcttgagttttaattcatatatataaagaatatattttgaacatgtccctacataaaaggcctcttgatgaaggaaacatttaatgtttagcatgccatgatataattttgtaagtatggttttatgttatggggttttgttttgtctcatgattttctagataatttttgccattcagaaagcagacatttaatatatacatgacatgcatatggtataagggaaaaaatagctcctgatattcccccatctccctgcccccaatattccaactggaaatagaagagggactgtttaagagagccaaacaggcagtggctaccccttctggactccacttagctgctttatagttaacagatctcatttccttaatacaaatgcgcacgcacacacacagacacacatacacctgggtaaagacatttttattaccagtctccttccttattctgtttctggtgatctcagaactttggagaactgaattatagcttcccttcacaaaatgctgggggaactctttataatactttagctaagcattatggtccctgatgaaatgtgctaaataaaaaaaaaaaagttttcaaatactgttagggttttgtataatctatcctttacaataaaatacccaccactgttaatatgcctgatgtacatctgtactaccatacaaagctgttcataatacatctggattggatgttcacatagcagaatttaccttgttaaatctggctggcattttatttcttcagaatatttctaggaaaacaaaattcccttctcatcagaatgctgtctactttaattaatatgaagtattattcaagatagaaacaacaaaatttctatgcttagcatgcattgaaaccttattattacaaaacagcatctgtttcttagagaattgatgatatccaggagtcagaaattcacgttacagcctcggtatttaac

SEQ ID NO: 7037 - DNA, 2300 bp, Homo sapien
gtttgctccttaaggcaactaagattttgtttctcaagtattctaatcctattgaaaacttctaggaggtggagttgctttgaattagtgaaaagtcagagtttgagggtacttcatacaaaatacagtatttgcatgctaaaacacatgaaaacaaatctaagactaataaatgataaagcaagaatgcactcgacctaagtaaataaaagagtagcatttaaaattgtaccaaagtgacagtagagaaaatagcccttctacaaatctctgtcctaccattaagctcacatatttgtctaacaaaaaccttcctcccacacccacacacacaacagtgtaaaactctctcgctctttctttccaaaggcaataatattcaacttagttctgtctgaatcacagctaatatactggtgtagcctgcctcaatctttgtactgtatacagtatctgttctctatgtagaaacggggctgagcatttgggactgcaaggcacaaaagactcgccctttaaatcaaccgtgttgtctagctctaatcctccatctaagcagaattagtgacgtcaaaccagtttccatggcacagccagactcatgacaactctgttatatcaagcagaaggacaaaatgggctgcgcttaattgcacacagaaacaaacatgaaactaaaccctggttaatctctcattttctggggactcgggaacaattctaagattggaaggtacattaagaatttttgctgaagttctataatgaagactcatgttgctcatacttcagcgcattttctagtttgttatgacaaatatccaaataaacaagtcaagcaatgttttctgtaatgcaacattcttaattcattatactgcttacttgctaacagccacacaatgctgtctcagtggtacaaattactgaggatctactagaactaaaatgttgcgaaaaaacccaaagcagaaaacaccaattgctgacaggaaagtaccttttcatataaacatattctctttaattactagtcctcccacaagccagacattaaattcgcccaactctataaaactcagtccctcacacttacagcttcctatagatatgctctctcatggaattccctcagacctgtgaaattcccaataagactcccttaattgtcacctggattaaaaaaaaattgccaagcctttattttataagtgctttaatattctatcagactgttgtggtatccttgtccacacctctataaaaattctactgtcatagaggacgtaataggtctcctttgaagtaagtcactgttttctaccttccttagaaacctcatcactgtcccacagtgcaggtgggaagagagacctgctgctatgaggaaccggaactgcagggttaatcctagtggggactgctaactgcatacagaatttgattgtagccaaggaagaatgtacaaaaaaaaaaaaattccatcccaattcttcacatttccacttcatatcaaggagtacaaaagcaggctcttgagggggagggttgtcattatatatatatattaaagcttaaatataatactgaaattggcacagacagttctgtaacagatgctcacgaagactgagaaacctataaaaatagagatctatgtcaaaaagaatcttagaacataggggtcaggtgtataattagaaccagcaatccaaatacttacattgtacaaatattgctttgtggaagaaagtttgcaaacattcagcacatgaaagagaattacttgccctaaaacaccataacatgtcataattccaccttaagcaatacagttatgaaaggggctatttttagctttcccatggttgttatggcaaccacctcctggctccagctgtacacaatgtttataattccagggaagtgaaaagagcaactttcctctataatgtaattatgtactttctacatctatggtaacaataccttagtttgattataggtatttgtttagcgatagtcagttggccctaggctatagttctagagggtttggaaaatctcccacatcagaggtggaagcagtggaaggaaaacaacaacaaaggatcatgataaaggactctgctgttactcaatggagatactaatgctatggaaaccagccataggaaataagccatttggggatggtgtaaagagcaggctataatgaaaccacttataatatgtaaggtaagaatgctttcaatatgatctgctaacttggaatttttctctcctctttgggcatacag

SEQ ID NO: 7038 - DNA, 2300 bp, Homo sapien
gtgggagaatcccttgaacctgggaagcggaggttgcagtgagccgagattgtgccactgcacttcaacctaggcgacagagtgagacaccatctcaaaaagaaaaaaaaagaaagaaaagaaaaaaaaaaggattgaacacagaaagactagagtagacaagaatcacttctccattcttggttatatttccttatctttatacactactgaaatcagtttgtttcaagtattttacctgggattcttgcatctacatgaaattggcctgcagtctgcctttcttacacttttttggtcagtttatggtgtcaagattataactccattaaatgaattggaaagtgttgccttttttcctgttctccataagaatttgcaaaagattggaatgatctgtttgttaaaagtttataaagctgtctggccctggtatttattggtgggaagactttaactactataattagactattcaggaattctatttttttttcttgagtcaattttgaaaaaaaatctaagcatttacccattttacaatttattagcataaagtagcttaaggaattttcttatttctaaacctctcctggatatgcatacttccttttccgatactgtttgtatcttctcactttcttttccttggccgttttaccagaagtttgtctattttatttttttaaagaaccagtcttagctttgttcattctctctgcccttctcttttatgttctgctttctgatggtttgttctgttgttttctcatttcataaattggacatttaactcattcatgttcaaggttttttctatttttagtaagtatctgagtttatttgaattacctcctttgcctcaccccatgattgagtgtatgcatgtatacaaacatgtatatatacacatttttattgcttttccattcatatctttacattatgatttatttgacctgttaattattttacagtatttttaaatgcacagacttaagagttttataaatgtatttccttttcaaaaaaattttgtaatgttaatatcactattaataagacaattttatattttgtgaatcctgataaaatgtgctgaagacacaacattaattatgtgatattcctgccaaaaatgcataacatgaacatagtagagagaaatatcagaaaaagataaaatgaggaatatcctacaaagttaccagcctatacttctcaaaaatttcaagttaaaggagactaaagtgacgtgacaagtacctgcagcacgtgtttctggactggatcttggtcaagaaagcattttttaaacttttgttctttcggacatttttgagacattcggtaaaatttgagtaaggtctgtaaattattaatagcattatatcagtgtgacttcctgattttgataataatgtcatggttccttgaaaaagtccttgttttttaggaaatagacactggagcgtttagggttaacggaatattgatatgcaactgaatcacaaaaggtttaggaaaaattatagagagagaaaatggtagagtaaatggggtcagatgttaacctttggaaaatctatgtggaggtatatggatactttgtactgttttgcagatttactgtaaatctggaatcatttcagaatagaaagtttaaaaatagcttttgttctaactaattgcatgtggtcaaagaacatgcgagtatgataaagcctgggcaaatttttatagcctttctctgcctcagctttaccatctgaaaaatggaaataatagcacctatgtcatatattgtttgagaggaagttaagacacttaaagtactgagaactcatccaggcacaagtatataaatatatgttgtagtaggctgaataatggcccccaagacatcaggtcctaatccatgaaccctatgttaccttacgtggaaatgaggtgtttgcagatgtgattaaattggagatcttgagatggggagattttcttggattatctaggtaggtcctaaatgcaatcacaagtgtctttaatcagaggcagggagattgcagacagaagaggagaaggcagtgtgatcatgaaggtgaggactggagtgatgcagccacaaaccaaggaatatcagtagccacaaaaaaaaaaaaaaaaaaaaaaaaaaaaaaaggaagggtcaaggaacagattctctcctagaaattctggaggatgaagcatcccaccaacaatttgattttggtgtagtaacactcattttggacttctggtctccagggaactgtgagaat

SEQ ID NO: 7039 - DNA, 2300 bp, Homo sapien
agcaaagaatgactagtctcctcagacttaggaggacaagctacttccactgccaaggaaggctcagggtgccatgggtgttcaagactgtcagttatctgggtctaagcagagtgcttatttcaaattttgggattccattccttcccaattgatgccttaactttcagaagagaaactaacctggtaattcagcccacagggagtagtcaaacactgtgggccactgtgcactaaagagccagctgagaggagcacactggaaccagaaaaaagagccccttcctcctctaaagttcctccagtaccctccactgatgaagctcactgtccattgaaccaaaaggcaagggagaaaccttccaatattgcaaacagggtagtgaagggtgggtttggaatggagactcaataggttgataattggcaacacacttcgccttcattccttctcccatggtctctaccaccacctcctgataaaaactcaaacacttcaaatagaaataagaaagtcaagaccctaatgaggatgccaagaccattaagaacatctaatactatatactcgcatcgtctagggtaaccaaccatctcagtttgcccaggactgtcctggctttagcacttaaagtcctgtgtcttgggaaactcctcaggcccatacaaaccagaacaatttgtcatcctacatatgtcctagaggttttcaaaatttttgtgcaccagaatcacttgggtgcttgttaaaaacgcaggtgattctgttaaacaaaaaaaaagcagtaatttcagatgcaagtaaatcatggattgatctttgagaaatacactacgtagaggctgaagaggtgtcaatcactacttttaggaactcctcaatccagacttctttgttcctgttccaaaactataatcattgaaaagaaagaaataacatattttagaagatacagccaaagttcctgagccagaagcagacattgacaaattagttgatgggggaaaaaaactgtagtgtggccttagcattttctctcctttcaggtctaggataaatcatttttttccttcagtgtcacaaagtataacaaataataatgagtgctgtgaaaatggatttgatagtagcaacaatataggtacacattgatgaggtgtacctataatgagcttcctgaaggtaaacactcatatcaggcttattttaaagatttccacagtgactatactttggcggatcttagagaatgacttgcataaaacagtcaattcagtgctacttttgctattttcatactgtaaagtacatggtttaacatgaccattttaaagatgtttctcatgagctcaaatggggtgagctctttttcattttttgagtttttgttgtgttccaggcattgtgctatattctttaaatgcattatctcacttaatcctcccaaaaagagcgatacccattttaaaaagaggcagagtacttgccctagattatacaactagtaagtggtggtgtctgggccaaaatgtaggtctgttcactcaagcaaatttgcttagcactggagagagccaaggtgaattaaggcgtggtcctacgccctgctgtaaatgctgtgttcggaggtgtgcacaggctgcaataggaacacaaaggaggctcatttcaggctctccgtggtttttaggataaaatgcaaatccttttgcctaacacattataaccaggtcccccaaactcctctccctttatctagtcccacagggacccggtcactctttctgccacaaagatgccgatgcttggacatctccagtttcgaggaactcacgtaggagacacgccttcacttccacctttgccaaaccccgaccccttcacaccgctcccctgcactctcaatccctgtccgctgcaacacatatcccctcatcagcaccttcggtgattaggccctccaggcgcgggggatgtgggactacccggactgaggactgcgcaccggaagtagtggcggcgctgcgtaacgtcgagaggaagtgcctgatgccgcggcctgtgattgggagttgctggagtcggtgcttcactcttaaggttccgatcacagactgcggagtgggtcaggggctgcgagggctgccccaagtcctaccgggtttgcacgggcgcgcccggctccgcccgcaagtgcgccttcctgacttactgctgggtgcgcggggctgggggtgcgagtaccacccctgaagtctcttcctgggcgacctccggggcctcattctaggcctcctta

SEQ ID NO: 7040 - DNA, 2300 bp, Homo sapien
agtgccacataataacttgacattagaattgcgcctagcctggacttctgtgctgtgagtgctacattatattattatacttcatgtatattacatattgtagattattgtgtataatgttacaaattgctacactagggtaaatttctttttttgtttttttttgttttgtgttttgagacagagtctcactctgtcactcaagctggagtgcagtggcgtgatctccactcactgcaagctccgcctccagggttcacgccattcttctgcctcagcctcccgagtagctgggactacaggcacgtgccaccatgcccagctaatttttttttttttttgtatttttagtagagacgaggtttcaccgtgttattcagcatggtctcgatctcttgacctcgtgatccacctgccttggcctcccaaagtgctgggattacaggcatgagccactgcgcctggcagtctttctgtttttgagacagggtctggctctgtcacctaggctggggtgcagtggcacgatctcagctcattgcaacttctgcctcctgggctcaagccaccctcccacttcagcctccgagtagctgggattacaggtgtgcgccaccacacctggctaattttgtatttttgtttgtttgtttgttagtgatggggtttcgccatgttgcccaggctggccttgaactcctgggctcaagtgatctgcccgccttggcctcccaaagtgctgggattacaggcgtaagccaccatacgtggcctaggatagatttcagtagttaaagcatatactatttagggtatattaggcattagtcattgttttaaaaacatttaaaaacattgaaacattaacatcgccttaatgcatgagtatactaattgtcactataaaataatgagacatttaaaacaaatagaacttacacatctagatgaatttcttcagaggagcttctgctggaacaatggctctgccatggttataaccttttttggaactgttattttaaagcaagtcactcaagaaaaccagttttattgttttggtcatatctcattgttaactagatacggcttcaggtaagctttggctctttcacaaaatcagatgcaccttcaaagagtgaagatttgctaccaaggcagtttaagagaatcttccgtgggctttcagaaggtatcttaagaaagatatccaaaattattttgagctgcgttggcattgttgaaataaacacatattcagtgggagaaagaaccctcattagctgtgtttattttgatacagtcataatgagctgtagcttttcctagaattagcatagtctcagaagactaccaattgtttaaataaaacagggccaggcattttattagttattcttttttttttcttttttcgagatggagttttgctgttgtagcccaggctagagtgcaatggtgtcatctcagctcactgcaacctccacccccgggttcaagcgattctcctgccttagcctcccaagtagttggaactacaggcatgcgccaccacgcccagctgattttgtatttttggtagacggggtttcaccatgttggtcaggctggtctcgaactcctgacctcaggtgatccacccgcttgagcctcccaaagtgctgggattacaggcttgagccactgtgcctggacttattattctatttactcttcacagtgaatctatgaggttgatgtcatctcaggttacagatgagaaaaccaaagttcagagaggttcagtaacttgcccagggtttcacagctaagcagtactgaaatactgtttgaattatgatctataaaagccctcacctatcatccctttatccttcattgcctcttttatttgtcccaacatgaaaggagtttattttatatctggagcctcatgacctgggtgatgttaggctctgcttgctgtgggagctgtggtaagatgatttcatgtacccattagaggctgcatccagattaactgtttccactaacatttagagtctaacttatcttttccatgttttttggttaacaatgttcattctgcacccagggtctgtttgtatcctggctttgttgacgtgaaagaagctgactggatattggaacagctttgtcaagatgttccctggaaacagaggactggcatcagagagggtaagtagatcccagaggtcacagttggtgctgcgtgttctccctctctggaatgtttcctagtaccatcacttctgctcaccaaagctagtcttaaacag

SEQ ID NO: 7041 - DNA, 2300 bp, Homo sapien
gactcaaacttatcaggaattgtcaatgccacccgagctagtgggttaatgatggatcaatgtggatcctgatttcaacactggggatgcaatctggtgctaagtgtgtgttccaacccatgtttgaagcaagttgcctgttataaagaagacatttttagtgtggagcctgatgtttctttgggctgctgactggagtaatggtgttggtaagtattgtgaaaaagcctgctatgagtttgggtgtcattcagggtccccaagtgtattcacaggtaagaatgaggtgagaaaggaccaccggggaaaacttatctgtctctaaaagtttcatatctctgaaggtggatatggtcaggaaacacttgccagaaaatcaaggaaagttggctgagaatttgtctaactcaccagaagttggattctgtcccctcaaaaggagcttccccaatgaaatgggcaactgctagtccagtcaccagcagtttctggctagaggatgctgatgctgattaaggaaagatgagatgcagatgcctgccctgatgaacaggaaagtcagggaacaaacaggtggcctgtggtcagctgtgaccagctccacaggagccagccctgaggctcaggctcccgggagtgctcagcagaccatttcgcctacattcagcatggcaaagggaaaccaaacaggccgagaaactagcctgcagtctgcaatctggttctgccactacaagccctgttaacttacctaacgtcttggagatcagtttcctagcctctacaatgggaataggacctctctcttgcagcgctgtgggaaggataagggattatgtataaaagctcctaggacagtgcctgctgaagctcagaagaagggcagcaaaaacaaaaccgaaacctgtttttcttcatgctaccgctgttatatttgcttcctcagctttacacgcgatgtaagcaaaaacagcttcacctctaattcctagttcagatctagcaccagcaaaacaaagcaacaggctgctgcagtcactgaggcacactgccctttgccatggtctggaattcctgtccatgcctacaccctgtagttttactctatggcaagtacctacttgccatttcagaagggacattatcttaatggtaaagaaaagggcagttctggcatgtggtatctggagtgacagcaagaaaaacaaaactgaagatttgctgctctcagaccaagaaacccaggtggtggcccactccatctgctgtagagtagaaatgtttccctggaagacatgggtgtgacaagtgaagagatcaaatgcacagctgccacacggggagatcatgaccctccattaagaaagagggacgctggaagacttggaaccatctgccagttctttcattagtaaggaatggaagataaatttcctagtgtcatgcatcaaactgatcaccaaagctggctgtatcacctggccaggtattatttgcattaataggagaacagctaagcattgaaaagaggctttattttattcctatggtgatttgaacctccctcacaggaaagcttggtgtggtgctcaaattttagaaagtatttcatatttcttagagaaacaagccgtgctcattttttgtttgtttgttttttgttttttaaaagggcagggggactacaatgccaggagccagagagcttgtcagagaacagcctggccaggcatggtgctccatctgagtgccgagtcagagcatgcccagcctttggcattttcctatgatcatggacagcatcaatcttacagcctggaatggaaacaggataaaaagcaagaaggcactgtacctttcccccactggcagacagagaaactctaactctcccgccctattttcatccatttaaattcatttcctttctctcaggttttctgtatcttggtttggaatgaatctggtacacggctcctgagtcaagaggtcaagaagacacgtggttttatgatgcaacaatgggcagccactctgttttgttttgggaacctcagtgacatcacagactaacccttgtaccttgggaccttgtatgtaagaaaacattgagtcagaagagagcgttagtcatagggctactgaaacacaaggtgacgagaactattaggcaattgagtgcattccctgcagggctgctcccacttctatctgacttgggtctagatgactcaagtgattcccgaggggaaaataatctatgtggaacagctgtcatgagcaggccttctgctgctctt

SEQ ID NO: 7042 - DNA, 2300 bp, Homo sapien
aaatttgctatctccctgcagttcttcccaaaatggtgcccaccaccctcccctgtgccaagaaggcatggaagcaccaggaagctgctgggagttggaggggggtgccagcccaggttctccaggaagcagacaccatgatgggatgaaatgtgcgaggatctgaaaaggagtcatgcctgtgtgcagtcacacagaaggagctgggaagactgggagggcctgcaggccactatgcaaatctggccctgagagtggttgtccatcaatcatgctgcaggctcaaacagcttcagcagagccattagggaatctctgaaccaaagaccacaacaaagaaatctcatatctcccaagcacagttctgcctcagtattccagctatgcatatgtttgcagggagcagcccctaggggggttcagcctcagtcaaagaaggcaatagattcaaacccagagcacctgctggtcagttacactccctgtagcaggagagctgccaagcccagtctcatggctgtgccacagggggttacagtgagaagtaactcacacctgtaatctcatcactttgggaggctgaggtgggagggttgcttgagcccaggagttcaagaccagcctgtgccatatagggagaccccatctcaacaaaaaatttaaaaaatagtcaagtgtggtggtgcatgcctctagtgctgactactcaggaagctgaagtgggaggatcacttgagcctgggaagcagaggttgcagtgagccaagattgctccactgcgctccagcctgggtgacagagggagattctgtctcaaataaataaataaataaataaagggttgcaacccagctcacccctgactatctgtgtagcattggtcaagaaaattaacccctctgagcttcagttttctcacctgtaaaatgcctgagaaactttatcaggatgaaagtagagtgttgatcggaggtgctcactgaatggtggcctttatcccctctgctatttttccagaggccaaagggcctaaggcctaccccaaatgtgcttcaggagggagagctgaagtccatagctgacctcaattccctgggctcatgggcagcccttccctctagagccctgccacacagtgggctgcaaaagccaagatggcttttaaatcagcaaaaggaactctctgctaaacatctcccccagggccagagagaaatgtttagctggctgttggccagagctgggatggccacctattacctctgcctggtctgggctccagcctgtttgaaaactcatcacccaggctaggactgcaggctgaagcccaggcagggaggggaaggacagaggtgactccttggacaggcctataaatccagccagctgggcagtcatccacccacccagctcatgcctgctccacagctctttcagatgcccgggctcctgtcttctctctcctctgagccccattatccaggaacccttcttcctattctccttccctccttcctacccctgtgggtctctctctctccctctctctctctctctctctctctctttcactgtctcagtgtctctccatctcccaggggggcctttatccttctgtctctcaacatccaacatcctctggctcctgatcctattcccctgcatctctttctctttccattgccttctctctgtcactgagttttcctgtctccctgagggacctccttcctctccacctctttctgactcttgctctctcttgctccttcattgtatgtcttgcccactcttccctcctcttctaatatctggcccagcccagccggccccagcctgcctctccttggagctgcgtgccaccttggaatgcctgtgagcacagggaggagctgagcccccgccgttgcataggggcctggtaggacctctgatatgatttggatgtttgtcccctccaaatttcatgttgaaatgtgacccccagtgttggaggcggggcctggtcagaagcgtttgggtcataagggtggatccgtcatgaatggctagtgccctccccacggcaatgtgtgagttctccctctgttggttcacgggagagctgcttgcttaaaagactctggcctccctcttgctccctctctggccatgtgacatgcctgctccccctccaccttccaccatgagtggaagcttctcaaggcctcaccagaagaagatgttggtgccatgcttgtatagcctgcagaactgtgagccaaataattctctttcctttacaaattacctagctcaga

SEQ ID NO: 7043 - DNA, 2300 bp, Homo sapien
tcctcgcattttacagagacctggcacataacaggcattcactgagatgtgaattacatagaattaagatttaaatagaggaaaataatcgcttccttatcttacagaagaaaacagtaagggccaaaaaagtcatgagagttgctcaaggtcacagtgttagctagtgcaaggcaaaagtgaagacaagaagtggaatggccagaagacagccatgtcttcccagccatacctgtattgagagattctgcttatttcctttcatggggaaagaagactttcccattcaaggcacctcagagactgcagctctacctgggacctgggtgcccactgtacccattgccagaatatgtagagcttagggcagagtttgaaaaatacttttgaaattatatgtgtgtgtgtgtgtgtgtgtgtgtgtgtgtgtgtgtatgtaatttttttttttttttttttttttttttagatagagtctcgcaaacacccaggtgggagtgcagtggcacgatcaaattcactgcagcctctaccttctgggctcaagtgatcctcccacctcagcctcccaagtagctgaaaccacaggcacatgtcatcaagtctggctaatttacaaaaacattttggctgagtgcagtggctcacgcctgccatcccagcacttgggaggccgaggcgggcagatcacgaggtcaggagttcaagaccagtcgggacaatatggtgaaactccatctctactaaaaatacaaaaattagccaggcgtggtggtgcgtgcctgtagtcccagctactggggaggctgagacaaaagaattgcttgaacccgggaggcggaggttgcagtgagcagagattgtgccactgcactccagcctggatgacagagcgagactccgtctcaaaaaaacaaaaaaacataaaaacctttttttggtagagacacggtctctctatgttgcccaggctggtttcaaactcctgggttcaagggatgctcccaccttgtcctctcaaagtgttggcattacaggcgtgggccgccacacctagccagagttcaacaaatattgcaggcacgtgtgggagaccaggacatgcctccccaaaacatgaaggattgtgctaaagacaagcagcagcacattcaggaaagctctctaccctggccctatttgcctaaaagtaggacacaggtttacaaagacaaaaggtatcctgtccctctgtctacctaggagaacaaagacaactttagacccctatggcctggagatggtaccagaggaatttacattaacaagcttgactaactggcctttgtcttttttttttttttttttttttgccttctcacaagttgcctcctggagagactcaaagccctatttctttgtcttgtaacttaaaaaaattactgttctttgttgaagatgctataaaaactggaattcaaagtcacctcttccagaacgactcattccctccagatttctcatgtataaatgaaatacacatgtcagtaaatttctgtctgtttttctcttgttaatttgtcttttgtaacaggagtctcccccaactaagaacctatgagggctacagaaaatcccctacaaatgaaaggggcagaaatgacaaactgcgatgaaaggccataaggatgctcacacccgaatctaaaaagccctttgtgtgggccgcagccaagcatactttggcaagaaatttctgtggctctaacctcctttgaaaactggagaaccaaggccaggaggcagaaggaggtggcagacccggcccggcggcggcccagcacgcgcaggccacccagagtggaggtgggaaacggcattacgcccctttcccttttcctggtcccgcggtgctacctcgtgtgccacccttaaagcgtagtccccgccgagaccgcccccgcctgagtggcaaggggacgaactgcgccctgaacaggcctggaagcccaacccggtgcggaccgccctcagtctcctagtccgggcgcgctgagcgcaggggggcgctgtcctcacccacgcgtaagtcgccgcagggcgtttccgggcggagaaaacctacacgtgatgggcgcccaccgagtgccagcaccgcctcctccagctccgccaagtaggtgggatccactactttgcagaggaggaagccgttcaggcctccctctgtgcactttgcaaaagcctctgcccttccatctcgaatcccttggcgccgatcacacttcctctgcctggaaacctggagccgtctctcgcga

SEQ ID NO: 7044 - DNA, 2300 bp, Homo sapien
tctcacttttttgcctaggctggtattgaacttgtggtctcaagtgatcctcctgcctcggcctcccaaagtgctggggttacagatgtgagccattctgcccagctgcttttccttctttaacacatgctcatgactttctttctctgccttgaatgcccttttcacctctctgcttgtcaaaatactaagtgtcctccaggataaacaaagatatcaactgttgattgaactcttcctagatttttccaactggatgtcacctcttttttttttttgaattctgtagcattttgtttatatgcttctatgccactttttaccttctcctttgaataatcttattgtcttatttctagttagctcctcccagtgtctaggcatcctttctccattcaacaactatttattgagcaattaactatatgccaggcattaggcaagtttaaggttataaaaaatgaagaagataggcagcattgtgtgaggctgtgcctcacacagttctttaacacggcaaattctcattttataaaagaacaaaggattaattaaaaacatacatgtttaaaatacagataaatatggagaagaaaaaaagaggccacaatcttccagaccagatagctattgttgacttatttcaaaaagtgaaaacaatattccctgggataagataaatttggatacagttccagtggtgattgtcactgctctccacccatccagttctcaaatggggtgggtgtgtgctacattttgtatcatttgcaggggggatttgatttggaaagcagagcaatgcccccttggatgtggggaagcagaacatgagtgtcccatccccagaatgtcctcatcccaatctccctagatctgtgacaagcaggcattaactcacaaaaatatccctggaatcgaggttgctgccggaagcctctgtaggtatctagtctcagaatcatcactttgaatatttaagctatcagtgacaacttccaccagatggcgccaaagtacatctgggaccagaagggatttggatcctgtagccagacccacaactctaccaaaccaacatcgcaggcccaggggtcatttcattaacctctcaataacatcgctctgaattttaatttaattttttagtttccacttactgctttatgacagcggttttagtgtgcatggatagggctaaatcatgtaaataatagagaaagatacaaaacaaaaatgcgttttttttttttttttttggagacagggtcttgctctatcacccaggctggagtgcagtggcacgaccacggcccactgcagccttgacctcctgggctcaagcaatcttcctgcctctgcctcctaagtagttgggactacaagcgtgtgctacgatgcctagttaactttttattttttgtagagatggggtcttgctctgctgcccaggctggtctcaaactcttgggctcaagcgatcctctcgtttaggcctccccaaatgctggaattacaggcgtgagccacctttcctcgccataaatgcttccatttccgcctcgacaactactccacctgaagctgttcatttcttcttgcattccttccagaaaaaagttatacacatgcctgaatataagcacctactttatatatttctccctcttgtttttgcatatgcatagtttacctaaaagtgacttgcccgctgttttggactacgctttgatcttaactaatatcttggagatatttccttacccaaatatattgcactatctcacattactcaaatcaatcaaattccataatttatttcgattgtgtctagcatttcgctatgattagaaagaatgctgtcatggaactttttgacaaacattgttgagaatatccatagggcaaactccgtacagagagcttgttggaatgaagggtaccagcattttccgtttgatggatagtaccaaattgccctccaggaatgttatacgctcaccagaactgattataataaaacgtctacatatttgttagttttataagcaacgcgtggtgtctcgtttgggtttaaggattctttaattatgaatgaggctgtctgagcatttcactgcggagcctgagcgcgcctgcctgggaaaacactgcagcggtgctcggactcctcctgtccagcaggaggcgcggcccggcagctcccgcatgcgcagtgcgctcggtgtcagacggcccggatcccggttaccggcccctcgctcgctgctcgccagcccagactcggccctggcagtggc

SEQ ID NO: 7045 - DNA, 2300 bp, Homo sapien
gtgcacaggctagagaccttggcaggttctaggaacttgaagaaaccgctggacaggagcatttaggatgatggcaggagcactccgctttttgctaactggaaaattattttggttgagtctcagtctacccatatgcaaaatgggtatgataagccttgtattgccagattgttggcacaacaggagctcaataaataaaggactctcaagtggcttaggtctgcgggccagtgaggcgcggttcccattgggcatggagtggggggcggctggagcctgcgcgctcctggcttggtttgcggaatatctttattaacgagcacttcaaggtaagccggcgatggaaaccagatgtgggatcgcgcggtcggcggcggagcaaggaccagagatactaagggggtagggtgggggtaagaattagcccagatgagattgggagcagaagcgcgaccccccaggtatattttttctttgggagaccttagatgcagaaagttgacatctgacccacattccttggttcacggtgctcaggccctctttaattttaccttgcacttttacctctcaccctactcccagactccctagaggtacgttctcgcttaacgattttctcagcggtttaaggaaggctgctctcgctggtctccttcaacttgaaccattccacagccgggggccagtttcccctctgcatctacgctgtccgcacggccttccaggtcggtggagggactagcctgagcagaggttccagggcgcgacggctatttcccagctgtgtgacctggaccaggtggccgcccctctctgagcctccgttagctcatcagaaaattgggggcgccaatctctagcacggttgtcatgaagcgaaatcgaggggctgcacgcgcaaagttttttcccttgctgtggcggtgccaggggccttgaggctcgcagtggtggtgaaaccacaacctatcaaaaccaagcagttcgttttacagtcgggggcagtgaggccagaaagggaagagacggtctcacccctctccccgacccctgaccccaaggagtgaacaggtgacagcgcgactatcgggcaaggtcagggggtctccagagtccgctctctgtacttcgcctggcaggaaatcccctcgcctgggcgcagacgtggggcgtgaacggtgcggcctctagacgggagcgcagagggcagcgctctaaagcttctgaagccgggcccagcccagggcttctccagggcttgagggagcacagattccgctacatcccagcccagcgcccttacagcagagggaaatagttaacaagacgtgcaagtgaccatgcactggacgacgaaggcttgtgtgtgtgttaatctcccgtaggaacgggaatggggaggaaggttggaaacctaggaaaaggtgccagcgggaaggcccgcagcggcgcccgcgagctcgcgcgcaggagtccgtaggactcgcttgcatccgcaggcccgtggtccccctggcttcgaatgtcaaaacctgttaggtttattttggggggcttttttttaacctgtcattaaaatttgcatttccctttgccctaaggcaaagctccgacaccccgccaattctcagcctagcctcgggagccctggggatcctggcatctccccagccccgcctagaatcggaaaagccctcgggcgcctccgggttgaatccccgctagcgagttagtagcatctccttaagagtggagaggagggggcaggggccagtggaaggagagaggaggaggggacgagagagggggaaaggaagaagcaaggcagggaaaaaaatttacttattttttttttccgctgcaaaaccttaagagggtttgggagatctggtcaactttccgaaacatctgaatctttttactgccctccgttctttccctcggctagctgtggggagggaggaaagagagagagggagagagagaggaagggggggggagggaggggaagagagagagaggagggagagagaggagagagacagagaaagaagagggggagagagagagaggccggcgtggaggggaggagggagagcgagcaggccgggcaaggagtgcacagccacagcctcctcgcctccccaaactcccagccaaggcgcgcggtggcgtcctcgcgccctcgctcgcgtccccgcccgccgcctgcgcaagccaggcatgaatgctgagacttgcgtctcttactgcgagtcgccggccgctgccatggacgcctactacagcccggt

SEQ ID NO: 7046 - DNA, 2300 bp, Homo sapien
ttcccggattccttagctcaaaactccaaacacacattggggtgcatctgccatacaggaccattctcagggtatgcttaagtcaagttattgctgtcaggagcatctgccatacaccatcacaaacacccccagctcggagggagcggggtgtggagtagggtggaataggaggaattttatgcccattttgcatgggctgggtagggtagggatctgaaacccagcccaagacagaatggcacagtggttctcaaagtgtggtccccggaccagcatccacatcatctaggagcttgttaggatcttaaccacttgcaggatagagggtgtctctctgcgggtatgacacactgctgggtttaaaggattctccagcctcacttttctgacttggtgtgggaatgctatgaaggagactttttgctgaaaagagaacattttctgagcatgtacggcattcaagcggtgggccaaatactttatgaatgctgtcacatgtaatcttcaacagctaccatcaagatcggtatgattgttatggctcattttattattattccctgtttaagggctcatcccagaggttaagtatcttgccttgtcctgggtttaaaacgcaaccaggaagctacctaggtctgtgtgattctcagaccaccctgacttctttacagtttgctcaacagtggttcatgcttgaatgtgattcagaatcacctggaggccttattaaaaccaattgtcccacagttttccattcagtaagttgggatggggcttcaaaatacgcactcctaacaagttcccagatgatgttgctcctggttcaaggaccacgctgtgagaactacagtgctgggctgggatccagctcccgcccttactccactcgtacaaagcgctcataatcataccctcccacaacggtgtgttgtgagaggacattgtgataatggaagtgaaagagctttgtcagctgcacaggtgaatgcccctggtcattaaccaggtaatctgcctgaggctagtcctctggagcctgggagggcagagggctgggacgcagggtgggcaccgcagccacctagagagctcttgcagcccacctcaattttgggccactttttcttcagggagaaagccagctttgagggcttaggcccacagcccctcctgccactattctcatcaacccacacctcctccctcacctcaggcagctgctgggcactgccccagcactggttgttctgggctacttccccaggggccagtccaggcaagctggggcagctcaagcctgtgactcaggacctgaggctggatcccgctcacgcccgcctccatgagattcagagccctcgacttcccttctctgagccttaaactgcgcattagtaaaataggcgcaacgagagtacccatgagttgtgggaattcaagggctagaactgtattcagcgcttggcatagagcctggcccctggcaaggattcaatcaatggtagtcagtattttcaaaaagttcctgggcccaggccgcctcctgatagaggccccgacttaggacacaaaccgctcccacgccgttccccggcggcacccggatacacccgccctggaatgccagcgtgggggccccagggctacccgcccgagatgagaggggcagggcagggcaggattaggaaggcgctgagcccaggctggtgcggggaggggcgtggcctcaccctactagggccgggggatggggtgggctcgaaggagaaagtgaaggaggcgggggcgctgggagggcccgggaggagaccgggaggacgaggtaggcgggagctgggcgggaccgttaggcagcgccgtgagtggacagggctggagcggggcgggcttaatccccagtgtaacctgggggcggggctgccgggatagaggagagactccgtagcggggcggggcctcagctccagctgggcccgggggcgaggctggttggggtacggccatagtgggcggggcctggccggcgggagcgcaccgccttcccaaagggctcgggggcggggccggcggagggggcgtgtcttctgggggcggggcctgccgagtccgcggcgttccccggctgcagccgggagggggccgaggagtgactgagccccgggctgtgcagtccgacgccgactgaggcacgagcgggtgacgctgggcctgcagcgcggagcagaaagcagaacccgcaggtgagcaagggggcagcgggccggggtagcctgccggacaaccataggcaaagt

SEQ ID NO: 7047 - DNA, 2300 bp, Homo sapien
cccacatctgggtatctccacgcctatgctcaccctgggcccattgtccacagcaccctgctaccatctccacacacccatatctgccccctcctccgggaagccttcacatgctcacgggtgttatcaggggaattagaggaggagaagctcctctccctttgagttattacaagcacaggcttcaaagctggcctgagagatggcagagactgacagagggtccgtgatcccctttcacagatggagaaactgaggccccacgcaggtgagggtgtgcctgaatgttcacagcaagttagtgtggtgttgggactggaacccaggactcctgcctgtgggtccacagatgtcacctccttctcagagtgaagactcccccctccatggatctgttagttaggtgggtgatctggttctctcagccagtttgagggagcatggaagttgggggagatagatgggggccaagggggtccccagatgagcttgtgtgtgatggtggggtacagagaggagtgggagatgctggggaggagaggccaagagtggggactgggacagggttggctgaagcaggaaccatgggcgaccctggtgagcccgcaagaatggcatggctgtgtatgctgctattgaaacaatctctgttgtcacctctttcctgcagccgtttatttatttctttatcatgcccttttggaaaatgctgggaatgccacccctcctggggaatgcaccctccccccgctccccagttcacaccgtctggtgtgacattcgtgctcaccagcttgcagagcgctaatgacatttgcattttgctggctggtgaaatgtgggctgtgcttggtgatggggggtaaggagatccttaggcaaatgggaggttcccagcctagaaagaggggcaggcttgctggtctgggggcccacgcaggtctctgagacgcagagaagggagcgaaggtgggtgcagaggggactaatgtctggcagaatttagagatgctgtttgtctaaagtcttgccagaacacaaggcaaccccaagtctggtgttccaggtcccctgacatgctcatgcactatcctctgcgtcacctccttaacatttattgagcaatttctagacgccaaatgctcctctgtgggcttcacagacttacgaaagtcattttaattcccggcaatcctcaggaaaagatgctattattattcccattttacaaatgaagagtctgaagctctgagaggacacctgacttgcctcttctggaaagaggttgcaccagcttgtggccaaggtccacctgcctccaaagcccgtgctcttggctactgtgggcaacctcctgttctttgtctgggcttgagcagaaccaagaagcatttgtctgctgaggcccaagactgggtagaggtggtgagcatcgtcccccgtccgccaccacagcatgcaacaggctcctgctatgctcctggggctgctccagtctgacagctacagaagagggtatggccctggagagaggcctcagcatgagtcaggagagacccagagtttaggccttgctctgccaccaacttgctgtgtgactttgagcaagtcagtgcccctctctgggtatcagtctccttattggtaaaaagaggccattggtctggcggcatggagcatcccaggaatgcattttcacacgaggaagaaacttctctccaatctgcttggactcatggacttgccttgcactcagacacacaaattatgttttacataaaagcaaatcatgaaacatttgctgaacctcctctcccttctgcaaggggcactgtgctagatgcaggggttatgacgcttatgtatttttactcagcacatgcaaacacaggcacatgcatacctttgtgtcttagaattatttccaggctatttcagtcggatctagatgttgagtgcccaatcctgatgctcacctgcaggctcctgcagtcttggttccatcacttcgcctcctgcagggccaggagagcctttcaaacagaaagaagagaccgcagctcgggcaggtaatcacggctgcttctgcttccctctcacaggtgagcatctcctggaccaccctcaagcttcaggtgagctgagcttctaacactaccatcaaagcaactggaaccccttgaatttgatttctggagacgcgagcataatccttttgcagacatctcaacgctggctctccaggtaacagaggttaggctcattcagcaaggggatttctgctacttttgttgttgctg

SEQ ID NO: 7048 - DNA, 2300 bp, Homo sapien
aagttgcaatagggaccagtagagcagcaaggaggaggtgtccctttagggaggaaagccctccggccccagggccagtgccaaatccaaagccgatgtgcctgtcagaccttcctcttgggctccaggcaccttagccatgtctgcctggccaagctcagctggtggacagacatctggcaccttggcagaaacaacgagaggagggacgcaaggcaccacccctgagaccaggaacctttcctgtgtcgactccccaccagctggctctgtctgtgctcctctctccatggattcaaatgcacttaaaaacaaacaaacaaacaaacaaaaacacctctagctcagaccaaaatgcagcctggagtggtgctgtcatcactgattaggagaggggtggagtggcccagcaggtgagaggcaggcaccgctctgctccatctgttccttatgatacgagggtgctggtctggctgctgaggagagtgttggattgtggttttgggcgagggcgaggaggggacagagttgctgaggcctattatgtgccatgggccttgtcagtgcttcctacaagctgtgtggccttggacaaatcccttaacccttctgagggctgggctgatggaaggatgtgtggtcatcagagtacatacctccttggtggttacaaggattaaacgagataatatgcgcaaaaccctgggcacagtgctggatccccaaacagtggctacgattattactgttttcctgacttcattttaaattgatgaataataattgtatatgtttatggagtccaatgtgatgctttgatacacattttactattattaatattaataataagcctcccagaaaccctttgagtcagacttagcaaccttattttgtggaagaagaagatagagtacagccatgtcctgtgggaggaagcgggagctgcagaaagtaatcagacaccatctcccctacatccatccacaccccaacacatattcccagaaccctttgcactgagtcctgtcatggaggtacaaaccccctgctggaagcacctgcagtgccggcagctcaggactggcttgagttctggcccttccccttactagctgtgggacatcggacatgtcgttttcattctgagtctcggtttccccacctgtctcatggatctctaatccctgccctgagtctctcctcagagccgttatgaagaaaatgtgaaaataacgaatatggaatgtaaacatgtcttgtgcaccttgaggtctgactcatgagagcagatgctgtcagtttcccctgggggatgggggacatttgcatctcagtgcagccccggctgtgcctggcaagcagcggatgctcaatcaatgttggctgaatggaattgtgttcaatgacttgctgccatgggtatacttttaggtgaagacaggaagggctcccagggaggtgggatgctagaggtctcagagtagaggtagccaaggctcagggaggctttggccccagaagcaggttttagatccccaggtaggctgctctccttttccctgcaacaccccatctcgctggcaccaagcaaccgccctggtctgttctgtggctggagggtgtgtgggttggtgggaagtttgtcaggcctggcttctggtccaggctctgggccttggttttctcatctatgaaatggccagctcacacctgcagtagagcaacaacgtgaagcgggactgctgagcacttaccacgtgcccgacgatgtgctaagcatgttactgtgggatttcagttcatcttcacaacactgctaggaggaaggttctgttcctaatctccgctttaaagtcagagagagcaagactcagagaggtagagtaatttgcccaaggtcacatagcgaatgaaagctagagccaaggctgaaacccaggcaggctggctccagcatgctcatctctatcatcggcctccatcttcttccagcctttgcaagggtggggctggctgcggggaacccctggggaggggctggggttcttcctgggtggggtcccccatcgggaagactgaggtggccttgtatttctaggtggagcaccatggaaggcgactgtctgagctgcatgaagtatctgatgtttgtattcaatttcttcatatttgtaagtattcctgggtcttcccaggcctctgctgggtgggcagaactggctgctgctttgaaatagtcacactgggctgagtccctggggcgagcacaggggccggcgctagaggcaggggtacct

SEQ ID NO: 7049 - DNA, 2300 bp, Homo sapien
tgagcagctcctattaactctaaatctctacagcaaccatagccggttcttactattggttgctctaggtgacttactttgtccaaggccacacaggcactaaaaggcagagtcaggatttgaacctaggtgatctggttccagagcctgctctattaaccgttaaggaactggtgcagacagaaccgagacctggagtcagaatgcccacctagctagatgcctgaggcagccactcacctctttctgtcttatttacttgtgaaatggagcatgtcatcagccttgccttccttttcccgcagccccccaccccggttcctggcccactgtgaccatcagatcagatgaaagagatccaggcatttctctaaggagagcacagggtggtgggggttggggtgggagagagcacattattttcccaccataaggggttgaaggagcccagaatttgggggtggggccttgtctgtaggagcctggttctctcaggttgacacgccaccagagagcctccatgacccccaaccctcatcctcaccccagccccccataggatgtgtagagacaaaaggtttgacaactgtagcgccaacaagcgtcctagagccccagataagatcctagcctcctgacagcgcaactgacagcagcatctctgaggctggattttagggtggagtatgaagaaggtggccgtagtgacagtggggtcatgttatttggccaagtcacaccaagcagggagagagaagggtgggcctaggctggaagcctgaaggctgagtgaactcaaactttaacgaccatggcctgtaaaatgggactaagcacagcgcccttatgggttgctgtgaaaatcaaatgagttaatacttgtaactcctttagcatatggtgtctggcatcagagagtgcgcagcaaacggtgactattgtcgtgactgtgttattacacacttgggtatcaccgccagccaaagcagtcccttccatttcaggcaccggcctgggcccgggagacaccgcaaggctatttaagatggtgtggtttgcccatctacgttgatcgtcccaagaaaggggcaccgtctgcagaacttgccaggaaagtcatcctgggcggcgcgggccacgccagggtctccccgcgcggcttcctcccccggcgccttctctcgggcgcgcgtgcgccccctgcaggcggcccccgggagagcctcgcgggggagccgggagcctggtttccccgccaacccccatcccgcccgccccggcggccaccctgggggcgaggcagcccggcgcgtgggaggggacggcgcgccattggcttgtgcgcggaaccgagaggagggaccagcgcgggccgccagactcggtaagccccggccgcgcagggcgccgcgcgcagtccagccggcccggccctgccctgccctgccctgtcctgccctgccctgccctgccctgccctgcactgcccggcccggcacgggcggcgcgatgtgaggcgtccgagcccggagcctccgcctggcatcagctccacgtagcccagcgccggcacgcgcgaggcccgtaagttctgctccccgccgccgcttccgagccgcggactttcccctcccgccgcccgccgcctgcgcagcgcaacccagcggggctcctgcggccgacgggaccgcagaggggcggccgggaccccgcgcgcgctaaccgggcgccccgggacatctcggcacccgctgagcccgctgggaccccagggggtcgcctccccagctccccaaggcgccgtcccgcagccccttccgtctcccctgcgcgctctcccctcgccgcccctccctctgactcggtttcccctctcccccggctccgcggtcgccctcctcctggactgcttatttcgtcctcggccactgcctctcgggctcgagctttctgcttcagagcaggagagaaacggagcgaaagcagtttctgtctccccggggtctgactcggtcccccgcgctcggttctctgtcccctccccctcccgccattgttcccggcaggaggagtgcgcggcgcaaacttgcgagttcccccagtctttgcccccgcagggccgcggacggaggtggtggcggagttcccgctgcccacaagtctggcccgaccttctggggtgggggcctgggggcaggggccctgggccggagaacccggggccgcctaacggctcggagctcaccgccgggggacaccggcgctgaggcctgggtctcagaaagtgggtgagtgtctgg

SEQ ID NO: 7050 - DNA, 2300 bp, Homo sapien
aaacttggagtgattgtgacaaaggcctcccactgatgtatgatcaggctggctgggattacaagcacagaccctgctgctagtctttagggttacaccaagcagagcactggcaggtgtccccaagtctgggaggacattgcacatgaatgacgctgggggccctcccttcagcaatccagagccctgagtgccagaaaggcagaagagggagtgacaaatgaattcatcaacccagcttggcccagctctgtaaaggcagtgaggtgagactgagttgttgcagaaattactatagagccttgagtcagatggctccacccaacacaccttaaaaataatcctcatctagagtcacatactttgattgattgattgattcattcattattggctatcactgtctaggtgtttggctgggggcagtgtcagtggcactggggcatcagagtttatctaccttagtaatcaggacagtttatattcactgagcacttactatgaaccaaggactgttctgtttacttccttgccaagggcacagactctcctgcccaatcccagctctggtgaggacagtgggagcctgcatggcacagagtccatgcacagtaaacatgagcagctcctattaactctaaatctctacagcaaccatagccggttcttactattggttgctctaggtgacttactttgtccaaggccacacaggcactaaaaggcagagtcaggatttgaacctaggtgatctggttccagagcctgctctattaaccgttaaggaactggtgcagacagaaccgagacctggagtcagaatgcccacctagctagatgcctgaggcagccactcacctctttctgtcttatttacttgtgaaatggagcatgtcatcagccttgccttccttttcccgcagccccccaccccggttcctggcccactgtgaccatcagatcagatgaaagagatccaggcatttctctaaggagagcacagggtggtgggggttggggtgggagagagcacattattttcccaccataaggggttgaaggagcccagaatttgggggtggggccttgtctgtaggagcctggttctctcaggttgacacgccaccagagagcctccatgacccccaaccctcatcctcaccccagccccccataggatgtgtagagacaaaaggtttgacaactgtagcgccaacaagcgtcctagagccccagataagatcctagcctcctgacagcgcaactgacagcagcatctctgaggctggattttagggtggagtatgaagaaggtggccgtagtgacagtggggtcatgttatttggccaagtcacaccaagcagggagagagaagggtgggcctaggctggaagcctgaaggctgagtgaactcaaactttaacgaccatggcctgtaaaatgggactaagcacagcgcccttatgggttgctgtgaaaatcaaatgagttaatacttgtaactcctttagcatatggtgtctggcatcagagagtgcgcagcaaacggtgactattgtcgtgactgtgttattacacacttgggtatcaccgccagccaaagcagtcccttccatttcaggcaccggcctgggcccgggagacaccgcaaggctatttaagatggtgtggtttgcccatctacgttgatcgtcccaagaaaggggcaccgtctgcagaacttgccaggaaagtcatcctgggcggcgcgggccacgccagggtctccccgcgcggcttcctcccccggcgccttctctcgggcgcgcgtgcgccccctgcaggcggcccccgggagagcctcgcgggggagccgggagcctggtttccccgccaacccccatcccgcccgccccggcggccaccctgggggcgaggcagcccggcgcgtgggaggggacggcgcgccattggcttgtgcgcggaaccgagaggagggaccagcgcgggccgccagactcggtaagccccggccgcgcagggcgccgcgcgcagtccagccggcccggccctgccctgccctgccctgtcctgccctgccctgccctgccctgccctgcactgcccggcccggcacgggcggcgcgatgtgaggcgtccgagcccggagcctccgcctggcatcagctccacgtagcccagcgccggcacgcgcgaggcccgtaagttctgctccccgccgccgcttccgagccgcggactttcccctcccgccgcccgccgcctgcgcagcgcaacccagcggggctcctgcggccga

SEQ ID NO: 7051 - DNA, 2300 bp, Homo sapien
agacaataagagcctctaatgggtgctttctggagagcggatgcagggggttatggatagagccagctgcttctcccctggtccccctccaagcactttgcctgttatcttgagcggttactgttgctgctgttgactatctgtgcagtcatctacaagggggctgtgaactctccaaggacagggacactgtcctgttcacccctggggccccagcacatagcaccttgcctggcataagggtgaggcactgtcaggatggcctcgttcacaaaggatggtggggcagccttggcccagcctgagctcccagcctccccagcttccccgttgataaggagactgagagaatacagacacccagagggcaaaggttatccactccaaataccacttaaggtgggaattcttcctctgctgtcctcatcaacccttccctggattctgcttgcatgctgctagtgacagggcactcattcatgacaactaaggcagcctcttccatgttggaaaacttggagtgattgtgacaaaggcctcccactgatgtatgatcaggctggctgggattacaagcacagaccctgctgctagtctttagggttacaccaagcagagcactggcaggtgtccccaagtctgggaggacattgcacatgaatgacgctgggggccctcccttcagcaatccagagccctgagtgccagaaaggcagaagagggagtgacaaatgaattcatcaacccagcttggcccagctctgtaaaggcagtgaggtgagactgagttgttgcagaaattactatagagccttgagtcagatggctccacccaacacaccttaaaaataatcctcatctagagtcacatactttgattgattgattgattcattcattattggctatcactgtctaggtgtttggctgggggcagtgtcagtggcactggggcatcagagtttatctaccttagtaatcaggacagtttatattcactgagcacttactatgaaccaaggactgttctgtttacttccttgccaagggcacagactctcctgcccaatcccagctctggtgaggacagtgggagcctgcatggcacagagtccatgcacagtaaacatgagcagctcctattaactctaaatctctacagcaaccatagccggttcttactattggttgctctaggtgacttactttgtccaaggccacacaggcactaaaaggcagagtcaggatttgaacctaggtgatctggttccagagcctgctctattaaccgttaaggaactggtgcagacagaaccgagacctggagtcagaatgcccacctagctagatgcctgaggcagccactcacctctttctgtcttatttacttgtgaaatggagcatgtcatcagccttgccttccttttcccgcagccccccaccccggttcctggcccactgtgaccatcagatcagatgaaagagatccaggcatttctctaaggagagcacagggtggtgggggttggggtgggagagagcacattattttcccaccataaggggttgaaggagcccagaatttgggggtggggccttgtctgtaggagcctggttctctcaggttgacacgccaccagagagcctccatgacccccaaccctcatcctcaccccagccccccataggatgtgtagagacaaaaggtttgacaactgtagcgccaacaagcgtcctagagccccagataagatcctagcctcctgacagcgcaactgacagcagcatctctgaggctggattttagggtggagtatgaagaaggtggccgtagtgacagtggggtcatgttatttggccaagtcacaccaagcagggagagagaagggtgggcctaggctggaagcctgaaggctgagtgaactcaaactttaacgaccatggcctgtaaaatgggactaagcacagcgcccttatgggttgctgtgaaaatcaaatgagttaatacttgtaactcctttagcatatggtgtctggcatcagagagtgcgcagcaaacggtgactattgtcgtgactgtgttattacacacttgggtatcaccgccagccaaagcagtcccttccatttcaggcaccggcctgggcccgggagacaccgcaaggctatttaagatggtgtggtttgcccatctacgttgatcgtcccaagaaaggggcaccgtctgcagaacttgccaggaaagtcatcctgggcggcgcgggccacgccagggtctccccgcgcggcttcctcccccg

SEQ ID NO: 7052 - DNA, 2300 bp, Homo sapien
tcaacacggtggcattctgcctgggccctgaatgggaggagtccccaggtctagctgaacccaagcccaggtctactctccagttgcccaagttgtatttctgctcaagactgaattaatcccaatctcactggatgtgaattaagcgcgggacttcgtattctgcttggacaatacccattactgactggggtttctcagtgggggactgagccaagcaggagatggggtggggatggggggacatggtagctttccctagaggaagcccagccttggcctggcccaactggccaaggagtgctttgctgagttatgggggttcagtgctcaaagttccaggggagtctgggcccccaagattctcagaatcatctgcccaattatccccacctgaggtctcagcatcccactctctgcccagcagggttcttggctttggctgagatctggccaagctatgccctccttctccttcacaaccctgtgaccctcctgcccccaattccatgccgagcctgatattcagtacaggataccctttggctgcagaaggagagagtgtcttacaacagcactatggggattttgttcttcactgcatggcctgagttaacagtggatcaacctgagcctgctgttttcttcctttaaggcttccagagcagttagccgccagccagcctcaccatccctgtaaggcccatcgcccctggattgtttagatgctagtgctttcatctgatcccccaccccaccaacacctgtacctcttcccagcccagcacagggacagtcttaatcaccgtaataccagggtggccaccatcacacgtcccacgacaacagggccctcattgcacatcaccaagtgacccagctccagaatgccctcctgtagtggcgttctcagggctgcgactctcttagcttaagatccccccaaagtagaacccgatgccaaggcttgtgtacagggagtttattttggaagtcattctagggaccagaaatgagggacgaacaggagtgggaaacaagagagagcagaagagccaagataacggtgcattattaggtcactgccgtgggtggctggggctcagccctgccaggaccttccaagcagtgcacagagggaccttatgggtcagatgacggcctggcagaagcattcacctggtggcgcctgtgcaccccagattgaggctggctcagtggaagcaacttccctccacaagtcctccggctgagcccgcttctgccaaccttgtgttggggcgctgcggaagcccctgggcagaaaatgaaaactgcctcatgctgacaggaggcgaggtgctggtggtgcaaagggagctgaagcccgcccggaactgcttgccacagcatggctggaaatagagttgtagccgtgcacgcggcaggcggcgttcagaaggaatctggtgcattctctcgtagttatgaaaacaggctctggagccaggctgtcttgattccaatccttctgctgtgcttcctttccttccacttacagaagggggaatactaagaagaaagtactttatagggttgttatgaagtaaatgagaaaattcatgcaagatgcttgtaatagtgcctggcacataataaatactcaattaagaggggcttctaatatccccattttacagttgaggaaactaagatacatattttttgagggatgaggagaaaggggacaaagaaagggagggaaggattttgagtagatcccgctcaaacctccagagaagcggaggccctggctctctcagcgtttctatgtcctcttcccctatcacaggagaggcctaaggatgggcagcaaaggctttcttccccaaacaggcattcaagcttcctctgctccagctacagggtccgtgggttccttgtgatgtcacagctggttgctatggagaccaggttgctgtgaatgtcagtccgaggcccattaggagcacagtgaacagcagcccaggcgagcccagggaggcaagaaaatgaggctccccgtgaggtctaataaacacctctcgccacaccccaaacacatagacacgcaatagagcccataggtcctgagtgagtccccctggcccaccccattcagctgagatctgacaacatatgtttggggacaaacagccccagcagccaggagcaggccacatcatacatagtcagcatcagccatggtcccctcccactctcctgggggaaaaaggtgctttacaggcagcgtggcatccgagcatccccatggcgatgct

SEQ ID NO: 7053 - DNA, 2300 bp, Homo sapien
tgggaatgcccgcctgctgcgtgcttctcatgttccctgtctgggccttgtgccttcttcctgaagtggaaggggggtcccaaggctttttagaagctgcctccttgcctagctttctggctcctctgtcccccgtccctggactcctcccagccccctcccgtctcttgcctgccctcctgcatccgatgccctggctgtcagggagaggaagttagctgcaggcacatacattttttaaaaacccagccatttaaggaaactatgcctctaaacaaacactcaaaggcccccacctcttgtccctaagggaggcagcaccagggccaggtcaggaattccgggcatgtggggaaggccctgaatggaggggaaggcaagttgctggtcagacctcctcccctcagagggcctcgccccagtcctgagaaccagccctgactcctccaggaccccagggctgctctgctggtcccaggccaatggggcccaggaaaaaggccagagtcattccctgggcatctggcaagaatatggcgtctgttgttgtttttttcttttttattaactttttaatttttacttctttttttctttttttagagacagggtctcgttctgtcatccagactggagcatagcggtgcaatcatgtctcaccacagcctccacctcccaagctcaagtgatcctcccacctcagcttcctcggtagctgggactataagcatgtgccaccatgcctgcctaatttttttttttttggtagagatggagtctcgttatgttgcccaggctggttttgaattcctgggctcaagtgaacatctcaccttggcctcccaaagtgctgggattataggcatgagccactgtgcccagcctatttttactttttactgtgaaacatacatataaaataatctatataacgtacgcacatttaaaagactatgttaaatcgtaaaataataataaatgaaggcttgtataagcccagactaagaaacccagcctaagaaaccttcccaatgctttccaagcccacgcttgccctgaccctgtggctgccccatatccccctgcccaggttaaccactgggttccgtgttgtgctgtggaagcccatggcccagagacccaagaacatgattgcagtaagaaaatgggaggtttcgtaagcttgtcgctgcaagggagtgcacagcgcagggaaacctcggtggtgtctcagggaaagggatctggaaagcccctgagaagatctaggcttggctggatgattccaaggaaaaccaggaaagcaagtccagttctggactgagtgcatgggcacttaataattttgatcttggaggcaggagggttaaaaccgcaccggcgttgtctggtgagcaagccactgtcactcagaaaggcagtggagaggaaggggtgtttcaccggtgcttactcactggtggggtctcacagttagcctggtctgtgtctatgagtgtggtttgtggtttcttggaaacgttatctatctgtgagcacaatttgtcattactcagtgttaatcattgtgcagcttttctttatagtttgcatgtatactatgtatcttgtagatttatgtgtggctaaatgatatgctgtttgtcatcaccaccactaccccaccactgccactacaacaaccccaccacctccattgctgccaccatcaccacgacagctacgccctcacacccacagaagcggcggtgtgggaggccacatgtgctctagctgttccatgtgtggggtgtgtatctgtgtatgctggggtggctgtggggggagagaggctatttagagagtttcaggctgagcagcactgaggaaccaagaagttggctgcaaagatctgggcctactgcaaagatcattgagtacctcctgcggtcccagtctctctttctctccttactcctggatttatctgaagatgagggctgagtgaccaaacaagcatgggatcaagggccagaaagtagcatcaggctcagagctggagtcagggctggcactgggaggccccgacagcaggagcctctgatccaccttgttccagctgtcttgaggaccatctctcccggcagcataccgtgtggcttcacactgctctgcctctctgaacctcggtttcttcatctataaaatgggaataagagtaagccacctcaatggactgtgggaggcttaagtaaattgaagtgccatgcaagtagctagcatgcagttgcagctcaatgaatgtgagtcccttgtcctcc

SEQ ID NO: 7054 - DNA, 2300 bp, Homo sapien
agatctttttgctctctggaggatgggaccactcccctcctttatctacttctctttttgccctcatctccgatatctctgcctcaccctctaccccagtcactgcaggacacatgtccaacaccctgggtacgttgacgcctcgaggtctttgcttctgctctttgccttcctggcaatgccatcctaccattggtggaaattccaggcctacctctgacattacttccttggtgaatctttctcctcaaaaggaacaacaaatggctccttcctcagtgctcttttctcggccgggcacttggcatccaaaaccatgctcagtgcaactggaggtgcattcagttctgaattaattgaagttatctgcgagtgccttcatctcttgggcagaccaagacctgcctgaaggatcttgtcattctaatcgtggaacccctcccccaacccccgtcccccagtacccgacactctgcctggcaccaagcagagaaatactcaggaaacttacagttgcattgaacctcatataacgatagggttgttactgtctcttgagcatctactgagagcagctgggtgctgggccctttaaatacactctcatggctccttacacagagccaggaacgtgggtattactgtgcaccactttgcagatgtgggaaataaaggctcagagaggtgaagccagttgctccagatcacacagccagtaacaggcatgagattccaagaagctgtgtttgtgacgccagagtcaagggaaacaaatgatgtggtacccacagtgctccctccctcatcacccccaccgcctccagctccacatccagattccaaaagccatgagcacccccatctgaccatgaacgcccatctgaccatgaacgcccatctgcggatcgccagcagcaaggttgacacggaactccttccgccttgggaggaggcttccctggggtagtaccctctgggggccgtctgggcaactcttgcagggcttcgtggatgtttggggaaagcactggacagcgcctcgcccaggtgccttcctgggaatcaccaactggggtttactgccccaattttggagcttgcacagagcatcctcccttggtaggagagacgtcgccattgggccacaggacttgtagaggacgccacgagaaaggggttgattggggaatggttgtcctggttacgccaccctgcagtgtcccttgccctcctccaaggcttccagccccatcgcaacctgtcagttttccaggcgctcaggaaagcatgtcaagcactcaagcactctgtgacaattccacccccggcccagtctttccctcttcaccccctctctgtgatgtcgaatcccatttcacagatggagaaactgaggaatcgagcaagtgaatgccgcttaaacatcttttccaagccagccagggaccagcccctccagttctcagaatctctctccctctgtaacatattttgacttgaagaacatgtgcgattcgtgactacaaaaccgcaaccccacataaagagttaatatttttaacgaaccccaagcccctcaccctcagccttcgcgggacgcctgcgtctcgcaacttcagtttgtatctccaaactgctgagcattcaaagggttaaatgggaccgggagggggccagccgcggagccctgaaagggttaaaaatccaaacgcgtcgactccccccgactatttggttccaaatggacagccacgcgaccgggagagccagggagcccccctcacaatgactttattaaaatttgagaacttttacttctgaccccaaaaaagtatcccagttcgaaagttctctcttaaccttttctttttttcatctatttttttctcgatttctccacgggctggattataaaacgctccctctccctttgggtttggagagccgggttcccccctccgggcagggcgcgggcctaaggggccccgggagttttctccggggccgggtcgggacgcggctggtgagtcccggctccggcccctgaattggggggtccgcgtctgccccaaacgccgctttcttccgttttccatgtcatttcctgtactaataagatggtggtcaaagcaggggaggagagcagcagcgagtcgccgccgccgccgcgccgaggctggcgctgaaactttgcctcgccggggaccagcgcgcccgcagcgcggccgctccctccgcgggggccgccagccgaggccgcgccgcctccgccgagccgcccgccgggccgctctcgccgc

SEQ ID NO: 7055 - DNA, 2300 bp, Homo sapien
cagatcacacagccagtaacaggcatgagattccaagaagctgtgtttgtgacgccagagtcaagggaaacaaatgatgtggtacccacagtgctccctccctcatcacccccaccgcctccagctccacatccagattccaaaagccatgagcacccccatctgaccatgaacgcccatctgaccatgaacgcccatctgcggatcgccagcagcaaggttgacacggaactccttccgccttgggaggaggcttccctggggtagtaccctctgggggccgtctgggcaactcttgcagggcttcgtggatgtttggggaaagcactggacagcgcctcgcccaggtgccttcctgggaatcaccaactggggtttactgccccaattttggagcttgcacagagcatcctcccttggtaggagagacgtcgccattgggccacaggacttgtagaggacgccacgagaaaggggttgattggggaatggttgtcctggttacgccaccctgcagtgtcccttgccctcctccaaggcttccagccccatcgcaacctgtcagttttccaggcgctcaggaaagcatgtcaagcactcaagcactctgtgacaattccacccccggcccagtctttccctcttcaccccctctctgtgatgtcgaatcccatttcacagatggagaaactgaggaatcgagcaagtgaatgccgcttaaacatcttttccaagccagccagggaccagcccctccagttctcagaatctctctccctctgtaacatattttgacttgaagaacatgtgcgattcgtgactacaaaaccgcaaccccacataaagagttaatatttttaacgaaccccaagcccctcaccctcagccttcgcgggacgcctgcgtctcgcaacttcagtttgtatctccaaactgctgagcattcaaagggttaaatgggaccgggagggggccagccgcggagccctgaaagggttaaaaatccaaacgcgtcgactccccccgactatttggttccaaatggacagccacgcgaccgggagagccagggagcccccctcacaatgactttattaaaatttgagaacttttacttctgaccccaaaaaagtatcccagttcgaaagttctctcttaaccttttctttttttcatctatttttttctcgatttctccacgggctggattataaaacgctccctctccctttgggtttggagagccgggttcccccctccgggcagggcgcgggcctaaggggccccgggagttttctccggggccgggtcgggacgcggctggtgagtcccggctccggcccctgaattggggggtccgcgtctgccccaaacgccgctttcttccgttttccatgtcatttcctgtactaataagatggtggtcaaagcaggggaggagagcagcagcgagtcgccgccgccgccgcgccgaggctggcgctgaaactttgcctcgccggggaccagcgcgcccgcagcgcggccgctccctccgcgggggccgccagccgaggccgcgccgcctccgccgagccgcccgccgggccgctctcgccgcccgggccccgcggctgccgcagcattcccgggaaggtgagtcagccccggtagccaatgtggccattgaaaatggcttcggagagcgctcggcagtttgccagcgagcgcgggggccgccggtgcgggggccgggagcggcggctgggggcgggggcggccgggggtctcggcgcgggcgcggggcgggggtccggacggcgccggcgcggggtggggggcggcccgccgtggccgcgaggtgggtgaaccctcggcaggtagctgccgccgccgcgggagccgggggccgccctccgcctccttcctcccagctcgctcgctcctcgccttgttacaatgtagccttttctctccgcaagcggcgcgcccgctgacggacgtggccgccgaccaatgggagtggcggcccgggccgagcgctcggaatgagaacgcggtgacacggacggggcggggcgcggacgccgacgccagagggctcgccgcggccgccggcctagttctcgcggacgccctcggccccgcgccgggggctgctgcggggtgctcggggatgaaggtgggaggcgtcctttgggatgcgacgaagccttctccatcgcggttcgcgattgcccgcgaagcgtggccgagccggagggcatttctggaatgcgttttaagtgtcagttgcggtgtagactcttcgggaaacctct

SEQ ID NO: 7056 - DNA, 2300 bp, Homo sapien
tcggtgttcttcctgcttgtgcacaagggaccaggtgaagcgtggcttcctgggcctggatgggcactggtgagcaggggtttgggggtttctgctactgccaccttgctagcatggtttctgtcctgttctgctcccagcctgtcctgattcaagatggcatctgggtagtcacagctggtgggctctcatcttatgaccactcaaagagcaggtttgggttagggatgcagtttgttgccacggagacgcccctcctgttgctgttggagtgacgggaaagctgttaatcctgggaatcctcctttcccttcatgtccagcttccgtggtgtggctctttctgacttgcagatgctctcctttgcactgtcatggcaccgcttggggatgattgaatggactctgttagtttcttaacaaaattaatggtgggccaggaggcgaatgggcactgtcgtgttgagcttatctttatgacagccccatctaggtgatctgtctgtggtggttctcaaccgagcactattttgtgcccctgggggcatttggcaaggcctggagacatgtttgatggttggatgctatcagatagaagccaaggatgttgataaaatcctgcattacacaggacaccccttccccccaacgaaaaattttctagccccaactgccaatagtggcaagattgagacacccacattaagtcctcctgatagccctggacagtgacactagaattgtcaccctagttttatggagaaggagactgggttcacacgagtcccatggcttggcccaaggagactcagtctctagttccaggtctagtcccatattcctgccaccatcttggactgggtaatgaggcccccagccttcttcccatcttctgggccctggtgttttgggtgcttgagtaggaaggtgagggctgaaggatgttggtgccgccggccttcccctcttggtttcagaaggaaaccaaggagtgaatgcgctctgagctttcctccataccctcatgtcctctcttgggtggattttttcaccttttatcactagttaaaagggtgacagagccacgatgtggagaaatcaagttccaaagccagagcaggagccaagtgggatggaagggccatgctgtgccccttgcccagggcctctggctgctcagttgagagggaatcccaggtccccctggtgtccaccaaagtggaacttgactccctcaggacagtcgtgggcttctcaaattctaccaaaaagtcacagcagcccacccccgaagaaagcactcccatgggaaggaaacctgtttgcctgcacatatgcaaaggtgggggcttggagaactgaccgggacggggaaggggaagagagccactaggcagaataagctttctgtggccacaccctaatcatggcattgtcactgctacacccaacggtagccagtgtaaatagtttccctggttacgtattcttccgagccattcattcagctgtagggctgtaggtaaatatcgctttatagaggcaatgggctaatcctaatttcaataagatcctttactgctatctttaagagattttaagccccttacatcatgatgtgtttccctccttagtaataaacccgaagagttgtggttgttattctggacagggagaataaggtgtgaaaggttgaacatgaactgccctagctctcaccgctagtaagagctaaagcaggccctgaaaccaaggccttcgactctgagttcagtgctccctcccatgtaacgccgtctcttctttccaccctcccctccgaggagtagtggaagggacctctcagtaggaggagggtgtggtgggggccaggttgccccaggtgcctcctggctccccagctgggggccagcaattaggaaggagaaccacctgcattgacggtcatttacccaattgtgctttgtgggatattcaacccaaggaatgtggcacacctggctgagcgtaagaggaagcccaagttctccaaggaggagctggacattcttgtcacagaggtgacccaccatgaagcagtgctctttgggagggagaccatgcggctgtcccatgctgacagggacaagatttgggaaggcatagcccggaaaatcacctccgtcagccaggtgccccgctccgtcaaggacattaagcacagatgggatgacatgaaacggaggaccaaggacaagctggccttcatgcagcagtccctgtcgggccctggggccgggggccgggcccccaccatcgtgc

SEQ ID NO: 7057 - DNA, 2300 bp, Homo sapien
ccctcaaacacccacacatggagggcaagggcaggcagcctgaaatctggtgggtgtgacaaggcaaccgtggacaatcacagggagagtaaaagtcacatgggcaagcaggagtgctcataaactaattctgggctgggattcaatccatcataggcttccacggacttctgtttcccatggtgtggcacctaccttccaggagtgtttcctgtggattttggaaaagcctgttttctcccccaggtataaatgtttctttcccatttgtttttcagcctcagaaagcatggtctccggccccgccatcatggaggatgatgaccaggaagtcgattcagcagatgaatctgtctccaatgatatgatgacagcgacggatgagccctccaagatgtcatcggccaccgggcgccgaatccggcgctttaagcaggaatggctgaagaagttctggttcctgcggtactccccaaccctcaatgagatgtggtgccacgtctgccgccagtacacggtgcagtcctcacgcacctcggccttcatcattggctccaagcagtttaagattcacaccatcaaacttcacagccagagcaacctgcacaagaagtgcctgcaactgtacaagctccgcatgcacccggagaagacagaggagatgtgtcgcaacatgaccctgctcttcaacaccgcctaccacctggccttggagggcaggccctacctggacttccggcccctggcggagctgctgaggaagtgtgagctcaaggtggtggaccagtacatgaatgagggagactgccagatcctcatccatcacatcgcccgggccctgcgggaagacctggtggagcgcatccgccagtcaccttgcctcagcgtcatcctggatgggcagagcgacgacctgctggccgacacggtggctgtctatgttcagtacaccagcagtgatgggcccccggccacagagttcctgtccctgcaggagctgggattctctagcacagaaagctatctccaggcacttgaccgggccttctcggccttgggcatccggttgcaggatgaaaagccaactgttggcttgggtgtagatggagccaacatcacagccagcctccgtgccagcatgttcatgaccatccgcaagacgctgccctggctgctgtgcctgcccttcatggtgcaccggccccacctggagatcctggatgccatcagcgggaaggagctcccatgcctggaggagctggagaacaacctgaagcagctgctgagcttctaccgctactcaccgcgcctcatgtgcgagctgcggtccacggcggccaccctttgtgaggagacagagttcctgggcgatatccgggcagtgcggtggatcatcggcgagcagaacgtcctcaacgctctcatcaaggactacctggaggtggtggcccatctcaaggaggtcagcagccagacccagcgggcagacgcctcggccatcgcactggccctgctgcagttcctcatggactaccagtccatcaagctcatctacttcctgctggacgtgattgctgtgctctcgcgtctggcctacatcttccagggcgagtacctgctggtgtcccaggtggatgacaagatcgaggaggccatccaggagatcagccggctggctgactccccgggagaatacctgcaggagttcgaggagaatttccgagagagcttcaacgggatcgccatgaagaacctcagggtggctgaagccaagttccagtccatcagggagaagatctgccagaagacccaggtcatcctggctcagaggttcgactcccgcagccggatctttgtgaaggcctgccaggtgtttgacctggctgcctggcccaggagcagtgaggagctgatgagctatggcaaggaggatatggtgcaaatatttgatcacctggaggccatcccgaccttttcccgggatgtctgtagggaagggctggacccccggggtagtctgttgatggagtggcgagaactcaaggctgattactacaccaaaaatggcttcaaagacctgatcagccacatttgcaagtacaaacagaggtttccactcttgaacaagatcatccaggttcttaaagtcctccccacttccaccgcttgctgcgagaaaggccgcaatgccctccagcgagttcgcaaaaaccaccgctcccgcctgaccctggagcagcttagcgacctgttgacaatcgctgtaaacggaccgccaatcaccaactttgatgccaagc

SEQ ID NO: 7058 - DNA, 2300 bp, Homo sapien
cattaattaaacctctatttccacaaaacattttgcattgccaggcccggagccaagaaaacctcccagggcagctcttatgtgagagattgctaaggctgtcaccagggactgcagtgcttcagctctacagtttgcagcaaatggggatcagtaggaaaatgtgcctggcatacagcaggcacacaataaatacttgtggaaaagtcagtttactaaaatggagctcatatcacaaatgggattccttcaaaacactggaaattctgcataagatgatcatatgaattattccacggttactgagtgcctgctatatgcacccatgggtgataacatggagactctaaagatgttagcttgttgaaggaatcccaagtccatggggtggctgaggctcaggggcacattgggaagtgtgtagagaggagtctggaaggcttagcagggaccacatcacaaagggatttggataaaggttgagtctcttgggtttattcttggagaacctttgagagctgtgagtgacatgatcagctttgtattttggacacctccttttgatgtcactgaaggaaagaactagagggagactattgttttgatcaaatagtgttctagaatttctgaacccaggccttaagacaactggcagcttctgcttcattcctcttagaatccagccagcatgctgtgagcagctccagcaccatggagaggtgacatagaggacaaccaaaatgcaccagctgacagccccattgtgatcccagtggcagccagcacctactgctcaccacgtgagttcaccattgcaccatctgcaatggtgtctggagagctgatgtcccagtccagctgaacccctagatgactgcagtcccagaagacaacatgttgagcaggaaaaccacccaactgagcccagccaacccatgaaatcatgacaagtaacacaataactggtctaagccagtaagtcatcggtgggtttttatgcaagtgtagatagctgaaaaactggaggacgggtgggttcccaggtggtggtcacagctacagctcagaggaaaaggtctggctggagaggctatagatttaggagacattggctcatagaaatgtgaaagctctgttgtggatgaaatcacctacatcccttttcacacatgcccagcacacctagagcacagccaacccacagcaaatatctgctgaattaaattcaacactccatataatgaagaacactaaaaagccactgttttcttgagctaagacagtcctcatgcccggaattctaatttccccttgttctaagcatagttttatgctcaccctctctgaatcaagtgtgtactcctagctgctgcattttatcttctttatcctcctaagacaagtccgtttgagtgtggacttggaatctgcaaacataagcttgggttcagggtgatgatttttctacctgtgcacctctcttctgagcctcggcttcctcaactatatataaaggtgcgaatacctgctgattaggtaataaaggtgaactcttgggcaacccttaaggggatgcagctgtattgtccatcttcagcaggacacaggtacagcctcaacccaaacatcccatctgttccctctacctgtggcctgttcctcttccctgtaagaaccatctcccaggttggggagctgggaaatctccagctttgtgtttgaaaaagctcccggaagacccaattttacagccagcttggccagctgctggggtagaagggtgagcaaggagctagtagtctgggaaagtgactcctagagtcgcagatctggttggagcccaggtttgtcctctaacacagtgtgacctccgcaagctccagcacttcttgggcccagttgtcccctgttgtacacaaagcattaagaatggcctgaaacaaccccaaggctccttccacctggaaggctccggctcctgttggggtgggggtccggtcacgtgttggcggggagggggttgccggttgacgtggctgcgggtccagcctcctctgacgtcctcgcagccgtcctccctccctccgtccccgcccctctggcggcgggagagctgctggctcgcccggatcccgggagctgcctggaggcgggcccggcccggggaaggtgagcggctgcgggacccagcccctcgccgggagcgggcaccatggtgctgtcggtgcctgtgatcgcgctgggcgccacgctgggcacagccaccagcatcctcgcgttgtgcggggtcacctgcctgt

SEQ ID NO: 7059 - DNA, 2300 bp, Homo sapien
ttattgggccacaggaacaaacagatgtttggatgtcattgtttgttttcttttgccttccaatgggccctttctgctccttccaggagctcaccagctggcctgggagggctgcttgcccacttatagttgccaagatgtttggctgtgcccccgtccagaaccatcttctggtcctgtcttcattcttgagccctttccagcctgaacccaatgggggactcgtgttccaggtctgctaacgtttgctggcagagcccatgtttgggagcgtgagctgtgtttaggtagaaacagacactgaaaacagctgctggcttctctgccgtggtaaacagggaataaagcactccccacctcccactgtgggcttcgctggggattggggagcacaaggcaggccgggcttactgtcgcttttggggaggggaaggccatttttctttagggactgggcctgccccctcaggctcgggtcgggccaggggtggggtgagatgtgtggagggagttggaagccctccctctccctggacttctagatgtttgaagactccataggcactttctaccgtttggtgtctgtgaggcagggtcgtttctttaagcctttgtgggtggactgtcagcaaaggcagtttctggcatgtccttgtactgtgttgatgagtggtatcaaacttaccttcacatcagcctcacttggttggtgctgatttaaacatacatattcccaggcccttcctcaggctcgcagaatcagaatctctgagggaagggcccagaagcctgcattttaacaaactcttcaggtgattctgctgcaggcattcagggaactacaccttggagacccctggcaggtttctaatgggttatctgggaaaccagggggaaggggcagtcaggaggaggagggggccagcccaaccgcccttagcatgcataccctgttatgctttttgacttagacttgggagcagatgcttttagatgtaggtctccttagaaacagatgctatccctgttctagaatatagaatagagtagttccccatcctctaggtgtgcttcatttgctgtccacccactcatccatctctcgacccactcacccacccatccatccacccactctttcatccacccacccacccacccatccatccacccaccctttcatccactcacccacccacccacacacccacccatccttccatctacccatcctttttggagtgaccacctgctttgtgtctggctctgggctgagctttggagacaccagaactctccatttagacaaacagacacagaaatcatcataatacagagggacctgttcaatgatcaatgtctcgaataagtactgtggtggcacagatgacagactccactggcagggagaagggatcagagaaggctttggaagacagcaacctgtgagtgggccataaaggacaaacagtttgctagatggagagtgtgagcgtgagggtgtgtaggagggaaagtcagttttgcgaactaaatcctctcacatccacattcagagcaggggcctatccccaggccccatggagcccgtattcggaggcttatctgtagctgcaacctctaaacttggccccatctcctgacatttctgagtgaaaaggagccactctttagtgtgtgtgctgcaggctcctgtggctgtcacagtacagttattgcggaattaacaggggaacagccatccaagtggagaggcacagaatacttcctgtcctagctctgccttcaactcactgtgtaactgtggacagtttcggcctcagtttccccatcatcaagatgggagattggctgtcaactctgccagcttcctgcctggagcgcagccctgacacccttcctgcaagatacacgttagcaacgaccgttctctctacgccaagctcatttgtctgagcgtatcagcaacacgacacctcgcagttcagtggatttgatgtgagctcccgcccctggcatacctagcgtgtaatacctgctgctgaaaaggggtatttgaaggcaaagtgcatggcagaaggaagcctgtaggtggcgctatggctccggttgccgagctgctcccaggagattcgttttcagaggatctgagaaaaacccggcagggttgatggcagctctttcttctcggtgccctcgcagtgcagcaggccccgcttatttgcaagaagcagccaggtcagcccactgggcctccccacctcttgtgccccttcgcacatttcagagctctctctttt

SEQ ID NO: 7060 - DNA, 2300 bp, Homo sapien
ctacccgaaatacaccagaatttgaaaaatgaggcgctggatctggtagtgcaagatagagaaagctttctctaaaccctgactattctcgtcagcctgaaaacttggggagggattaactctgggtgaaaaggaaggttctgatggctcagcccaaggctattagagcttggttttttatagagggacagtcacgatttggaaacatgaagtcttagcttttggaaggtcagcaccactcttgttaggcatctcagtacgctgccactccctgggtgggggtggggagggggaaggcaggtggagaaacagacttggtagccttggagtcaggactgaggactgactctgccatcccaggtgctgtggctacaggaatgcgcactggaaggtgctgttagcccctccagcttgatgggggtggagatgggggagaggagtttatagttatgagtttgcaattgtgaccaagataaatgaccatttggtctagtgggacccttggggcaagggccttcataccatctgctctgggtggagagagggagaccttcttgatgacccgagagcccagtcctccagggaagtgcagctgtcatgttctcctcttggcgagtgagtgaatgtttgttcctggctaccctgaacgcaacaatgtgcaattattaagtactcacccccttgccagacactgctgaatgctctacacacattaccatccagtgttcacaacacccctacagggtgaggatcagtacctctgtcttctggatgaggaaactgagccgcagagaggctgatcactcacacaaagtcacccagcaaacacacagcaggttcctctgacccaggaaactgctgtgctaaccattctgctgtgcttcactgtgtgggatggaggcagcagctgcttgcccatacatcggggacgaggctttcccagaatgcctggagttttcaagccatccactgctctctgcgccccagtccaggagtgatggagagctatagtcgggaatcagagattccaggtggagatgaaggctgactgttcctctgcttcagaaataaccatttggtcagaactgaggagcatcagaggttcagccagacaaagcaccttcctagtctccagatgaggaaacaggccactggggtgggcagcctcagtcatgtcagatgtggtggcagagctgggactcctggccgtcctctccagcccaggggccactgatcacatgatattgctctgctcatgcaccctgcttctcctccactccactctgagaggttcatcaaccagtccctggtgcccatgaaggccaggcctgtggaagatgctcagtcaatatttgtgcagaggatacaggcccaaggtgctcggctggccagctctgtccccatccctcatccataaaagcagtggtggctccagattgccacctagaaagccaggggcagtctggtaggaagaaggtgggcagtgtggaggagcggcctagaagacggtcagccagcaaacccactctaaggtcccattaagacaccccctgaccctgcccaagagggacaactgcagcggggacaaatgattcatccccacacttgagaagcagaggggcggggaaggaggaaaggctaggggtgtgtgtcagggtattgcacacagagatggttggcttcagttctgggttctgaagtccctctgtgccgctggctgggcaagaggtaaaggacagctgggccaggggccaggctgggactccagcaggacttccgcggcgaggggcgctgggggggcgaaaggctttggcggcccggccagcagcgccctcgggggtaaggggaagggaggctacgcggagaggtgccagagacagccggtgcccttgcccgccggccgcccgaagtccgggtggtgggcgtggctgcccccggcgggtgggtgggggcgggctccggagcctggctgcggagtgggtgtccagggcgctcgcggctggggcggcgcggggggcgggaaggcgcgcgccgaaggggtggggaggagaaggggcgggcggctcgggggtggagccgggaccgcagcgcctgccgctcgctcggagctgtagccgccgctgccgccgctgctcttggctcggggacgcgggcgggcgctccgagaggctctggtgcctgcggctgctgctctcctccggcgcccggggctgcggcgctccgggtcccggcccctgtcccggcatctctcgggtccctgagccccggccccgggtcccgcgtccggccggagagaacgc

SEQ ID NO: 7061 - DNA, 2300 bp, Homo sapien
aagactgaaattgggagagtctctcagccttctgatgccacattctcatttacaaaatgataattccacctgccacacagacttttctcagccaggaagatggtgccctcggggggataaggtgatgcgacatttgtgctgtcactcacctcctgcctgccccctgcacctcgaggcctccctcagcccccaggaaaggactcacagcccagccagcaaggagacaggaggaagatatcacaaagtgagtgcagcttctgttaactgccttaagctgctccctgcaataatgttggtgtaatccataagattcaattatggttatcagacaattaggcacaccacagcgaggttattgcataattaatgctcagtccccatctcagcctctgagagtgacacaggttacaagattcacctgccccgcatctgggagaggagcaggggcacccaggatggggaatgacctccctgtgggctcagaggaggatgttcttaggaccccagaggcatggcaaagggacagtgtgtggctgaaagagcttgagtcagtgtgtgcccagggccctcacgcctgccattgtgtttaggacttgggctttaatctctggagcgagattcaaatcctgcctcaactactgattggctatatggcattaagcactcgccttacatttttaaagcctccatctccttgtcttttaaagaagggaattgatgatgttatgaaaactggatgagagagtttgcatattggttagatggttcctgcagtactattttcattatttccctctctgagcctcagtgtcttcatctgtaaaatgggaataattagcctcaccttgcctaggcttgaaagatcagccggtagtttgagacctgcctgggcaatatagcaagaccctgttcaccacaaaaaaggaaaaaaaaaaggatgaaagatcagtttgtgagtcaagtaagacacacatgtgaacgggatgtgtggagtgctttgctaacgcgccattgtcttagttactatgtgcctggttttctgctcaaccctccagggtacgactttgtacaagtccccaggtctcaacaggacagtgggtgatcagcccacctgagaagtgaaactcatgatttgggtgagtagactagaggagaatcacttctttctttctttttttttagacggagtctcgctgtgtcacccagggatctcagctcactgcaacctctgcctcaccggttccagtgattctcctgcctcagccccccgagtagctgggattacaggcacacgccaccacacctggctaatttgttattattagtagaaacggggtttcaccatgttagccaggctggtcttgaactcttgacctcagacgatccacctgcctcagcctcccaaagtgctgggattacaggcatgagccaccatgcccggcctgagaatcatttcttgagctatgatctgtaacattcaaatgagcctcaacggacacaaaacagaaaaatcatcaaaaatgtcggtgaaaagttcaggtgggagaactcaggtgatggtgcagacagaagcaagtaggggagaaagctggcttcagggagagtggttaggcctttgtgagaaagactggggacttctcatatcatcctctgtgtcccagttcccaaaacacacacgcacatgggcacatgcatgcaggcacacaaaaacaagcccatacaccagacgaaaaaatacagatgcaggtacacacacatggacatggacatgtgtgtgcctgtgcccatataaacaaacattagtgcacacacacactcacacacacacaggctcgggcagtatgtgctcacacacaaccatacacacagatacgcacagaggtacattcacacacagaccaacacacacaggcacacagatgcatgcacgcatgcacgtgcgcgcacacacacacacacgtgcacccaccctcagtgataaccttccaatccactggcctctccgaaattagcacagaccattttcccacgaccctttctcgctgagcgtgtgattccaaaactgtccacaagaaggtgctcgggagccagaattcaggcgttcccggcccgcggacgcttagagaggggagcttcggagttatggggggacccacccttccatttaataactgagaaagccacgggaggggacttgctgggctcacagccagtgatccctgccctgtttccttatggggactgcggtcagaaatggggagtggggcagaaactgtcactgtcacggtcctgtttagaga

SEQ ID NO: 7062 - DNA, 2300 bp, Homo sapien
accctttgtggatggtttaaacaattaacattccttaaagaaaattcaaaagcaaaccatttatgcaaggtacacaattcccaggggccttagaccccctaagaaacatccccacccctcctttccctcataagggataaaatgattagaatccaggaaacttgctgtactggcctgttaacaaccttaatccaagggagtgacactaatgacagaatttcaggtatgatgtgagagattggagacaggggtatactttggcctccatagagagcccacactgtcccccacacacgcagcactgactgcccctgggcctctctcagcgaagtgcatctggcctatatacaagatatatctcttccctccagttcaaggtggcagcagtcatcagacaagttcctgctaatgtgctaaggagaaggcccttccagatcaccagggcctctcagggacaagtttgccctgtctgtcactaaattgtttgtcatggtgaactctcgggcataagagaggagagactggaacagatacgaattgctcttaatgaaccaaaacccacagcttcaaaggaaaatcccagaggtagactctccaggtggggttgaggagaccagctcagtccctcttgagtctttctttccccaaagggatattttagttccaaaagtgacaaggtaaccagatggtatcctccaggtggagaacagcccacaactaggaagcagagtctcattccttgaggaggaagaggggagtgctagtacccggggctagtggaagagggtagggtgtgggcccggctcgttgtggggcagctgtttacttcactgcagcctgcagccctcccatttccctacagcccacccagggctgcgctcagctccagtgaaggtttgtgcagttaggatctgagagtttaagcgtactatataggttttacctttttattctggaaatttgcaaatgtacacaaaagtaaggaaactcttataatgggtccttgtgtatctacgcctagctacaactatcaatggcttatcttatttaatctatcaaccttttaaaaaaaatctttttgaggtcaggcacggtggctcacgcttgtaatcccagcactttgggaggccgaggccggcggatcacctgaggtcaggagttagagaacagcctggccaacacggcgaaacccggtctctactaaaaatacaaaaaataaccgggcgtggtggtggacgcctgtaattccagctattcgggaggctgaggcaggagaatcgcttgaacccgggagacggaggttgcagtgagctgaaatagcaccactgcactccagcctgggcgacggagcgagactccgtcccaaaaagaataaataaataaaaataaaaaatatttttggtaagtattcttagtattttaaaacaaatcccagccatgacatcatcttacccgttaattaaatggcactaattaaatggtgcttgaaatattacaaacatctatgttcgaccataccacctagagttctgggcaagaaggttgggacccacaggtcaagcctagccccttagttttaccatgaagataactcaggccgtcggagaaagtggcctgcccaacgcaggtgctagagcgcgaaccaagagaagtcgatcctcctggtctccccggctgcctggtgagtggcagaccacaggctagacttcccaggccccggccctggaaggggcggggaaccctccccctcactgccagctggaagaatccgagcggtccccgcacgcacttctggaagtgcaagccggtagcgcggcgggccagggatacagccaagtcccgggacgtgccagctgcggtaactgaagccgggtcccgggcgggcgggggtaccagggacaggagtagccttggaaagaggagagggcctcctcccacgaccgtccggatcaccgcctctccgccggcacccccggggcccatgccgcgaacaggccggcgaggctggcaaggtgcccgggcccggggcggaaagcaggaagtcgatcccgcgggcgcggcccagggtgcggcgctgcagatgcagcacggggtcgcggggcgggcgcccagtgcaccggaggaggtgagcgccaggtcgccttcgcggcccggggacacaggcagggacgcgggagctgatgcggctggaccggccggggaaacagtattttctggaaggggtaagagatgctgtcttgagcctttggaatctcggatccgggccgcccagaggacctcgacaggagcacagggaggac

SEQ ID NO: 7063 - DNA, 2300 bp, Homo sapien
tccaggtggagaacagcccacaactaggaagcagagtctcattccttgaggaggaagaggggagtgctagtacccggggctagtggaagagggtagggtgtgggcccggctcgttgtggggcagctgtttacttcactgcagcctgcagccctcccatttccctacagcccacccagggctgcgctcagctccagtgaaggtttgtgcagttaggatctgagagtttaagcgtactatataggttttacctttttattctggaaatttgcaaatgtacacaaaagtaaggaaactcttataatgggtccttgtgtatctacgcctagctacaactatcaatggcttatcttatttaatctatcaaccttttaaaaaaaatctttttgaggtcaggcacggtggctcacgcttgtaatcccagcactttgggaggccgaggccggcggatcacctgaggtcaggagttagagaacagcctggccaacacggcgaaacccggtctctactaaaaatacaaaaaataaccgggcgtggtggtggacgcctgtaattccagctattcgggaggctgaggcaggagaatcgcttgaacccgggagacggaggttgcagtgagctgaaatagcaccactgcactccagcctgggcgacggagcgagactccgtcccaaaaagaataaataaataaaaataaaaaatatttttggtaagtattcttagtattttaaaacaaatcccagccatgacatcatcttacccgttaattaaatggcactaattaaatggtgcttgaaatattacaaacatctatgttcgaccataccacctagagttctgggcaagaaggttgggacccacaggtcaagcctagccccttagttttaccatgaagataactcaggccgtcggagaaagtggcctgcccaacgcaggtgctagagcgcgaaccaagagaagtcgatcctcctggtctccccggctgcctggtgagtggcagaccacaggctagacttcccaggccccggccctggaaggggcggggaaccctccccctcactgccagctggaagaatccgagcggtccccgcacgcacttctggaagtgcaagccggtagcgcggcgggccagggatacagccaagtcccgggacgtgccagctgcggtaactgaagccgggtcccgggcgggcgggggtaccagggacaggagtagccttggaaagaggagagggcctcctcccacgaccgtccggatcaccgcctctccgccggcacccccggggcccatgccgcgaacaggccggcgaggctggcaaggtgcccgggcccggggcggaaagcaggaagtcgatcccgcgggcgcggcccagggtgcggcgctgcagatgcagcacggggtcgcggggcgggcgcccagtgcaccggaggaggtgagcgccaggtcgccttcgcggcccggggacacaggcagggacgcgggagctgatgcggctggaccggccggggaaacagtattttctggaaggggtaagagatgctgtcttgagcctttggaatctcggatccgggccgcccagaggacctcgacaggagcacagggaggacaaactgaagtccgagagaggcggcgtggcctccggcctcggggagcgctgccgggggtctcgggcttgggagagggcctgggggcggtgaaaatggggggaaaggaggggaccacaacattgttatggaagagtgagctcggattggcagagggacgcggggctgcaacgcgagtctccggaggtggaggggtccaggctgatgtagcgccgcccgggtcctgggtcggggttccgggaagtggacctgcgagccaagcctagccaagtcgggggacggaggctccggggcggacggagctgagggtgggcaggcgaggttgatggagcccttccaggaagcagggcgaggctcaagcacccagaaaaacctgtggctgccgaggtcccccgccagcagcgggcagcggagcgcaggggcggggctggggactggcgaactccgcctctctggggctgtcgctttaagggcaaggcggggcgtgcgggccctttaaggccacgtgggggcgtgtcaggaagtgagtccagggcccgcctcccggggagtcggcctcggatgtccggaggctcctgggctgagccggcgacagagcccgggaaggcagcgagacgtgggcgccggcccagccccctcccgcgtccttcagccccaagccccgagcccctctgacccttccgcagccctccctcca

SEQ ID NO: 7064 - DNA, 2300 bp, Homo sapien
aaaatatttttggtaagtattcttagtattttaaaacaaatcccagccatgacatcatcttacccgttaattaaatggcactaattaaatggtgcttgaaatattacaaacatctatgttcgaccataccacctagagttctgggcaagaaggttgggacccacaggtcaagcctagccccttagttttaccatgaagataactcaggccgtcggagaaagtggcctgcccaacgcaggtgctagagcgcgaaccaagagaagtcgatcctcctggtctccccggctgcctggtgagtggcagaccacaggctagacttcccaggccccggccctggaaggggcggggaaccctccccctcactgccagctggaagaatccgagcggtccccgcacgcacttctggaagtgcaagccggtagcgcggcgggccagggatacagccaagtcccgggacgtgccagctgcggtaactgaagccgggtcccgggcgggcgggggtaccagggacaggagtagccttggaaagaggagagggcctcctcccacgaccgtccggatcaccgcctctccgccggcacccccggggcccatgccgcgaacaggccggcgaggctggcaaggtgcccgggcccggggcggaaagcaggaagtcgatcccgcgggcgcggcccagggtgcggcgctgcagatgcagcacggggtcgcggggcgggcgcccagtgcaccggaggaggtgagcgccaggtcgccttcgcggcccggggacacaggcagggacgcgggagctgatgcggctggaccggccggggaaacagtattttctggaaggggtaagagatgctgtcttgagcctttggaatctcggatccgggccgcccagaggacctcgacaggagcacagggaggacaaactgaagtccgagagaggcggcgtggcctccggcctcggggagcgctgccgggggtctcgggcttgggagagggcctgggggcggtgaaaatggggggaaaggaggggaccacaacattgttatggaagagtgagctcggattggcagagggacgcggggctgcaacgcgagtctccggaggtggaggggtccaggctgatgtagcgccgcccgggtcctgggtcggggttccgggaagtggacctgcgagccaagcctagccaagtcgggggacggaggctccggggcggacggagctgagggtgggcaggcgaggttgatggagcccttccaggaagcagggcgaggctcaagcacccagaaaaacctgtggctgccgaggtcccccgccagcagcgggcagcggagcgcaggggcggggctggggactggcgaactccgcctctctggggctgtcgctttaagggcaaggcggggcgtgcgggccctttaaggccacgtgggggcgtgtcaggaagtgagtccagggcccgcctcccggggagtcggcctcggatgtccggaggctcctgggctgagccggcgacagagcccgggaaggcagcgagacgtgggcgccggcccagccccctcccgcgtccttcagccccaagccccgagcccctctgacccttccgcagccctccctccagccgcgcccggcctccggcagctccctgtacgcctccctccccctgcccgcccctccctcccacagccgcccatgacgccctctcggcacctcttcccactctgccacgcgtccttttcctgcaccttcgccccgcgtacctactcctgccccgccctgccattcctctcccctcccttctctctgcgacccctccctgttaggccccagcctcttctcccctcacaggtcttctctgtcctggcctcaccgccttatcctattcctctcccttgccctgtgtcttgtctcagagccccctcggggtgggagtaggttgtggagcagcacaactgggctcaccccaaagcagaacttctcaatccatgaggacaatggggaggcctttaggccagcccacatgtgacaatggagggctgcggcttccttgcggagagcacaagtgagctcactgccctggactccagggaatcagagttctggccgcggggtgacccagctcctctgctaccatgaatagggcccctctgaagcggtccaggatcctgcacatggcgctgaccggggcctcagacccctctgcagaggcagaggccaacggggagaagccctttctgctgcgggcattgcagatcgcgctggtggtctccctctactgggtcacctccatctccatggtgttccttaataagtac

SEQ ID NO: 7065 - DNA, 2300 bp, Homo sapien
tgcatcctcttcctgcccctgctcctgctgctcggggagcttcaggccctgcgtgactttgcccagctgggcagtgcccacttctgggggatgatgacgctgggcggcctgtttggctttgccatcggctacgtgacaggactgcagatcaagttcaccagtccgctgacccacaatgtgtcgggcacggccaaggcctgtgcccagacagtgctggccgtgctctactacgaggagaccaagagcttcctctggtggacgagcaacatgatggtgctgggcggctcctccgcctacacctgggtcaggggctgggagatgaagaagactccggaggagcccagccccaaagacagcgagaagagcgccatgggggtgtgagcaccacaggcaccctggatggcccggccccggggcccgtacacaggcggggccagcacagtagtgaaggcggtctcctggaccccagaagcgtgctgtggtgtggactgggtgctacttatagacccaatcagaatacggtggttgagaaggaaccagtgtttacaagtaatatcagaaagttgaaggaaccagtgtttacaagtaataccagaaagttgccaaacccttctctatcctctcgtatttctgagtttttgtccttcccgagggagcaccctagtgagagttgaaccccttccttctgcctccagggcctgtctgcctccacatcactctgaggacagggacaggcaacaaccttgaagggacagcaatggcaaagccacaaaggcttcactgtactcaggggagatggccctaccacagccacctggagagggttgggaagccttccgtctgcggtgggcaggcagcctcaccctgggcccacagaccggccttcctttggaggaaagtgtggcctggactgagggaggaaatgagcgagttccctctgacaccagcagatccccaggggctgctgggcagtggcctgggaatggggtggattgtgagaaagtgctcaccatctatacaccctgtatgtccagcttttgaacacaagggaaccatgcttctcttagaggttaagcagggtcattaacatcctcccccagtccctaacatcacattgtcctgcgtggctcctctggccctgagtggcacctgtccctctggtctcccagcacctggcccaggtaacagccttctgaaagcagagccaaggagctgcttctctcttctcccagttctacctccccagaagccttcctccccaggtggggctgatggagcaagggtccagactaggagccttccaccccagctgtgtctggcgcccctagatctctgcaagggaggtgttacagctggttctgagccgcttgccttgtgatggtaagacaccaacctttacattcttccctgaggttgtggctgacagagcctgcttggccccactgttagtccagcgagctcctatatcaaaatgccgtaggccgggtggcttacaaacaacagaaacgtattgctcacagtcctggggggctgggacgcccaagatcaagaggccagcagattcggactccgctgagggctgtttcccgatccatagatggtgccttctcgctgtatcctcaatggtagaagcacaaacaagcaagctccttcctgcctcttttataaggactccaaccctgttcatgagggttccgcccccatgacccaatcagctccaaaggccccacctcctaatactgtcaccttgggggtgagaattccaatgtgaatttgcagggggagtgggggacacacacaaatttcggggccataccacccttcaccacaccctcctgcgctcagggtggcttgcagtccctggcccttctggtgggcatttggtatgtcctttctcttggggtgatttctgatgtttttactctatatagtgaaaagctagggagagcgggtcttctcccccctccctctccagtcccctcacaatcccagatgggttctaatgcagctgctggggcctgatgccctgagttgtttgtgattcaataaagaatccataagatcctgtgtgtgtggcctgagggaagaggcagcagggctggagaggatttgtgaacagggcctgggggtggaggggaggttgggacctgtcagaggcagcagggctgaagaaggtttgtgaacagggccctggggtggaggggagctggggatctgtcaggaaggagggctcatccctgccttcaccaagcccacccaccagcaggcagcctttctaggagctggttctttctaaggat

SEQ ID NO: 7066 - DNA, 2300 bp, Homo sapien
aaagcagaactagaatttgaactcagcaactccaatgtgcaaagcctcaggtttaaccattacatcacactgcctctcatgatagcttaataagagagcgaggggaggggagggaagtgacttttgatcattcaacaaatgttttttgagcacctactatatgttaggtaccagagtaccagctgagaagacactgaaaagtaagacaagcacagtccctgcctcacagggttcacggaatacagatatagcattatgggaatttagaggagaaaaagggaagaggacccatctctgaggttaagggagaaccacctccttacactctgtttcattcctagcaaagcaccaaccttgtggagagaagagggcataggagagggggaacacaaaaccttaaaataaaagtaatgaaagattgcatcgatttattcagcaagaatttggaaaggaaattcaaaaataaggaaagggtcaggtaagcggactaggataaacctttaagagcctgccaatatgagactctagttcaatttttactcaaataatccttgagcgttaggtgccaagccctgagctagacttcagacatacaactgtatgtaaataagccacagcccctgctctccaggagtttatactctaatggggcagaaagacttttaagcaagaaatttcagtattgtgtgccaagacaagtgaccaaaaagaagcacagaataagatggggcactattcaggttgggatcagacagcaagaaggtgacatctatactgaacaatgatacagagcaaactggagttagaaacaaagatggaagagggagtgtgatctagactgctggaacagctcgtgaaaagccctggaaatgacagagaatgcctaggattgcagtgacactggtttagagagtggtgccaattaatgccactaaattgcagactaaattactaaatgctttcatcactctgtcccaggtccaggaagggttccaagcatgggctcaacctagggtcaagttgaaacagactgttttccacctgataaccccaaagctgcagcttgactaagccgtcttagcccaagagggttccacctggcgtcccagaagaatggggacagtgtcctccacatctctgaaccctacccggaatccagtacagtgctttgcacacactggatctactaaacagactaaaagaaaataaattcatctgatggcataattactatctcaattcaagtcccccacattcccagtccttactcccaaatcctctactgctgcatattagggcactccttccccgtccttagactctgccacttggaattaccaaggatcttcgcacaaagagaagtatagcttcgtggataaaagcagaaatttcgaaatcagaataatctgggtgaaatcctcttagcagctttatgatattgaataagtcactcaacctgcggcaccctccgttttcttcatctgtgaaacgaaaacaacagcagctttttcactggggttcgctaaatgaatgtaactgggctgagttgagaatagtaaatgagaccgtctacgtaaggagatgatcatgtctcttgccatataaagtgcacttaataaatggcagctgtagtagaatgatgtagatggtgatggtgacgatgttggtgataataggaaggtcagctgtcagtcttgcaagtcactggctgtagtcacagcaacccctaccagcccaggcagcttcttctagaagcaggccctgaacaggacgtgggtaagagatccgctgtcccttgagacttggcctactcccggcactccgcggacagccccagcctgcggacagccccagcctgcgtcacttgtccgcatgccagctccacccgggcggacccacacatggtaggaacgtgagggggcgggcctgttccggcgcctctgggccaatcgccaggtggaaggcactcagccaatggcagaggggctctggggccctgtgggcggggactaagggtggagttgcggcgtcataggtcactgggcgggctatgggcggggtccacgtcgcctaccggggcggagcgggggtggctggagcagtctggacagtcatggcggcgactgtggcgacggcggcagctgtggccccggcgccagcgcccggcacggacagcgcctcttcggtgcactggttccgcaaagggctgcgactccacgacaacccggcgttgctggcggccgtgcgcggggcgcgctgcgtgcgctgcgtttacattctcgacccgtggttcgcggcct

SEQ ID NO: 7067 - DNA, 2300 bp, Homo sapien
gtgcatgccaccacacctggctaattttttgtatttttttgtagaaactgggtttttccatgttgcccaggctgatctcaaactcctgggctcaggccatccacccacctcagcctctcaaagtgacagatgctagccaccacacctggctgtatctaggtttttaaatgttatctcctcatccttgccattattgagattttgtggcatgggatagctttgccagtttggtgagtaatcttgtgactttagggaagtcattatttgcttggaggtctgatttcttaattaccttatggccccagatccaggctgtgtgtataatttattcaaccaaaatctagactgagcatttttcatgtgtgctgataggaaaattccttttgactttctagaaggtggagccaaacagggaactcttgaggacaaggaacatgaccagtcttgggaagtttgaatcctagtgcagagtcctgtggtgaggccccttcccactgcctggccctctgtagctttcttcttgctcagagcagtggcacagtgcaggcagggcctgggtgtttcacatgcaggcatgctgtgccacttctaggggatagtccctccacatctggcagctgagccactaggtctttggagggcccagattcctttgtagaagagacctgagaggcaccatgctaagagctgggcgagtgtttgtatccatgtgccacccctacctctcaggtgaagcggaacagcacacctcccctctccctatttgggcaactcctatggcgagagttcttctacacggcagctaccaacaaccccaggtttgaccgcatggaggggaaccccatctgcatccagatcccctgggaccgcaatcctgaggccctggccaagtgggctgagggcaagacaggcttcccttggattgatgccatcatgacccaactgaggcaggagggctggatccaccacctggcccggcatgccgtggcctgcttcctgacccgcggggacctctgggtcagctgggagagcggggtccgggtgagtgctctctcaacgaaaagctggcctgtaccctctggtcaggcccgtcaaagggcagcccccttctgggctgagggatgaggtgggatttctgggtccaggagatcccctccagatcctctgtggcttgccttcaatggaagggttttggctcctgggggcactgtggtgacttgggaaaaaacatggctgcatgtccccaaggaggctgatcatcccctcccctatctaggtatttgatgagctgctcctggatgcagatttcagcgtgaacgcaggcagctggatgtggctgtcctgcagtgctttcttccagcagttcttccactgctactgccctgtgggctttggccgtcgcacggaccccagtggggactacatcaggtgaggatacagaccaggctctctggcctctgaccactgtggcctcctactaggatgggataccctgggccttttgaaggagggtctgggtatgctgatgggtcatctggtgtatcttatttcaggcgatacctgcccaaattgaaagcgttcccctctcgatacatctatgagccctggaatgccccagagtcaattcagaaggcagccaagtgcatcattggtgtggactacccacggcccatcgtcaaccatgccgagaccagccggcttaacattgaacgaatgaagcagatttaccagcagctttcgcgctaccggggactctgtaaggagacaaacacctagctcactgaagggaaggacagcacctacaggctcagggggccagatggggatgtccagatacttgcaaagggagactgagtgctgtctttcaggttgacaccttcgctgggtatgggacactgcaggctgggatgaactgggccttcctgagtagttgtggggctgtgggaggaaatggaacctcagtgtcttgctcctaccctccccacccccacttgcttcatcctgccctgtagccctctgcaatcctgcgagacggcactctgattactcctcgcctctctcccaggtctactggcatctgtcccttcctgtgtggaagacctcagtcaccctgtggcagagcccagctcgagccaggctggcagcatgagcagtgcaggtgagcagcagcaaccaacctcctgtggcctcctgtggcctgtgccaccacttcagtcattcaggactgaggccagaaggaggccttgcccagtggagcttatattccacctggggcagtcagatagtaaagaaaccaagtt

SEQ ID NO: 7068 - DNA, 2300 bp, Homo sapien
caggctgggggtcagtcagtgcagggcctgctccacgccctcaatccatcctttaattcaatgcagccacttaagctgcagcctgtggtgaggaggggatgcaggctctctggctgtgactaggtggttgagatctgcccacagccaagcctagggcgcctggatgctggctttgtctcctggccagagaatggcccctctctgtgcagtgtgccctgcttccatgctaggggatgctagccttggactgaaagctttattagctcacaccccaactttctgggaaggggcccaggcaaggcccaagaatatcacagtctggcctgcacagagtgaagaaggagaaaaggggaggaacctgccttgggaacttgtctcattcttggctctgctctgaagctcctgctggcctccctcataccaagacctgggcctgcctttccttcttgcccttctggcttctctctaataatggctttgggttggtctttggagctaagataactttgctcttgagcaaaaggttctggaagagggagttgtcctttacatccacccctgacctgctaaggatgttccctagctgaggcaggtctacattctaaggaacgattagtagccatgatggcaagactgctttcctgagaggaaaagccaggcaccatggcagcagatgattaccgtgagggcccagtgaaaggggcctgatcacgaaagctgagaaagtagtggccacccctctgggccccagggacagggaaaagagaagcagccatgacctttggctctaggtattgggatattctcagggctggtggtcggaggttgccttctgcacggaaggtgcctccagctccttgctaggtgccgcactgaaggaaaggggccagcatgactggtcggcagtccagatttgcaaataggactccacgagttgtggcacagtttgctctgcacgttttctgccctgtggacagggtctctagggttctctcgagagaccagagaagccaatgaggtttgaccagaggctctacgacccagcaaagctaaggccctagccttggcagtccgtactctgaaataactcaatcgggaaactcagggacttgaaggcctggaagcccaggaataacaccctctcgagggagagacaatgaggaagaagccatggccaaagcctagcagggatggaggtgccagagggaacagaaacaaccaaaatgatcccaagaagtcaacagtgggaggagagggaaaggcgccaagtcttagaatgtgtgtctgtgggtgcagaagaggggtgctctgcaggaaatgcagttgaggcgctaagaaggagaatgctgggaaggtcctggcgagagaccgagaagcctggagggctcaattcaccacgagtagctgtttggggctgaagagagatttgggtcaatctttagagaagacagcctctagggagagtctttgggagggtcccctcaaggtaaagggacaggactggggtgagggctggatcccagcgcaggaggtggagtgtttctgggtctcaggcaacacatttgtgttacgttacattctcacaacaaccatgagagggactgctattgtcccatttcacagataagaagaccaaaccttagtgctctgaagtcactaatgcaaggccccactgcccagtcacttgtggagccagtgaattcacaccacctgactccaaacctgtacactttaagagcccactgacatcctctcctttctctgccttcctccacgaccctccttttccgcctgccttcttggtctctgctgcggggggccaacctggaccttggggtccagtgtcctgccattagtcatctgatacccgggcactaagcccaaccggagggacaaagcccacaccggccacggggtggaggagagtcgatgtcggatttagggcggggctgaaccaagcccagggccgcgggggccgtggcttcagcaccgcggagagcgccatctccgggggcggggctggcggggtgggggcggggcctgggcggggcgcgcgagaccccggccgggtcccgggggcgcgcgcggggcgctctcgccagtcccgcgggccgtgcgcggtgctgtgccgcgccctgccagacacaggtgcgcccgcctagcccgaactccgcggcggcggctgccctctcgccgcgcctccgcctccttcgcagccgccgcctcctccgcgccgcgctccgcccggatggccagggctgtgcccgagaatggcggagcgagaaagcggcggcctggga

SEQ ID NO: 7069 - DNA, 2300 bp, Homo sapien
cctggggagtctgcccctctcccctccacaccttgctctcagaatcaggacctccagcccaaggagtgctgaagaacctcaaattctctctctgtaccctctccacagctgcagagggagggctggaggagtggccaaactggaggtttgaggaacaagttcactaaggtgttggtgcacagcagggccctgcagggctcagtggctcacacctataatcccagcactttaggaggctgaggtaagcggatcacctgaggtcagaagttcgagaccagcctggccaacatggcgaaacctcgtctctactaaaaatacaaaaattagtcaggcgtggtggcgggcgcctgtaggcccagctaatcgggaggctgaggcaggagaattgcttgaacctgggaggcaaagtttgcagtgagctgagattgcaccattgcactccagcctgggcgacagtgagactccgtctcaaaaacaaacaaacaaacaaacaaaaaacaaggtggggcagaggaagggagaaggagcctcaccttgagggccctgagcctaggtcctaatcccagttgctaactggccttatgaccaaggagcctcaacatgtcacagcttttgtgggctgtgggcagtaggagagagggcactgccactggagacctgcgctgtggcctctttggccagtgccttgctgtgccatgtgggacaaatcctttcccctccttattgggccctaatttcccatctgtgaacagttcatagcaacttggggctgctgggaggagggcaagcaagcctggaacccagagcgtggccagaaatgatgtcgacgatgcccatgaccacctcctctgttctccaagacctttgcctctcctcaggcccctggtcacctttccctgggtcttcgttctttgatgtgagaagagggcagctttaatcccccacctgatagagaagaaaactaagctgtggagtagggtggagtgagggagtggaaggaaggttgtggtttcctggtgaggtgtgatgcttagacctggtctctaaaaataaaattaaagttaaaaaaaatgaattaaaaaaaaccgcctagtctctgaggtcagaaaagaccaacactcaaattttggctgggcgttcttaaaaggatgctttcttcatctggagatatctggtggagaggattaggtaaaataatgtattactattctcagggtaccataaatccgctggcccgctccctcaggccactggcccacggctccacccatgtcacgcccctttccccgcagccaatcagcgctacctccccagagcgcccgttccctccaccactcgccgcagatctcccggtgccacccgttccagggaggctgcttggtttgggaagatactccccaggggtctccccttcccttgggggcgcagctgaggactgcgaggtgcgtccgagggccagaaagctgagatcgattctgagttcaaggatcaagtctgccctcaaaccattttacagatcgggaaatccgagacccagagaagggatactcccgcccaagggccaccgagccgagagaagcccgggccagggctttcttcgcgtatgtgggaatgcaggcgcgagccctttggggggcacagtccatacgggagctgaggccgaagccggagcactaactgtgctgtctaggggatcgagacggcactagagggctggactccttactgcctcagtttccccagcactacctttgttgaggaaacggagatggggatactggccgaacgcgcgcctgctgagacacagtgcaactgtatttagacgccccgcacctccccaaatctgatcgaggctccttttttcaagcacccgctatctctcagccctttaaaatccggccctgccgttcgagtctctcggcgttccattggaaagactcggggctccagctcccttctctagaatgaactgctctgactgccgcccggctttaccggagctttaactgcgcaggcgcaagggcagccaacccggtaaacggaagagctgggtgctgacggcgctgggcgggtcaggggcggagagcgtgctaaccaatgacttgagggagtagggggccgggtttgggccctcagttgctaagggctacccgagtgggaagcggttcaagagatggggtgaagggtggttcaccggttcttcaagtcctcagccttctggcccgcggaagttaagcaaccaagaggcgggcctaagaccggaagcaggaaggagggcgcaggaagcagggcgccgcagc

SEQ ID NO: 7070 - DNA, 2300 bp, Homo sapien
ggtcaagcctgctgtgagttgtaatcacaccactgcactccagcctgggtgacagagtgagaccttgtctctaaaaacaaacaaacaccatatgggatccatagttgggtgctggcccaggatgagtcttcaataaaggggctgggggagtcagtgcaggaagctgggtctgcagatctcactgtagtcactcacaatgttggcccttcttctggctcaacctcaccactcagggaaactgaagtgctgagatacctgctaggcccccaaggggttgttctgggggcgtggagggagaaagagggacacgtatgggcatataaacaggtgctgttcctcttggcctaagacccattttgacccagctctgcccaggactttgctgtgtgaccctattagacgagtgaggctccatctctgggcctctggtactctcgtaggtaaatgttggactggtctacctctcttcccctgtgacttggggcaaactgaaggagagaggatacggctcaatctgcccaaaggtccttccagcccaacaaagacggccaagcccaggcagggggccagggagcaggggaggggcctcctgcacacaccgcaactctttgtctctgggccctaatccggcctgggatctagagaggaaattcaggcagccctgctgctgccaagctggctagacccatgctccccttcccagttctgcagggagggagaagaaactggttccagcccaagccccttcctattctgtcctggggagtctgcccctctcccctccacaccttgctctcagaatcaggacctccagcccaaggagtgctgaagaacctcaaattctctctctgtaccctctccacagctgcagagggagggctggaggagtggccaaactggaggtttgaggaacaagttcactaaggtgttggtgcacagcagggccctgcagggctcagtggctcacacctataatcccagcactttaggaggctgaggtaagcggatcacctgaggtcagaagttcgagaccagcctggccaacatggcgaaacctcgtctctactaaaaatacaaaaattagtcaggcgtggtggcgggcgcctgtaggcccagctaatcgggaggctgaggcaggagaattgcttgaacctgggaggcaaagtttgcagtgagctgagattgcaccattgcactccagcctgggcgacagtgagactccgtctcaaaaacaaacaaacaaacaaacaaaaaacaaggtggggcagaggaagggagaaggagcctcaccttgagggccctgagcctaggtcctaatcccagttgctaactggccttatgaccaaggagcctcaacatgtcacagcttttgtgggctgtgggcagtaggagagagggcactgccactggagacctgcgctgtggcctctttggccagtgccttgctgtgccatgtgggacaaatcctttcccctccttattgggccctaatttcccatctgtgaacagttcatagcaacttggggctgctgggaggagggcaagcaagcctggaacccagagcgtggccagaaatgatgtcgacgatgcccatgaccacctcctctgttctccaagacctttgcctctcctcaggcccctggtcacctttccctgggtcttcgttctttgatgtgagaagagggcagctttaatcccccacctgatagagaagaaaactaagctgtggagtagggtggagtgagggagtggaaggaaggttgtggtttcctggtgaggtgtgatgcttagacctggtctctaaaaataaaattaaagttaaaaaaaatgaattaaaaaaaaccgcctagtctctgaggtcagaaaagaccaacactcaaattttggctgggcgttcttaaaaggatgctttcttcatctggagatatctggtggagaggattaggtaaaataatgtattactattctcagggtaccataaatccgctggcccgctccctcaggccactggcccacggctccacccatgtcacgcccctttccccgcagccaatcagcgctacctccccagagcgcccgttccctccaccactcgccgcagatctcccggtgccacccgttccagggaggctgcttggtttgggaagatactccccaggggtctccccttcccttgggggcgcagctgaggactgcgaggtgcgtccgagggccagaaagctgagatcgattctgagttcaaggatcaagtctgccctcaaaccattttacagatcgggaaatccgagacccagagaagg

SEQ ID NO: 7071 - DNA, 2300 bp, Homo sapien
ctcctactgcccacagcccacaaaagctgtgacatgttgaggctccttggtcataaggccagttagcaactgggattaggacctaggctcagggccctcaaggtgaggctccttctcccttcctctgccccaccttgttttttgtttgtttgtttgtttgtttttgagacggagtctcactgtcgcccaggctggagtgcaatggtgcaatctcagctcactgcaaactttgcctcccaggttcaagcaattctcctgcctcagcctcccgattagctgggcctacaggcgcccgccaccacgcctgactaatttttgtatttttagtagagacgaggtttcgccatgttggccaggctggtctcgaacttctgacctcaggtgatccgcttacctcagcctcctaaagtgctgggattataggtgtgagccactgagccctgcagggccctgctgtgcaccaacaccttagtgaacttgttcctcaaacctccagtttggccactcctccagccctccctctgcagctgtggagagggtacagagagagaatttgaggttcttcagcactccttgggctggaggtcctgattctgagagcaaggtgtggaggggagaggggcagactccccaggacagaataggaaggggcttgggctggaaccagtttcttctccctccctgcagaactgggaaggggagcatgggtctagccagcttggcagcagcagggctgcctgaatttcctctctagatcccaggccggattagggcccagagacaaagagttgcggtgtgtgcaggaggcccctcccctgctccctggccccctgcctgggcttggccgtctttgttgggctggaaggacctttgggcagattgagccgtatcctctctccttcagtttgccccaagtcacaggggaagagaggtagaccagtccaacatttacctacgagagtaccagaggcccagagatggagcctcactcgtctaatagggtcacacagcaaagtcctgggcagagctgggtcaaaatgggtcttaggccaagaggaacagcacctgtttatatgcccatacgtgtccctctttctccctccacgcccccagaacaaccccttgggggcctagcaggtatctcagcacttcagtttccctgagtggtgaggttgagccagaagaagggccaacattgtgagtgactacagtgagatctgcagacccagcttcctgcactgactcccccagcccctttattgaagactcatcctgggccagcacccaactatggatcccatatggtgtttgtttgtttttagagacaaggtctcactctgtcacccaggctggagtgcagtggtgtgattacaactcacagcaggcttgacctcctgggttcaggtagtcctcctacctcagcctcccaagtactaggcacatgccaccacgcccagcaatttttgtattttttgcagtcatacagtttggccgcattgagcaggctagtctcaaattcctgggctcaagcaatccacctgccttggccttccaaagtgctgggattacaggcataagccactgttctggcctggtctcacatgtttaacccccacaaaccgtctctgttgagggtcctggagagggaatcacatttccccaccccagctttaggctacagatgaagatcagggaggctggaggctcaagctccagacgcctgagtggccagtgcatggcccttctcaatttctgggtgcacaaggagccaccatcagtctccatagcaaccattatccctgccctccagagacccaaagcctgaccttccccatctcccagagaaagggggtctcaggttgggctgctttccacagcttcttttgagtttgcctcactttttgcagccagaagttgggcaaatgacacagcctgagccccctttccaggtcatgggaggggagattctcattccaatccactttcaacaggtattgagcacttggtatgtgcaggccctggttgggcactggggactggacagacaaggttccagtccggtgagcagcttacattctgggagggagacctgcaataaacaagcaaacaacttcaactttccatgagtgctagccagccctgggaggctccgctgccagaaggaacgtcaagggcaagtcctggggcgggagacccttccggaggaggagcaagaaagctgcttctgcagcgcagagcctggggaacggagtggggccgcttgagacgggaggggccggagggtgttcttgtctaacagg

SEQ ID NO: 7072 - DNA, 2300 bp, Homo sapien
atatgcccatacgtgtccctctttctccctccacgcccccagaacaaccccttgggggcctagcaggtatctcagcacttcagtttccctgagtggtgaggttgagccagaagaagggccaacattgtgagtgactacagtgagatctgcagacccagcttcctgcactgactcccccagcccctttattgaagactcatcctgggccagcacccaactatggatcccatatggtgtttgtttgtttttagagacaaggtctcactctgtcacccaggctggagtgcagtggtgtgattacaactcacagcaggcttgacctcctgggttcaggtagtcctcctacctcagcctcccaagtactaggcacatgccaccacgcccagcaatttttgtattttttgcagtcatacagtttggccgcattgagcaggctagtctcaaattcctgggctcaagcaatccacctgccttggccttccaaagtgctgggattacaggcataagccactgttctggcctggtctcacatgtttaacccccacaaaccgtctctgttgagggtcctggagagggaatcacatttccccaccccagctttaggctacagatgaagatcagggaggctggaggctcaagctccagacgcctgagtggccagtgcatggcccttctcaatttctgggtgcacaaggagccaccatcagtctccatagcaaccattatccctgccctccagagacccaaagcctgaccttccccatctcccagagaaagggggtctcaggttgggctgctttccacagcttcttttgagtttgcctcactttttgcagccagaagttgggcaaatgacacagcctgagccccctttccaggtcatgggaggggagattctcattccaatccactttcaacaggtattgagcacttggtatgtgcaggccctggttgggcactggggactggacagacaaggttccagtccggtgagcagcttacattctgggagggagacctgcaataaacaagcaaacaacttcaactttccatgagtgctagccagccctgggaggctccgctgccagaaggaacgtcaagggcaagtcctggggcgggagacccttccggaggaggagcaagaaagctgcttctgcagcgcagagcctggggaacggagtggggccgcttgagacgggaggggccggagggtgttcttgtctaacaggtcacttaaactctccgggggagaattagcccgcatcatgggattaatcgagggtgattaaatccttagcacagggcctggcacgctgtgctggtttagggtccagagcgccccccacccattccctggcctgctatggggtgcgcgggggagagggaggaaagacgagctccaggccggtgcgcccgggcacaatcacgacgatctggacaagagtggggatccccggccctgcccaggcagcctaggccgcccgcgtctggggcccctcgccagctcccgggcgggaggcggccttcacaagggcgctttgtcctggcggcgccggcagggcccggccgggccacctggactgagagtgggggagtgaggcgaaggcttcaggtgctccgcggctctggcgcaggtgtcggccggctccgcccctgtccccagagcaggtgtcccagaccctgcggcctgcattccggccccctcctcctccctcgtgtcgagctcccgcagtgtctttgatcccgggcccggggacactggcccctccccttggggagtgaggggaggagacgcggccccagagcgggggcagggcagggggtcagggcaggtagcggggcccgggccttcgcgggtggctgctcccgctcccccagccctcccctcgtcctggtgggaaactcagcccagaagggggcttcgggggctcctcgcgggctggggaaccgtcggatgccggcccaaggggcggggccaggaccccgggggggtcaccccgccccttcgcgctcagccccgctgaggtgaaacctgagcccaggtcgggggcgggaccggcccgcgcctctcccctggttcccgcaccctggccggcggctgcgagcgcagggcccagcccgggagccgctggagcaggtgagggaggtggctcggcgcgagccgcacaacccggccgtcgggccccgccgcccagggctgagtctcccatctcgcccctcggtccgcagggcctgcgatggagcctgcagccccgggtcgcgtccctccctgagcgcccccgtcggcggccatgctgccc

SEQ ID NO: 7073 - DNA, 2300 bp, Homo sapien
cctgcccaggcagcctaggccgcccgcgtctggggcccctcgccagctcccgggcgggaggcggccttcacaagggcgctttgtcctggcggcgccggcagggcccggccgggccacctggactgagagtgggggagtgaggcgaaggcttcaggtgctccgcggctctggcgcaggtgtcggccggctccgcccctgtccccagagcaggtgtcccagaccctgcggcctgcattccggccccctcctcctccctcgtgtcgagctcccgcagtgtctttgatcccgggcccggggacactggcccctccccttggggagtgaggggaggagacgcggccccagagcgggggcagggcagggggtcagggcaggtagcggggcccgggccttcgcgggtggctgctcccgctcccccagccctcccctcgtcctggtgggaaactcagcccagaagggggcttcgggggctcctcgcgggctggggaaccgtcggatgccggcccaaggggcggggccaggaccccgggggggtcaccccgccccttcgcgctcagccccgctgaggtgaaacctgagcccaggtcgggggcgggaccggcccgcgcctctcccctggttcccgcaccctggccggcggctgcgagcgcagggcccagcccgggagccgctggagcaggtgagggaggtggctcggcgcgagccgcacaacccggccgtcgggccccgccgcccagggctgagtctcccatctcgcccctcggtccgcagggcctgcgatggagcctgcagccccgggtcgcgtccctccctgagcgcccccgtcggcggccatgctgccccgagggcgcccccgggcgctgggggccgccgcgctgttgctgctgctgctgctgctcggattcctcctgttcggtggggacctggggtgtgagcgccgcgagcctggcgggcgagcgggggccccgggatgcttccccggcccgctcatgccacgtgtccccccagacgggaggctgcggagagccgccgccctcgacggagacccgggggccggccccggggaccacaaccgctccgactgcggcccgcagccgccgccgccgcccaagtgcgaggtaggtgcgcgcggccctggcggcgggagtcctgggggcgccgcccccgagcccggcctcttggacatctgcgggaatcacagtacctggcgtctgtccagcactggccagccggctggggcgcacctcgaacgtgcagctcctctgctcccgacctcatttccccatttgaaatgaagggttggctcctgctgccccctccgcacactgttccgggctctgctgcggggtggggcagctcaacatgggtcctcaccgcctagcggagaaggggggctgctgccgacctgggcgtccctccccagctcttgcatgtggccatcgtgtgtgcggggcataactccagccgagacgtcatcaccctggtgaagtccatgctcttctacaggtacagccaggtgtccgtggaggagggtcaggagtggggaagggacaaagcccgggacaggctgctggtctcagagcttcagcttcctcatctgtgacgcggggacagtgtccccttcctcccttagaagggcagttgtaagaacatcctgccgggcgcggtggctcacgcctgtaatcccagcactttgggaggccgaggcgggcggatcacgaggtcaggagatcgagaccatcccggctaaaacggtgaaaccccgtctctactaaaaatacaaaaaattagccgggcgtagtggcgggcgcctgtagtcccagctacttgggaggctgaggcaggagaatggcgtgaacccgggaggcagagcttgcagtgagccgagatcccgccactgcactccagcctgggcgacagagcgagactccgtctcaaaaaaaaaaaaaaaaaaaaaaaaaaaaaaaaaaaaaagaacatcctgagccgggcgtggaaaagctctttgcagatggcgcttccatctctgcgcccctcggggtgggggctgtcccatgttgctcctgctggggcctctcaggcttcctctttgcccacccaaaaggaaaaatccactgcacctccacttggtgactgacgccgtggccagaaacatcctggagacgctcttccacacatggatggtgcctgctgtccgtgtcagcttttatcatgccgaccagctcaaggcaggggcccagcccttcccccctcccctcagctgtgtccaccgctctcctctctccaagacctggtggggt

SEQ ID NO: 7074 - DNA, 2300 bp, Homo sapien
acattatgagttcatctaggcttcttgaatcatttataggaattttcattttcactctcaaactcttacactttcgctgctgtgaattttttttaacataaagctcagactactaaatggcctacacatgtaccataaagtccatattttattttttaagaaatcagaatttttaaaaattgctttttcttgagaaactaaacttaattttgcaggtcacgaaagtaaaaaaataccttcatatccaatgatctcaaagcacctcttgtgaaaatacataacaaggtaatagaaatattatttaatggaaaagatgtgactagtaaagtccaaggctatttctggttctgcgaatgactcactttgactttgggcaaatcatctcaccactgttgctctttatctgcaaaaactggatttcatgcctatgggagttgcatggctaatcaatgcctggaaaatgcgtagtggcagttgctacaaaagtgctgagctttaaaaacaaaaccccccacccccccatttgtattcagttgaggttggggtttattgttatttaacattcgaaggccaacactatgttaagtccagagtgctgcacagatcagataatatcactgtccagtaggggttttttttaatctaagattttttacttttaaaaaatttattgtggttgggggtttagaatccggtaatacatccatacaaaaacgttaagcttcaagttgaaaactatcgattcgaaaatctaaataaaccccctccaaaaaaaaaaaaaaaggccctcccccgccccgccaagaaatctctcaaaacaagaattcttctgatgtttttctcctccctgcaattctccatgttacagtccttggaggtagaataggcataaaatactttcactaataaaatatgacaaaccgccggattatacgtggccgattcccagtgattgccctgctacacaaagcagaaaagtaaatgccatcatcccccttagaacaaaagaacttaggaataaaaaacatggagaggggggagaaagcagcaataaataaaggtgagcgaaggcccccgtcccccgcccctcccgggagcgagtgctggactaagtactgctaataaagtggttcaagggtagttatttggaaagggggcggggtggcgaggggagggagcgggcgagcggcggccggggattgcatgttgcattcgacttgaggttgcatctttctcctgttgcctggaccacgctcccccattgcagtgcttccccatcacttctcctcgctcctgcccctcacggctttcccccccccccttcaaactgctgttgcactggagggagttggggccgctctggagcccctttgcagctcccgccggcgggaggggggagttgggctcgggccgcggagttgggggggccgccgcgggctccggcctcgcctcggctgcggctgcacgggagccgagctgcggcgctgcacgggccccggagtttggctgccttcgccgccgctcggtgctcggccccatcaccgccgccgccgccgccgctgcactggagtttggctgccgctgccctacttcactctagtttagtttcactcactttacatccgggttttttccctaggcaatgggtgccgcagcacaccccgttccttaggcaaagtgaaataaattcgccgcaccgacacgtcaagtagtccgcccgcccgagcgccgccgcgggcccccgtcgccccccccgccgacgccccaccgcccccggtggggggacccgagcgtcccgggagccgcgggccgaggcgcgggggcccgggccggccgccgtaccactccgcccggcggccccctccctccccgccgcggcccgctctcccccggcgcctcctctcccctcgccctcgtccccgctttcccagccccagtccctctcgcccggctctcgggagcggcgggggcgcgcacggcggcggcggcggcgggccggcggggccgcgcggcgggctcccgcgcgggcgagtgtgtctgggcctgggcggagggatccccgggctgaggcggcggaggtgctgcggcccggggccgggtggtgaatgggctggtggtgctcgctgctgctgctgagaggaggaggaggatgaagagttgggcttgtttgtctcctacagtttctctcctgctgctctgattcccccctcccgattccggcccggggcctgtgtgtgtccctcctggaggaggaggaggatccagttcctccccccaaccccctcctccccaccccccct

SEQ ID NO: 7075 - DNA, 2300 bp, Homo sapien
gtcctaagagtaaccaagtcttcatgtataaaaacataatataaagtcatagtaagtaatagagtgtggtatagctatagggacaaacacattgacaaatggaattgaacagaatcccccaaagcagatctgcacatatataaaaacctgatttatgacaaagatggcatcacagaccacaggaaaagaatagattatctagtaagtggtacccacaatttgttattcacatggggggaaagatagatccctatatcataccgtctccaaaagtaaattctgtataaattaaaagcaaaatgtacaagtcaaaactctaaaactttcagagaaaatatggaattcctttatgatgttggacaggtaaagattttctatacaaggtacaaaatgtactagccataaaataaaagactgatacagtatattaaaaataagaacttctttcaaaatacatcttcaagaaagtgagaaggcaagccacaaagtgggagaaggtatctgtaatgcatgtaactgacaaataaatatataatcaacccttcctatagccatctatctgcacatgtcttcatctctttcaggatctttgctcaaatgtcatatttttcaaaaaacctttcctgaccactgttcaaaaattgcaaagctcaccaccactccctgcaccactccctgcctattgcctttcctgcctttttttttttttttttagacagagtcttgctctgttgcccaggctggagtgcagtggcacagtctcggctcactgcaatctcagtttcctgggttcaagcagtcctcctgcctcagcctcccgagtggctaggactgcaggcatgtgccactatgcctggctaactcttgtatttttagtagagatggagtttcaccatattggtcagtgtggtcttgaactcttgacctcaagtgatccgccctcctcagcctcccaaagtgttgggatcacaggcatgagccaccatgcccagctcctgccttatttttaacctcaacatttatcattgccatacatactacctatttaactaaatgatttgattgcctgcctcctgctgtccccaatagactataaactttgaaatgagaccaggaattttggtgtattttgctcactgcatacataatacacaagagtgcttggcacatagcaggtgctcagtaaatatttgttgattaaacaaactcttacaaatcaataataaaataccaacagcccagtagaaaaatgagcaaaagatttaaacaggcatttcacaaaataaaaaacacaactagtcaataaacatataaaaagatgctcaagtttattaataatcagggaaatgcaaataagaccaaaactagatactattttacacccaccagattggcaaacattaagaattctgacagttctaagtattggcaaggatgaggagcaaagaaaattcttaatacacctgctattgggagtataaaattgcagagcctctttggaaaacaatttgggattatcttgtaaaggtaaacatgtgcctagcctatacaccagttgatctgttcttagatgtacagcctgaagcaacgctactcaaagtatggtcctggtgctgatatgtgaagaatctgatagaaatacagaaagagtaagcatgtaaaaaagttcatagcaacttgatactgacacactatatttatttgtttagacatttaaaacatcatagtgaaatatccataacataaaattgaccattttaaccattttaagcatacaatttggtgacattaagtacattcacattgtcacgcaaccatcgccaccatgcatctctagaactttatcttcccaaactgaaattacatactgatatggtttggctgtgtccccacccaaatctcatcttgaactatagttctcataatccccacatgttgtgggagggacccagtgggaggtaattgaatcatgggggcagttacttccatgctgtgctcgtgatagtgagtgagttctcacgagatctgctggttttataaagggctttcccctcccaccaccgcttggctcagaacttctccttgctgcttccgtgtaaagaaggatgtgtttgcttctccttccaccatgattgtaagtttcctgaggcctccccagccatgctcaactgtgagtcaattaatcttctttcctttataaattacgcagtctcgggtatgtctttattagtagcgtgagaacagactgatacatgtaccaacaacttccccttctcccagcccctatcagccaccattct

SEQ ID NO: 7076 - DNA, 2300 bp, Homo sapien
cagatgtgacgcatttggggaagacacccatggtcccagcaccctaattctacccgccactgttgtgaaagtgaattgatttctttttggcccagccttacttctcggagttgcatggctggtgaactggtccccagagcatgggttataatcctactttctcaggagcaaattctacaggaggcctgggagctaacagtcatgtgacagcctggaaggtcagaacttcactctccagaactatgtcaactagatcataaggtggggaaaagccacgtgactgcctgcctgccagggaagcaaacaactgctgtctcagccttggtatgaacccttctcccacctggtgctgagagcaattttggtgacatccatggcttagctgcaatgacatctctacctcttaaaggcctttggttcctgagctaattaaacgtcccagacagaaaggacatgcttaatcttattaataacttctggtcaggaaacagtgtgcccagccctctgagggagtgcctttctgaaccacctccatttgttcaggtgcttggcgattgctatcagccctttcaagagattaagtttgtacgcaggagcaagccacttaggtaatggatcccggggccctgggagtgtctggtgactgtggagtgtgcagccagccagcaccttggctcattcagattccagaaccactgttttccaacttcctgctcttcagaaccattggggggtagggagggacttgactatcgaggagaagagggggactctcctatctctggctgttcacccagccctttcacacagagggaagctggggactgtccttgccctgaggagcctcacagctcagtggggtcacagatacaaacaatgtgagcaaataaggacaataccacattagactggaaacagtggaggtgagcacatgatgccctgtgggtgtataccgttggtaactgctccagcctgggggttcagggaaggcttcctggaagaagaaacaggtgagatgagaaatgagagttacaagctgaaaatcggctgggcatggtggctcacacctgtaatcccagcactttgggaggccaaggaggccggatcacctgaggttaggagttccagaggagcctggccaacatggtgaaaccccgtccctactaaaaatacaaaaattagctgggcgtggtggggcgcgcctgtaattccaggtgctcaggaggctgaggcaggagaatcgtttgaaactgggaggcggaggttgcagtgagccgagaacacaccattgcaccccagcccgggcaaaaagagcgaaactccgtgtcaaaaaaatagtaataataataaataaaatttttaaaaagctgaaaatctcccccgttgaggggagatctgttgaggggactgtgaaatggaattccctgactgggtttcgtgcaggctttagtataaggctggaaggatggaaatagctccctcatcaatttacgggacagtggttggtgaagccttaaaatgccaatgttccaggaacactgttatcggttccaggactattgttgctttaagcccccaccttgagcattcagagaagagagattactaagacgaagttgcagatgtctctttaaaaaaggagagaggattcctcgagccacgccctcttctcattaatattaaattattgtgaatattgatgtgggggcgtggcgccttggccagctgggctagccagccaggggttcccggtttcacagagaggaaagtgacagaagacgtgcggagggagacgcagagacagaggagaggccggcagccacccagtctcgggggagcacttagctcccccgccccggctcccaccctgtccggggggctcctgaagccctcagccccaaccccgggctccccatggaagccagctgtgccccaggaggagcaggaggaggtggagtcggctgaatgcccacggtgcgcccggggcccctgagcccatcccgctcctagccgctgccctaaggcccccgcgcgccccgcgccccccacccggggccgcgccgcctccgtccgcccctcccccggggcttcgccccggacctgccccccgcccgtttgccagcgctcaggcaggagctctggactgggcgcgccgccgccctggagtgagggaagcccagtggaagggggtcccgggagccggctgcgatggacgccgtcttggaacccttcccggccgacaggctgttccccggatccagcttcctggacttgggggatctgaacgagtcggacttcct

SEQ ID NO: 7077 - DNA, 2300 bp, Homo sapien
tcttcgtctagtcctcttcgtttttgttttttgtttgtttgtttgtttgtttgttttttgagatggagtctcactctgtcacccaggctggagtaccatggcacgatctcagctcactgcaacctccccatcccaggttcaagcaattctcctgtctcagcctcctaagtacctgggattacaggtgcccaccaccacgcctggctaatttttgtattttttagtagagacggggtttggccatattggtcaggctggtcttgaactcctgactcaggggatccacctgtctcagcctcccaaagtgctgtgattacaggggtgagccactgcacccagccttcgtccagtcctcttcttgcccaatctactgctgccatcgctcctgcttgcccagcctgaccctatgagagagaggccccagtcaccttctggggttgctgagctagagcttagtgatcttctggagttgctgagcttaaggccctgaaccctgtgaagtcagaggtcacagaggacctcccacgaattcagctcctatgatgtctatgccaagggcgagcttgtaaaggagctgggcctctgtggtgtcagatgaggcagcacccaggaattggctacccagatgtcaactgtctttctgaccctgcagaggggcttctgatgtcatagctgagaccaagcgcctggcagtccgtgtcccacaatgtcagggctggtgcaagctcatgctcagctgaactcatgatgtccaagtggagctgatgtgcaacgttgctaactcggtttcccctgctctccccagaggacctggtgcagatgcctccgacgccccccagcagccatggcagtgacagcgacggctcccagagtccccgctctctgcccccctccagccctgtcaggcccatggcgcgctcctccacggccatctccacctccccactcctcactgcccctcacgtaaggagctgggggtgggctgatcccagaaatgaggaattgaatacatccacctgagcacactggccagtcaggagggtttggggagccccgagactgatccccaccctcatcagaattcagagggatgcttacctggcagatgggagttctaatccttttatttttgagtcttgctctgttgcccaggctggagtgcagtggctcaatctcggctcactgaaacatctgcctcccaggttcaagcaattctcctgtctcagcctcccaagtagctggaattacaggcacttgccaccgtgtctggcttttttttgtttgttttttttttttgagatggagtctcgctctgtcgcctggagtgcagtggcacgatctcggctcactgcaacctccacctccagggttcaagtgattctcctgcctcagcctcccgagtagctggtattacaggtgcacaccaccacccagctaatttatgtacttttagtagagacagcatttcaccatgttggccaagctggtctcaatctcttgacctcttgatctgcccacttcagcctcccaaagggctgggattacaggcgtgagccaccgcatctggtcaggaattcaaatcctttcgccctgcctcatggtgaacaggagactattgcagagccaggactagaacttgacattcctgacctccaggggatgacccaggctgcctccaaggagcgctgtgtgaggggaagtgcccagatggtccagaatccccaggaaacatggagctaggccctgagccctgggatgggtgtggagtctcccaagccaagattgtagggaggggtctgagggagatgctgtttggggcaccctggacaagtaagctttgagggtgcagtctcagggatgggatccaggaagccctcccgaacaatgcactaagagcctaacacctgagctctcagcatggccctggcacctgacacatgttactgaatttcacccagatccactccctttccagatgaggaaactgaggcatagagcattgtgtgccttgcccaggtcatatagatagcacatggcagagcttgaatttgaacccagggctgcctggctcctaactaccacatcatacttcctacagaaattacaggggacatcagggccactgctcctgacagaggaggagaagcggaccctgattgctgagggctaccccatccccacaaaactccccctcaccaaagccgaggagaaggccttgaagagagtccggaggaaaatcaagaacaaggtaaagcctgccaccctggggcttcagagggcttccttggtgggtgggctcc

SEQ ID NO: 7078 - DNA, 2300 bp, Homo sapien
ggaatgtcaaacccagccagaactaccataattcacagtgtaggaggttcccctggcccaggccgcttggaaataggagccaagactcctgaaagagcaaacccaagggcagctgacccccttgtagggggtcggggacaagtgccccaccctacccactccagcagcaagacttctttagaacttggctctcgggaggaagctcccctgtgaccaagaagttgaatgcaattccactcatccgacagggaagtactagacagagacagagatgggaggtggaactgaagcaagctattccctgccctttgggaagcttccagattagagcgaagagggcaaactgcaggaggctgctactctgtggctggcagcatgatgaagtggaaaagggcgtgagttctgaggccagaagccctgaatttaaatcctggccccaccactcactgcctgagccatcttgagcaaataaatcacttgaatgatatctccgtgtcctcctccataagacggaggaagtgataatatctgccacccagggttgtggcgaggatcaaatgagatgttagttattgttcaagggtaaaggggaggcccaggaaatcgttatggggctgaaggagggagactgtatctgtactggagtattggggaggggttcatgggggaggtggcacttgacatgggccttgaagggcacttaacacctcttccataggcaggacagggaaggggacatactccaggcaatgggaacagtctgagcaaaggcacagggcagggcagctatgacacagctgtctccctttgtagcccattctctacctctgtgagtctggtccctcccaccttcccacactcatagtcacaacttcagtgaaaagaaagacacagactagattagacatctgaggcagagggccatggggtctgggaggaaagagagtgttgttcagctggagccatccaaggagacttcctggaagaggaggcttttaagcaaagcctcagaatttgaagtacatcaataggagatatcagatggaggggacaataggagatatcagatggaggggactgtacagtcctgatgcaagttcccagaataaggagcataaatgagtgggagaaaacggaagagcctgggctgcaggatgggggaagatcaaggcaggccttgagtgcaggctaaagtataggcatgaggaagctaggaaataccacgggagaagagtagatgctatggccagaaagatgagtctggggccgtgaagaggaggtgttccatcagagaagttcaccagggccccactgtaatccagatggagggttcacctgaggaacactgcaaggacaagaggaggtgacccaaggaggaaccatgggatttggagggaaagaagaagggggagtccaagatggacctcaaggagaactccagtctttccttttggagttggcttctcccctatctcatcagcctctcctgacccagcaggccgattaaatctaagagaccctggccctgaagcctcagtaattcaggtcctaggaggcctccctgccttgaggagacaccacccccatctggggccctctctaggcacgatccagaagagctctaggcctgaaggtagtgttacccgccatcgggtccatccccaaattcaaggtatccctgggtatgttccctctcctgtgccccttccccaaacccagtgggtctctaaattccagcggcgccgacggggttaatgttggctcatgtcaccgcctctgcacgcccccgctccaaacctgccagctgcagcggcgaatgccgaagcccgaaagcgagggaccaggcagccgtgggggtggaggggacacatcgcagtagctgagtgacaggcggcggggtgatgattggcagctgccgagctgcctggactaggacccgggcgggggcgcagaggtggtcgcaggaggcgccccacaccccgggccttgcgccctgagctaggttcgtgcccgtggtgggctgggccgggctcgctcccttcgtgccctgagcgggcgggctgggcggagcggcgccctcccctccggaccccaccggctggagagtgtctctaaggtgacactcgggtgcgcggcagcagcggcggttgcaggagctcgctctccgcccgggctccggctccgctccagccgtccggggggcgccgcggcgcgcagagcgcagcaccccgactccagccaggagcccccgcccccccggagcgcaggaggaccccggcccgcctctcccaggcgcagcg

SEQ ID NO: 7079 - DNA, 2300 bp, Homo sapien
tattatgttcccatcatgagggacacaaaggtgattacagcaccagatggaggtttttaagggtcgggatagcatcttgaagggttctgtagcataaatgtttactgaactgaactgatgctgtttctgtcctcaagaaattcacagtaacaaacacatatacaactaaagaactagttatagagcagggcgattaaagaatgcttgaggaaggtacagtttccttcctagaaccagtcctaagaataaagagtgaatatatgccctagtatttatttaccaaatcctcacaatggccttgaactccagcacagtttggcctctggagatctttccagctcctaacgcattccccctggctccctgttctctggccatgctggcctttttgcaattctccagacacaaatacattctttgttccatgcctttgctctgactctacttccacctagaatgctattctcccaggtaagtcacatagctcacgctccccattcattcaggtctgctctcaaatatcacctccccagagaggccctccctgatcccctccccctgcctaagtcactctcatcactcttctcccttcctttggcttcatttttctttatagcacatctttttttttttttagacagagtctcattctgttgcccaggctagagtgcagtggtgtgatttcagcttactgcaaactccgcctcccgaattcaaacgattctcctgcctcagcctccagagtagctgggattacggatgtccaccaccacacccagctagtttttgtacttttagtagacagggggtttcaccatgttggccaggctagtctcaaactcctgacctcaagtaacccaccagcctcagcctcccaatctttatggcacatcttgtttgctgacattatattgtacatagattgtttgtttcctgaatgtcttccccactagaatctaagctctgtgaggacagagccctgcttccttgtttttagagctatgttctccgatacggtgcctgatgcacagaaggcattcaataagtatttattgaatgaattaatttgtcaaccttcctatctcttctttattcctcagataacaccatgagctcaattttttttttttttttttggagacagtgtctcactcttgtcacccaggctggagtgcagtggcgcgaactcggctcatcacaacctccacctcccaggttcaagcgattctcctgcctcagcctcccaagtagctgtgattacaggcacctgccaccacgccgggctaatttttgtatttttagtagaaatggggtttcaccatgttggccagactggtctcaaactcctgagctcaggtgatctgcccacctcggcctcccaaagtgttgggattacaggtgtgagccaccatgcctggcctattactccactttacagatgagaaaactgaggctcagaaaatctccctggcacatgtattcattagtttatttgtttataggctaccttgtcccaaaagttatttagaggactccgagaggtttatgacctgatccaggccacacagagctggtaagaggcagaacaggacacatgctcatgtctccaggctccatcctcattgctcatttctctacaccaccttcctgtatgcccagccctgtgtaagatggtatgctgcacacagaagtgctaggaagagagcgctctttgagggctgggcacacccagccattgtacctggtggttgtcataaagcgggagacctcagcaggaccaagagttgaaaatcagacagtttaaatggagaggaaaaccagacaggagcccaggtgcagattccagcccaagcaagccccatggctgcctcctggctgctggtctgggcttgtccccacctgccccttgctttcttgtgcagctcttcacggcagctggccccagccagcggaaggcgcctatgagccctgagcctgtggtcctcagcttgggcggccagcggcctctagcaggcccccccctcgaccccacccccgtcaggaagtgccgaaagaggaagagagtcgccgggcaggatgagcgcaccgggggctggccacagtgccgggggaagctgcaatgaatcctcagctctgggcccagtggaggcgctggggacggaagaaggggagcggccggggtcactgaggcagatgtggcgctaccgctcctgggacgtgccacagatcccatcagaggcaccccagacacagtaggtacaaggggtggcctgggagtgggcatgggacctctgtccctc

SEQ ID NO: 7080 - DNA, 2300 bp, Homo sapien
cgtcaggaagtgccgaaagaggaagagagtcgccgggcaggatgagcgcaccgggggctggccacagtgccgggggaagctgcaatgaatcctcagctctgggcccagtggaggcgctggggacggaagaaggggagcggccggggtcactgaggcagatgtggcgctaccgctcctgggacgtgccacagatcccatcagaggcaccccagacacagtaggtacaaggggtggcctgggagtgggcatgggacctctgtccctctatgagccttttatctgagatgggggtgacagaagtagggtcacccatctgtcatccagcactctgcagaggcacagagtagggcaaaggagttattggcagggtgcagggagctctgatgtttggactgtgtggaggaactgagctcgagagaggccaggagttgagcaagctagcagtggggggatctgggaagaggagcccccccaggagtgtggcactggatgctggagatttctgacccagctgcaaggccttgtggagactccgtggggtcttcagttgcctctgatctcttctctcagagcttggagtaagagccattgggaaacttccccaaaaggacccatgcaccccagaggccagttgtcaggcatacttggggattgatctgccctcctcctggccaccctggcaccagctgctggctggagggctggagccccacctccctgatcagaccttctcccaacttgcaggaaactgggagagggttctgggcctcggggtgctggttcttcctcaaaatcacaggcttgtccgcaggtcacagccctaagcattggctatttgcggctgactaaggctggaaaacgggctgccagaacccaagaggggaggatgaaagcgaaggtgacacaggatgtggcttggcagagaggcgtgcacacagaagtagtgggcagctggtgtgggcagcagggtggtagggtttggggaggtggaagaccatgcttcccagctcctggcctcccttcgtcagccctgcgggggccatcagaaacagccccggtgtgtgtgatggctgtgcccctacaggtgactgcttgggttccaattgctctcatttctggagggggacggcctcggctgcattgtggggtgtctttgtgtgtgcatgtgaggtatatttctggatgggagtgtgtgcatatgcacacacatacatatgtgtgagggatgtggcaaccggtaaccattgtcctgggagtatttgtatgtaggagaaaggtgtgtgttctgtgtgggcatgtgtgcttgtgaatgggagtgtggtacctgttgtccttctgtgtatttgtgagtgtgtaagggctgtgcaggtgattcccgtagcatatgagatctataggttctgttgaatactatgtcaggaaaatgcgatgtgttgggcctgggtgagaaggttggaaaccattgtgaatagctgtggaaggatgactttgtaggagaaacttgtgagttctttgttggtgtgtgtgcgagtcattaagtgactttggtcactgagtgcgagaggctggggtgggaagtgttcgtttaagtaatgagtgggcataattgtgtaagggatgtgtttgttctgcgtgcatggggagcactgtgtgacttttgttcccctgggtgcgatttgggggagccaaggaggtatgggtggagattgtgagtggctatgagtagggtgtgcgagagcggaggggaggtggtgacagcagccctcgcgagtgtacacttgtgagcgtgcagttgtttggtagcggagggatcgggggaggaaagatgcgcgtctggatgcgcgcagtgcgagtgtgccaggccgggagattcagtcccatccaggcgggccgggccgggctgggggcagggctttctgctgccccgcccattcgtcgccccgcccctcggaccgccccagcgggctgcagcgcagcgggcgtccggcagagggcgctgcgggcccggtgccaccgtgcggccgagggggcgtgctcggcggcgggcaggcagcggcccggccagctatgcggggtcctgcggccgcggctggcggcacttcctggagcggcggcggcagcggcttcccgggcacctgggcgtggggagcgggggcgcgcggcgcggggcgggcggagcgagcgcgcgccatggaggtggcgggcggcgcggagcgggcgtgctgagccccggccgccggcccggcatgggcgtctcccgcgggccctccgccggccggggctagggccggatggagccg

SEQ ID NO: 7081 - DNA, 2300 bp, Homo sapien
tcagtaaaccagtattttccaatgactggtgcttgatgttacaaaattcaaaatgcaaggtagtccagtggaaagttcattgacgtggttttatatttatatttatttatatttatttatttattttgagatggagtctcgctctgtggccaaggctggagtgcagtggcgtgatctcggctcactgcagcctccgcttcccaggttcaagcgattctcctgcctcagcctcccgagtagctgggattacaggcacctgccatcatgcccggctaatttttttttttttttttttgtattgttagtagagacggggttttgccatgttggccagactggtctcgaactcctgacctcagttgatccgcccacctcggcctcccaaaatgctgggattacaggcgtgaaccactgtgcccggcctgatacggttttagattccacattgcaactaacctttgagaaactgtcatttgtcatattttggtgtagtagcaaagaaaatctataattacctggaaaggctgttaaagatattccttctttttgtaactacatgtctgtgtgaggcagaattttcttcatatacttcaaccaaaacaacatgtcacaacagattgaatgcagggatagacaggagaatccagctgccttctattaggccagatgttaaagagatttgcaaaaaatgtaaaatgatgccactctttttgctaacttttttttagaaaattatttataaaagtgttgtttatattaacgtaatgggcttattgttttaagctagtaagtatcttaaacatttctcagttttaacatctgatatgatacatattaatagctgtcaccccctaaaacaaaactcttttgggatcttcaccaattttgagagtgtaaaggggtctgggagctttcaagttgctgaacacatggaggttcctggaggatggtgtgcccagggagggcgtggaagctcctcgcccctttcctcatcaaaaaaaaaaaaaaaaaggctgggtgcggtggctcatgcctgtaatcctagcactttgggaggccgaggtgggcggatcacgaggtcaggagttcgagaccagcctggccaacatggtgaaaccccgtctctactaaaaatacaaaaattagctgggcatggtggcaggtgcctgtaatcccagctactcgggaagctgggccaggagaatcatctgaacccgggaggcggaggttgcagtgagctgagatcacgccattgcactccagcctgggtgacagggcaagactccatctcaaagaaaaaaaaaaagagtttaaagaggtcttgggatcaggcagttggacagctgccactccagaccctagggtaccatgtcaggactgggagttgggggggtggcattccagtcaggatacatataacacagactggtgtcttctgggcgttccttagcttggcagagccagaagacccagaagctggagtcccagctcaaccaaatcggagttgtgggcagtcacgggcttccacaagcctcgagttgccccatctattcagtgggacagtagtgctgtctgcacaggggaaataccagcctcccgtttgtaatgctggtgaaaagtactttgtaagttgtgaaacactccacagatacttatttttgtgattgttttgtctggagccggtgtgattagcttccccagacctcagaaaacctgtccagtgggcgtgagaaggcattaggtggctaaatagggggcattagtggggggccccctccctaaaagggcctggctcccacttctccctccttagacctcgttcccaagctgaggcatgggctgggctgtactgggtgccaggtggaagggaggccactgggttgtcacccagcctggctctgggaaccttgggaaaaggagctgggaggcacgctcgtgcgctgtgtgcccgtccgcccacccgtcgcctgctgcagggcctggagccgctgctgggagaggaagtgcgttcagttaccaatcgggttattttcataacggctgtctcaggctgcagggaggagggtgacaagggggagggggcagaggagcagccacggctgctagctctccaaactaggacttgctcagcagaggccgccagcccggagctggatccagagcccggccttggggaccccagctcccacctgcgccctgccttccagatcaggtcaaaaggggcccccagcccctccttgctttctgcttcctccctctgtatctggctgggtgggtgcggggagggttggatccgggcg

SEQ ID NO: 7082 - DNA, 2300 bp, Homo sapien
aggaggggggtgcagctggggcctctccagccacagagggctcagtccctgcctgctcccccagggctacacagatgagcctgtgtccaagatcctctcccacgtggaggaggggaacgtggtacagctggaccgctgggacctccacgctgagcccaaccccgaggcagggcctgaggaccgagatgaaggcgccaccgaccgggtaagttggccagggttggtggggggcagggcaggtgactggggactggatcccacttttccacttgctggttctgggacctcgggcgtgtctcttcatttctccaacttccacttcttccttgtacgatgggaataatagtacttgcctcacaagatgctgttttttctgtgttttttttttgtttttttttttttttttttgagactgagtctcgctctgttacccaggctggagtgcagtggcgcaatcccagctcactgcaacctccgcctcccaggttcaagcgattctcctgcctcagcctcctgagtagctgggattataggcaggtgccaccacacctggctaatttttgtttttctgttttcttttttttttcttgtttttttttttgtttttgttttttgttttttgtgacagagtctcactgtcacccaggctggagtacagtggcacagtcttggctcactgcaacctctgcctcccgggctcaagctattctcctccgtcagcctcctgagtagctgggactacaggcacccgccaccacacccggctaatttttgtatttttagtagagatggggtctcaccatgttggtcagcctggttttgaactcctgacctcaggtgatccatctgcctcggcctcccaaagcactgggattacaggcatgagccaccacgcctggtcagaagatgctgctttattccatagacatgcactgagcgcctgctacctgccaggcacttctctaagcagtgagcaaaaccaagcctcgctgttgtgctccacatggcatgtcaggaagaagtgttaggggagctgacagggaagagatgctgcaggcacgcagggaaatcccccaggagccaccaggcagagcagggctgtgcctgacagcgggtgagctgggctgagccctagcggacgctgctgaccaggaaaagcctgtgaacagatgggctgagctggctcggccacacgaggcccctggagcggggacatttgtgaggcccagccctcattttggtcccttgacctttttccagttgcccctggatgtcttcaacaactacttcagcctgggctttgacgcccacgtcaccctggagttccacgagtctcgaggttggcagcctcccactgaggccagggcagggtgggcacaggagtgtccccgggagggtcagaccctgctcccgccagtgaaggcatccatcccagccctcccccaaccccacctgggcaggctggggtgactcactggcccccactgcttgtctccacccagaggccaacccagagaaattcaacagccgctttcggaataagatgttctacgccggggtgagtggggtctgcacccccgcctgtgcccacctcttctaccacccgtgcccgtgcccacctgtgtccaccaggccccaggagccctgccgggtgctggtgaggaaagatctctgtcagcagatggtgacgccctctgtctcccacagacagctttctctgacttcctgatgggcagctccaaggacctggccaagcacatccgagtggtggtgagcggggccaggctgccgtgggtgggtgggccggaagggagggaggcggaggccacctggcacatgcacctcaacaccctccccgcccgcctccagtgtgatggaatggacttgactcccaagatccaggacctgaaaccccagtgtgttgttttcctgaacatccccaggtgaggagggggctaccggagctggggggagccctgctgtccttgtcctgcagagactgtgttttgaggcccatgtcatcgcccgcctttgcaggtactgtgcgggcaccatgccctggggccaccctggggagcaccacgactttgagccccagcggcatgacgacggctacctcgaggtcattggcttcaccatgacgtcgttggtgagtgggccctgggcccatggtgcctgggagcacagcccaaaggtggaaggggtcacccatactcacctccatgggccacggcggcctagttcaccctcacctcccttctttgtctcattcctctggcttgagagcggcacctaccccc

SEQ ID NO: 7083 - DNA, 2300 bp, Homo sapien
acagccgctttcggaataagatgttctacgccggggtgagtggggtctgcacccccgcctgtgcccacctcttctaccacccgtgcccgtgcccacctgtgtccaccaggccccaggagccctgccgggtgctggtgaggaaagatctctgtcagcagatggtgacgccctctgtctcccacagacagctttctctgacttcctgatgggcagctccaaggacctggccaagcacatccgagtggtggtgagcggggccaggctgccgtgggtgggtgggccggaagggagggaggcggaggccacctggcacatgcacctcaacaccctccccgcccgcctccagtgtgatggaatggacttgactcccaagatccaggacctgaaaccccagtgtgttgttttcctgaacatccccaggtgaggagggggctaccggagctggggggagccctgctgtccttgtcctgcagagactgtgttttgaggcccatgtcatcgcccgcctttgcaggtactgtgcgggcaccatgccctggggccaccctggggagcaccacgactttgagccccagcggcatgacgacggctacctcgaggtcattggcttcaccatgacgtcgttggtgagtgggccctgggcccatggtgcctgggagcacagcccaaaggtggaaggggtcacccatactcacctccatgggccacggcggcctagttcaccctcacctcccttctttgtctcattcctctggcttgagagcggcacctaccccctctcctcactatgcctcgggataccttcactccccactctgactggagcgtcaccctcattgcctctgtcccttccctttcctacctggggtctcagcctcccctctgccctctggccaggggtcactctcacctttgttctctggctagagtttctgcttcggaaggagcagagtctgggacccccctgcccccagccctggtgccatctgacccaagcttcctgtgcccacaggccgcgctgcaggtgggcggacacggcgagcggctgacgcagtgtcgcgaggtggtgctcaccacatccaaggccatcccggtgcaggtggatggcgagccctgcaagcttgcagcctcacgcatccgcatcgccctgcgcaaccaggccaccatggtgcagaaggccaagcggcggagcgccgcccccctgcacagcgagtacgtcccaccctgccacgtgccctgggtgccaaggccagaccctgccctctctgggccttgatttccccatctgtaaaaggggctgactgtccctctgccccaggggtgttgggagtggagcgggaccttctctcggcaagtggtttggtgccaggccgagggtggcaccaaggcagggcccttgctgagcccccgcttgccggccctgcccgacagccagcagccggtgccagagcagttgcgcatccaggtgagtcgcgtcagcatgcacgactatgaggccctgcactacgacaaggagcagctcaaggaggcctgtgagtgcggtggggcggcctggcagggtggccaggaggggctgaagcagccggggcccccttgggcagggctgtggggtgcagccagctgctgacaggtgctctgttctccagctgtgccgctgggcactgtggtggtcccaggagacagtgacctagagctctgccgtgcccacattgagagactccagcaggtaaggggtgggggcttccccaggtgcccaccgagagggtggtgggaagtgaggccaggcctcttcctcccgcagccagctcgccctgcggagcctcctctgtgctggttccccctactccaagttcccttccctccctggcccccactctatcccagcctggcctttgcttctctcaacaggagcccgatggtgctggagccaagtccccgacatgccagaaactgtcccccaagtggtgcttcctggacggtgagtctactcccagggtgccaagctgtttcgtgttccctccctaggggatcccaggtaggggcagcagaggacctgggcctggacatggcactccctgatcctcagctgccctctctcccacagccaccactgccagccgcttctacaggatcgaccgagcccaggtgagcgattgcaggcctgctccagccacagctgcttccgggccccagggtcgcctctcctgggacgccttccctgttagctcccccgatgggctcacctctgtcctcatgcctctgagagcttttactattgcctgtgtgcatggacagcgtgc

SEQ ID NO: 7084 - DNA, 2300 bp, Homo sapien
agcagttgcgcatccaggtgagtcgcgtcagcatgcacgactatgaggccctgcactacgacaaggagcagctcaaggaggcctgtgagtgcggtggggcggcctggcagggtggccaggaggggctgaagcagccggggcccccttgggcagggctgtggggtgcagccagctgctgacaggtgctctgttctccagctgtgccgctgggcactgtggtggtcccaggagacagtgacctagagctctgccgtgcccacattgagagactccagcaggtaaggggtgggggcttccccaggtgcccaccgagagggtggtgggaagtgaggccaggcctcttcctcccgcagccagctcgccctgcggagcctcctctgtgctggttccccctactccaagttcccttccctccctggcccccactctatcccagcctggcctttgcttctctcaacaggagcccgatggtgctggagccaagtccccgacatgccagaaactgtcccccaagtggtgcttcctggacggtgagtctactcccagggtgccaagctgtttcgtgttccctccctaggggatcccaggtaggggcagcagaggacctgggcctggacatggcactccctgatcctcagctgccctctctcccacagccaccactgccagccgcttctacaggatcgaccgagcccaggtgagcgattgcaggcctgctccagccacagctgcttccgggccccagggtcgcctctcctgggacgccttccctgttagctcccccgatgggctcacctctgtcctcatgcctctgagagcttttactattgcctgtgtgcatggacagcgtgcggccctgccctccacactggagagtatagggcggtgccagccagaaaggcagtggggtacctaccaaaggcttgctgggtgggtaggagggcctggaagcccagagccatccagggagacacagaagcaaaggcattctggtcaggcgccagctcacctggtaaagtctgggcagtcggaggaggtgtcaggaatgggaaggagtgggagagggacaggcagggccccttgcctggccacctcctttcagtgtttgtgctcatggcagaggcttctccaggtctaccagccttgctgcccctcggcccccaccgtcaggtgccctgacctcccgccctgacctccccccacaggagcacctcaactatgtgactgagatcgcacaggatgagatttatatcctggaccctgagctgctgggggcatcggcccggcctgacctcccaacccccacttcccctctccccacctcaccctgctcacccacgccccggtgagtcctggtgtcccgtccctccagcccctggctttcagccccacctgtaagccgatgacttctgaatccctgcttctagcccctccaccagttaactaaatggtgtcaacctgaacctggccaaagcccacctgacggccttcagccctgtggttctgtggggaagcggcctcacgtccaccctggttccctccctgacttctccctcctctggacctcatccttcagccagtcctggcagcccccggacccaccacctgagcactcctccccacccctactgccaccagcccttcccggctgccacgccctggcccccagctcttatatccctgtggccattcgtgccctcgaacccccatctccataccacggtcaactaaaaatgcagagcataccaggccactccccaacctagaagcttctttctcagcagccctttggacgtggattctccccaggccccccgtcattgcactgggctcccagccccctccctgagttcacctccatggtcctgccccactctcttctcttggttctttgaggcatcaggtgtttgccaccactggacttctgtcatcgctgcctccaactcttcccccatctttccggagctcccccacccccatccccttcgaatctcagcttggctgtttcctccttggagagatcactcccaggaccccctctgcaggggtgccacatcacctgttctgaattcttaagagcacccctgctctcagaactccttatttatttgacttgtttgtatccctgaactagaatgtaagctccatgagggcaaggccttcctctgtctcgtttccctgctgtatccccagtgcctggaatagtgcttggtgtgtagcaggcactcaataaactgtggaaaggatgaagatgcccccagttggggttggggagggcgaccagctggcctgtgccgtag

SEQ ID NO: 7085 - DNA, 2300 bp, Homo sapien
cctgccatgcctcctgccctcagctccaggagctgcaccgagctgggggcgacctcatgcaccgagacgagcagagtcgcacgctcctgcaccacgcagtcagcactggcagcaaggatgtggtccgctacctgctggaccacggtgagccgggcagtggagcccagggcctggggccaaggtgggaggaggaggggctgccaggcctctctgaccaccacctccccttctccagcccccccagagatccttgatgcggtggaggaaaagtaagtatctgggcagtgcagaaccgtggtcaccccggaaaccacccttttccccacccctcccattttgtcaggtcagagcccataaacttcctggtcacatctgtcatcccctgggccacccctattgccccagagccctgaacttcctgccctttctgatggcccttgggagacagatgggtggatcaggggacgggatggggtacacagccagcccctgctcccccagcggggagacctgtttgcaccaagcagcggccctgggccagcgcaccatctgccactacatcgtggaggccggggcctcgctcatgaagacagaccagcaggtgagcagacggcaggcagggagcccacgagggcaccaaccaaacctttcccaaggtcctaggcgggagctggggctgggggctgtccctgggaagacacagtccagaccctgggaaacctgagccagcaggggaggagctggtgggcagagaggcctccctccctgaccaggccacagggaggtagagcccctgcctctcagcctgctaggggttaggcctgcctctggcccctgctgatcgcagctccgccctcctccagggcgacactccccggcagcgggctgagaaggctcaggacaccgagctggccgcctacctggagaaccggcagcactaccagatgatccagcgggaggaccaggagacggctgtgtagcgggccgcccacgggcagcaggagggacaatgcggccaggggacgagcgccttccttgcccacctcactgccacattccagtgggacggccacggggggacctaggccccagggaaagagccccatgccgccccctaaggagccgcccagacctagggctggactcaggagctgggggggcctcacctgttcccctgaggaccccgccggacccggaggctcacagggaacaagacacggctgggttggatatgcctttgccggggttctggggcagggcgctccctggccgcagcagatgccctcccaggagtggaggggctggagagggggaggccttcgggaagaggcttcctgggccccctggtcttcggccgggtccccagcccccgctcctgccccaccccacctcctccgggcttcctcccggaaactcagcgcctgctgcacttgcctgccctgccttgcttggcacccgctccggcgaccctccccgctcccctgtcatttcatcgcggactgtgcggcctgggggtggggggcgggactctcacggtgacatgtttacagctgggtgtgactcagtaaagtggatttttttttcttttctgcttttcttcttttgcgggggaggtctaacaagcagcgggggctgcggggttgtcctcggggtgggggactggacgctgtcgacagcaccttcctggggccccggctcccgtttggtggttggtcccagggcctgcccggttcctgacctctgcccggcggccgcgctcgtcggggccgggggcggggccgatccctccggcttcccgcttcccgcggagaacaacaatgaaagtgaaagaggggtggggcgggggcgagcccgggttctgtggcccatttgccctgtggccttgagcaagcccctcccccaggcctcgggggctctcccggtttgggggaaccgggcgaggcaatgccacaggcccagggttagagggggtgggcacttgcagctgccgatgtggctggatctggaacttctcagacggctcctgtcagcgccaagtttcaccaaatccaggcctgcgggctcctcccccaggacccccactcgcagtccctcaagcctgtgctcccggaaaggcactgggcgaccgcacccgtggctttctctgggcgaccgggtcccagactccccccagcacagcagagcgcttccctgcccacccgcggaaaccgccccaggtgggccgcgccccctccccagcagccagcagggcgccagggctgagccggccgtggaggggagcgggtcccgcgggttataca

SEQ ID NO: 7086 - DNA, 2300 bp, Homo sapien
gtgagcagacggcaggcagggagcccacgagggcaccaaccaaacctttcccaaggtcctaggcgggagctggggctgggggctgtccctgggaagacacagtccagaccctgggaaacctgagccagcaggggaggagctggtgggcagagaggcctccctccctgaccaggccacagggaggtagagcccctgcctctcagcctgctaggggttaggcctgcctctggcccctgctgatcgcagctccgccctcctccagggcgacactccccggcagcgggctgagaaggctcaggacaccgagctggccgcctacctggagaaccggcagcactaccagatgatccagcgggaggaccaggagacggctgtgtagcgggccgcccacgggcagcaggagggacaatgcggccaggggacgagcgccttccttgcccacctcactgccacattccagtgggacggccacggggggacctaggccccagggaaagagccccatgccgccccctaaggagccgcccagacctagggctggactcaggagctgggggggcctcacctgttcccctgaggaccccgccggacccggaggctcacagggaacaagacacggctgggttggatatgcctttgccggggttctggggcagggcgctccctggccgcagcagatgccctcccaggagtggaggggctggagagggggaggccttcgggaagaggcttcctgggccccctggtcttcggccgggtccccagcccccgctcctgccccaccccacctcctccgggcttcctcccggaaactcagcgcctgctgcacttgcctgccctgccttgcttggcacccgctccggcgaccctccccgctcccctgtcatttcatcgcggactgtgcggcctgggggtggggggcgggactctcacggtgacatgtttacagctgggtgtgactcagtaaagtggatttttttttcttttctgcttttcttcttttgcgggggaggtctaacaagcagcgggggctgcggggttgtcctcggggtgggggactggacgctgtcgacagcaccttcctggggccccggctcccgtttggtggttggtcccagggcctgcccggttcctgacctctgcccggcggccgcgctcgtcggggccgggggcggggccgatccctccggcttcccgcttcccgcggagaacaacaatgaaagtgaaagaggggtggggcgggggcgagcccgggttctgtggcccatttgccctgtggccttgagcaagcccctcccccaggcctcgggggctctcccggtttgggggaaccgggcgaggcaatgccacaggcccagggttagagggggtgggcacttgcagctgccgatgtggctggatctggaacttctcagacggctcctgtcagcgccaagtttcaccaaatccaggcctgcgggctcctcccccaggacccccactcgcagtccctcaagcctgtgctcccggaaaggcactgggcgaccgcacccgtggctttctctgggcgaccgggtcccagactccccccagcacagcagagcgcttccctgcccacccgcggaaaccgccccaggtgggccgcgccccctccccagcagccagcagggcgccagggctgagccggccgtggaggggagcgggtcccgcgggttatacaggcgccggggctccgcggcaggcaagagaagctgaggcctgagaacggcccgggccttggcgtacggcaggggacgacctgggatgggggcagcgggcggcggcgcagggagtgggccgggggccggtgtgcgcgggcgggacggggcccggggtcgggagaccaccgctcggaagatggggccgggagaggccgccgtcgcagcgcagagggcaccggcggggagacgcgaggacgcggggccgggaacacggacgccggagtagaagcgcggggggcgcgggctggagcgggggcggggacgccggggtcgggggcggtgcgggtttgaggggagggggcggggcgggtccttccctgggggggtggggagagggggcgggggcccatgtgaccggctcagaccggttctggagacaaaaggggccgcggcggccggagcgggacgggcccggcgcgggagggagcgaagcagcgcgggcagcgagcgagtgagcgcgcggcggcccctggtccgcccggccgcggccgatctaggggctgggggctggaggcgggggtgggggtctgagctgcgtcctgggctcgaggcgtcccccgg

SEQ ID NO: 7087 - DNA, 2300 bp, Homo sapien
ccaagagagggcagtatgtggtctttgcccttgactcgttgtgtgaccttgggggtgacaacacttgctctcagcctctcctcctacgaaccaaggatttagaacaggagaacttgaactatcaggctaggaggctgggtctgtatctgcgacggtggaatagaagggctggggtcagacttggggcagttaccctggcccttggccccagcctgcagtacatttttgtgtttatgtatagagatcaagtttaggtgccaatccctatagctgctggggaggatgtcccaggacaggatcctctctattctgcaaatgagaaagaggtgcaggaaggggcagtggatcgtctcaggccacagagccagagcccaggctgcgggttagtgctccttcctccacagccggctgccgcgccctctcttcctctcacacacagacgcacagaactgcgtatccgaccatgcctgctgggctggcgtggctgtgatgggcccgcgtgcgtctgtggagcggtgtgtgtgttggcgggtgtgaaggaggctgggctgagcggctgccctggcactcagagctggcgtgggcctccctcacatggagggaagaggaagagggggaggagagctaagaggagcctggtgggagggagggcaggctcagggaagggcctgtggtggggactccagctagggcgccgcccggtgtgcggagtggactgtggaggggagaggcggccctggcagcccttctcttccctctgggacaattctttcacctcacgggtccccagttgggcctcagggttctctgacaacctagtgacccctgcactgcctccctcccagctgcatgccctgtggctggagctgaggactccttgaaggggatgtgacagttgcaggtacctcctgaagccccttctgcagggactctcctcctctctggggtgcccagctccatgcaccgcctctggtcccctgcaaagccttctggctcctggagctctttggcctccttcagccagagctcttaagttacgggactgccttcctctcaccacctcaccccgcacttaatcccaccagcaacatagtgcaagaagccgtgaaaccttggtcaggcttttaacagctccgtgcctcagtttccccatctgtaagtagtagagaaaaaatggtatctacctcataggtttgttatgaggatgaaatgagttaacactataaaaaatgttgccaggcatgatggcgcctggagtcccagctactcaggaggtgagaggatggcttgagctcaagagttctagaccagcctggacaacataccaagaccctgtctctacaaataaatagataaataaatagacactttttttaagtgtcaaaagtgcttggcacttagtagaccatcagtgttaggtgctcatacataccccgattattgcctttgtcccagtgtcttctacaggggttggagagcaggtgttaagaaatgaccgaatgggtaaatggatgaacagaacacctccctccagagcccacatgctcgtgggcctctgggaccactctcctcctcctcttgcttccctgagctcccccagcactggcctctgtccaggccttgcgctgcctccaggcctttgctgtggctactgcccctggcagggccactctccacagctcctcctgtggctggctcctcatcacccagatgacctggtgggtgaggccacctagcaaggagtcatgcctgtcctgccttctgactcactctctcatcaccctgccttttttttcttttgtggctcacgtgtttgcatgtctccccccatgaggcagggggccatgtgtgtcttattcacttctgtagccacagcaccctgagcaatgcttgccacatagtaggtgctcaattaatgttgaatgaatgggcaaatgcgggatggcgggacagagttctctcaaggcattctgccagagaatgtccctctgtcaccttgaatccagtgtacctccagatgactcccccattccctcctgtagttcatgcttttctctccccttcctccccagacacggcctacccacccctggcaaccaacatggccaacttcacacctgtcaatggcagctcgggcaatcagtccgtgcgcctggtcacgtcatcatcccacaatcgctatgagacggtggaaatggtcttcattgccacagtgacaggctccctgagcctggtgactgtcgtgggcaacatcctggtgatgctgtccatcaaggtcaacaggcagctgcagacagtca

SEQ ID NO: 7088 - DNA, 2300 bp, Homo sapien
ggtctgtgggttcttttctcccataggcagcatctcatattgtgtttattatgtttcacattttcctggtcgtgctgggtcctctcctgtcatttctccttcagagttctcaacacttggaatttgaaatctgctctgccttgtattgagatgacatttagctcctatttctccattcttagccaagatgttaaataaactgaggaccagcatgagcacctccccttacttaacatgttgcctcttttatagtgcctcgtgtaaccttcagtctgagactgcgtgtatttgagccagctgatctcattcttgttttcctttatatatcccccactaatctctaaacactataaagccattatctctgaccatattttgcaccctctcttttccatcagtttttaaaaatgttggtaaaatacacataacataaaatttatcatcttaaccccttccctttatttttttattttattttattttatttatttatttatttttgagacagagtcttgccctgtcacccaggctggaatgcagtggtgcactcttggctcactgcaacctccgcctcctggttcaagcgattcttgtgtcttaacctcccaagtagctgagattacaggcgctcgccatcacgtctggctaatttttgtatttttagtagagatgaggtttcaccatgttgaccaggctggtctcgaacttctaacttcaagtgatctgcccgcctcagcctcccaaagtgccgggattacaggcatgaggcaccacacccagcccccttcccttttttttttttttttaaatgaagggataaactgaatcagaaagaaattatatttaggttttaatagcaacaaaaagatgcttgtgacctacgttgtacgggcccacattttccccagccctggggtttgcccctttttctctgttgtcttcttgtgttctttcaccaagctctgtgttacctttgggcactggcaactgctcagtactgtccagtgcactggcttctccttccctgctcttcagcccttctaacgagagatagattcgtgtttgttgtccagaaggaggtgaatctttggatcttgcaggagcaaattgtcagctctgtaatgtgattctgggaaggccagctctctctcatgggtgtggaataattagatttgacccatgatgcttcttttctagctttattttctattttttattttattttatttgagacagagttttactcttgtcgcccaggctggagtgcaaaggcgcaatttcagctcactgcaacctccatctcctgggttcaagggattctcctgcctcagcctctgaacagctgagattacaagatgcaacaccatgcctggctaattttttgtatttttttttttcttagtagagacagggtttcaccacgttggccaggctggtctcgaactcctgaccctaggtgatcctcctgcctcagcctcccagagtgttgggattacaggtgtgagccactgtgcccggcctgttttctatctttctttaaagagatgagagtctcttgttgcccaggctgaccttgaactcctggactcaagcagtcctcccaggtaactgagactacagatgcacaccactgtgcccagatagttttttatctttttgaggcttagaggcctccaccctttcccccgcttaggatcctttttaacttcaaaatattttctaactcctcttatgataattagttgtactttgttcagtactaattgataagtgaaatatacgataatgaaaagctatcatgaattcaattgtacttttaaatgaattagtaatttatcacaacagtagtatatttgaaaaataatagtatgcttaatttggaaactgtcttatttgtttgatattcagctactctgtgtacatgtataatttgtgggctccccagtaactgcagtctgctggtcaggaactcctgattccattgttctctttaaccccccttttacattccatatagtcttatctctttctccttgcccctcctttcatctgcacaatttcaggtcaaaggaataagatatgttaaggaacacagtgtacgctttctcttttgggaaaataaaaaccaaatactttcaatggatcagcttccaatatccctggtattgatttgtcatttaatgctcggcagccaattctaccaagatataaaaaccatcatagacttttgtttctggcttgtgaagttcccagtggtccacttaaaagccaagtgttgccttaacttcggtttcagggcc

SEQ ID NO: 7089 - DNA, 2300 bp, Homo sapien
cattagactctcttttagtttcaaagctaactgttttggatagtacttctttgggaaaacctgaaagaagtttgggtggtattttagataccttggtgggttgtctgtgtttatcaaactggaagatggagatgtaagcacataattgacatttatttagtcctcaagatcaaaacatattgtctgtattaaagttgatgcattgtgtttctttggtcctcttggatttccagtcgaatacaggccaattttctggtttcagctatgtcacttaatgctgggactgttcattgccaccaagattcatgcttcttgccggtgtagctgccatatgagggaagaactgattctgtggcagagtatgagagcattttatgctttacggttaggatgaactcttgtatttgagcaaaggtgtgcttaaggtagctgtttcctgggatggcaactctaggtgtttttcatgtgaaatcgttatttttgtgatacatattcctttactctggcaagaagtattgagtgttactattttaatctctttgaaagttttggaagtcttgaatgaagtggatacctgagtgataccagttatcagtaatgattgctataaattcaaacacaagtttcctcttctcagttaacataatctctctatgtgtgtctttgtctctttcttctgtgattttagtctggtgagatttgatccacttggacactacttactcacagcaattgttaacccctctaatcaacaggtaagttagtccagcagttccaattccagctaaactgtgagttcttttcttaactagtattccaattctgattatattggattttaattctcaatacccaagtcttatctttccagtcaagatttaaagctagcttcagactgtatattcagggttatagccataatcttgacaggagagtcgattctgaaaccctccagtgattgcctcattagaagtaacccttatcatcactagacagtgttggatagcttgtcactcatgtgcctctggctggttgacattttgcttcccctcactgcttccatgtcatggggagatgtcttttgtaagacaattggtttgtcagctgcactcattcagatatgctgctaattgggagtggaaaatttaataccatgtgattattttgaatctgaggccagttgtcagtgcttcaggggtagagagttgtttcctacctatgaacattgttttccttggatgattgtcagtggttagtttttcttgatttacttggaggttctacctaactgccttgctctaccccctgccccatgctggtccacgttgcagggtgatgacgaaccagagatccccatagatggaacagaattatcccactaccgtcagcgtgccctcctgcaatcacagccagttcgccggacgcctctcctccacaatttcctgcacatgctgtcctcccgctcttctggcatccaggtgggagagcaaagcacagtgcaagattctgctaccccctcacccccaccgcctccccctcagccctccacggagcgccccaggacttccgcttacatcaggctccgacagcgggtcagttaccccacagctgagtgctgccagcaccttgggatcctgtgcctttgcagccgctgctctggcactcgagttccttccctcttgccacaccaggacagtgtcccccctgcttctgccagagctactaccccttccttttcttttgtacagaccgagcccttccatcccccggagcaggcctcgtcaacgcagcaggaccagggcctcctgaaccggccgtctgccttcagtacagtccagagcagcactgccggcaacacgctccgcaacctcagtctgggtcctacccgccgctctttgggagggcctctgtctagccacccttctaggtatcaccgagaaatagctcctgggttgacaggatctgagtggacccggacagtactcagtctgaactcccgctctgaggcggaatccatgcccccgcccagaaccagtgcctcttcggtgagtttgctgtctgtgctgagacagcaggaaggtggctctcaggcatctgtgtacacttcagccacagaagggaggggttttccggcatcagggttggcaactgagtcagatggagggaatggctccagccaaaacaactcgggcagcattcgccatgagcttcagtgtgacctgagacgcttctttctggagtatgaccggcttcaggagctggatcagagcctgagtggggaagctccccagacccaacag

SEQ ID NO: 7090 - DNA, 2300 bp, Homo sapien
tgcactggggacccctactgagtccagcctttgaagggacctttgagtaggtggaggcttatggaacaaggccctctggctcttctgagcgaagtgttatgttctcgcctttttctgggtgggtaaactgaggctgatgtctgggacgtgacttccccacatatccccaacagatcattaaattcactgtaagtcactttttgtcgtttaccaattcccttccccccacttaccagtcaagttatgaaaacagtgagttattgtttgatcgtctgtgatcccaattttcctaggaatatagactgttaggaatatagatcctgtcacaagaggcttcagaagtaaaggaaccatgtggtttcttggctgttttgcttttcaaagtctgtatcattttaactagtgtagcaatgacagtttctttttgtttcttgataaccttgttgtctactttgtttcctgataaccttgttgtctactttgtttcctgataaccttgttgtctacattgtttcctggttgatttatcctccttctccccagcctctttggaaatcttataactatggtgtttgtggttagaggttagagtctagtagaggatggtcaagactttgaaggcaaacgcttgtcctgtgagggtctgctttctggggagtatccaatggaaacccaaggagtctgtctctcttttttcttttttttttttaagacaggctagctctgtcgcccaaactggagtgcagtggcgcgatcttggctcactgcaacctctgcctcccgggttcaagcgattcccctgcctcagactcccgagtagctggaagtaccggcgcgcgccaccacactcggctaatttttgtatttgtagtaaagacggggtttcatcatgttggccaggctggtcttgaactcctggcctcaagtgattcgtccacgtcggcctctcaaagtgctggaattacaggcatccaccgcgcccgcccagttttgttgtatttgattagtagtttggtcactgcacatacaaaagctaaaaaaggctgtgtgtagaaatcattcaaatattgagatatttaaatgaaaggttaacgctttgggaactcctttgtggttcccttttccttcccagcttggaaagtctggggactaagtctgttattttcatcggattcagtaccatgatcctaatttgtgtcacttcattcttggaaaaaaaaaaattcagcctgtcgggcgcagtggctcactcctgtaatcccagcactttgggaggccaaggcaggtggatcacctgaggtcggaaattcgagaccagcctgactaacgtggagaaacctaaaaattcaaaattagccgggcgtggtggcgcatgcctgtaatcccagctacttgggaggctgaggcaggagaatcacttgaactcgggaggcggaggttgcggtgagccgagatcacgccgttgcactccagcctaggcaacaagagcgaaactccgtctcaaaaaaaaaaaaaaaaaaaaatcagtcttgaggtcattctgggttggataagtttccaaagtatgtagaatcagtaagagagcgtttttttgtgtgtgtgttttttgagacggagtcttgctttgtcccccaggctggagtgcagtggtgcgatctcggctcactgcaaacttctccgcctcccaggttcaagcaattctctgcctcagcctcctgagtagctgggattacaggcgtcgccaccacgcccagctaatttattgtatttttagtagagatggtgttttaccatctcggccaggctggtcttaaacccctgacctcgtgatccacctgccttggcctcccaaagtgctgggattacaggtatgagccaccgcgcccggctaagagagtggttttaagggtgcagagattcagttcctagtccttgagtggaaactgtacaaggccacattctcccactattttagtattctcatgtgagttttggaaagattactgttcctttaattttttgtgtgaggtcagcaagatttaaatgaagggcccttaatcataagcaatttcctagttacacgacctcagtgctcccagaaggggattaatgaagagccaccagactatctttatggagaatctagattgggaagttaagctaagaatgtgcatttttgaaaaagtttttatggtagaagagaatgtatatcagaggaaagaatgtagagaagaaagcaacattgtccactgggaattgataagttctgcgtagaatttagagttataaggactatctca

SEQ ID NO: 7091 - DNA, 2300 bp, Homo sapien
cagctactcgggaggctgaggcgggagaatggcgtgaacacaggagccagaggttgcagtgagccaagatcgctccactgcactccagcctgggcgacagagcgagagtccgtctcaaaaaacaaagaaacaaaaacaatgtagttatctgagtaaaatttgaatgagggctatagctatgctccacaagcctctccaagaaggagagttttctttctttctttttttttttttttgtagtcccgagtagctgggactacaggctcctgccaccacgcttggctaattttttgtatttttagtagagacggggttcaccgcattagccaggatggtctcaatctcctgacctcatgaaccgcccgcctcggcctcccaaagtgctgggattacaggcgtgagccaccgcgcccggcctgggcagtattttcaaagacttagaggagatttttgtaaagtgccaatacattatttaaaaaaggctaatactgtaaggatgtgctctttgagtttaattaaagtcttcaaaggctgggacttttttttttttttttttttttttttttttttttttttttttttttttagacggagtcttgctgtgtcgcccaggctggagtgcagtggcacgatctctgctcactgcaacctccgcctcctgggttcaagcgattctcctgcctcagcctcccgaaaagctgggataacaggcacccgccaccacgaccggctaatttttgtatttttagtagagacggggtttcaccatcttgaccaggctggtctcaaactcctgacctcgtgatccacctgcctcggcctcccaaagtcctgggcttacaggcgtgagccactgcgcccggcatttaaaaaaaaaaaaatttaagatagggtcttgctccatagatcaggctggagtgcaatggtgtgatcatggctcatcgcagcctccacctcccgggctcaggatatcctttcatcttagcttcccgagtagctgggcctacaggcgggagccaccaggcccggctaactttttgtatttatttattttttttttatagagactggagtctcaccatgttgcccaggctggtcttgaactccagggctcaaagcaatccaccagcctcgtctcctaaagtgctggaattatggacgtgagccgctgcgcccgacaaactgggactatcttgtttcctttttacacccttcctctctgagtagtggggaagggtgtaaacctccctaggagcaggtaaggtagactatgattgctcacaattggtaaccatacttgcagtgatctttgtgatttattgaatcacatctaggatgtacatattaatccatatttgtgctgagcatattcatttatcaactaagagactacagaaaaaagccattgttgtggtgatgaaaatgtcaacactttatcaggttctgaacccaaagagacttttgcttattatgtaagaagcacacctgtggctctaggcctttggaagaaaataaaagagaaaagcaatccgtgtgctttttttccccctgccttaaggtcaggctacataattctgggttttcccagcttctcttggtcatgctttgtggggactaaactggagcttttacgtagactgttcattttgttcctcagcttgaattctctctcgttttctgtctctatgatttttaattcccctcactgctctgttaggaaactaagggtcaaatgaggttaactaatttgctcaattgggataaagagtgttgggagtccatagaacagttgggggactatagttacacaacaagtgttattgcgctatgatttgatcttcaacacattcacgagaaactccagttctctaaagaactttaacagccggcgacccacagaaaatggcagaagtgcaggctcttttttaacccgtggcttatgatctgggtttgtttatttacgcctcagacaggagccggaccttgagtaggagttgagctgtttttcggcgctcggctgtggttccttgaacgattgcttgggcgttcctcctttgatgtctggggcgttcttgtattcggtgatcttttgcgccgtcttcttgcttgatgtctcctgagcggcggcggcgccgggtcgagggctgagttgtccgcgaggccccgcgctcaagccgccttctcctgccggtcggtagaacggaccccttcctttattcctgtctcctctttctttttccctgtggctcagcccgttcgctggactgcaaaccgagctcccgtctgccttgcaggtaggc

SEQ ID NO: 7092 - DNA, 2300 bp, Homo sapien
ctccagctcttgacctcaggtgatctaccgcctcagcctcccaaagtgctggggttgtgtgagccaccgcccccagcctacataacttttctatgcctccaaacaaaatgaaaattcacacttgcaaacttacccagaagccagctatctttgtgcatacccgcttcaaactgactactgagggaagactgctgcagcacagcacagtcctgtaggctgccgggccagtttgtctccacggtcattagtgtccctctaatgtcacacaccatcaggcagtttaaagaatgcaggccttttcggttcacataggagaggtcttcagcatttggtgccttgatggccacatggatacagtcaaccacccccatcacccctggcatccctgccaacccatagaattcatccttcagagcctgaatggaggcttcatcagctggaaagcgaatgaactgtgaggccctttccacaagtgcttcagtgacattggcaacacaacgactcatagacgcctgactgattccaatggcatctcccatccgagtctggaaggaacctgaggtataaaaacccaatgctgcaaggacctgtgtctctgggctaatagccctggatcgctgagtaggcctagaaagattcgcccccaagagctccaccaagtaataaatgaactgccgtggaaacccatacatggacatcaagtattcatcagtcacatcatccagcttaaaacggtccaatgtccggtgaccacggccatatagcaagaggtcacagtcaagcactgttattggtatagccatggtaaatgtgaatgttggctctcctctttgctttttctgaactgttcccaatgaagatgttggtgcaagaacgtatttttaagaaagtatcagaatccaacagctaaccacagttaaatggctctgccatttataatcttctctctgtaaatgttaaaagaaaaaacattaggaacctaccaaagactttaaagtgactcaaaggctggagcagctccttttctacaaatttccattttgttgaggcaaaacgtactgtacttacaactccggatttttctccactaactcatggctgcacgacaggcttgctctgattcaaggataatgggaattcaatctttgtggctcatttaatgcttggcatttcaattgagaacaccaaaagaataatggaggtgatgacataattattcacaaggtaaaagaggtcggcttctaactatataggccaagaagcagctgacatatgtcataaccaccttgggtaagaattggtcacgggtttcattatccaaagacttctggtttcacctgacaaatacaggacagatgctggggtgttcaaaccagtctaacaagaaaagaaggggcaaaaaaaaaaaaaaaaaaaaaaaaaaaaaaacaaccaaagtccacaacccagccttatggacgtacactgtgtgctgtaacaaaaggcttttccctcactccaagaactccaaatcgtgaacctgagggccaggaagtacggaagaccagacacattggaagtcgggagcgaaaaagaggctggccgaaccaggtttgggaagcgactctgccacttttaaagggcaccctaaaaacggatgtcaaagtctgattgcgccggccactcagttagcccaggcccgtcacccacctctccgcggctgccaggttaccagccacacttcccacccacccagccgggttgggccctcctccggaaccggcgactgcacagaggccgccacggcgcgcaacagcggcaccgccccttccgcgtcagcgcccgccccgcgccgcgccctcactgccgctgccgcggctacctgcggttcatctccgcacattccacacgcggcccaaacggtctctctctctctctctcaaacaccgcctttccgtctttgttttatcttgagtagcttagaaagattggagaagaaagcttacgtggaatgaaaatcaacttttatggatattttgaggactaaaagaataaatagggcgtccgtactgtagcgaaagtgcgactaaggttaggcatctggatttcccccgtagccctctttcaccccccccccccggccattaccgaagcggatgaaaacaaacactaacgatggcggcgccgggaagcgaccggctgctgggcttaaggcgggagtgaccgcttaaccagtgagggaagcactgaagagcgccagtcgacgtgggtgcgacaactcgcggagtcttaggagcaaaacgtctggggcctgcgagcca

SEQ ID NO: 7093 - DNA, 2300 bp, Homo sapien
tatttaaaataacctttaaatccctttagggacttaaaatccttttaaatatttaaaacccaaactttagaaaggtttgattccctctgggcagcctcctttgcattcctcctggctacagtacctctattctctcgcagaatattttcagtttttattggtttccacaatttgataggaagcaatgaccagcaactctatgcactctcctccactaagcacatgcaggaaaaatgacggtttatgtaaattcatcttacttagctccacaccccatgttggaagttactttcgaatattccacacctaaagttcaagtaaacttccttcgagattaagctcctgggccggactctgtggcttatgcatgtaactccaacactttagaaggctgaggtgggaggattccctgagcccaggagtttgagattaaagttagctatgaaggcgccactgtactccagcttgggtaacacagcaataccttatctctaataataataataaaaattttaaaatctaaaaaactaaaagacttctcctgagctgataaatggagagttgaaaacaacaaaaaaaaaacctcataattgagctggagccactacatgcacacatgaaaaggactaacagtcataaaacaacacacaaaatctggaagctaatttagtgtaaaggaagagcttgttgtttcttattataatacatctcccactaaaggtgtccaataaattctatcaccttaggagatgagttttaaactaagtgtaatgagaaaataggtaattttttaaaatctcttttttctttttggctgcggggtggccagagaacgaagaaataccaaaagtgaaatgctacgctgaattgaccaggctaactgggaactcactggaaaagtgaaaactgggaagaattagtgatgagctcaagaaggtgcttagccacttacccagagatttatttaatgagaatggatcacaggtttccacaggtcgttccactgccagtaagaagacagtcgtgaaccatgggtcccttttttcactagtcaacagtcaccctcacctacacgcggagtacatatttggcactcagcaaatcttgattgaatgaaaacctacctcactcatattggcacccaaccccggagttatggccccccaaattacctccaaaacgcctgacgacctaacccaaggagctgaaaaagtggagaggaaagctctggggtggaggggattctctgccaaacaagcaggggccaacggggcctagaccaactcaacttcccacagaaaactcaggggcccaggggattgaaccgtggctaatcccttctacttccacgaagcagcagccaaggggccgcagatccacagcctcccacccgggggcgctgagagatcttggggtatcccccgcaaaagttagtacctgcgaagctgcggcacaaagagtggttccgggctctcattacggaggccgggacctgggaccgaccagccgcgcctcctggctgagggttccgcgctccggagctgcagtgaccgtacacgtcgccgatagacacctaaggcttcagaagggtcctggctcgcaggccccagacgttttgctcctaagactccgcgagttgtcgcacccacgtcgactggcgctcttcagtgcttccctcactggttaagcggtcactcccgccttaagcccagcagccggtcgcttcccggcgccgccatcgttagtgtttgttttcatccgcttcggtaatggccggggggggggggtgaaagagggctacgggggaaatccagatgcctaaccttagtcgcactttcgctacagtacggacgccctatttattcttttagtcctcaaaatatccataaaagttgattttcattccacgtaagctttcttctccaatctttctaagctactcaagataaaacaaagacggaaaggcggtgtttgagagagagagagagagaccgtttgggccgcgtgtggaatgtgcggagatgaaccgcaggtagccgcggcagcggcagtgagggcgcggcgcggggcgggcgctgacgcggaaggggcggtgccgctgttgcgcgccgtggcggcctctgtgcagtcgccggttccggaggagggcccaacccggctgggtgggtgggaagtgtggctggtaacctggcagccgcggagaggtgggtgacgggcctgggctaactgagtggccggcgcaatcagactttgacatccgtttttagggtgccctttaaaagtggcagagtcgcttccca

SEQ ID NO: 7094 - DNA, 2300 bp, Homo sapien
gagatactgagattactttgccccctcacattctaaatgaactttctcctgatagaaattcctgatttttttttttcattcccacggtaaagtgggaaggagtcatttaggaaggtttttgtgtgtgtgtgtgccatccatcaggaaaaataatttatgtcattcctggcttctcaaacttccatcctctcccttttctccctctgttagatgattaaaggcattttacactctagttttctgagccttgactcttgggacatatccaggagtagctaaagacagaggcccctgtgtggaaattcttaaatggaggtcataagagctcaaaagcctttgcatagtacaggtcctccctgctggctggagtccaggggccacttgactgcacaatcctcctgcccaccttgaatccccgtttttggccagaggacttttcctaacccttgctgcttgcagggctgtgactgctggtttggcagccacagccatgggcccccactgctgctgcttagggccccctgtgcaggactcagcttcagtctgaaaggctggggaaggagggagtgggaacagccaaattaaatatgtcattcaaagacctttagttgagggagggatgattgggggcgaggagaggggaggaaacatggcagggagcctagagaaccttagcccaggcaatttgtcaagggtgaagagatctctggcaggctaaggaatcaaatttggaactaaagaagaagaaaagctagaaattttagtagttccaggaagtgcagccctctacaatcaactcaaaaggcagggcaatagtggcatcagccagaccacataatgccatctcccattgatgggccagtggggaccaactcctgccctaggccacagccccaccagatggtgtatttatagtgaactaagtcgtcctgctgtggtttgagaacgagtactaacttcacctttctcctccagtgaggatactgaaaccgtatcaaacagcagtgagggacgggcctcccctcacgatgtcttggagaccatctttgtccgaaaagtgggggcttttgtcaacaaacccattaaccaggtgatttttctgccactgccacctgtgagaatgtctgagttcttagagtaaggccccacaggcagttttcttaacctgagatattaatatatatgaaactactgaactggcatgcaaaactgtatgtgtgtgtaaatttttctgtgaagaggattaataacctgtgctacccctccagaataagttaagaactattgtcctgtgaccttttaaagcctcctacaagaaagggagactagacctagataccatttagtacaaaaacactacactgtgtcattgcctcggccttatttgaattgaactaggaggttcctcctcagcggggccagtgaagcacattattactgcattactgtggatcaggcttccaaagctgaattcccagggtcctcaggaccccaacccttgtttatgctgtgggtgtatgtgatgggggacagggaggtgagcgagcttggagagcctctaacaaggcaggagcctaaggggcagcatggtcagcatagctgtgtgaacttgctggacctctaggcttctggcaaccaggaaggaagcatgaacactgcaggaggggcaggcatgaatgcttttctcctgtgtctcttcaggtgaccctgacgagtttggatataccctttgccatgtttgctcccaagaatttggagctggaggataccgatccaatggtgagcccaccgttgactacgagttcccagtagatggtgcgctagtcattgttcttcctgagccagagtcactaatcccccacagactataaaccatggcccctcggcttacgggtttgtagccagcattaagttcttcccagaattttcagattgtttacagtaacttgaatctgggtcacagcatcagccctaatcctgccttgctatgaaacaggtgaatcctccagattccccagagactgaatctcctctccagggcagcctgcactcagatggctccagcgggggcagcagtggcaatacccatgatgactttgttatgatagactttgtaagtcgccgtcaccttccttgacctttgctgtcccggggaactagacctagaagcatctactgcacttgatccagatttccttcatagggatcagatgtgctggtgtagacagaagggatggacaggtggagtctggtctggggagacattttggaggccgataaacaacaaggcattttttgtc

SEQ ID NO: 7095 - DNA, 2300 bp, Homo sapien
ggagtgcagtggcgtgatctcggctcactgcaacctccgcctcccgggttcaagcgattcttctgcctcagcctcccaggtagctgggagtacaggcgcgcgccaccacacccggctaatttttgtatttttagtagagatggggtttcaccatcttggccaggttggtctccaaatcctgaccttgtgatccgcccgcctcggcctcccaaagtgctgggattacagccgtgaaccaccgtgcccggctggtcctctctttcctcactgtaaaatgagcttagtagaacatgcctcatcagtgctatcgtgaggttgagtttgtgtccccagttcatggtcctatataggccctcaacaagtgtgggttcccttctttacttaggagatgaattaattggttcattcattcaacaaatgatagcatctactatatatcaggtgtcattctgaatagaccagaagttcttaaacagtgattctcagaaggtgtatgaacctcttaaaattgcatacatctcctaagttttcttagggaaaaagtccacacatgttaccaatttcagaaaagtctacaacttcctaaaagtgattgcctaaggtgatccttaagatttttgtaaaggtttacctgctgagaatggaaaaattaatctcagagttgggtgtattttgcacagagtagagcaggcttgtgggtggctggtgtcttaaacaggcaggatacttcatttctactacttgatgttagaatttccctgtgctagcttcctcaccctcccactgaatgggagtttaacttccaggctcagaagttaaactgtgggttgggggtagtgggaggggccagtctgactgggagatgggaaccactgggcttagttatgctgggaaaggaggttatgtgggggcgttgagggaggtcatgtctggaagaactgacagcatagaagagcagtcactggaaaagaggtgaagttcaagttcagctcccttttagatggtgtccttctccctccttcacatccaccccagctcccagctgctccttttttttttttttttgaaacagagttttgctcttttgcccaggctggagtgaagtagcttgatctcagctcactgcaacctccaccccctgggttcaagtgattctcctgcctcagccacctgagtagctgggattacaggcacccaccaccatgcctggctattttttttttttgtacttttagtagagatggggtttcaccatgttggcaaggctggtcttgaactcctgacctctggtgacccacccaccttgggctcccaaagtgctaggattacaggcatgagccaccgtgcccggccccggctgctccttctaatcctgttgttcactgcagcacaaagtatttctgaacactggagaattatatttctgggaggcgccattgcctctacagaggaggaaatttaggcccaagtaggaaaaggacttgctcagcatctttgcagctcactggcttaggcaggatgataatccagctctccatactacctcatcatttcatggcatcagcacctactttgtgcagaaagatgtctctgggatagctgtaggtggggctgaaggagcccctggtccctgggcagtgacaggctgaatagaaagggtagagagaaggctctggcctggagggggttgctttgagctggattctgtctttattacccagctggaggtcgctatggggagcagctcccacagcctcctggctggatggcaggaagcacatgtagatattgaagggttgaagggttgaagggttgaaggctgaaggggagtgagggagctgggctttggcatcactcagagaaatgcattcctgaccgtgagggatcattcttctctgtgttcttgggaagggattatattttggtggtaaccaggggtagtggatgaggacaggggacagggagaggaagaagagggtttttttgggctgttttcgctggttggctttggcttgggagcatgaaacagcgttaccactcaatccgtgtggttgccctggtgatagggtggctgttgctaggcacagggagagggctcaccatccagggcccttggctgtgatgtgatgtgtgcaggaggttgtcaagtggcctcagagcccagagtctgtggctctgggatggcagctctccccctcttcttcctgcccacccccagggcttgtctgctctccttatctgccctgctgattctctgaccatatatgtcagttttggggctccaggaatgcagctggaca

SEQ ID NO: 7096 - DNA, 2300 bp, Homo sapien
tgaacttcacctcttttccagtgactgctcttctatgctgtcagttcttccagacatgacctccctcaacgcccccacataacctcctttcccagcataactaagcccagtggttcccatctcccagtcagactggcccctcccactacccccaacccacagtttaacttctgagcctggaagttaaactcccattcagtgggagggtgaggaagctagcacagggaaattctaacatcaagtagtagaaatgaagtatcctgcctgtttaagacaccagccacccacaagcctgctctactctgtgcaaaatacacccaactctgagattaatttttccattctcagcaggtaaacctttacaaaaatcttaaggatcaccttaggcaatcacttttaggaagttgtagacttttctgaaattggtaacatgtgtggactttttccctaagaaaacttaggagatgtatgcaattttaagaggttcatacaccttctgagaatcactgtttaagaacttctggtctattcagaatgacacctgatatatagtagatgctatcatttgttgaatgaatgaaccaattaattcatctcctaagtaaagaagggaacccacacttgttgagggcctatataggaccatgaactggggacacaaactcaacctcacgatagcactgatgaggcatgttctactaagctcattttacagtgaggaaagagaggaccagccgggcacggtggttcacggctgtaatcccagcactttgggaggccgaggcgggcggatcacaaggtcaggatttggagaccaacctggccaagatggtgaaaccccatctctactaaaaatacaaaaattagccgggtgtggtggcgcgcgcctgtactcccagctacctgggaggctgaggcagaagaatcgcttgaacccgggaggcggaggttgcagtgagccgagatcacgccactgcactccagcctgggcgacagagtgagactccgtctaaaaaaaaaaaaagaaaagaaatcatattctcaacgttggaatcggcctcccagttgcaaatcccaccacaatacaacagcaattacaactctcaactacaattatgtttgcatagagcttcacggtttacaaagcccaggttacgttttgcaattatcctgtttcacagattaagaagttgaactgaggccgggcgcagtggctcacgtctataatcccagcactttgggaggcgggggcgggaggatcacgaggtcaggagttcgagaccagcctggccaacatggtgaaaccctgtctctactaaaaatacaaaaattagccgggcgtggtggcggacgcctgtaatcccagctactcaggaggctgaggcaggagaatcgcttgaatccgggaggcggaggttgcagtgaaccgagactccagcctgggcaataagagtgaaactccgtcttaaaaaaataaataagttgaactgaaagcgtggcctaataagtggcaaggaggaacacttcccccaaatttcttcttcttagtgctttgccagatcagatctgggagatttccccctcccgccggcttgctggatgacagcgatccggcctggactctgccctggggaaggcaggaagaaggtagtgaaaatgattaagtcctcttattgcaggcgccaaaatggggcagaaaccctgcaggaaggccaggcctctgagcccagttccacccccgttcccctcctcggatctgctccggtcctccccatccggaccccatcccttcggacgacctggccagctcctttcctttccccatccccacccggggagaccccgcgcccagcagctcaccgcgctcgggcactgctccctctgccacgcctgtcaaggctcggcaaacatccggctccgcggtggaacgggaaccgccccctcccgctctcttctatccccaaccatttccgccacacctccaacccacttccggccccaaacatggcctttccaggagccccgcccacttcctgcacatgcccgcctaagttcctgcctcggggaggtaacagcataactgtccgactcgtcgctcccaaagagatggctggaacaattagttccgctttcccagctagtcgaatcactggtgcacctccggaatccgaggttcgcattgctctcggacagagttctgcctccccagtactcccaaactcccagtcctgtgcaccaatgaggtccagctctgaggcttctttcctgagaaaaaaatttggaagtccgtgactgtttcc

SEQ ID NO: 7097 - DNA, 2300 bp, Homo sapien
aataaaccaacaaaagtccttctcaaatgtgttcgaggggtcgggtaggaataaaaaaagaaactagatgaaactttcctgggacaaatttaagatgaaactcctggaaggttagaagcctctggttctcctctaacaggacagtgctgtctgattcttcattcagtaaggaccaaaaagtctgtctcctcacctccctcccaagggtatggagaattactaaattgaacacattactgtcttccagtgagtactaaacagaaaaagtaataaggaacaccagctttttaaaatggtatttattgggccaggcgcgggggctcacacctgtaatctcagcactttgggaggcccaggcaggcggattacttgaggccaggagtttgagaccagcctcaccaacatggtgaaaccctgtctctactaaaaatacaaaaattagctgggtgtggtggtgcacatctgtaatcccagctactcgggaggctgaggcatgagaatcacttgaacctgggaagtggaggttgcaataaggcgagatcgtgccactgcactccagcctgggcgacaaagcaagactgtctaagaaaaaagaaaaataaataaaataaaatggtacttattgtgcagtgaaaccttttatcttcactatttcatcagctcctccatataatcccaagagagccactgctttgtttcacagatgaattaaatgcggcacgtaatttaaccagctaggtgacaaagctggaatttgatcccatgctttcttaattccaaaaaccttagctcttgaccttcctcactcactgctgacactgtatgattccagctttcaacaacttttcaaacctcgattctttaactactgctgctgagaggagacagtcctgaagagaagggacaagactatctcctatctcttgaaatactctctttcttcaaattgaaaagctgtctagcaatgtccaaacctcccctacattttcaagggcggagggaagtcgctctatccttcaatacctcctcctgccgtggctttactccctcgcccttctccttggaggcagactcctcttccagcggcccccacagcaggccgggctgcagggggtccccgacacaccagacccccaagcgctgttccttggcgagtgaggggccaagggccaagccccggggaaggctctttaaagcgaggatgtctcgggtcggctcgggtgggacgtctttgaggccctgcgtacagccttctccggaagggttccatcctaagtccaggcccaggcgcggctcgcgggctgcagagagaagggaagacagtgagggagccacccaagaaggtgggaggtggggaaaagtgtgggaggaaaccgcaggtccaggtgggcctgcggagcccgagggacaggtgagggctctaaggagggccctgaaagttttgaggaggctcaagggctcttcagaagcccccagcgactctgagggcactggaggatcctgggatccggaggagagaagactgaggagaaagctgaccacagagcgtcagatccacctgggccaaggttgagggtcgcggacatcgcaggtcactcaccgagttgcagcgccttcttcccctccaagagcagctcctccgcctcctccattccgggtcagaaagcctccctacgccggaagtgagcttcctcttctcagctcctccaggaaacagtcacggacttccaaatttttttctcaggaaagaagcctcagagctggacctcattggtgcacaggactgggagtttgggagtactggggaggcagaactctgtccgagagcaatgcgaacctcggattccggaggtgcaccagtgattcgactagctgggaaagcggaactaattgttccagccatctctttgggagcgacgagtcggacagttatgctgttacctccccgaggcaggaacttaggcgggcatgtgcaggaagtgggcggggctcctggaaaggccatgtttggggccggaagtgggttggaggtgtggcggaaatggttggggatagaagagagcgggagggggcggttcccgttccaccgcggagccggatgtttgccgagccttgacaggcgtggcagagggagcagtgcccgagcgcggtgagctgctgggcgcggggtctccccgggtggggatggggaaaggaaaggagctggccaggtcgtccgaagggatggggtccggatggggaggaccggagcagatccgaggaggggaacgggggtggaactgggctcagaggcctggcct

SEQ ID NO: 7098 - DNA, 2300 bp, Homo sapien
acaaaaacaaacaaaaaaacccaacaggtaggtagcagtggttcacgcctgtaatccccactttgggaggctaaagtgggcagatcacctgaggtcaggagttcacgtccagcctgggcaacatggtgaaactctgtctctacaaaaatacaaaaattagccaggcatgatggcgggtgcctgtagttccagctattcgggaggctgaggcaggagaatcgcttgaacctaggaggtagaggttgcagtgagccgagttcacgctattgcactccagcctccatctcaaaaacaaaacaacaaaaacccaaaatatatattataattttattttatttattcaattttattttattttattttatttttctaggaacaggtctcattcaggccaggcatggtggctcacgcctgtaatcccagcacttgggaggccgaggtggaggtgggcggatcacctgaggtcaggagttcgagaccatcctggtcaatgtggcgaaaccccatctctactaaaaatacaaaaattagccaggtgtggtggcacacgcctgtaattccagctacttgggatactgagtcaggagaatcacttgaacagggagatggaaattgcagtgagccgagattgttccactgcactccagcctgggtgacagggcgagactccgtctcaaaaaaaaaaaaaaaaaagaaagaaagaaagaaagaaagaaacaggatcttactctgttacccaggctggagtacagtggtgcaatcatagctcactgcagcctggaactcctgggctcaagtgatcctcctgcctcagcctcctcagtagctcagactgcaggcatgcaccaccattcccagctaatttttaatttttttttggtagagatgagggtcttgctatgttgcccaggctggtctcaaactcctggcctcaagcgatcctgccatgtcggcctcccaaagtgttgggattacaagtgtgagccactatgcctggcctaaaaatatatatatgaaaatatataagaaatgggcctcccaggaattaaggtgtttgcgggagtcctggtccccagtttttctgccaacactccctgttcccacacatgacctggtccagaccccaaacagccaggcccaaaggacaggtgaggcgaggcgagaacttgtgcctccccgtgttcctgctctttgtccctctgtcctacttagactaatatttgccttgggtactgcaaacaggaaatgggggagggacaggagtagggcggagggtagggtaggaccagaagcctctctaggcctgccatggggcaggcagccagggagaaggagggcccctcagtggagacccagggatttcagtagcccctgttccgggacaggcgcaggtcctgggaggtgacagaagatagactaaaggcccaagagtccctggacctgactcctcccaggcagctgccacacacaaacacacctccaggcaccctggacaggaaggaggagaaatgggcccctcctccagtggctgagaagctggggcaaatgttggctgttcctatccctggtgcatcccatggcgaggggcaacttccatcaggccacaccttttatctttgtctctatttttgatatctgtgtattatgattatacaaacccccacattggcctatatgtgcagatctgattaagaacttacgatattccatggacattccattcctaatctcctttagtcctcacaacaaagtattattcccattgtatagatgaggaaactgaggcacacagagatgacaagcaaccaccgctatatgttaggattcgaaggagctccaggaaagtctcatagccccactggccagaatgggctaaatctcagagggggagggtgggagatgggggtgacagtgaccttttttgtgactcctcctagaccatccatccctgctcccaggaggacctgtcctcccagatggtggagatggacaggaggactatctacccacccgtccccacggccctgaccctctgacctcaccctctccgctgatttcttcatgttagttcaacattaacccagaggggtcaggacagacaattcctcagtgacccaggagctgacacactatggcgcacgtccgaggcttgcagctgcctggctgcctggccctggctgccctgtgtagccttgtgcacagccagcatggtaagggagtgcttgcaggctggaacaggctggaggactggggtgtgggcccatgggctggggtctcctggctggacagagcacacagag

SEQ ID NO: 7099 - DNA, 2300 bp, Homo sapien
actctgcaaaaaaaaccacatgaaaataataaaacaagctacagaacaacagaaaagatttgtaagccagtatccaataaaggactaatatctagaatatataaagaactctgaaaactcaacagtaacaacaacaacaacagaaaaatcagaaaatgggtatccatggccaagcctgtgagtagtgagctgagatcatgccattgcactccagcctgggtgacaagagcaagacttaatttaaaaaaaaaaaaaaaaaagatgctcagtgttattagcaaccagggaaatgcaaattaaaactgtgttgaaatatcactatacaatcatcagaattgctaaaattaaaaataatggtaacgtgaaatgctggagaaacctaaacagtcatgcattgctgctggaaatgtaaaatggtacaactacttcaggaaatagtttggtattttcttataaaactaaacgtgcagttactatatgagccagcaattgcactcttggacatttatttcagaaaaatgaaaatttatatccatacaaaaatctatgtacaaatattcataacaacttcaatcatagtagccaaaaactgggactatagctcaagggtagagcattttactgcataatagccaaaaactagaaacagttcagatacctttcagtaggtgaatggttaaacaaatctcttgtacatccatacatggaatactatttagcaattaagaacaaactgctggtaaatacaataattcagataaatctccaaggaattgtgctgcatgactaaagccaatcccactggcctgcgagccaagattatgccattgccctccagcctgggtgacgggagtgaaaccttgtctcaaaaatgaaaaatacaaatatgaactattttagggatatagagaagaaaaatgtcaacataaggcaaaaaataagaagtcttggtaaaatttgtaaccttctgatcacaataagtgctttgggtcttctagctaaatatttttcagaactaaagggagataagtaaaagtttttcatctttaagatgtattaaagctttataatttaatacccaaatatagtccaaagaaatgtgtccttatcttaaagatgattgtcatcattgcatatgttatttaaatttagcacagttcttgaattatgaaaagtactgatttcatattggaaagttatagtgtgaaagctaattcagtgcttgagactaatgaaatcagtaagcctgagatcataaatgataacagtcttcatttgaagtgtgtaactagtctttatttcttttggcagcttctgggctggctggctgagaaactacctactcttcgttccacccctacagaccttatcctttgtgttcctcatctctactcctgcctagaagatcgaaatggagatgtgcgaaagaaggcccaagatgccttgccattcttcatgatgcatttaggatatgaaaaaatggccaaggctactgggaaactaaaggtactacttcttgttgctgctactgctgttaaaagctattaaaaaatatatttaacatgggcctggcacggtggctcacgcctgtaatcccaacactttgggaggccgagacaggtggattacctgaggtcaggagttcaagaccagcctggccaacatggtgaaaccccatctctacaaaaacaaaatttagccgggtttggtggcacatgcctgtaatcccagctacttgggagggtgaggcaggagaatcgcatgaacccaggaggcagaggttgcaatcagctgagatcgtgccactgcactccagcctgggcaacaagagagaaactctgtcttaaaaatatatatatattaaacatgaatttatatgaggaaaaaaccatattacctcctgtgagtctcaatttgaaatcgtaacaagcaaaaataaaatattaagcagtgtagaagtaaaaatctgctgacctcacaggggtgaaaactgtgaccttctagaatgatacctaccttagtgtgacttcataatgtgtgtgacttctctgacaccatgtactgcctcccttacttcagtggtatttcaaaactaggagctcaatcatttgtttgacagaggatttgttcataagctttgtatgactttatcatttatgtgacctctcactttttatgtcattttgtctctctagccaacttctaaagatcaggtattggccatgctagagaaagccaaagttaacatgccagccaagcctgctccacccactaaagcaacttctaaaccaatgggaggg

SEQ ID NO: 7100 - DNA, 2300 bp, Homo sapien
tccacacccttctcccatacctacaagccctacgcctctcttcatctgtatgctttgtagcatcctttacaataaaccgtgaaggtaaaaaacaaacaaacaaacaaacaaaaaacaccaaaaaaacaggtgctgctaaaactgaactgtcagtagtagaagactgcgatggaattaccacacccactgttcataattcaaacataattcaaaactgatcaagactttaaagtaatggagaataaagtaaaaggcatgttaattgttacggaatacctttgcttgccattgcctcagtgaacagccttttaaaaaattttttttcttttttttgagacagagggtcgctctgtcacccaggctagagtgcaatggcgggatcttggctcactgcaacctctgtctcccgggttcaaatgattctcttgcctcggcctcccgagtagctaggattacaggcgcccgccatcacgcccagccattttttgtatttttagtagagagagagagagagagacggggtttcaccatgttggcccgactggtctcaaactcctgacctcgtgatccgcccgcctcggcctcccaaagtgttgggattacaggcgtcagccaccgcgcccagcctaaaatcttatttaaaaatttttttacatgagtttaccaactagatttaacttatggttgcaaaataaattgatttcacctttatctatatcattaaatttggtaaaagcattacagtttgtccagtcacttcagagaagtcaaagtcttctacaatttcttaaagtttcaaaagattcttagcttaatttattggctctttaggtcaaaagaaggacttttcagggtgatgaaaatggaggaaggaggagctcacctttctaaaaatgagttttcaattactataattatgcataagacaggcagcatttctgggccaagatttgatgccttggtcccatgagaattaaattagagccacgcataaatttggggcaagttctgcaaaaaccacttcaacctctattgatgctgaataaaaaactcattgttaagattcatcaacacgaatatattttctaacacacactagccactctggcaacaaccctttcatcattttctatccaagaaacacaacggaatgcatttcaatcctgctcaacaattaccacgattacaagtagaggggagagctcaaaagtaagaatctagttcaccgagcccgaccttaaagtagcaaggcccaacccacactgctggctattgtattggttccccaacacctccagggctggaaggacaccagaacgctcccgacacgttgagagagagaaagccagtcgttaagggcggggtggtggatgatcggaatcgttcacatcgcagcaagccagcagggacacaggtgtgcggccaggccccggtgccgctgtccttgctccagggcgacaaggcccttcgcaaccaccacagccctcgtaggcgcttacttattcattcacttgacaattacgcgagaggcactctagcagggccggctctcggggcccccgccctagtcttggtaaatcgctgccgccaggcgcggccctgcaccgcccgcgccccgcggacgctgccacccgcgccacgctgcggcgcgctctggccacctggagcccaaccccggcctccgccgcacacgagcgcccacgcccccggccctgcccgccgcaggtcccccggcctccggctcgcttcgccgcctcagacctgccgggttcgtggggcaagtggggcgcgcgtctggagacctccagccgcccaggattcaggggctcctctgcgcgcgcgatgcctgcactcgagggcctcgcgggtggggcaggcccaccgaccactcacctcagctgggtcagaaccaagcggcctgctctaagccgtttgaaaccgcttgggccgccgcacaccccgcagtgtcctcgttctttattggtcctcgacggaccgcccatcggacttttattggtccatttgaaaggcctgtgggcacgcgccgcccgcagccttaaaggggccgcgcgcagccgtgtttccctctggaccagacgccgcctgcacgggtggggacgctggtcgctgccgggggcaagtctgccgactccagaaagaaaggcgaaagaatgtgtgtagacccgggcatccttggtcgtcagcatgtttgctttatttaattacagatgttcaggctgctgtcaacacccgacaattttttttggtcatttcattccctagagattgtgaagctaagt

SEQ ID NO: 7101 - DNA, 2300 bp, Homo sapien
gcttggtggcacatgcctgtaatcccagccacttgggaggctgagataggagaatcgcttgatcctgggaggtggaggttgcagtgagctgagatggtgccatcgcactccagcctgggcgagagagcgagacttcatctcaaaagaaaaaaaaagaaaaaaaaaaaagggccgggcacagtggctcacgcctgtaatctcggcactttgggaggctgaggcaggtggatgacctgaagtcaggagtttgaaaccagcttgaccaacatggtgaaaccccatctctgttaaaaatacaataaaaaataattagccgggcgtggtggcaggtgcctgtaatcccagctacttgggagcctgaggcaggagaattgcttgaacccgggagatggaggttgcagtgagccaagatcacgccattgcactacagcccgggtgacatgagagagactctgtcagaaaaaaaaaaaaaaaaagccgggtgcagtggctcacgcctgtaatcccagcactttgggaggcccaggcgggaggatcacgaggtcagcagatcaagaccagcctggctaacacagtgcaactccgtctctactaaaactacaaaaaattagccaggtgtgatggcacgtgcctgtagtcccagctactcaggaggctgaggcaggagaatcgcttgaacacgggaggcggaggttgcagtgagctgagattgcgccactgcactccagcctgggcgacagagcgagactgtctcaaaaaaaaaaaaaaaaaaagcagtattgcagtaaacatccttgtacatttttctttgcatacttgcacagatctgtacgataaattcctcatagtggattactgggccagaactagattatgtacattttagtaactgtcaaattgtcctcctaaaggtttgtaccaattatactcttaccaatattgactttgagtgtccatttttccaaatctctttatatttttaaaaacagagatggggtcttgatagcaagacccaggttggtcttgaactcctggcctcaagcaatcctcctgcctcggcctcccaaagcgctaggattacaggcataagccattgcacccagcctgtttttccaaatcttgaccaaccaaaggctgttgaactttttcatctctgccaacttgacaatgaaaaaacatgtaattgtttcatttacttttatccatcctctctccatcttttagcctgttgggaatctacacattctttaaatcctaggttaaaaattcatcttcctcacagatcctcccccatcaaatttctcctgtctctaagcatttatagcttttcatttatacagttattacactgctttgaattttagtgactagtctgtatgttatattcctccaaccactgtagattacaaattccttggaagtaaggacctgaactcattcacagaaacactgaatgtagagctaagctaaaattctggagatcatgttaaccaagcctctcgtttttataagggaatattaagcatttgcaggatgcgttacagttcacaaaggcttttctcagacattctattagttatattaactcctccattaaattgtaagggaaacatcgttatcccattttacagataaggaaacaactccagaagatttactgagaaaagtgatttactcagaacagttccaaggtcagaatccagcatcctggcttcattcgctgttacttccacgacatctcagctgcctctggtttccctcacagcacttagcttcacaatctctagggaatgaaatgaccaaaaaaaattgtcgggtgttgacagcagcctgaacatctgtaattaaataaagcaaacatgctgacgaccaaggatgcccgggtctacacacattctttcgcctttctttctggagtcggcagacttgcccccggcagcgaccagcgtccccacccgtgcaggcggcgtctggtccagagggaaacacggctgcgcgcggcccctttaaggctgcgggcggcgcgtgcccacaggcctttcaaatggaccaataaaagtccgatgggcggtccgtcgaggaccaataaagaacgaggacactgcggggtgtgcggcggcccaagcggtttcaaacggcttagagcaggccgcttggttctgacccagctgaggtgagtggtcggtgggcctgccccacccgcgaggccctcgagtgcaggcatcgcgcgcgcagaggagcccctgaatcctgggcggctggaggtctccagacgcgcgccccacttgccccacgaaccc

SEQ ID NO: 7102 - DNA, 2300 bp, Homo sapien
actctggggttgatgaactctttttaaactaagtccatagaaataataatcataatagctctcaccacttacagtgacagcttatggtatgctttccgtatgccaggcatgtgataagccatatatatgccacattatatgtgtgtgcacatgcatatatacatactctcatgtaatttcctccagtcctatgagcaatttattatttacatttaactaaagagaaaatgtaggcttacaagttaagcatcttgccttatgtcagatagctaggaagtggtcgaaatgggatcagagatgctggcagagtgacagatttcttctcagcctcctccctgcacctcccatttacctatctgaaaaggaggcccttagccatcctcagatggtatggggtccaacacctacaaaaggagcctttcagctttccattcctcacaccagcaccgctagaaagttgtcggtggcccctgcctagtgtttctctattcttcctaggggaaggacttcatatcagctacgccattggtggactcctcagtattctgctgattttggtggtgattgcagctttgatgctgtacaggtaacttcagtcttgctacaggggccacatgctcattggtcttcatgagcatgtctgggatctcccgaagctctgcagttcactgaatcaagctctgaccagccttattgcaaggttgggtgcctggtcagggcagcagaaggaaagggtggaaacctaaatacttactcttctccagtcacagcctaagcattttccttattgaatgactgtaacaacccttcggattttctttatagactaggatgctgagtgcacagaggatattacccaaggtcacaaagtaagaggcaaatctaagactgactcttaacatctttgctttttccagtactccctgcttcaaaccactgaaattggaaatgattttccccttatacaaacacagccttttactacaatattggtttgtacatctttgctcagtagcaatcattctggaaaggtagaatgtgtcatttataatctttttatgtccctctttctttatattttcccccaaatgctttaaacgtagcttacagtttgctgctgttgttcttcatcatcatcatcgtaacagttaccattaatggatatatatcaatgtcatgacaacctcgtaacacaggtattattattcctcactttacagatgaggatctgaggctcagaaagtttattttttttaatttttgtcttatttttttgagatagagtctcactctgttgcccaggctggagtgcagtggtgcaatcttggctctctgcaacctctgcctcctggattcaagcaattcttgtgcctcagcctcccaagtagctagaactacaagcatgcaccaccatgcccagctaatttttttttttttttttttttttttgtatttttagtagagagagggtttcttccatgttggtcaggctggtctcgaactcctggccttgtgtgatctgcccacctcagcctctctaagtgccaagattacaggtgtgagccaccgcacccagccagagagtttagattatatctatcaaggtcccagctaataaatcacagaggtggaattgaaacagatctgtctgactctaaagctcagtgcatcagttctccattgctgcataacaaattacccgaaaacttagtgacttaaaatgacaaccattatctcacagtttctatgggtcagaaatctggatgcagcttagctaggtgcctctgcctcaaggtgtctcacagactgcaatccagatatcagctggggttacagtctcatctcaaggtttgaccggggaaggatccccttccacactcactcacatagttgttggtaggattcagctcctcataggctgttggctggaggccttcctcattagtttcttgccttgtgggcctctccataggacaacttacaacatggcaggttgcttctcccagagcaagagcaaaagagaatgagggagggcaactcaagaccagaaccagtttcttggtaacctaatctagtagccatcacatttgcataatcttttcattagaagtaagtcaccagaacagtccacactcaaggggaggggattcttaagggcatgagtaccaggaagtgggagtcactgggatcatcttagaggctgcctaccagactcagtttacagctttcccaggtatcatccccttaaagatctcgactaatttctcatcaccttccctcctaaagacacaaaaaatcca

SEQ ID NO: 7103 - DNA, 2300 bp, Homo sapien
aaaaattctaatgactgtgttttccatttatattttataaaaaataatctgggccaggcgcagtggctcatacctgtaatcccagcactttgggaggccaaggtgggcagatcacatgagtccaggaattcaagacaagcctgggtaacatagtgagatcctatctctacaaaaaagtttttttttaattagccaggcatggtggcccatgcctgtagtcccagctacttgggaggctgaggttgggaggattgcttgagcccaggtttaggctgcagtgagctgtgattgtgccactgcacaccagcctgggtgacagactgagaccctgtctcaaaaaaaaaacaaaaaacaaaaaataaataaataaataatctggaaatacatatgtgaataaagaagaagggaatatcctatacctatatataatttactcttaatgttttgatgtctatcttttctagacatttttctaattagaacagtttttttttttttccactgcaacatactggtctctttatttttaatatcatcagtagcttacaaggtagttaacacttgatttcaattctgaaagcagaaacataataatgatcccaaataaaaactttagactcaatgtccctaaagttacaagatttgcacatgatcaaattcatatgctgtgtgcccccattctctgtttttactacagtttgtaaagaaaaggaaacacccaggtataaacatgtgcctttctcactaacttttaagtactatcagtcattattactctcggattttctttaggtttatttagaaaacttttgaccccgctcggaccttttcttattgtcagagttctatttgaaaattcagtgcatcttggttccaaatgctcttgcaagtagctttcctctggctgtttaggagatgcctttgattgcctgctcataatgtaccacaaagaagtcaccttctgagcatttcaagttagttatctgagcactccctctggatgtcttgcatattcccttgtgaaagaatgaagagaagaaaaacattttttgaccttgggatatttagctcttgtgataatttttatccaatcagattggcttggctagcagctgcttctgactcatcctggtagtttaagaaagcctaatattgatgtccttagtattctttctgcagacttccaactcactcccaaacctgcttctcatttttaaaggtacatattttataacacacttaaacatggtataacggcttgaaaacagtgccttgcacggatttctctccatttcctgttgttgccctctccatgcttctgatgtcttccatcttgtacattctcatacctgaaagcccccacttacaggcctttccccctttcctggaggaaggcatgaccttcactgagtatgagtaggcttcacatccagttttctgtgccccacagatgctctgaaagggatgccaggctgggcctctgtgcacgttccaatgacgctgttcctgctgctccaggtaagccctgagtaccccactgttccggaaaagaagatgtaatgaatctaagtctccactgatatctttcataaccttcattgggactctggggttgatgaactctttttaaactaagtccatagaaataataatcataatagctctcaccacttacagtgacagcttatggtatgctttccgtatgccaggcatgtgataagccatatatatgccacattatatgtgtgtgcacatgcatatatacatactctcatgtaatttcctccagtcctatgagcaatttattatttacatttaactaaagagaaaatgtaggcttacaagttaagcatcttgccttatgtcagatagctaggaagtggtcgaaatgggatcagagatgctggcagagtgacagatttcttctcagcctcctccctgcacctcccatttacctatctgaaaaggaggcccttagccatcctcagatggtatggggtccaacacctacaaaaggagcctttcagctttccattcctcacaccagcaccgctagaaagttgtcggtggcccctgcctagtgtttctctattcttcctaggggaaggacttcatatcagctacgccattggtggactcctcagtattctgctgattttggtggtgattgcagctttgatgctgtacaggtaacttcagtcttgctacaggggccacatgctcattggtcttcatgagcatgtctgggatctcccgaagctctgcagttcactgaatcaagctctgaccagccttattgc

SEQ ID NO: 7104 - DNA, 2300 bp, Homo sapien
acttcttaatcccctgacattgaaagtatggggactgcctatcctggatttctttgggacaactgtactggctctaccacaagtccctagttttcagctggaaaaaaatatggtctccagaatcccaaggtcattcccaacagatttaaaagcaagtcttcggccaggcagagtggctcacgcctataatcccagcactttgggaggccgaggcgggtggatcacctgaggtcaggagttcgagaccagcctgaccaacatggagaaactccgtctacgaaaaatacattagccggacgtgatggcgcatgcctgtaatcccagctaccctactcgggaggctgaggcaggagaatcgcttgaacccgggaggccgaggttgcagtgagctgagatggcgccattgcactccagcctgggcaacaagagtgaaactccgtctcaaaaaagaaaaaaaaagagcaagtcttcataagcaacatatatgaaaccctgagaccaaccaaacctgcattaggaaatgagaggtgggaaggaggatgctggggaatcagcctctacttttgacgttttttcctccttggattttaggctgtggtaactgatcgaggccagaaatgttgacagtcttgcctagccccaagatcatgtaagcctgacctgacgctactgccgccttcagtcagcaagaagaactacacacccagaaaatgcttcagtaatagttaccatggtgatgctagttcaaccacattgcatctggataaaaatttcaggcaaaacgatatagaaaactactgcctaacaaggagttaacaccttacatcttttatgttgttgttgttgctgtcgcaaagtatggttcatgttagctttggtaaaagatggtaatttgaagtgaaagtactgaaaaaaacaagcaaggatgaaatgtcaatgtatccatttagagaaatctaataaccactttgcactatgccaaattactttcccctcagctaacagggggcatttgggtcttcctgactctatttactggtgaggaaagtgagttaatgaaatccatagatgatccaagcccaagaaatgctggcatatcagctgggagggaaaaaagcgatatactgggccatcagaaagttgggcatttgggcaaaaggaacaaaacaagattcaacctggaaaaatggaaggtggtgaaattaatccgtattattaatatgcattagggagagtagaccacaaaaggaaggaagactagagacaagtttatgattttatgcagtaaatcaaaagttaaatctgagggaaggacctacagactggggctggaaggaggctgagggctttgtgggagtgcagctgcccatgaggactcctttcctgaccccctcccttccttgtcaggatcagaaagtcaaagaaggtgaagaggctaacaacagtgatttacaaagacagcaaggaggaactaagtctgtatgggccgaatctgggcctctgagctggagcaacaggacccagacaaccatctcaggaaatgagtgaatgaaaaggggcgggggggtcggtgaattatttagccctagaacaacgctgcctagaccgggggaggccagggagaagaaaatctccgaaaaggaattttgacagtgagaacgccagttaagatacagcactccaggccccctgatgtcccttgtttgatgtcaataaagacccaagaggattatgcatccacaagccttgcgtattcgcagacatcaaaaaagtctggacttggggccggtaggcgggggcagggtcacgtccaggcgacttgggtcagctcaggtgctcgtctgaagcatagagctggagtgagcgggggcgagacttgctgctaggataattttttttttttaagttagggaaatttaagcagtagtaatagcgacagggagggggctctctctcgggccaggaatgtgggggcggcctgaggaggagcggggccccgcgcaggaggcgccggcgggtggggtcgggggaccagggagccggggccgagggcgggaaggggccgggccggcgctgggggcgggcccaggcgcggtggcggtggccggggctgcggcgcggggggcggggcggtcgggcccgggacaccccctcccggtcccctggcggggcagcgtcggctctggcagcactggaggcggcggcggcccgagggcgacttgcggggcgcgcaggccgccgtgcacccgggacgcttccccctcggggaccctccgcgggcttctccgccgcgccgtccg

SEQ ID NO: 7105 - DNA, 2300 bp, Homo sapien
ctaaaaaaagagactgtgtggtttagtggtcagaccactggcctggatgttgggatagctgagatccagttgtagctctaccactatgtggctgcatgatgctagacaagtcactagacaagtcactgttgtgacttgtgcctcagtttccctagttagaaaatggaaaagtgccttagaaaggttttttttttttttttttttttttttttgagacggagtctcgctgtgtcgcccaggctggagtgcagtggtgcgatcttggctcactgcaacttctgcctccccggttcaagtgattcttctgcctcagcctcctgagtagctgggattacaggcgtgcgccaccacgcctggctaatttttgtatttttagtagagatggggtttctccatattggccaggctggtctcgaactcctgaactcgtgatccgcccacctcagcagaaagtttttatgaggacaaataagattatttgcaaatagctacaagttgcttgggaataaagtaaaattatcacttaataattactatggtattaccttattaataaaatagtaaaaagccacagttatggaacatatgaacctcccataacctcaagctagatgggggaagcagataagaaggcaattaaaaaaaaatcagatttgctggacttcacaccaaataccaaattagtaaatttgcctcaagacactaagccctgctcctactttggctctgtccttttaacctcaccacatccaaacttagagtgactcacaggagcctagaattgagacacatatacaattttaagggaaagcaagaattaggaggtttgaggctccttactggaggacgctaagaataggccactcggaacacaaagagaagaacctcctctttccttttcctcccagtgtaggtggtctactggtttcccagtcattcctttgatagcttgattttgttttctttgtctctttttcacaaacctcaccttgttggagggggagggcactaaaaaagtgaggacagagtggctttttctgctatgtctgaactgtgtctagtgctacagatctctgacctgttgtcaggagtggagaggggcgaaaagaaatatttaggaacttgaaaaccagtgaatattctcttaaagaagaagtgagcaattgggcatatagggaaaaaaatctaactggtgtcctcgtttctgcagcccctctccctcaagaagagcaatgtcttggtaggaaaaaggaaagacacctgggaaaggtaccaaatagtaagggctaggaatagaaagaagaaccaaagataaaaaggaattgagcctgggcgcggtggctcacgcctgtaatcccagcactttgggaggcctgaggcaggcggatcacctgaggtcggcggatcacctgaggtcaagagtttgcagaccagcctcgccaacatggtgaaaccccatctctactaaaaacacaaaaaattagccaggcggagtggcgggcgcctgtaatcccagctacttgggaggctgaggcaggagaatcgcttgaacccgggaggcgctggttgcaatgaaccgagatcacgctactgcactccagcctgggcgactgagtgagaattgagaagaaatggcaattagttcagaggacttaatgagtaccttttgtgtgtccagccgtcataggcagaaaagacacatctctgacctctagaagcatccagggtatatgcatacgtaagcactttgtagcaatttaagatagtaaataccaaagagataaaaatagctaatgggatactaagtgtttatgggggccaaagggcgggggctattactgagttaggataaacagtgtataaaagcagggatagttatgaaattcagaaactgcgtatatgggcggctgacagtaattcttcgacactgggaaacataacggattcaaaagaattcttcatctcagattcctctaaaaccaagtcttcaagaatgggagtccaaagaaacctggaccatcgtgaagcgactgcccccggaacttgagtggccagctccactttgcgacacggagactgtttgtgtgacacctcctccagctcccgtcccccttccgccgcgtgggtgccatggcaacggagagagacggcaacctgggttccggaagccggagagctggagctttgaagccaccccggtcaaaggatgctgagtccggagcgcctagccctaccggactacgagtatctgggtaggaaccccctttaactttggggagggaaagacgtgcagacgaatt

SEQ ID NO: 7106 - DNA, 2300 bp, Homo sapien
ccgcctcccagattcaagcaattctcctgcctcagcctcctgagaagctgtgattacaggcatgtgccaccatgcccagcttatttttgtattttagtagagatggggtttcaccatgttgcccaggctggtgtaaaactactagcttcaaatgatctgcccgcctcggcctcccacagtactgggattaccggtgtgagccacggcgcccagtgcttggattacgggcgtgagccacatccagccagagcataacattttaacttgaaaggacattgggtctccctcctttccctgcttcagtcacataggaatgactgggttaatagatgactgggttaagggatgaccaaggggttaaggcatatgaacagttttttagcagtgcaacaattgtttacttaaacccaactcaccctatttatttatttgagacagagtttcaatctcgttgcctaggctggagtgcaatggtgtgatctcagctcaccacaacctccgcctccggggttcaagctattctcttgcctcagcctccacacctggctaattttgtatttttagtagagacagggtttctccgtcttggtcaggctggtctcgaactcccgacctcaggtgatccggctgcctcggcctcccaaagtgctgggattacaggtgtgagccaccatgcccggcccaactcagccctattgcaaaataatcactccttggggttcttctagctaaaagctatagatattttttaatgaattgatttaaatcaaattagtccttaaagtgtccttgtggagcctgacagaggaatgagaggcatcaagagttgtattgtattgcctgccaaccctagaccccttttctttgagaaacgagacagcaattctaggtcttagtgcataaggccagtctttgtgctttgaggtgcttttttttttctctctgagacggagcctcgctctgttgcccagactggagtgcagtggtgcgatctcggctcactgcaagctccgccccccaagttcacgtcattctcctgcctcagcctcccaagtagctgggactacaggcacctgccaccatgcccggctaatttttttgtatttttagtagagacggggtttcaccatgttagccaggatggtctcgatctcctgacctcgtgatctgcccgcctcggcctcccaaagtgctggaattacaggtgtgagccacggtgcctggctttttttttttttaataaagagtaggatgatgaagaactcattctttgatgcagttatgttcatttccctggtgctggggcatttcttcatccattcctttgctttgtgaaccccatcagtgaaggatggggttcatagtgcacaaggtagggagttgttcaggacagagaccactggcatctggtgcacaatattaaaattacaacacgagccaggcacagtggctcacgcctataatcctggcacttttggaggccaaggcgggtggattgtctgtactcaggagtttgagaccaggctgggcaatgtggcgaaaccctgtctctactgaaaaaacacaaaaaatcagctgggtgtggtgacgtgcactgtagtcccagctgctcgggaggctgaggcacaagaatcgcttgaacctgggaggtggtggttgcagtgagccaagattgcaccactggactccagcctgggcgacagagtgagaatctgtctcaaataaataaataaaattaaattataacaggcaaaccgtcactggccagggaactcctacgtggaataaacaaagctgatgtgtaaagaattctgaggtgtgcttcacaggtcaccacacacagctagccttctgttggggtctggcccagccctgtgcttgggtaaggacagaaggctctgggtgacgctccgtgaaggagaacccagttgctgggcattgtctcttgtgcggtgatgctgatgcctatcctttggtctcatgcctggctctgctttgctgcgcagctctgtctcccactccgtgctgtctgagatgcaggtgattgagcaggaaaccccagtgagtgcaaaatcctctcgctcgcagctggacttgtttgacgatgttggtactttcgcctctggacccccaaagtaaggctgttttctagctgtaaacttggctgctgtgttcctcatcaggcttctctgagccactctactgtctccctaggtacaaggacaatcccttttccttaggggaaagctttggctcccgctgggatacagatgctgcctggggtatggacagggtagagg

SEQ ID NO: 7107 - DNA, 2300 bp, Homo sapien
cggagccctgatgaggttaccctgaccagcattgtgcctacaagagatggcaccgcacccccaccccagtccccggggtccccagggtgagagccaggagcgcggctgtggcaaagaaacagctctgcctcccgccctcctttcctttctccttggtttcatttctttcacacctgaaatgggttgaaaattggtgccagggacctgagggcctacttagtagttgtaatgatactggttctcatagtggtttagatttgctgggcatttcccacattccctctcgtttatgccttaaatcagctgcgtgtggcaggaattgcctctttgctcacagtcgggcatggcgaggtagagctagaatctttagtacctcacctgactctcccaggtgcctctgggggtagggaggcctttgccctgatcctgggtgagatctccagccccgtgttccttgcactctgagctgctccctttgcctcccctctccagcacggggcaggatgaggagtggtcagatgaagagagtccccggaaggctgccaccggggttcgggtgagggcactctatgactacgctggccaggaagctgatgagctgagcttccgagcaggtaccctgggacccctttcctagcttcagcctctgccttatctgcctgagcaggggtgtcagaaagggaagccaaatacccacttcttaagggccagtcctctgtcccttcagctgttccaggtccagatagctggtgcctggtggctgcattcagggtctggggtggggcagcttgctgaccttgacctgcctctgcctgagccatgtctttgctagctgggctctgggaccacaccatccccctcagtccttgacccagttgcaggaacagggcctgggccagggccactggcagtgaccaatcccctttcccccaggggaggagctgctgaagatgagtgaggaggacgagcagggctggtgccaaggccagttgcagagtggccgcattggcctgtaccctgccaactacgtggagtgtgtgggcgcctgagtgtcctgacagcccttctgcaacgtttacccaccctggttcagagcccagcttctcctggagagccggaccctcagggccctgaaccgtcgctctctggctgctcctctgtcccttgagggaggaagtcctgggacccagggaggggaggggcctttgtctagggaagggactggtagggaagggacgagtctaggctgagggcaagatgggaggtcagaggtgacagaagcgttcaggggtgcctgggcctccccaggagctgtggactcagttcctgacctctgctttggggttcctggggtgggcttggggtgagtgtagttctggcctagcagcaccctcttgtggcttgttctagcgtgtattaaaacttgacacacacccacacacaaaaacaaaaacaccactgtcgggctcatgtgcatttttttgataggacacccttgccaggccaccagagggcatctagagagaggcctagcgtctgttatggggccggggttggaaaagggtttgcctgcttggtacctgctctggaacttcgagatactaatctggagtggaggggactcgctgtcaggcttgctgttaaccgagaacggctgaaggctgggcgagacgcgggccaatgcgtctgcccgttcgggccggagggacgaggagtgtttgggcagcctaatccttattcatcgatctgtaattagctggagtgggggtccccgcccccagcctcccgcagcctgcgcggcgtgggggcgactccacctgggggttgcggcgtgggaggggcggggggaagggtactacgcgcgcgaggaggtttgggccggtccgcgcgccgtcgccccgccccggctgcggattggcccggcgcggcgttgattcttgcggccgcggttgtcgtcgccgcccccgtcccgccggctgcccattggtccagatcggactccaatcaccccacccctcggctggcccaggcaccgctgaggccggcctggtgagcccgccctccccgccgtggattggcccgcggcgggacccgtcagccgcggttgtgtctgggaaggagagaaaatggcggcggagccgaacaagaccgaaatccagactctttttaagaggcttcgcgcagttccaaccaacaaggtgcgtgagcagggggcgcgcggagtctctcgtcccgctggggcctgagggagggagaagggcggaggtgggttatgtttctggggtgtcggtgcctggcct

SEQ ID NO: 7108 - DNA, 2300 bp, Homo sapien
aatagagataagggacttgtccaagccctaagagagagtgggtgttgaaattggtctcagaaaccacatcccaggtttcagattcactactcagctatgatttgccaaacacggccagaatcctcaggccaaaggtggcgcgccttgggtgccccacaggtgtcttggggaggcagttttacccttccattagcactgcccagcaagtgagccctcggcaggcaaaattacccccattcattttctccaggtccctttcccgttttgtgagcggattcatctgcgtaaagaacgcgtcagtgattcctcctggatttagaaacaacataattttgctatttttaaagctgccgtttaaaactccgcgcgcacgcactcacactcttcagggagctgagggtgggaggaaaagtacgagcttcagagggcgcagccaggcgcctcagcttcccagggctcagagccgcgtccctgggggcgcactcctctgagagcgccggggctctccgacccgctgcgattctgcgcgcccgggaccttctgcgtccgggaccttctgcgcccgggcgttcgaccccgttggtccgcgctccccctggtcttcaaggctcagggcaccgccgctgggtcaccgggcccaggagagagtgggaggggcggagaggccgagcaggtggcgattaggtcagcttcggaacattcttggaccgctccagtggatataaataacagacggagccgctctgcaaaatctcacccccgggggaaagcggggagagggaagtagggagagaggagggagaagggatttatttagcgtggggtggcatcgtggcgatatggaaaaatgtaccagactgataaagggggtggaggggcgaagggtaagaatgaatcgtggtacaaaatctggaaataagaactcggagcgggaggagcttaggcctttttgtcccacccccaccgcgtgttcgtctcaggccttagaaggcgccccagattagcagggcagctgtggaacggtagggcacggttttggagtcccagccctgcctgactagagggaaatcttgggcaagcctctgaaaagcccccgagcctcagtttttgcatctgtacagtgggaatcctaatgcttacaaggggtggttgtgagcctcgcctgagccaatttctaaacaagctgtgcagctaaaaatgtaaggcagtgtaattcccccggcccctctccaaggctgcccgtgccggcccggtcccttcttgctccctcgggtctcccaggctctgcaacggtccgggagaggcaaagccgaaatctggctccctgcggcaccggggcgcaaccctggggagcccgcccaggcactccgcacacgggcgaagcagagaaacctcgacccgcgccacaagagccgctggtcgccgcgatgcctgcagccccgctgccccgccgcgtggggttgaggcagcggcggccaggagaggggcggggccgggggccgggggccgggcttcccgggggagggcccggcgcgctccgggaggccgcggcgcgggcccaggagcggcaggactcgggccggagcgtggccggacccccacccgccgaggggcccagggaggacgcggtgagtgccctggaggggacgcgcgggtaggcggcggcgggtgcggtggctcgagcccgccctctcctgctccggcttctgaagtttgcaatggagccgactcccgcccagggagcccccggccaccccgctctgcgtgccgacgggaagggccgtagccgcgccgaggggccgtcccatctgcggtgccgcgggcttcgcaattccgcaggccgcccgggggaggcggcgccggcgctggagggctgagccgtcttcaggggcccctcgagggcccccgtccgctcgcctcgcgcccgccccgaggccccagagggtcctcgctccctggcgatccctcgccctatgcagcgagccccgattcctgggtccgctgcccggggccaccatctggagcccacggcaaggccggcccaggcagggggcgtcccctccccttggcggtgatcagtggccccacccccgccaagaccaagttcaacaagtttggccaagaagtctagagcttcggtggctaggcctggccctgccgctccgcgtggctccacgggctccgagttatgcagctccgggcggcaaggggtcctgtcgaggggcgcggtccataagggttgaggccagaggcgcgtagcctctgggcgccgagctctggagtggaggctggggttcgga

SEQ ID NO: 7109 - DNA, 2300 bp, Homo sapien
aatgggagccctgggggtagcattagcttggagctggctttccaaaggcatgtctgtctactttcagcttagaagcagccccctatgctctgggttttattttgttgttttttttcccctacagtacctcaggggcaattaagatcagctgcaacatttctgctttctgctcccagacttgagcccaagggaagccagatgttttccagtccacatccccttctctttgtggtctgatgaacagccctgttttctgagtctctctatggcctggctttcccagatcccacagcctggctgccaactttatttttaatgaggttttaataggtggctcctgtaattaatttcattcttgtgttttcacacttcggtctaggtgcctaaaggccttcaggcgctaggagggatgttaactgattttaaagaatacaaaaccctgtggctgtgatttgccattttcccagctcctctgatctgcagttgttttttacaatcattaattagctggggctcatggctcagcggaaggtcagctggtcacctgtcatgttttatagaggtagaaatagagataagggacttgtccaagccctaagagagagtgggtgttgaaattggtctcagaaaccacatcccaggtttcagattcactactcagctatgatttgccaaacacggccagaatcctcaggccaaaggtggcgcgccttgggtgccccacaggtgtcttggggaggcagttttacccttccattagcactgcccagcaagtgagccctcggcaggcaaaattacccccattcattttctccaggtccctttcccgttttgtgagcggattcatctgcgtaaagaacgcgtcagtgattcctcctggatttagaaacaacataattttgctatttttaaagctgccgtttaaaactccgcgcgcacgcactcacactcttcagggagctgagggtgggaggaaaagtacgagcttcagagggcgcagccaggcgcctcagcttcccagggctcagagccgcgtccctgggggcgcactcctctgagagcgccggggctctccgacccgctgcgattctgcgcgcccgggaccttctgcgtccgggaccttctgcgcccgggcgttcgaccccgttggtccgcgctccccctggtcttcaaggctcagggcaccgccgctgggtcaccgggcccaggagagagtgggaggggcggagaggccgagcaggtggcgattaggtcagcttcggaacattcttggaccgctccagtggatataaataacagacggagccgctctgcaaaatctcacccccgggggaaagcggggagagggaagtagggagagaggagggagaagggatttatttagcgtggggtggcatcgtggcgatatggaaaaatgtaccagactgataaagggggtggaggggcgaagggtaagaatgaatcgtggtacaaaatctggaaataagaactcggagcgggaggagcttaggcctttttgtcccacccccaccgcgtgttcgtctcaggccttagaaggcgccccagattagcagggcagctgtggaacggtagggcacggttttggagtcccagccctgcctgactagagggaaatcttgggcaagcctctgaaaagcccccgagcctcagtttttgcatctgtacagtgggaatcctaatgcttacaaggggtggttgtgagcctcgcctgagccaatttctaaacaagctgtgcagctaaaaatgtaaggcagtgtaattcccccggcccctctccaaggctgcccgtgccggcccggtcccttcttgctccctcgggtctcccaggctctgcaacggtccgggagaggcaaagccgaaatctggctccctgcggcaccggggcgcaaccctggggagcccgcccaggcactccgcacacgggcgaagcagagaaacctcgacccgcgccacaagagccgctggtcgccgcgatgcctgcagccccgctgccccgccgcgtggggttgaggcagcggcggccaggagaggggcggggccgggggccgggggccgggcttcccgggggagggcccggcgcgctccgggaggccgcggcgcgggcccaggagcggcaggactcgggccggagcgtggccggacccccacccgccgaggggcccagggaggacgcggtgagtgccctggaggggacgcgcgggtaggcggcggcgggtgcggtggctcgagcccgccctctcctgctccggcttctgaagtttgcaatggagccgactccc

SEQ ID NO: 7110 - DNA, 2300 bp, Homo sapien
attacaggcttgagccaatgcgatggcctaccattaatgcatttttgtatatctcctcccacccccacaaactgtcaggcacggggcttagtgggtggaggaaaggcccagcaatgcctgagtaagcccaactcctgcctgcctcttcgcagaaactagggtgcatccaaactgtctcttctcaggctaggcaggacagcgcggcctcacctgtgaaccttcaagacttggactttggctgaagcgagggcgtaggagttctaagtaccgctggctgcacgccctctggcccatcacgtcccaggctgctcctaggtggacacccaacaggttaggcaagtcttagttaaaagcagtgagaggccaagaggctgggcatggtggctcacgcctataatcccagcattttgggaggccgaggcaggcagatcacaaggtcagaagatcgagaccatcctggccaacatggtgaaaccctgtctctactaaaatacaaaaaattagtcaggcgtggtggtgtgtgcctctagtcccagctgctccggagactgaggcaggggaatcgcttgaacccgggaggcggagattgcagtgagccgagattgtgccactgcactccggcctgggcaacagagtgagactccgtctcaaaaaaaaaaaaaaaaaaaaagcagtgaggaggctgggcacagtggctcacacctgtaatctcagcactttggcagaccgaggtggatggatgccaggagttctagaccagcctaggcaacttagggagactctgtctctacaaaaaatgcaaaaattagctgagtgttgcggcgcgcacctgtagtcccagctactcgggaggctgaggtgggaggatcgatgtccaggaagtccagcctgcattgagcccacatcctgccactgcactccagcctgggtgacagagagaggccctgtctcaaaaaaaaaaaaaaaaaaaagaaagagagaaagaaagaaagaaaaaataaaaacagccaacgaccaaacaaataaaagagcagtgagaaccagacacggtggctcatgcctgtaatcccagcactttgggaggcagaggcaggaggatcacttgagcccaggaggtccagaccaacgtgggaaacatagcaagaccttgtctctacaaaaataaaaataaaaaaattaggcttggggatacaggtctgcaagcctacttgggaggctgaggtgggaggatcagtgaaacttgaggtcaaggctgcagtgagctgtgattacatcactgcactccagcctgggtaacggaagagagacactgcctctaggaaaaaaaaaaaaaaaaaaaaaaaaaggcaaggagttccaatcattctcccttcacagagaagcagcttggattcgatgggactgtagtttctggaatccgactgcaaagctgaccgctggtagagcccagcttctaacttaggaaaggcactagctctctacaaagccgccactccccaactacaccctgtagggaccagccaatcccaaagcccgagcgggcgtcatcaccaattgcaaggcgggagacagagccttggctggcaccgggcctcctccccggacccgcagaggcctggcagcgccgcgtttgaggagggttcgtgtcaggaagtcaaggctggatgatcgcttaagcccaggagttaaagaccggcccggacaacaaagcgagaccccgtctctccagaaaaagaaaaaaagagagagagagagagaaattagccgggcgtggtggcgtacgcttgtagtcccatctacttaggaggctgaggtgggaggatcgcttgagcccaggaggtggaggctgcactgagctatgatcgccccactgccctccagagtgagcgacagagccagaccctgttgctaaaaaaaaaaaaaaaatccataaagccggggaccatctttgctccagggaggtcagctgacccgggctggcactggccctggcgcagttcccgcccctcccgggagcgctggcaccgccccttggcaccaccccctccccgcgcccccgccttccaggaaggggcggggtctccgagacgggtggggccggagctccaagctggtttgaacaagccctgggcatgtttggcgggaagttggcttagctcggctacctgtggccccgcagttttgtagtccccgccttgtttctccccagaggcctctcaatcctccctccatgatcttcgcatagagcacagtaccccttcacacggaggacgcgatggctcccaagaaacgcccagaaa

SEQ ID NO: 7111 - DNA, 2300 bp, Homo sapien
cagtgagccaagaccatgtcactgcactccagcctgagcaacacagcaagactctgtctcaaaaaaaaaaattttttttgaagagcttattcagagatagtggctcatgaaaagggaggaggaaactggggaaggacaagctcaggacagagctgggccttaagagaacaataacaatgtctatggattcttgatacggctgaggctgacagtggtaatcagaggaacagcttcccccattcctggggtggggcgaagactcaaggagcaggcacactcaccagtcctccctgatgtgccctaggaatatagcacgacctggcgcagcagacagggctcaaaaacctcatcttgatcaagaaaagacaagccctctctacgcatgtcttccccgctgtctttcatcttggccctgtctggtttatcattagatacccccacaacattctaagctccatgaagacagagatcatatctgtatggtgcacaactgaatgcaaagtgctagcacagtccttggcctttaataggtactcaatgtcttggatggaaagcctgtgatttcacagtcagaaaccactttgccaggcccgcccttaagtccgaatttggatgcttaatcaaatttgcctcatcccagccaagcaggggcaactcagctcctagggctttgttccagacagctctcagatgtcttttcctgtagttgtgaccaaaaatacaagaaggaggccaaagtgcccagcctcagccttaggctccctgagggcaaaagatgagggcagcataccttgttccccttgcctctggagctcccaaccttacctcttgccggtgataagaggtgtttaggaagccgtgatagcgctgccgcagggcctggcccagttcccagtgctgtagcatcccctcctgtgggcaaacccaagggttaagagggtctagagggaaggggtggcttcaagccccatggggtttaggccctgttgctttccaggttcacgctttgctggagtcaattaatctgatcccagaagtctttcattaagtggccagtcatgcacagcaatatcatgggcacagagattaaggttatgaaatctggtcaaagtcagcacccatatgggaaaaggcagtttagtaggaccccaagttttgtagactgctctagacgtcgctcattctgcagctcatcctgaggaaaggctggcttctgacccaccttggttaactgaccaaacccctggggccattcttcttcctgataggggtccttgggatatgtcttcactggtgaacggtctccatggcggtacagctgagagaataaaatggtttgcctataggtcagaagcatccccttgatagggacccagagcctaccttttgccccatgttagggaaggaagtctcattccctctgggaagcctactggctgcaaaagaccccagctaggagtcagtcacttcttccagattccagagattctaacttagctaagcaatgctactggagaccataggcaaagccaaggtacaggtaggaagggaaaagagaagtgaaagcaacgtatgtggtggggacaactggggaaaaaagataaccaaaggcttctttagggatgagtcttaaccattcaaccacttccctgtctcaaggcagactcaccccgacgtattcggtcatcctgactcccataagccagggctccaggtcaatcctgaatccagcctcccaactacccaggccagtcgtcccctcctaaaccagctgttccttcccgagatcctcgacctccaccagctggcctttgcccttttagcttcagggaagtctttggtgagcccatctctcattaccaaggtaacgaagcgcagactccgggcccgggtgggcggcatcaccaccaggttcacgccgagaaggagctggaggagagccgcccggctccagccggaccgcttgcccgccatcaccgttgtaatctatgcagcaaacaagctggaacccgctgggtggcacctgcaagcagccgcccggacgcacccgtaaggacacacgccggaagtgcgttcgccgccatcttacttagggacctgctggggtgcggggaaaaggcgcagtctcggtgggattgcgtgcaggagggtcgtggtctggctgtggcggaggagcataagaaggtaacgcgacctggcgcggcagacagggctcgaagacctcatcttgattaagaaggccacaaattcgcgtttgcctctgctcggagaaatcccttaccaaggtggcacttgcagtg

SEQ ID NO: 7112 - DNA, 2300 bp, Homo sapien
gccgggattacaggcgtgagcacgcacccggccaaaacttgacttttaatccattctcaaactgtgcccatgcccaaactgtgaatttgggcaagtcacttcctctctttaggtttgtttcctaagctgtaaagtaagaggactaggttaaatcaggtattcagagatgctgatttatgaaacctgtaataaatggtctttgtgaaccatttgggattatatgcaaaattccatgtgtgtgtttatatgtgtgaacatttttctggaggagaggtgcaaaattttcatgtgattcataaaggggcttgtgattaaataagaaggttaagaactgtttggctacccaggctttggctcttactctatttgcttcttggcctcctccatgacaactctggaagcaaagtttaaatcctgaagtatatataaataattgaatctggagtcctaggacaaaataaagacagataatcctgatctttttttttcttttcttctttttgagacacagtcttgctctgtcatctagactggagtgcagttgcaccatcatggctcactgcagcctcaacctcctgggctgaaggtgatcctcccacctcagcctcccgaggagctaggaccacaggtgtgtgccaccacacccagctaatttttaaacttttttttgtagagaggagatcttcctaagctgctcaggctggtctccaactcctgggctcaagcaatcttcccaccctggcctcccaaagtgctgggattagaaacgtgagccaccacaccaagcctaatcaggtttttgttgttgttgttttgagacagtctcactctgtcgcgcaggctggagtgcagtggcgtgatctcagctcactgcaacctccgctttccgagttcaagcgattctcctgcctcagcctccagagtagctgggattacaggagcacgccactgcacccggctaatttttttttttttgtatttttagtagagacggggtttcgccacgttggccaggctggtctcgaactcctgacctcaggtgatctgcctgcttcggcctctcaaagtgctggtattacaggtgagccacggcgcccaggccaagcctgatcagttttgtttcccaaagatctgaggagatttgcttccagtaggcagatctgaatcaaagcatccccaggacctatgatctgacctgcaaccgtcacaggagtcacaaagtcctgaggccaaactggctgcacctgaatcctaatggtcaatgccaagagggccattgattctgtggaaaccccacctactcccactttatgatatgcgcctgtcccttacctcaaaatacctccccactggtctgaaattcctcccccagggattcagtgctttgggtttgtaaagtctgaacatcctgtgcaacccaactcctttgggaagaggcatgacatgacgtcttgactctaattaactaaaacttggaagtggaggggagggaggacagggaaaggactggaagggaaagtgagagggctactgaagctttgtgcagggcaggaacggtaggccagactggggcaacctcaaggacacacggagtccaaagggttgtttacatactgtgtcctgcaccccaagcaaaacatctcctggagaacagggccagggctcaatctccccacaaaggcaggggcgtggagagaagcgacctctactttcccatccctcgcctcaattctgcacccgatctagctatggggtcaagcctggaggggacgctggttctccagacatggtcccgcccactgcaagtgccaccttggtaagggatttctccgagcagaggcaaacgcgaatttgtggccttcttaatcaagatgaggtcttcgagccctgtctgccgcgccaggtcgcgttaccttcttatgctcctccgccacagccagaccacgaccctcctgcacgcaatcccaccgagactgcgccttttccccgcaccccagcaggtccctaagtaagatggcggcgaacgcacttccggcgtgtgtccttacgggtgcgtccgggcggctgcttgcaggtgccacccagcgggttccagcttgtttgctgcatagattacaacggtgatggcgggcaagcggtccggctggagccgggcggctctcctccagctccttctcggcgtgaacctggtggtgatgccgcccacccgggcccggagtctgcgcttcgttaccttggtaatgagagatgggctcaccaaagacttccctgaagctaaaagggcaaaggccagctggtgg

SEQ ID NO: 7113 - DNA, 2300 bp, Homo sapien
ggctggtctggaactcctgacctcaagtgatccatctgccttggcctcccaaactgctgggattacaggcatgagccaccgcaccctgcatgatctgtagtttcaatcccacaacaaccttgtgtggtaaaaattactattatccctattttatttatctttctttctttttcttttttttattttgagatggagtctcagtctgtcacccaggctggagtgtggtggcacaatctcggctcactgcaacctcccagattcaagtgattctcctccctcagcctcccgagtagctgggattacagacccgcatcactatgcctggctaacttttgtatttttagtagagacggggtttcaccatgttggccaggctggtctcgaactcctgacctcaagtgatccacccgcctaggcctcccaaagtgctgggattacaggcgtgagccaccgtgcccgttctatttatttttcaacacaccattgctggctcaactattcttattttaaagatagggaaacaaagattcagagacgttaagtaacttgctcaatcaagatcacataggtaataagaggtttaggatttgaacccaaaatctgagcccagagtctgaacgctaaatcaacatgctgagttgaaattgactacagcagttgtgatggcgtgtgcctgtaatcctagcactttggaaggctgaggtgggaggatggcttgagcccaggagtgtgaagccagcctgggcaacatagtgagaccctaccccaaaaaaggtaaaaaaaaaaaaaaaaaggaataataaaaaaaattgactagggctaataagtacgggatagacgagaataatatttcttttttttttttttttggggacagagtctcgctctgtcactcaggcaggagtgcagtggcgcaatctcggctcactgcaagctctgcctcccgggttcacgccattcttctgtctcagcctcccgagtagctggaactacaggcgcctgccaccatgcccggctaattttttgtatttttaggagagacggggtttcaccgtgttagccaggatggtctcgatctcctgacctcgtgatccgcctgcctcggcctcccaaagtgctgggattacaggcgtgagccaccgcgcccggccgagaatatattatatttttcttgttattcattcaacaaataggaacacagtacctactctgttgccacatctatgccagccctgtttcaggggtgttgggggagatgaaatcaataaaatatgatgtctactttcagggatggatttcatgccccaggcagcagagtaggaagaatgactatagtctcagtagctgctggttggagcctgccatcacttcagatggggttgttccccagaagaggcaacccgcataccttcccaggtccatcctgggctgccacctgagttgcctgtcttccttctgccacctccacccctatcccaggcctgccactgctcatagcagatttcctatcaaaggctctcctggcctcctctcttatctgtggcccccgcagggcacccactttcagaaactccctggaaggcccagcacctgcctctctccacccctggatttctaccagcttggctgaggcctggggctagtggggagagcttcttggcctcttcccagaggcaagggaggaggagggaggctgggaaagccgctggggctcagtgtcgcaattccgggccgtgctgggacctttgctccacgaggtgcctatggaggggagggaacacgattctggaggctgctgggattggggtgggggttcctgggaggcagtccttttgcaagagctgctaagagcgctgggtaaggagaggaaggggagagacatggaacttggctggtctgcagggaaatgccactgttttggccgggagtagggggcgggagtggcgggagagggggtggccggctggggaggagccagcctggtggagaagctgccctgtgggcgggggtgaggaggggagggctgtggtcaccaggcaggaaggaggggtggcctgacccctcggcagtccctcccctcagcctttccccaaattgctacttctctggggctccaggtcctgcttgtgctcagctccagctcactggctggccaccgagacttctggacaggaaactgcaccatcctcttctcccagcaagggggctccagagactgcccacccaggaagtctggtggcctggggatttggtgggtctgctccttagcagtggcctggggctctgtgtgtgtatctggg

SEQ ID NO: 7114 - DNA, 2300 bp, Homo sapien
cctactctgttgccacatctatgccagccctgtttcaggggtgttgggggagatgaaatcaataaaatatgatgtctactttcagggatggatttcatgccccaggcagcagagtaggaagaatgactatagtctcagtagctgctggttggagcctgccatcacttcagatggggttgttccccagaagaggcaacccgcataccttcccaggtccatcctgggctgccacctgagttgcctgtcttccttctgccacctccacccctatcccaggcctgccactgctcatagcagatttcctatcaaaggctctcctggcctcctctcttatctgtggcccccgcagggcacccactttcagaaactccctggaaggcccagcacctgcctctctccacccctggatttctaccagcttggctgaggcctggggctagtggggagagcttcttggcctcttcccagaggcaagggaggaggagggaggctgggaaagccgctggggctcagtgtcgcaattccgggccgtgctgggacctttgctccacgaggtgcctatggaggggagggaacacgattctggaggctgctgggattggggtgggggttcctgggaggcagtccttttgcaagagctgctaagagcgctgggtaaggagaggaaggggagagacatggaacttggctggtctgcagggaaatgccactgttttggccgggagtagggggcgggagtggcgggagagggggtggccggctggggaggagccagcctggtggagaagctgccctgtgggcgggggtgaggaggggagggctgtggtcaccaggcaggaaggaggggtggcctgacccctcggcagtccctcccctcagcctttccccaaattgctacttctctggggctccaggtcctgcttgtgctcagctccagctcactggctggccaccgagacttctggacaggaaactgcaccatcctcttctcccagcaagggggctccagagactgcccacccaggaagtctggtggcctggggatttggtgggtctgctccttagcagtggcctggggctctgtgtgtgtatctggggtggggtcggggaatgtcctaaggatctgagaagggggtttctggggagaagtgaggggtgatggtgatggaagcttgggacaggagcaggactctgggtcccagaataactcatgaggggctcaggggaggaggtcctctatgtgaattggggagattcttggagacaggtttgtgctgggaccctggaaagtggcacgagcgaggttctctaataagcagcgtgtttcactgggtggagtgagctgtcctcagtgttggagtgagggggaaggggcccaagagaagcagggcagatgcacccaaacattccctgctggcctggaggggactttgggggagaaaagccggcacggtggctgggagcccagactttggagtcagaggagggttggagtcttgactctaccgccgcctaactgtgtgaccatagttacttaatctctttgaacctcagtttgcttatctgtaaaatgagtttaagaatagtcctgagccaggagcagtagcgtgcgcccataatctcagatactcaggaagctgaaacctgattgcttcagcccagtagtttgaggcgatagtgtcctattattgcacctgtgaatagcactgagttccagcctgggcaacatagagagaccccatctcaaaaaaaaaattaatagttttgacctcagagggatattatgaggaaagcacataaagccttataacaggctgggcgcagtggcttactccaataatccccacactttgggaggcccaggtgagaggatcacttgagcccaggaattcctagactagcctgggcaaaatagggagaacctgtctctaaaaaacataatagtaatataataaagccttagtacaggctaatatatggcaagtaaatgttagctgatattgttgatattgataaaagggaggatcaggtggagaagggagctgaggccagaaaggagcccagttctagaagagtataatctgggtccttcctgcaggacagtgccttggtaatgaccagggctccaggaagagatgtccttgtggctgggggcccctgtgcctgacattcctcctggtaagcttcattccatccctctcccctgagcccagaccgcaggctccacgcctcctgtaggaatcagcctccttcattacctgccttcttccttcctccagagagcagtccagagtcattct

SEQ ID NO: 7115 - DNA, 2300 bp, Homo sapien
aagaaaaaaaacaagaataccagaattattatttaattcagcacctcttgtgtgccagacacagcgctaagtgccctgcatactttgtcattgaactataccaacaattttctgagaagggttcagatatgattcccatttcacagatgaggcttatagaggggttaagacatttgctcaaggttacacagcaaagccttgtagaccttttttttttttttgacggaatctcgctctatcgcccaggctggagtgcagtagtgcaatcttgggtcactgcaacctctgcctcccgtgttcaagcaattctcctgcctcagcctcccaagtagctgggattacaggcacctgccaccacgcccggctagtttttgtgtttttagtacagacggggtttcgccatgttggccaggctcttctcgaactcctgacttcaggtgatccgcccgcctcagcctccgaaagtgctgggattacaggcgtgagccactgtgcccggcctcagtaaacttcttagtgagttcctaatagttccctaaggtgaggagagaagaaagttcctgctgctcctgctgcttgcgtcagcctcccttcttcctccccagggctgcaagtggaattcatcaaccccatcttcgagttctccagggccatgaatgagctgcaactcaatgatgccgagtttgccttgctcattgctatcagcatcttctctgcaggtgtggaggaggggcaatgggaaacagcaagagacttacaccaaggagggctgcaggtcccacaggaatcggtggggggaggggggtggtggcttgggagggtggaggcatttgctgtgttattttaggatgagagagcttggctggagcatgtctctatattttggttgcaatttggggtatggaactggaccctggccagacctgctcctcaactctcttggtgacctatagaccggcccaacgtgcaggaccagctccaggtagagaggctgcagcacacatatgtggaagccctgcatgcctacgtctccatccaccatccccatgtgagtctccccatggtgttccttttcctccttcccacacacaggcccattccctgacatacctactttcccttcaagaatttctctctgactgcatgctgtgcagacaattcacctctcccacaactcccctactcttgccccgcttccctggggacaggcaaaagctgtgtttgtctctctcctttccccaggaccgactgatgttcccacggatgctaatgaaactggtgagcctccggaccctgagcagcgtccactcagagcaagtgtttgcactgcgtctgcaggacaaaaagctcccaccgctgctctctgagatctgggatgtgcacgaatgactgttctgtccccatattttctgttttcttggccggatggctgaggcctggtggctgcctcctagaagtggaacagactgagaagggcaaacattcctgggagctgggcaaggagatcctcccgtggcattaaaagagagtcaaagggttgcgagttttgtggctactgagcagtggagccctcgctaacactgtgctgtgtctgaagatcatgctgaccccacaaacggatgggcctgggggccactttgcacagggttctccagagccctgcccatcctgcctccaccacttcctgtttttcccacagggccccaagaaaaattctccactgtcactctgtggtatggccataaatgcctcagcgccgcctcactgataggtctggtactgtttgaacaggaagatcaaaatgaatacaaaatgagagaaaccaatttctggattgggggtggggacacggtaatagaggaggaagcctgcgatctttaggatccgcctccaggcccagaggagggagagtcacaaatgacagccttggccgtgagagggggcctcttcttactaacccccactgcgccatatgggtaaatggaatgctgaggcttaggcgcccccttcccctgctgggatccgggtaggatccggttgcctttctgcggtggaggaggaagtgttggatttcagcgctaaggcgtcggcggtgcacctcacgtgcatgtgtagcatgccttggtttttcctttggcatctgaaaaaggcacaacctgaaagacctagaacccagtgtcggtccccaggccctttgggacaggaagagaagagccgtgtggccgcggggaggatgtcctgaggcggggctgtcctcgcggactgactggactccatctcccagcgggcgccgcggcgcg

SEQ ID NO: 7116 - DNA, 2300 bp, Homo sapien
gcccaggctggagtgcagtagtgcaatcttgggtcactgcaacctctgcctcccgtgttcaagcaattctcctgcctcagcctcccaagtagctgggattacaggcacctgccaccacgcccggctagtttttgtgtttttagtacagacggggtttcgccatgttggccaggctcttctcgaactcctgacttcaggtgatccgcccgcctcagcctccgaaagtgctgggattacaggcgtgagccactgtgcccggcctcagtaaacttcttagtgagttcctaatagttccctaaggtgaggagagaagaaagttcctgctgctcctgctgcttgcgtcagcctcccttcttcctccccagggctgcaagtggaattcatcaaccccatcttcgagttctccagggccatgaatgagctgcaactcaatgatgccgagtttgccttgctcattgctatcagcatcttctctgcaggtgtggaggaggggcaatgggaaacagcaagagacttacaccaaggagggctgcaggtcccacaggaatcggtggggggaggggggtggtggcttgggagggtggaggcatttgctgtgttattttaggatgagagagcttggctggagcatgtctctatattttggttgcaatttggggtatggaactggaccctggccagacctgctcctcaactctcttggtgacctatagaccggcccaacgtgcaggaccagctccaggtagagaggctgcagcacacatatgtggaagccctgcatgcctacgtctccatccaccatccccatgtgagtctccccatggtgttccttttcctccttcccacacacaggcccattccctgacatacctactttcccttcaagaatttctctctgactgcatgctgtgcagacaattcacctctcccacaactcccctactcttgccccgcttccctggggacaggcaaaagctgtgtttgtctctctcctttccccaggaccgactgatgttcccacggatgctaatgaaactggtgagcctccggaccctgagcagcgtccactcagagcaagtgtttgcactgcgtctgcaggacaaaaagctcccaccgctgctctctgagatctgggatgtgcacgaatgactgttctgtccccatattttctgttttcttggccggatggctgaggcctggtggctgcctcctagaagtggaacagactgagaagggcaaacattcctgggagctgggcaaggagatcctcccgtggcattaaaagagagtcaaagggttgcgagttttgtggctactgagcagtggagccctcgctaacactgtgctgtgtctgaagatcatgctgaccccacaaacggatgggcctgggggccactttgcacagggttctccagagccctgcccatcctgcctccaccacttcctgtttttcccacagggccccaagaaaaattctccactgtcactctgtggtatggccataaatgcctcagcgccgcctcactgataggtctggtactgtttgaacaggaagatcaaaatgaatacaaaatgagagaaaccaatttctggattgggggtggggacacggtaatagaggaggaagcctgcgatctttaggatccgcctccaggcccagaggagggagagtcacaaatgacagccttggccgtgagagggggcctcttcttactaacccccactgcgccatatgggtaaatggaatgctgaggcttaggcgcccccttcccctgctgggatccgggtaggatccggttgcctttctgcggtggaggaggaagtgttggatttcagcgctaaggcgtcggcggtgcacctcacgtgcatgtgtagcatgccttggtttttcctttggcatctgaaaaaggcacaacctgaaagacctagaacccagtgtcggtccccaggccctttgggacaggaagagaagagccgtgtggccgcggggaggatgtcctgaggcggggctgtcctcgcggactgactggactccatctcccagcgggcgccgcggcgcggccacgcccccccactccccgcgcgcgcccggtggaggtaaccgcggccgcgcgcccccctctgcccccgctgcccaggattggtaggctccaccgctcggcagccggcttccctgctcggacgccgagcaccgccaaagcgcgtgagtggggggtggggactgggggatggggagcccgtcaggaagtctcaggggccgattatcttgggaagtgactttcagaggaatccccatgtcg

SEQ ID NO: 7117 - DNA, 2300 bp, Homo sapien
aggaggggcaatgggaaacagcaagagacttacaccaaggagggctgcaggtcccacaggaatcggtggggggaggggggtggtggcttgggagggtggaggcatttgctgtgttattttaggatgagagagcttggctggagcatgtctctatattttggttgcaatttggggtatggaactggaccctggccagacctgctcctcaactctcttggtgacctatagaccggcccaacgtgcaggaccagctccaggtagagaggctgcagcacacatatgtggaagccctgcatgcctacgtctccatccaccatccccatgtgagtctccccatggtgttccttttcctccttcccacacacaggcccattccctgacatacctactttcccttcaagaatttctctctgactgcatgctgtgcagacaattcacctctcccacaactcccctactcttgccccgcttccctggggacaggcaaaagctgtgtttgtctctctcctttccccaggaccgactgatgttcccacggatgctaatgaaactggtgagcctccggaccctgagcagcgtccactcagagcaagtgtttgcactgcgtctgcaggacaaaaagctcccaccgctgctctctgagatctgggatgtgcacgaatgactgttctgtccccatattttctgttttcttggccggatggctgaggcctggtggctgcctcctagaagtggaacagactgagaagggcaaacattcctgggagctgggcaaggagatcctcccgtggcattaaaagagagtcaaagggttgcgagttttgtggctactgagcagtggagccctcgctaacactgtgctgtgtctgaagatcatgctgaccccacaaacggatgggcctgggggccactttgcacagggttctccagagccctgcccatcctgcctccaccacttcctgtttttcccacagggccccaagaaaaattctccactgtcactctgtggtatggccataaatgcctcagcgccgcctcactgataggtctggtactgtttgaacaggaagatcaaaatgaatacaaaatgagagaaaccaatttctggattgggggtggggacacggtaatagaggaggaagcctgcgatctttaggatccgcctccaggcccagaggagggagagtcacaaatgacagccttggccgtgagagggggcctcttcttactaacccccactgcgccatatgggtaaatggaatgctgaggcttaggcgcccccttcccctgctgggatccgggtaggatccggttgcctttctgcggtggaggaggaagtgttggatttcagcgctaaggcgtcggcggtgcacctcacgtgcatgtgtagcatgccttggtttttcctttggcatctgaaaaaggcacaacctgaaagacctagaacccagtgtcggtccccaggccctttgggacaggaagagaagagccgtgtggccgcggggaggatgtcctgaggcggggctgtcctcgcggactgactggactccatctcccagcgggcgccgcggcgcggccacgcccccccactccccgcgcgcgcccggtggaggtaaccgcggccgcgcgcccccctctgcccccgctgcccaggattggtaggctccaccgctcggcagccggcttccctgctcggacgccgagcaccgccaaagcgcgtgagtggggggtggggactgggggatggggagcccgtcaggaagtctcaggggccgattatcttgggaagtgactttcagaggaatccccatgtcgtcgaaacgggcgctatgaccccgtcgggtgagagtctctctgagcaacccaaacagaaggtactgctgtgggtcccccacttggcacgcgacggcgctgggtcggcctggcgcgccctcccgcgcccacgggcgctaggctaggtctgtgcgcagccgctgtctcccgaggtcggccccgccccgcggcgctcggctcggtgcagccccggccccccgggctgaatggtacggccccggccccggcctccccctccgcaccccgcgcgagtggtgcgtgccccccagtgcagacgcggaactggcgcccgctcggagcggcgccgcgctggggagcgactgacgccccgctgccgggggacgtcgggctgggcctggccagtcccccagagcttgggaggtaggagagtctgggccggtggggtcctgggcgagcgtctggggactccgagcgggagacgggctctgagaggacaccgtggctct

SEQ ID NO: 7118 - DNA, 2300 bp, Homo sapien
catcgggtgtttaccgaggactgtacccaatgctggaccctgggaacatgaggaccaatgacacagagcgcctgaacaggagttagagtttggtggaaagaacaagtcctcaattgtgattaggagagcagatcctatttaaaagctctctactcctgatagttgttgtttttaagccttgatgaggtttgaactcatgatgatgatgatgatgatgatgatgaccatgaccagcaacaacatttgatattctggtcaattagtatctgccaaccttgagatgtggagtctaatatcactccattttatagaatgggaaactgaggcttgtagaggtcaaattatttccccaaggtcacagccgttgagtggccaagttggatcacactccaggtctgtcccgacacgtcaacatggagtgggaggccttgcttatctggaagaggatactcttcagcattccgaggacaggaattaagccccaaagctcctgtgggccgcaaagggttctcacgagctgcacgcccagcaggactttagacccaagtgaatccctggtgggacccccaggttctatttgctttctagctcctagccacagcaggggagaaacagaccaagctgagcggagaagcctgtaagtcctgtgttttcctccagacggtagcaagtagtggcagtagacagcctgggagtgagggacttcccaacgctgtcaaagaccttagggaacccagattctggggccattatcgtagggacaaatacccgccccacacctcctcaaccccagagggctcactgcagcccaaccctgcagctccctagtcctactgcagggccacaagagaaggcaaaatggtgttgtgtcttcattcttctatttttatttttttttttttgagacagggtcttactttgttgcccaggctggagtgcagtggcacgaacatggctcactgcagccctgaccccccgggctcaagtgattctcctgcctcagcctcccgagcatctgggactacaggtgtgcgtcacatgcctgactgatttttgtattttttgtacagatggggtttcatcatgttgcccaggctggtctcgaactcctgagctcaagtgatctgcccgcctcagcctcccaaagtgctgggattacaggtgtgagccacttcgcccagcccatttttatttttttattattattctttgagatattaataataaaaaataataataaataatatttttattattattatcactctgtcacccaggctgcagtgcagtggtgcgattttggctcactgcagcccggaactccttggactcaagcgatcctcccacctcagcctcctgggtagctgatactacaggtccacaccaccacacctggctaatttgtgtgtgtgtgtgtatttattttattttttatttttttagtagagatggggttttgccatgttgcccaggctggtctcaaactcctggcctcaaataatctgcctgcctcggcctcccaaagtgctgggattacagatgagccaccacacccggcctaacatttttaaaattataaacccacttcatacgtgtgacaatcctgtgcagtgggtgctgctttcacccaccccgctttacagatgaggaaaccaggtgctttgagattaaagagatggcagtgctaggactcagagacaccctggccccagggtctgtggacatgaccactgcctgaactgcctgcgaggatgctcctgacccgttagccttagggttatgggcccagcatgctcccaccgtacaatttgctgtaagagggacacacacggggcttggagtacccctgaggcttgccaaaggttggggaggcagaattgtgctgcggggggtgaggggggaagggacaggagccagccagggacaatgtggccctaccttctccctggagagacctcagctctctggaattcatctatatttagcaggtggctggacaggaggcagataagcagagcctggggaggggggaggtccccatatatagtgggaaggacaggaccccactcagtccctctttgggtgacctgtgcctgcttcgtgcctggtgtgacgtctctcaggatgcctgagccggggaagaagccaggtagctttaggactggggttgggtctaagtgtgggagcaggggggtgtctacaattggggagcagggctaggagggagttcttgagggggttgacgaggacgtggcctctgagccccaggacaggggcagccagtcctccagggtcctttt

SEQ ID NO: 7119 - DNA, 2300 bp, Homo sapien
gtaatcccagcactttgggaggccgaggcaggcagattatttgaggccaggagtttgagaccagcctgggcaacatggcaaaaccccatctctactaaaaaaataaaaaataaaataaatacacacacacacacaaattagccaggtgtggtggtgtggacctgtagtatcagctacccaggaggctgaggtgggaggatcgcttgagtccaaggagttccgggctgcagtgagccaaaatcgcaccactgcactgcagcctgggtgacagagtgataataataataaaaatattatttattattattttttattattaatatctcaaagaataataataaaaaaataaaaatgggctgggcgaagtggctcacacctgtaatcccagcactttgggaggctgaggcgggcagatcacttgagctcaggagttcgagaccagcctgggcaacatgatgaaaccccatctgtacaaaaaatacaaaaatcagtcaggcatgtgacgcacacctgtagtcccagatgctcgggaggctgaggcaggagaatcacttgagcccggggggtcagggctgcagtgagccatgttcgtgccactgcactccagcctgggcaacaaagtaagaccctgtctcaaaaaaaaaaaaataaaaatagaagaatgaagacacaacaccattttgccttctcttgtggccctgcagtaggactagggagctgcagggttgggctgcagtgagccctctggggttgaggaggtgtggggcgggtatttgtccctacgataatggccccagaatctgggttccctaaggtctttgacagcgttgggaagtccctcactcccaggctgtctactgccactacttgctaccgtctggaggaaaacacaggacttacaggcttctccgctcagcttggtctgtttctcccctgctgtggctaggagctagaaagcaaatagaacctgggggtcccaccagggattcacttgggtctaaagtcctgctgggcgtgcagctcgtgagaaccctttgcggcccacaggagctttggggcttaattcctgtcctcggaatgctgaagagtatcctcttccagataagcaaggcctcccactccatgttgacgtgtcgggacagacctggagtgtgatccaacttggccactcaacggctgtgaccttggggaaataatttgacctctacaagcctcagtttcccattctataaaatggagtgatattagactccacatctcaaggttggcagatactaattgaccagaatatcaaatgttgttgctggtcatggtcatcatcatcatcatcatcatcatcatgagttcaaacctcatcaaggcttaaaaacaacaactatcaggagtagagagcttttaaataggatctgctctcctaatcacaattgaggacttgttctttccaccaaactctaactcctgttcaggcgctctgtgtcattggtcctcatgttcccagggtccagcattgggtacagtcctcggtaaacacccgatggacaaatgacaaaaagagacgtcgcagcacacaggggccaaaagagatacacaacaaattttaaaagagactctgtgctgcaagaggatggattgagaataactttacttgttttttgggaggaggttaatgggtgggaggggtgagaggggagatctgatttacatacggacttgagactcccaaggcagtaccccgggtcgtcctctgcaaggttgccccggtggggtctgacgcccagctggcgtccgggagccggggtggagtcctggagggaggcgaagcgggatgtggagggggcctggagtggggggagggggcgggtgaggcgaggcccggcccgccacagtcctgcctctgggccccgggagcgtcctccctgtgtccgggccgggcgagggcttaatgctatggccagcggggaggcctggcggggcccggcgggggctgcgggctcagtggggcgggtggcgccgctcggccaggcccccgcggcccagcacttcgccgctgaactggtaggtgagcttcttcttcaccttcttgacctcgcccgtcttgccgtagttgcgcagcgcgcgcgccatcttctggtaggtcatcttcttgcggttgcccttctggatgccccagcggtgcgccagcgcctccttgtgcttggacgagaactggaaggtgcccttgtccttgtccacccaccagatgctgtccttcatgtcgccgctgcggagcaggtccaacaggaactggtacaggcggatct

SEQ ID NO: 7120 - DNA, 2300 bp, Homo sapien
gataaacattaacttcatcattatcattattattaataataataatagtttattctaaagagcctagattcccactgagtgtggttacacctataatcccagctacccaggaggctggagagggaggatcacttcagcccaggagtttgagaccggcctgggcaacatagtgagaccctatctctacaaaaaatgtttaaaaatttgccagacatggtggcacacacttctagtcccagctacttgggaggctgatacgaaaagatcgtttgaacccaggagtttgaggctgcagtgagctatgattacatcactgcctccagcctgggtgacagagtgagaccctgtctctttttttttttttttttttttctctgagatgaagtctcactcttgcccaagctggagtgcagtggcacgatatcggctcactgcaacctccacctcccgggttcaagtgattctcctgcctcagcctcccaagtagctggtaatacaggcatgtaccaccatgcccagctaatttttgtatttttagtagagatggggtttcactatattggccaggctggtcttgatctcctgacctcgtgatctgcccacctcagcctcccaaagtgctgggattacaggcttgagccactgcgcccagctgagaccctgtctcttaacaaaaaagtattcagtgtgcagggggaggggcttacaaaaaattttttttaactaaaaaaaaaagcctggattagcacttgaacaagcatagagcaaatgcttttaatacatgtttctttcctcttgttctccctgctcctggccaccttagtcaatggcccagagaaataactttaggggaccatgttgtcactgcagttgaagcccaagcatggcaccatgagggcagggactggttttgttcacctccgtcttcccagtgcctaagtagagtgggcactcaacaaacatttcctgaatgaatgaatcaatgattgcctctttttaaaaataaaaatgtctttctaggccaggtgcagtggctcacgcctgtaatcccagcactttgggaggccaaggcgagcgaatcacctgaggtcaggagtccgagatcaacctggccaacatgatgaaaccccgtctctactgaaaatacaaaaattagctgggtgtgatggcaggcgcctgtaatcccagctacatgggaggctgaggcaggagaatcgcttgaacctgggaggcggaggttgcagtgagccaagatcacaccactgcactccagcctgggtgacagagtgagactccatctcaaaaaaaaaaaatctctttttaaattgagatggaatctcactatgttgcctccaactcctgggctcaagtgatcctcccacctcagcctccccaaatgcttggattacaggcatgagccaccgagcccagctgaatcctagcctcttaagaagcctctcaggccgggcatggtggcttatgcctgtaatccaagcactttgggaagccaaggtgggcagatcacctaaggtcaggagtttgagaccagcctggccaacatagtgaaaccccgtctctacaaaaatataaaaattagctgggcctgatggcaggtgcctgtaatcccagctactcaggaggctgaggcaggagaatcccttgaacctagggaggtggaggttgtggtgagccgagatcatgccactgcattcccgcctgggcaatagagccagactcggtctccaaaaaaaaaaaaaaaaaaaaaagcctctgagactctcctctgcaaaattatctaaacctgaagcgaaaacaaaacaaaacttaatttgcattttcttttttttttgagatggagtctggctctgtcgcccaggctggagtgcagtggcacgatcttggctcactgcagctccgcctcctgggttcacgccattctcctgcctcagcctcccgagtagctgggactacaggtgcctgccaccacgcccggctaattttttctattttttagtagagacgggttttcactgtgttagccaggatggtcgcgatctcctgacctcgtgatccacccgcctcggcctcccaaagtgctgggattacaggcgtctggccttaatttgcattttcatcttgcagtgagctaacaggatcccgaaactctcctcgctgtaggagagtttgctctgctctttagtgaggaggctgtcctggggctctgggatttggtgaaatgattcctctccagttattgatccctgcttcagccccacttctggctctgcccatttttgcct

SEQ ID NO: 7121 - DNA, 2300 bp, Homo sapien
ctgaatgttcaaaattccttcccagcagaggggactcaccagagatcactgggccagaaaaacaacaacaacaacaacaacaacaaaacaaaaatgcctctactcatccctccaccccccagaaaagatcaggaactctctgaaggcaggggtcttgtataatacttttttgttttcccagcgctcagcttagagcctggaactcaacattgggaagatgcatggatggacagataagtggatagacagatagatgaatgagtggatggatggatagatggatgggtagatgagtggattggtggatgggtggattagtgaatcggtagatgtgtggatgagtggatggatggatggatgaatggatggatggatagataagtggatgagtggattggtggatggatgaatggatggatggatagataagtggatgggtggatttgtggatggctggatgaatgagtggatggatggataggtggatgagtggatggatgaatgggtagatagctggattggtggacaggtggatgagtaaatgggtagatgggtagatgggtggataggtggatgaatggatggatggatgaatggatggctggatggatgagtgataccaaaaagatactgcatttgtatgtttatcacagcactattcataatagcaaagatacagaatcaacataagtgtccatcaacgggtgagtgaataaataacatgttatattgtatttatatatatatataatgaaatactattcagccataaaaaagaatgaaattatgtctttgcagcaacatggatggaattggaggacattatcatatgcgaaacaacgcagaaacagaaagtcaaatactgcctgttctcatggggctcctggaaaccgaagctgataggtgaatggatggataggtggatgaatagatgggtggaatggtaggtgggtggattggtagatgggtggatgagtggactggtggatggatggatgaatgaatgaaggggtaggtggatgatggatgggttgatggacagatgagtggatgggtagatgggtggatgagtggatgggtggatggatggacaggtggatgaatggatgagcagattcatagatggataaacagatggaattgtggactgatggactgatagcaggtggacgggctgattaatggacatatagatggttagatagacaagtagataaacagatgggtgggtggatgaattgactgacagatgaatgaacaaacaaacggacagttggataaatggacacataagtgaatgcatggtgggcttgatgaatggatagctggatggacaaatagacagacaaatagatgcatgggaaaacagatgaatggtggataggcaagaaaggtttgtaaaccaggagggttagattgatattcaggcattgccaagggatggggaaactgagaaacctgggctggaaacagagccctagggatttgaatgtggtaatcaagaagctgggaggggagggtataagaacccaggaccctcttctggtggtagggaagcccatgtgaacagattcagagggaaggaagaaagcagcactatgctgaagaccctacacctgagcccagcctcagcctagggatagcctaggcagtgggggtgcagggccacaggaagagccaggcctgatagcctgctagatcagagccctcacccaggaaggctgactccagaaagtggaggccccaagaggccaccccttccagctctgaccccaatgaggtgactgttggctacatagggatctcaaaagaagcaggcatttgttgggttagagcaaaagcctcccagtggtgtggcagagctacacgttctccctcccatcctccctccccagcttagcccccaaagtcatccctctcagtcccagcttcctctgggcagggggcctggaccccatggcttcccaggccagccctttgagcaccacctgccccagccggccagagacttcctgtatgtagcgcaagagatttatgcaaacgggttggggcggtgatgtcaccccaaggggactatctcccagcggcaggcccttcgataaaatcaggaacttgtgctggccctgcaatgtcaagggagggggctcacccagggctcctgtagctcagggggcaggcctgagccctgcacccgccccacgaccgtccagcccctgacggggcaccccatcctgaggggctctgcattggcccccaccgaggcaggggatctgaccgactcggagcccggctggatgtta

SEQ ID NO: 7122 - DNA, 2300 bp, Homo sapien
tttctagctctatataaaacttcccatatgtcaggcatagttctaagtgctttgtctgtatttatccatttaatcttcacaacaacatctaagtctaatttcgagatgaggaaactgaggcataaggagttaagtaatttgtcccaggaagtctggcatcagaatcttactgtcttgaatgggcacagtggcacacgcctataatcccagtgctttgggaggccgaggcgagaggattgcttgagcccaggagatcgaagctgcagtgagctgtgatcacaccactgcactccagcctgggtgacagagttaaaaaaaaatttgttatattcaccttttgaattttctcttctgttcccttttatcttctttctaaacaaaacaaaacaaagaatcgtattgtcttaaccaccaagacaccaagaggtaagccagagagagagagagagagagaaagacagaggctaggtgcagtggctcacgcctataatcccagcactttgggaggctgaggcgggtggatcatttgaggtaaggagttcaagaccagcctggccaacatggtgaaaccctgtctctactacaaaaattggccgggaagtagtggcccatgcctataattccagctacttgggaggctgaggctggagaattacttgagcctgggaggcggaggttgcagtgaaccgagatcatgccactatactccagtctgggtgacagagtgagaccctgtctcaaaaaaaaaaaaaaaaaaaagagaaagagaaagagattttatatagtgagattttcatatatctgagatgagatttgatatatgtatacaattttacacattgcatacatgtgatcatatacaccttttatttatttattttgagatggagtttcgctcttgttgcccaggctggagtgcaatggcgcgatctcggctcactgcaacctctacctcccaggttcaagcgattctcctgcctcagcctcccgagtagctgggattacaggcatgcgccaccacacctggctgatcttgtatttttagtagagggggtttctccatgttggtcaggctggtcttgaactcccgaccgcaggtgatctgcccaccttggcctcccaaagtgctgggattacaggcataagccaccatgcccagccatatatggccatacacatcttttaatgtgttgttttcctttaacattttttccttccctattcacattagttcctcccaccatagaatccataatatcactttaatgtgttatctatgttttttatgtattcattatacatagacttatatatactgatacctttaatcacatacacatatacaaggtttctttttgtcattattttaaaatagtctcttaaaaaataaaaatagtggatcatattaaataaatatttctgcatctcacttttctcacacacctggaaacccctgcaattttattaatttgtaattttttttatttttttatttttgagacagggtctcgctctgttacccagactggagtgcagtggcacgatcagggctcactgcagccttgacctcccgggttcaagcaatccttccacctcagcctcctgagtagctggggctacaggtgcgcaccattacacctgactaattttaaatttttttgtagagaccagttctcagtttgttacccaggctggtctggaactcctgggctcaaaagatcttccttcctaggcctcccaaagtgctgggattacagatgtgagccaccgggccttaggtatccgatgggaattccaggccaggtgggaggaaagggtagtgcattggcaccaagtaacgtttctggctgggtcttgcccatccccttgttgggtggccaggagcgctcagcctccagaggcaggaatgctgactgtgttattgtgaaatcatttgcatattgtgaagtgctttgcataagatggagcgcttttgcatacagggaggggggcattttagaagtcctagggcaggatccctgagtagcttttctttgccaagaaactaacccagggattccattttggaactcagggagggaacagaacgtcctggcagttgtatgggcccggtggggtgagatggacagaaagcttcagaagacaagctgggccaccagggagaagttggcggtctaaggaaggccaacagtgcaacatgaagtgggacaggcaccagaggcagccctgagagctgagtgtgctctcaagagccccagcagaggggaaagtgacagagtaaatggttggagctgccatgg

SEQ ID NO: 7123 - DNA, 2300 bp, Homo sapien
atacctttaatcacatacacatatacaaggtttctttttgtcattattttaaaatagtctcttaaaaaataaaaatagtggatcatattaaataaatatttctgcatctcacttttctcacacacctggaaacccctgcaattttattaatttgtaattttttttatttttttatttttgagacagggtctcgctctgttacccagactggagtgcagtggcacgatcagggctcactgcagccttgacctcccgggttcaagcaatccttccacctcagcctcctgagtagctggggctacaggtgcgcaccattacacctgactaattttaaatttttttgtagagaccagttctcagtttgttacccaggctggtctggaactcctgggctcaaaagatcttccttcctaggcctcccaaagtgctgggattacagatgtgagccaccgggccttaggtatccgatgggaattccaggccaggtgggaggaaagggtagtgcattggcaccaagtaacgtttctggctgggtcttgcccatccccttgttgggtggccaggagcgctcagcctccagaggcaggaatgctgactgtgttattgtgaaatcatttgcatattgtgaagtgctttgcataagatggagcgcttttgcatacagggaggggggcattttagaagtcctagggcaggatccctgagtagcttttctttgccaagaaactaacccagggattccattttggaactcagggagggaacagaacgtcctggcagttgtatgggcccggtggggtgagatggacagaaagcttcagaagacaagctgggccaccagggagaagttggcggtctaaggaaggccaacagtgcaacatgaagtgggacaggcaccagaggcagccctgagagctgagtgtgctctcaagagccccagcagaggggaaagtgacagagtaaatggttggagctgccatgggaggctgatgagggtcagagacttaagagacctgtactcagtcgctatctctgcccaagtgagtacccacatgccccttcctgaatcttctcctgtactggctgatttccagagaagaatacaaactcgaaacgccaagccagactcccactgctgttcaggacctagacgtgagaagtggtatcacatactctggcttcaggacacccaggtttgaatcctggctctgccatctgtgccactgtgtgaccctgggctaacagtacccaccacaatgggataatatgaggattcagtgagatagtgcgagtaaagtgaatagcacatagtaggtggtcagtaaattgcggttataagaactgctatccagtgtttgctgccttagtctaaccaaagaggtcaggtctagcttcctccaggtgagggaagcacagagccctcgcctcccaggtttggagttcccatcagcagggtccagccaccatgcattggaccccaaagggttacaagccctggagacagtggcctgaggttcccagtgaaaaaccaaagcataaaaataattcgatgagtaagaataaaattccctcttctgaggttcccggggccaggcccctccctgcggcaggcacttcccctttcccttgctcatggaggagccaggccgggctgactcagagcaggagcgcacagtagtcctcccagcccgacctgggcggcgtggtctggcggccgggcgcgcccccgtgcggccacgggcagactgcggccctggacgggaagcggcggccagatccgcaagccccgcagcctggtcgatcgcggtccccgcagagccgccgcttccgtccctgcccagcctggctgagcgcggtgcgtgtggctctctcacttccgaccgaccctcccctccggcccgcagccctgcccaaacggaagtgcgccctctacccgggtcccccaccgccgcgaggcggaagcgccctcccgccgccactccccccgaccccgcggcacgcggcgcctcgggttccggacaggccccttgtgacgtggccgcgcgccgggggcggccccgggccgggggccgggcggccgggcggccgggcggggcagagcctgggcggggcgcggcaccgcagctggatggctggggccgcccggatcgccgccgccgccgccgcacggtgagtgccagcaggaccctcggggcccgcgccccgggcgtgatggacccggccgatccctcgccccgtccgactggtcctcatcagacctgggccggctcccaggacccgggagtcaggctcgcccgctt

SEQ ID NO: 7124 - DNA, 2300 bp, Homo sapien
atcccggctaaaacggtgaaaccccgtctctactaaaaatacaaaaaattagccgggcgtagtggcgggcgcctgtagtcccagctacttgggaggctgaggcaggagaatggcgtgaacccgggaggcggagcttgcagtgagccgagatcccgccactgcactccagcctgggcgacagagcgaaactccgtctcaaaaaaaaaaaaaaaaaaaaaaagatggctcagaagagcctacctaaaagttggttaaggggagaatgtctgcatccctcctaggcccaggctggaggctttctaaacatattcgtatttgtcaggatctccaaaagtaggccccagaatgggacccaactgacccaggcatagtgggaccagcacagattggacagtctttcccctctgggcttcttggctcctatcgggcaactcaaagtgagaatttggggtcagcagtcctagtgctgccagtgactcactgaataacctccagcaaggcacttaacctctctgagcctccctatgcttatttaaatttgagaatggtaattcagtctgtccacaaggcaggcttgttgagagaatggaataaagcactgttacttgaggagacgctttgtcagcctgagtgagcagctgtacatgttgttatttaaagaaaaaaattctgctttcaaccgtgttccaaaaaaaactactgcaaaggctaggtgtagtggttcatgcctatagtaccaacactttaggaggctgaggcaggaagatcacttacgcccaggagtttgagaccagcctggtcaacatggtgaaaccttgtctctactaaaaatacaaaaattagttgggcgtggtggtgggtgcctgtaatcccagctacttgagaggctgaggcaggagaatccattgaacccgggaggcggaggttgcggtagggagagaccgcgccactgcattccagcctgggcgacagagcgagactccgtctcaaaaaacaaaaaacaaacaagcaaacaaaaaaaaggcaacgattgcacagattttcatcaggttaacagagtgtttgtgatggtttgacttgaaatataagctatgttgcttacatgaagttccctttaaaggggctccagggctcacctcaaaggataaggagagatcatttaaaatagccgacaagggtacaacgaatgagtctcccatgatccggagacccgctctgctcactgagattactaaccatggtcagagaaaacaaacaattgcagatacgagacataattttttttgagacggagtctcgctctgtcgcccaggctggagtgcagtggcgcgatcacggctcactgcaagctccgcctccgaggttcatgccattctcctggctcagcccggagtagctgggactacgggcgcccaccaccacgcccggctaattttttgtatatttagtagagacggggtttcaccgtgttagccaggatggtctcgatctcctgacctcgtgatccgcccgcctcggcctcccaaagtgctgggattacaggcgtgagccaccgcgcccggcccgagtcataatgtttttaatcgtagaggctgatggtcaattgagttcttcccacgtggacaattccgtgaagcctgctctgacgttaggagcagcagcgatttctctttaaagctggttaatgattccctcccgtaactccgggtggccagcttgtacttaaataattgtaaaaatgcggactgaggtggcatgcctttttggccctttgcacacggctggcctatgtcgtttattaattgggaggcagtgtcattgtgtaaatccccttattcctagcggggtcacggtctgagtttgaacgcgcccctccgcaagcatctgtcacgggccagattaaagactacatttcccaaaggccctcgcggatcccacccttctccctccctttccggttttacacataggccccgcccccaacgcgcgtgtcggccaatagcggccccacctctcgcgcccggcaaaaataggacgcgggcgggaacgtttcggggtccgcgggggcggggcctgtggccaggggttggtctttggaatcggagaggcagattcgctgctccgcagcacggccggagctggtcgggtcaagagtcgggatttgtggggagaggttttccactggtcaagagaaggctttaagaaagacggtattaatctcccgttgcggctcccgcctggtcccatcttctgcccgctcctccaggaaatgaatctgctgccgaatattgagagtccag

SEQ ID NO: 7125 - DNA, 2300 bp, Homo sapien
taaacatttattgtgggccaggtgcgggggctcacgcctgtaatcccaacactttgggaggcagaggtgggcagatcatgaagtcaggagttccagaccagcctgaccaacatggtgaaaccccgtctctactaaaaatacaaaaattagccaggtgtggtggtgcgcagctgtaatcccagctactcaggaggctgaggcaggagaatcacttgaacctgggaggtgaaggttgcagtgagccaagatggcaccaccacactccagcctgggtgacagagggaaagtgtctcaaaaaaaaaaaaaagtattgtggtcaggcatggtggctcacgcctataaccccaatacttcgggaggctctgaggcaggtggatcaactgaggtcagaagttcaagaccagcctgaccaacatggtgaaaccccgtctctactaaatacaaaaacttagccaggcgtggtggcatacacctgtcatcccagctacttgggaggctgaggcaggagaattgcttgaacccgggaggtagaagtctcagtgagctgagattgtgccactgcactccagcctatgcaacaagagcaaaactccgtctcaaaaataatttttaaaaataaaaatttattgtttatttattttttgagacaaggtcttgctctggtgctcaggctggagtgcagtggcacaatcacggctcactgaaacctccacctccaggagttcaagaccagcctgggcaacatggtgaaacccatctctacaaaaactagacagctgtggtctcagctacccaggagactgaggtgggagggtcacttgagcctaggaggtagaggttgcagtgagctgtgactgcaccactgcactccagcctaggtgacagagtgagaccctgtctcaaaaaaaaggggggggggataccagtcttaactggatgaggtacaatgtgacttcattttaccttaatcaccctttaaagaccctgtctccaaagacagtcaccttatgagatactgagtgttaggacttaaacatatgcgtttggttgcggggggacatgattcagtcatatcaaggtggggaatggagtggtgtaactgctgatgggtgtgcgtctcctttttggggtggttaaaatgttctggaattagtggcaattaatgtgcatctctgtgaatatactaaaaaccactgaattgcccagccagaaaggataaacttttgccctggggcaggaagaaggctggcatgcagagagaggagaaaggggggctggatgagctggcctgctagcgggggccccaatactacataagaccttgcccttctccacagtatctggtgttaaatctcattatgaggaccctttcagcccggggttgggattggaagtgagacattgaaacttcaagggctgggttctggcccgggtggggatttgccatggagcaaaatagcctcttgcagcacatgcggggtttcctgtgccgggcactgtcctaagtccttctcaactctttcgtcattgagttctcatagcagtccagtgagccaggtaccattcctctcttcagtccacggtgccaggtcacttggctagggtcccactgagagttcgaaggaagccaggctagagctcaggcctctcaccagctggaggtctttcccagactctctaaggtgagagttggtgaatggtgtcagcctgggcctggatgagtgacccacggtgctcagtgaatttcaggaacagagccaggggatgctgcggtcaggggtgtcttgatggggaagaagcagggctgggcgctcacctggcttccccggacctgcaggtccagcctcgctctccttcccccgagcacctctagcccaaggcctgcccacttgctggagctggccccttggcaaggctgctgggagggcccgtgctgccagggcggtcagggtcagtgtcagaggtgcctaagggacgcccaagggggtgcccaggtggcaaggtgcctgtatgctcagggaagccacgtcccagctcgcgggtgggtgcagcagaggcccacgtgaccttgctgctgacattcctcagaggccatgtggccccaactggcagcgacagctgcagacgggctgaaccagctttgttcccagggtggcgcctgctctccatccaggccccattccggctcccacccgacgctgcttttgttcccacgtttcggggggcagctggcactgtgattcctgccccatgagtgcctagaggcacggagccaccagggatcaccccacgtgggacac

SEQ ID NO: 7126 - DNA, 2300 bp, Homo sapien
tgcagctgaaatctctgcacacacacctccccctcctccaaataaagtaaaatcatattagccacttctttcatagaacttttaaacattcctttataggatttgtagaggattatagttgtgcccttctactttttcagtgacattgcctcaagggcacatattgctcagtcttacagagccctatagtgtgtagtatctggcaccatagcaaaagcttgggaattacagttgaatgaatgatattaaagatgattgcagagataagatctccagatcttatctccatacctcagggaagaaggctgaaaacctttaaaagcatattgttagctattctgttgttggatggtgactttaaattattattgtctttattgtccttagagatagctttttctagtacctaacaccccacatgataggaagattgacctttatccaaatgaaaattaactttctcacagcataaatgtattattctgtcttgttctcactagggagcagctggtaagtaactcaggccagtgtttctgggccctttttattctcacgcacttctgttccagtttttccacagcactgtatgtgagccagagggaccttgtataagggtgggtggtagcagaagtttggaatgcaacaagtatttttgcctgctggggaggtggagggattggtaagtatctgaattttttctttttgtataattaaagggaagtcaacaggtaatgagaaagggggagtgaaaaaataatgaaaggtttcaggaattatttttaaacaggtcccgtttgaaggtcttgtttggctgcaaggaacagatgtccactcaagctagcatatatgaaagggctttcttataaggacacaggtggactgaactgtaatctaatcaggagctctgcagctagaagacctagaaagtgtatctttctgactccaggatatataactgctcactctacatgtacctcctttctactcttaactaccttataactttggttgcaacatgacttttcttcggatcccttctccctccccttcacattgagacataattcacatactataaagtttaccctttaaagtgagcaattcagtgatttttagtatattccagagttgtgtaaccatttccactatttaattgcagaacatttcatcacccttaaaagaaaccctgtacccattagcaaccattcccctcttcttctccatgtctcccttcccccatccccattcctaagcaaccaccaacctactttctgtctgtagatttgcctgttctgggcatttcatataaatggtaacatatactatgtggccttttgtgactggtttcttttacttagcataatgttttcaaggtctttgttgtagcatgacccattgtcttttgaccacagcactttgagcttctccatttaacccatgctatctctagttgcaacttttccacttctgacttcactactaactgcctgtttctgttaaccagttccagattctgtaaagtagtgctgtcaaataaaacattctgtgatgatgaaaatattctgtatcgcagctgggggcagtggctcgtgcctataatcccagcatttggcaggctgagatggaaggatcccttgaggccaggagttcgagaccagcctgggtttcacagcaagacccctgtctttacaaaaacaacaacaactataaaatgttctgtctctgtctcatacagtagccactagccacatgtggcaagtgcaactgaagaacttagttttttaaattaagtttaaatagccacttgtggctagtggctatcatcgtattgctcagtgcagctataaaggagcttgattggccaggcccgtttttgttttaagcataggtcaagggtcttaagtttctggccagccaatggatcagcttgccattgggttaagacccaccacatggtttagtcacttggggccagaggatgggaaaaatttggaatagaacatttgtgctgcccctgagataggcctggggtggggaaattttgagaggggaaaagaaaggagaaagagaagagagtgttcaagaattttgaacaaatacatactttgaaaataacagctcttttttgttccctcgtgtgtctcttcccaattgtatccctattgtattttctcatagtatgtttcagcagaaatcaaggtagacgaagtaacctcttgtcctgaattttcatagttgctcattcttaataatggcagcagaagcaacaatgagagtaactacctcctcaggtattacta

SEQ ID NO: 7127 - DNA, 2300 bp, Homo sapien
tgcctttccttatttagctcatgggcaggttccaagaagcttctaaaggcgcaacattttgttttccatatctggcacctagatatacctattcagtaagtcaacaatatttattgagcatgtactatggattaggcattatcaaggccctgaggatagagcagtgaaataaaacagacaaaacctctatcctcatgaagtttacctttggtttaccttctgggctactgtcaataaaacaagtaaaatatataaatacaaaatatactgtgaggccgggtgcagtggctcacgcctgtaatcccagcactttgagaggcagaggcgggcagaacacttgcagtcaggagtttgagaccagcctgaccaacaggggttgaaaccccgtctccactaaaaatacaaaaattagtcaggcatcgtggcacgcgcctgtaatcccagctactcgggaggctgaggcaggagaattgcttgaacctgggaggtggaggttgcagtgagccgagatcgcgccactgcactccagcctgggtgacaagagctagactccgtctcaaaaaaaaaaaaaaactgtgttagataatgataaatgttttggataaaaatgaaagtgggattgaaagcatgggtgtgtgtgtgtgtgcacatgccatgcatgcaagcagtgtaaaatagagtgcttagggaagactggactgagaaggtgacacttaagtcaaagtctgaaggaggtgaggaagtgagccatgtggatatccacatgattctatggagcacaaaaggagacagactctctgcttgaaacatttctacaacctatagcagcaaatatatggtaatatttgtgacaacattctgtaagctataatggtctataaatataggatgttttcagtcaactacacataaaactattaacaagaacaagatcatatatcagcattatgaatgtatataaaactacccagtacaattagggaatatgatcatgtacaatttaaggactatatggtaccagaaaaactctggttagtttttttcccccccaaaggcgaaagaggaaaacccttgaggcttctgcttggaagcccacttgttgtttgtggtaaggtaggatataatcagtatttgtgggtataaaaattatattctctgggaagccagatgatgttagagagaaaccatcccatgagttatttgcatgttgatggggccaaaagcttccagaacaaagttttctttcttaatctgcatttaactgcctcacaaggtctggaacctaggaataaatgttggcttaaacaacaacaacaacaacaacaaattgtactgcttgcgttccatctagacccagggattccagagtaactcaggaggaagtctttagagacctaacctgagttaagaaaaaaaaatatatatatatatttttttttcggtaaaagcaggttatggctgggcaatcggtctcttaatagaatctttgtgaacttccttatgtcgcagcgatcgttgccaggttgtgcgttcacactgattatcttgctaaaaagcactccctgcacttggaacacacatattcacatcccagcaaagaaggaaggcctggatgctgttgcttgtctgctggggcaaaaaggggcgtgccatgtgcccaacgctggccaagcaccagtcactcactcatccatttattcaacaaatatcttattatgctcctattcagtgcccagtaggggtgcctccttgcccaccagggtcatctagagctcctgtgggtgcgatgggcggagtcgagaacttcagattcccaggcctggctcttccctccagtagggatcggagacaaagagatgcgcccctgcagctccctaggttgagggctccgcccgcggccccaggggcttaggtgcggctgctcctccacttcccagcccgagggggcgctgcagcgcccggcgctcggcccgcccctacgccgcgctccgctcgcatcggcgctgcgggcggcgccgcggtgatacgttccccctcgccgcgctccccctcctcctctgccctccccgccggtggtaggtgccggaagtgccgccattttggggtgttctgctctggcggcagcggcagcggcggcgggacgcggaggctcccccgggattcggcctcagcagcgaggcggcggcggcggctgcggaggcgcaggcagcaactgaggcagcggcaggctcaggtgcagccgctggtgagtgctgcggccgcaggataacgggccgcgggagggagggaggggaaaaaag

SEQ ID NO: 7128 - DNA, 2300 bp, Homo sapien
aagtaaaaagaagaaatgccctcaacatgctaaacatgtaaatctatacagtcagaaagcaggttagtagtgtttgcctaaggctggaggatgattgggagaaaatggtgagtctctgctaattcataaggggcttattttgagggcaatgaaaatattctaaaattaggctgggtgcggtggctcatgcctgtaatcccagcactttgggagaccaaggcgggtggaacacctgaggtcaggagttcaagagcagcccggccaacatggtgaaaccccatctctattaaaaacacacacaaaattagccaggcatggtggcgggcacctgtagttctagctactggggaggatgaggcaggagaactgcttgaacccgggaggtggaggttgcagtgagtggagatggcgccactacacttcagcctagtcaatagaaggagactccgtctcaaaaacaaaatataaaaaaaagaaaatgaatcttttaaaaccaccagatgggccgggcatggtggcttatgcctgtaatcccggcactttggaaggccgagggggacggatctcctcaggtcaggactttgagaccagtctggccaacatggtgaaaccctgtctctactaaaaatacaaaacttagctgggcgtggtggcagctactcgggaggctgaggcaggagaattgcttgaacctgggaggcagaggttgcagtgagctgagatcacgccattgcactccagcttgggtgacaagagtgaaactctatcttaaaaacaaacaaacaaacaaaatctccaccagatgcttgggccgggcgtgtggctcatgcctgtaatcccaacactttgggaggctgaggctggcagatcaccataggtcaggagttcaagactagcctggccaacatggtgaaaccccatctctactaaaaatacaaaaaaaaaaaaaaaaaaaaaaagaaagccgggcgcggtggctcatgcctgtaatcctggcactttgggaggccagggggatggatcacctgaggtcaggagtttgagaccagcctggtcaacatgttgaagccatctcactaaaaatacaaaacttagctgggcgtggtgacatgtacctgtaatcccagctactcgggaggctgaggcaggagaattgcttgaacctgggaggcagaggttgcagtgtgctgagatcacgccattgcactgcagcttgggtgacaatagtgaaactctgtctcaaaaacaaaaaacaaaaaacaaaaactccaccagatgcttgggccgggtgcagtggctcatgcctgtaatgccagcactttgggaggctgaggtgggcggatcaccttaggttcgagaccagcctggctgacaaggtgaaacctcgtctctactaaaaacaaaagttagctgggtgtggtggcatgcacctgtaatcccagctactcaggaggctgaggcaggagaatcgtttgaacccgggaggcggaggttgcagtgagctgagatcttgcgactgccctctagcctgggcaacagagtgagactccgtctcaaaacaaacaaacaaaaagtaaatagctggcattacaaccattcttcttacctttttgtaggttgcaggttttatatttgagctcttcataatatttttcttaaggatatattaatataatgtatattttcctattttttcctgctatgtaaacactgctgtttggtcagatgaaggagggagccctgccctaggacaggggaggggaggaggaaggcgacctcaacccaggacccctgttcaccctgggatcaggccctcacccaggtagctcctctgtttgaaagctctaagcccttccactgtcctcttcagggctaccccgccacacagcctctccttgtcttgtcttccctttggcggggtcacacccgcacctgggtcactgcccccttcctctggtcgagggttggggggagtgtcccctcctccctcggccggagtcacagttccacacgcaggggtccttcctgcccctctcacctggggtcacaacccccctccctcggaggagggaggtcaccggccacaggcgggggcctcagtttcccacgctacagggctcacacgtgtctggcctgcgacgcgctctcccttcgccggggtcccagtttcccgcccaggaaacctcggtccctcctccgaggccgccgggccctcctccagagtcccgccagtcccccagagtccaggccagtccccgccgtcacccggtgcgagcccgcgagaggcctagtgcagctgg

SEQ ID NO: 7129 - DNA, 2300 bp, Homo sapien
atctcctcaggtcaggactttgagaccagtctggccaacatggtgaaaccctgtctctactaaaaatacaaaacttagctgggcgtggtggcagctactcgggaggctgaggcaggagaattgcttgaacctgggaggcagaggttgcagtgagctgagatcacgccattgcactccagcttgggtgacaagagtgaaactctatcttaaaaacaaacaaacaaacaaaatctccaccagatgcttgggccgggcgtgtggctcatgcctgtaatcccaacactttgggaggctgaggctggcagatcaccataggtcaggagttcaagactagcctggccaacatggtgaaaccccatctctactaaaaatacaaaaaaaaaaaaaaaaaaaaaaagaaagccgggcgcggtggctcatgcctgtaatcctggcactttgggaggccagggggatggatcacctgaggtcaggagtttgagaccagcctggtcaacatgttgaagccatctcactaaaaatacaaaacttagctgggcgtggtgacatgtacctgtaatcccagctactcgggaggctgaggcaggagaattgcttgaacctgggaggcagaggttgcagtgtgctgagatcacgccattgcactgcagcttgggtgacaatagtgaaactctgtctcaaaaacaaaaaacaaaaaacaaaaactccaccagatgcttgggccgggtgcagtggctcatgcctgtaatgccagcactttgggaggctgaggtgggcggatcaccttaggttcgagaccagcctggctgacaaggtgaaacctcgtctctactaaaaacaaaagttagctgggtgtggtggcatgcacctgtaatcccagctactcaggaggctgaggcaggagaatcgtttgaacccgggaggcggaggttgcagtgagctgagatcttgcgactgccctctagcctgggcaacagagtgagactccgtctcaaaacaaacaaacaaaaagtaaatagctggcattacaaccattcttcttacctttttgtaggttgcaggttttatatttgagctcttcataatatttttcttaaggatatattaatataatgtatattttcctattttttcctgctatgtaaacactgctgtttggtcagatgaaggagggagccctgccctaggacaggggaggggaggaggaaggcgacctcaacccaggacccctgttcaccctgggatcaggccctcacccaggtagctcctctgtttgaaagctctaagcccttccactgtcctcttcagggctaccccgccacacagcctctccttgtcttgtcttccctttggcggggtcacacccgcacctgggtcactgcccccttcctctggtcgagggttggggggagtgtcccctcctccctcggccggagtcacagttccacacgcaggggtccttcctgcccctctcacctggggtcacaacccccctccctcggaggagggaggtcaccggccacaggcgggggcctcagtttcccacgctacagggctcacacgtgtctggcctgcgacgcgctctcccttcgccggggtcccagtttcccgcccaggaaacctcggtccctcctccgaggccgccgggccctcctccagagtcccgccagtcccccagagtccaggccagtccccgccgtcacccggtgcgagcccgcgagaggcctagtgcagctggcagccccgccccggcacccgcctgctcttctcgcgggtccggaccgcgagcgcgggggccgacgggtcgccgctgcgccgggccgggatggcggccaccgcgctgctggaggccggcctggcgcgggtgctcttctacccgacgctgctctacaccctgttccgcgggaaggtgccgggtcgggcgcaccgggactggtaccaccgcatcgaccccaccgtgctgctgggcgcgctgccgttgcggagcttgacgcgccaggtgagccgggccggggagcccgggcccctgccccgtccccgccgctccgtccctgtcgggccgctggggtctccaccgtctttgctgagccacctctttgcctcggcagctggtacaggacgagaacgtgcgcggggtgatcaccatgaacgaggagtacgagacgaggttcctgtgcaactcttcacaggtgagggaccgggccgaggggcaggctcgggggcccgctccccctcgcccaccgccctgagcctgggacggctagagaagtgtgggggaggtcaccatgcaccggagccag

SEQ ID NO: 7130 - DNA, 2300 bp, Homo sapien
tactctccatgcattcttgccatcagttaatttggcctctttttttttttttttgagatggagtcttgctctgtcgtccaggctggagtgcagtggcgcaatctcggctcactgcaagctccgcctcccgggttcacaccattctcctgcctcagcctccctagtagctgggactacaggtgcccaccaccacgcccggctaatttttgtatttttagtagagacagggtttcatcgtgttagccaggatgctctcgatctcctgacctcgtgatccgcccgcctccgcctcccaaagtgctgggattacaggcatgagcccccgcgcccggcctttttttttttttttttaagacggattctcactttgttgcccaggctggaatgcagtggtgcaatctcagctcgctgcaacctccacttcccagtttcaggctattttcctgccttagcctcccaagtaggtgggattacaggtgctgccaccacgcctaatttttgtatttttagtagagatggggtttcaccatgttggccaggctggtctggaactcctgatctcagatagtctgcctgcctctgcctcccaaaatgctgggattacaggtgtgagccactgtgcctggcctaacctggcctctttgtgtgtctgtgtgtgagagagagagatgggagtttcgctcttgttgcccaggctagagagagagagatggagtttcgctcttgttgcccaggctagagtgcgatggtgcgatctcggctcactgcaacctctacctcctgggttcaagcgatttttctgcctcagcctcccgagtagctgagatttcaggcgcccacgaccacgcccagataattgttgtatttttagtagagatgggtttcaccatgttggccaaactggtctcgaactcctgacctcaggtgatccacccaccttggcctcccagagtcttgggattacaggcatgagccaatgcgcctggcctaacctggcctctttttgatggccagattatgaatggtcgtctctgttttttgttttgttttgtttgtttgtttttgagacagagtcttactccgtctcccaggctggagtgcaatggcatgatctcagctcactgcaacctccgcctctcaaattcaagcaattcttctgtctcagcctcccgagtagctgggactacaggtgcataccaccacgcccggctaatttttgtatttttagtagagacagggtttcaccatattggtcaggctggtctcgaactcttgagcttaggtgatctgcccacctcggcctcccaaagtgctgagatgacaggtgtgagccactgtgcccggccatctcttgtttttttaattttttgtatttatttatttatttttgaataagttatctctggcttgaagttgatatgagctggggagaaggatgtctttgtaaccccagtaccaccaatctatgagctttcaaagttccttgagaactactgtcatcaagttaacaatcttaatcaccctttgtctgaagcactagcttatgagagttttttaaaagctacaaggatgaatacaacagattctccgcccggcataaattgcctcaaagaaagtgactagaggagagttggatgccatacagtaattagagagtagtatgataaagctaggaacaagtgtgagggccaggatcttaaggatatgtgtcttagctgagccttagcctagaatttaacagctgtcatataattttaattttgccaataggaaattggggagaatgtgcacatttacctgattgggaaagagtcatctcgtacccactcgttggctgtgtccttgcactgtgcagaagatgactccatcagtgtaagtggccaaaacagtttgtgccaccagatcactgcggcctgcaagcatggtggagacttgtatgtggtgggagggtccatcccacggcgcatgtggaagtgcaacaatgccaccgttgactgggagtggtgtgctcctttgcctcgggaccggctccagcacaccctggtgtctgtgcccgggaaagatgccatatattcactgggtggcaagacactgcaagataccctctccaacgcagtcatttattatcgcgtaggtgataatgtgtggacagagacaactcagctagaggtggctgtgtcaggggctgctggtgccaacctcaacgggatcatctacttactagggggggaggagaatgatctggacttctttaccaaaccttcccgactcatccagtgctttgacacagagacagacaa

SEQ ID NO: 7131 - DNA, 2300 bp, Homo sapien
accatgcctggccaacctcacaccttaagtatggctatatctcacttgcaaggttaggattgtttcctaacgttggcccatcactaaaaaagtttttagtcttagatatcttgccccatcaccaatttacataggtaattagacccactgggacatacgaagtacaggataaattagagtataatacaaatcactcctcactactctgtgtggttaaatgttgtgctttaattttcctgacttcttcctctaacgcactgtgtctctgacagcaattacactgaatctcacctcaatctttctcagcaggttatctcagtaagaatgcaggaataataatgtaaactaacaccaggaagcttgagggttcttttctcctaaactagaacattcactgaacatcatagccaagtaactgggtatggtgtgtcccctccctaaacttacccgagatgatatctgtgagtaagcggtggggcaagtggagaaattcctctgtattctgcagctgggccaggtgggtcttggcacagtgcttggcagccgtatagagctcaggatcactgtgccgatctgccagccacatcacctgaaggcagtttcccacttgcactgtgcgggccaaaaaccgagagcattcctcaaagagagatgtcagctgatacatgtctgacacctcataaatttcctgcaactcctcagctcgaagtttcacagtcccatggtagatataatcaaccaggagctggaaaacagactcgctgacatcctgcagcacaatcacccggttgtgggcctccttcaggttggaagtgaacatggatcggaagaagcagctctgagctgagaggaccagccgatggagctgaaactcccggccttccaccgaaatggtgacatcagcaaagagctcctcctctagacacagtttcatgatgccttgagccacacggcctgaatgtgaccgatctttgaaagtgtagttcacaaagtagttctcatccatggatgctccaggctcctctggtgattccatgctagccaacttctctctctgccagctgtctgcaaagcaacaccatcttgagtaacctgaggaattcacagccatagtctgtgaatccaactgtccaactcagggagggaaaaggaagaagtgagagcaaagtgggtccagattggccttagtcctggccctatccatgatgtccctgacgctatcctttaaccaaatctgggttcgttatccccagtggcgcccctccgctaatgatataaataaaagttccaactctgggtgttttcctgagaaaacacggaataattcctttccataatgttaacaaaagacttgggatttaggtcaatatatgaaagcaaagggctgggagaggcctgtgatcgtaaaagccttactaaccaaataactggggcataaaactagtgaagctcaggggcagtagaatcagacaaaaaggacccctggccccggcctagtggccaggtcctctccttcccagcgcatggagttaagacgctccatatgaagcctagcctgggatatccgtgggtcttacatttgctctcttctgagctgcttcccccacacttccccgctcgctcgaaagactccctatggctgcgtcccagaacttgagtccatccgcccccaggccggggcactgggaggcccatcaccctgtgcaatgtccccgctccaccttgagtcgtcttggaaacggtcgccagggaaaccgttcttcccgctcaggcccgcccgccctcgtcaaaagcttggctcagagagcgggggaggggtgtgtagcgtagaacccaaaacgcccgccccctcccctcctctcacccgcctggttcttcagcgtcctcgccttctctctaggctctgccacaaggagctaggaccacgctcacctcacgatttccctacctgcctgtctcgctttctcacctgcgttccctcctttcatcccggagcccggaacctccgcttccggctccacgtccgcccggaagaagatctgctgcacacttccgtttccggtccgtgcccttggggctccgtgtcctgctgtctttccgtccgctgcctagtctgcatctgagtaacatggcggcggcggcggtagccaggctgtggtggcgcgggatcttgggggcctcggcgctgaccaggggtgagcacgggcagccagctgagaccggggtcaggcgcagcggcgtgcccagtgcagagagctcctcagggctcatcccgcgcgtctgtgccttttatctccctg

SEQ ID NO: 7132 - DNA, 2300 bp, Homo sapien
tgactctgaagttccagtttaactgctgtgttctattgtatgttacaaactgaaattaatatccttacccccaaaaccttctcagatctcccaactgacctcaaaacggttttgccgagttgggacgtccactgctgtcaagtcaaccagagatttgaactgtgcattggtgtgatccctgaggaaagtcagcactgggatgacgccatcaggatggatacagacctctaactcattgaagcaggacacctgcacacatgaaagtgaggggagagggaacaaagagctactgagggaacagctaacttcagctggagtcacctggtttaatgctgagagaaaagtccaagcttgggatggaggaatctgtagtttctttgaaacaagtctgcccactcccacatgccctgcgaacatggttctttcttgacccagacccaaataacattagtaagtattacctgaacttgttggacatacttgggcaagatttcagccacatactctccaaaagctgagagctgcttgtgggccacatcattccgtggtctgacagtggctggaaggaaaaggcatatttaaaaaagaaatggagaaggcaaaagccagccctgcatgcagtctcttaggcttgtaagggatgtcaaatccaggaaaggctccctgaagcaccttgagaaaggtgcatgtgaaaggtttcccttctagggaatacagtgatgaaaacttggggaaagtgccaccttaactacacggtcctcagaaagactcttactatagcagctggggtgttcacctcttctcaaaattactccacagttcttccctcacattgcctgcatttctgctaaagcagtagtctcagttctcctgtcagactaagagctgtttgaggatgggaactgaacttttgcctctctgtagctccttagcacgcaagtttataccaggttctcaagctaagaacttcagggcttgaagatccctcacagactctctctctccttaaaagtgtgtgtgtgtgtgtgtgtcaatgagaaaactgaggcccaggtgtgtgtgtgtgtgtgtgtgtgtgtgtgtgtgtgtgtgtgtgtgtcaatgagaaaacccaggaaaggagaaatgccaggtctcctaactcccagtccgtgtatcttgactgtaacataatatgtacatactcattcatgcaaccctaaaccactgagcaatcacacatcacaagctacagaataatggttaggtgtttctgcctctggcagcaggcaggcctactttgtcattcactaggtctttgaccctgggcagtttaattctttggactgtttcctgatctatagtaagaagagtaagatgctatctaccccataaggctgttgtgaggacgaaataagatcattcactaaaacgcttagcgaggttccaggcacacattaagcactcaattaacgctaggtactattattacagggctctgaggcctaaaggttatattgcttgctttcaaagagctgacagtttaatcagacaaaaaggggatgattgaaatggacaaggaacaatcagggccataacaggcctaagggcacagggagggctcgattctgcatgcagggtgaagaccactgcaagtcagatctccaagatttgccaggaggacgtagggaagggcatcctagggcaaggacaggcatctaaggggccccgccgatagttcagagaagagcgctgcccgcacatactcacggcgcgtgtcggccccggcgctctcccgcctcaccggcagcaacagaacggagggtcgcccagtccctgcacagggagataaaaggcacagacgcgcgggatgagccctgaggagctctctgcactgggcacgccgctgcgcctgaccccggtctcagctggctgcccgtgctcacccctggtcagcgccgaggcccccaagatcccgcgccaccacagcctggctaccgccgccgccgccatgttactcagatgcagactaggcagcggacggaaagacagcaggacacggagccccaagggcacggaccggaaacggaagtgtgcagcagatcttcttccgggcggacgtggagccggaagcggaggttccgggctccgggatgaaaggagggaacgcaggtgagaaagcgagacaggcaggtagggaaatcgtgaggtgagcgtggtcctagctccttgtggcagagcctagagagaaggcgaggacgctgaagaaccaggcgggtgagaggaggggagggggcgggcgttttgggttctacgctaca

SEQ ID NO: 7133 - DNA, 2300 bp, Homo sapien
gtgatgctttgggggggacacaggcaggcaggggtgtttccctgctctcttagagaggcactactaaaccagggagtctttgatgggtttttttttttttttttgagacagtgtttcgctcttgttgccgaggctggagtacaatggcgtgatctcggctcaccacaacctccgcctcctgggttcaagtaattctcttgcctcagcctcccgagtagctgggattacaggtgtgtgccaccacacctggctaattttgtatttttagtaaagacggggtttctccatattggtcaggctgttcttgaactcctgacctcaggtgatctgtctgcttcggcctcccaaagtgctggaattataggcgtgagccactgtgaccagctcttttatgtttttttgagatggagtctcgctctgtcacccaggctggagtgcagtggtgctgtcgcagctcgctgcaacctccacctcccaggcccaagcggttctcccccctcagcctcccaagaagctgggattacagatgcacgccaccacgcccagctagtttttatagtttttgtagagatgggatttcaccatgttgcccaggctggtctcgaactcctggcctcaaatgatccacactggcctcccaaagtgctgggattataggcgtgagccaccacactcagccggaggtctattttaatgggactaaagagtgtagttgcagacgtggtggcctgcaggcatggatgtatttctgagagggattctggagctgtaactgaaagttctcacagtccacagggttcaggatgggtgtggcatggtagccaatcactcttgggctacaggaatctccctggtttctggcctgagctgagaatggtggggttctttttttcttcttcttttttttttttttttgagatggagttttgctattgttgcacaggctggagtgcaatggcatgatcttggttcactgtgaccgccgcctcccgggttcaagcaactctgcctcagcctcccgagtagctgggattacaggcttgcgccaccacgcccggccaattttgtatttttagtagagatggggtttctccatgttggtcaggctggtctcaaactcccgacctcaggtgatctgcccgcctcggcctcccagagtgctgggattacaggcgtgagccaccgcgccaggctggtgggggttttttgagacagggtcttggtctgtcacctaggctagagtgagtacagcagtgtgatcgtggttcactgcagtctagactgcctgggctcaggtgatcctcccacctcagcctcctgagtagctaggaccacaggtgtgtaccaccatacccagctaatttatttgtagagatgagggctcaccatgttgcccaggctggtcttgaactcctgggctcaagccatcctcctgtcttgccctcctaaagtgctgggattacaggcatgagccaccgtgcccgctctgaattaagaatgttgctaggaaacaagaggtcccagggctggggcaaaaaccactcaggagctgcagatttgtctgtctgccaggggacaatacgccctagcccagctgatctgtctgtccagcctgcggcagagtgcctgagaggggagtgcttggctctgcctgtctgtggggccgcccagccagcccaccatgcagttggaagactttgcagctgatgcttttggcagctgaggggctccttggaggctgggctgggccagactgggtgtcggggctggcctcagtcgcaggatattttgagggcgcagacagtaagatggtcttactgcctgagctctttcctaccctttgggagggccaagctacagctatttgctaccaaacacctttttcctattaactaagcataccgcccagctgggcaggaacaggctgagggcctgacaagcagggagccaggctcctgccaacaaccaaagattccccatttctaaaggatggaaagagcccctgggaggtgaccgaggccacagccagcccctccctgttcagcactgaagaatgacacgcattacagagctctggagcagcccgcagtggaaagttggagctgaggtgtgtggcaggcagatgagggagcagagaactgctgaacagagtgagactcagaggacgtggttgagcatggctgcgaccctgcagttcctggtttgcctggtggtagccatttgtctcctctctggtgtgactacaacccagccccatgcaggtaccaggcttcagggtgggtggagaggagccaaggctg

SEQ ID NO: 7134 - DNA, 2300 bp, Homo sapien
aaaaaattttaaaaaaaattagccaggcatggtgacctgcacctgtagtcccagctacctgggaggctgaggtgggagaatcacttgagcccgcaaggtcaaagctgcagtgagccaagatcataccattgcactccagcccaggtgacacagcaagaccctctctcaaaaataaataaaattgtggctgcaaaacaagagaggagggagcagggactataaccagcctagggcttttctctggatcctgctgccacctcttcttaactcccattctggagcccacccatctgccttacacccaccagctcatggcatcatctttctctatatccctttcccagtggcttcctccctatcccagtcccctgatgcaaatcctgatgtcatctgccccagccacccatctctacctcaaccctcacttctctggtgagaactcttgtggatccagggagtgtcaaatcccagcctgaaccaaacctcaactgagattatattatcctataatataccttctcccctcccctcccctcccaccattggaatcaccctcaggagagcagctccactcttctcatccagaaggggcccatggccctaagaagggccatagattgccataggttggcttttggcatcccccagctctccttcgacatccctgtgtggctcatcccacccttaccctgcttcttgtcctccccacagtcctgtggcccaagcttttcaagttggtgaaagagacagttgtgatctgacaagggctagacaggtgcttcaccctctgtcaccaaataccctcattatccagcccaaaacacctccattcattcctttctattctggcacatattcgttaattcattccatcattcacctaacacccttgaagcagagccaatcacctctaccaacatcttcctagagacaaatagattaactggggtggggtaaactttgagagctccaaaaggaaagctccagaggacgggggttctgcaggggtccaggcctctcagggaccacagagcagacctgcagcagaggcagaattagagcccatggctctggagtcaaccagggccaggcagagggcaccagctcttggctgctgaaagtagagctcttcaaaagtcatccactcagtcagcatctactgagtgccaggcagtgtcgtcacctctacagccgtcaggggagagaacagcagcctagagaaagggagtctgagcccccatcccacgggctcgaagcccagagtagaggccagcactagtgcctctggtgagtattaccatgggaagaccgctgttcccagcccgggtgccctgctggactcttgctagcctggccccagcgaggcagggcatcagtttccctctccagaggcctttcttccccacctattgccctctcaatcctgtcccttcttgcaggagcaaccttcccagcagaaaattccattctgccccaaggactctcctccttactgcccctcaccccggggaacgcaggctgcccctctgatgcctgcagactcccttctccctctttcctaaccgaccgtgggcattttccaatttggaggtgaggaggaaaaactaggttattttcagctcttcctttactggcaacattgacccatttatccttctcttccttcagacctctcccccaaggccacttagcttggacatctgtcccagccaaaatctcaccttccactgtccttgcagcccaaaggctagtccagcctctgagtccagctctagccctctctccccacactaggaaggaagctggactgtagagcgctctgggccaccccgcgttagctgctgcctctggcctcagtttccccaactgctcagattaatgatgcctgctctctagacccagaggacgaagctctaaggaggtcacagatgaggaagggtccagtgctcggcgcagactccgtgcggagcccctaggccccgcagctcgcccctccctctcccctactcccctcctctccccctcccgtctctcccccgcctcttcgctctcgctcggctccctctctagctgaccttccctttccctcacgcctccccacgcccggcccctggccccagcaccctgtccgctgccgcctcagagccgggaaaagcagccggagcccccgccgcccctgccgcagcgcgggcggtcagcgcgcagcccggcacccgcagcctgcagcctgcagcccgcagcccgcagcccggagccagatcgcgggctcagaccgaacccgactcgaccgccgcccccag

SEQ ID NO: 7135 - DNA, 2300 bp, Homo sapien
cagactgaatcccccaaccacccacccctggcaagaggctctgtgcctccccatgctcactagcatcagtgggacaaggcaatattatttggcaccatcaatgcacaaatccaagaataaataatccaaccaggtgtggtgactcacacctgtaatcccagcactttgggaggcaggtggatcacttgagttcaagagtttgagaccagcctggggcaacatggcgagaccccatctctactaaaaatacaaaaaaaatagctgggcatggtggtgcacacctgtggtcccagctaattgggagactaaggtaggaggatcgcttgagcccaggaggtggaggttgcagtgagccgagattgcaccactgcactccagcctgggtgacaaagagagaccctgtctcaaaaaaaaaaagaaaagaatcccctgctaaatagtctctctggctcagctttatgtttctagattcagttagaagcaacttgtttcttacaactttattttttatttatttattcttttgagactgagtctcgccctgtcacccaggctggagtgcaatggcgcaatcttggctcactgcaacctccaactcccgagttcaagcgattctcctgcctcagcctcccgagtagctgggattacaggcacccgccatcacacccaactaatttttgtacttttagtacagatggggtttcaccatgtcggtcaggctggtcttgaactcccgacctcaggtgatccacccacctcagccttctaaagtgttgggattacaggtgtgagccaccgtgcccagccaatatctgtatttcaatataaagttttttaaaaaaaaccctttcctatgcataatttcacttaatgctcataataaccctgagagatacacagtagtgttagatttagatacaaaaactggaaattaaagtagctaaaatgacaaatggatgcagtggaaaagccaggatccaaatccaagtctttcccctacagtacttcactctgctccaagctcagattcaccaaatgttgtttgatagaacacgtgagctggggctgaaggagcagggacaatgcctttttcacttttgcctctgatagcctgtagactggtaggcactgaagtatttgttcacttgtgcaataaatatttattgagcacctcgtatgtgctgggcactgaaaacacaaccgtgaacagaggctgtcacggttcctgaactcatggagctttcattccagtggaggagacataatttcagtgataatgctacgacggggcacaatgtgggagaaaataagagggaggtggccaggcgcgatggctcctcactcctgtaatcccagcactttgggaggccaaggcgggtgaatcacgaggtcaggagtttgagaccagcccggccaacatcgtgaaaccccgtctctactaaatagacaaaaattagccgggcgtggtggcgtgtgcgtgtaatcccagctactagggaggctgaggcaggagcattgcttgaacctgggaggcgaaggttgcagtgagctgagatcgggccactgcactccagcctgggtgacagagcgagactccgtctcaaaaaaaaaaaaaaaaagaaagaaaaagaaaagggggaggtaattttagaatggtcagagaaggtttttttgaaaagataacattaatcaaacgaataaatgaatgaaaagccactcgctagcggattcattatttgctatacttatttagagtttgtcagtcacgagactgttacggctctgatgctgagtatcttttgaatcctatgttgatgatgcccaaaaggcaagtgcagagatgaagcataatgaagaatccttttcaatttcttttcagtcctctgaccttgcctctgccgtcacggtcacactcccccactgacactcccattcttctgtttccggacacttgcggcctggaagcgcatgtgcaagagaaaccgtcattcctggtgaagggcgagcccccggcagaacgcatgcgcctctgtcccttaagccccgccccgacctcagcgccccctcgcgagcgcctgccgtttctcggggcgggacgggggggcggggactgggcggagaggcgcgtgctgctgcgtgcgtgcgcgcgcgccgcgggcgggccagtgaaaccggcggccctggcacgtgacctaggaccggctcaccgggtcgcttggtggctccgtctgtctgtccgtccgcccgcgggtgccatcatggcggacgcggccagtcaggtgctcctgggctccggtctc

SEQ ID NO: 7136 - DNA, 2300 bp, Homo sapien
ttctagatatgacaccaaaagcataattcatttaaaaaaaaattgatgttggatggccaggcgtggtggctcacacctgtaatcccagcactttgggaggctgagacgggcagatcacaaggtcaggagatcgagaccatcctggctaacacggtgaaactccgtctctactaaatatacaaaaaaattagccaggcgtggtggtgggcgcctgtagtcccagctactcgggaggctgaggcaggacaatggcatgaacctgggaggcggagcttgcagtgagccaagatcgtgtcactgcactccagcctgggtgacagagtgagactctgtcccaaaaaaaaaaaaaaaaaaaaaaaaagattaaaagtctctgcaaagatagttgaaaattagaaatttcattgttggtctagaatagtgttgaccacttagaggggccacttaagtatttgctgaatgagtggattctgagtagaacctagcctaaatatatcttttctctgcagtgcctatagaaggttcctattttaccagttccagagtgggaggcaaacgaggaattgtcaaggaacttgctgtcacgttgcaaggaccagaagataatactctactgtttgaatcaaggtttgagagtgggaatctgcaaaaagctgtcagagtgtgagtaacaatttctcaaagggatgataattggagtgactagaaggtgtcttcagtaatgatattaggaatcagaagtacttgcaaaaaagaaagaggtgatggggaatagttatgggtatgaagaaaaatggagtaattattactcattttttccccaaaataaaatgttttctaaattgtttactttgcttatagaagaaattagagctcacctaaaatttgtattagtaaaaatatgtaacataaaaagtcctatagtcatacttcctagatgcagcaaatattaagtttagtgtatatgccttaatatttttctgtgtgtgtatatgtaatatgcacaaattatatatatatatatatatatatatattttttttttttttttttttcttgagatggagtctctctctgttgcccaggctggagtgcagtgacatgatcttggctcactgcaagctccgcctcccaggttcatgccattctcctgcctcagcctcctgagtagctaggactacaggcgcctgccaccatgcctggctaatttttttgtatttttagtagagacgggatttcaccatgttagccaggatggtctcgatctcctgatttcgcgatctgcccgtctcggcctcccaaagtgcagggattacaggcatgagccactgtgcccggccatttatatatttttaaaataaaaattgattaatggtgtatgtacatattgttttgcaaattggcaaattttttttccacttcataaatttcaggtgtttttctatggcagtaccatagatatacttccttattgtttttgtttgtttgtttgttttttcctcaagatggagtcttgctctgttgctcaggctggagagcaatggcacgatctcagctcactgcaacctacacctcgtgggttcaagtgattctcttgcttcagcctcctgagtagctgggattacaggcacccgccaccacacctggctaatttttttttttttttgtatatttagtagagatggggtttcaccatgttggccaggctggtcttgaactcctgacctcaggtaatcagcccgcctcagcctcccaaagtgctgggattacagagaataaatgattaaggtagcagatttttctgttgtaataagacctgtttttaccaggagaaaacaacattttcccaatttgttttttaaggcagggtgtaagcttacagagttgttctattttctccattacagagacacctatgagtatgaactcaccttgcgaactgacctctacactaacaaacacactcagtggttttattttcgtgttcagaacaccagaaaagatgctacctatcgcttcaccattgtcaacttgctaaaacccaagagtctttatactgtagggatgaagccactcttgtactcccaattggatgccaacacccgcaatattggctggaggagagaaggaaatgaaatcaagtactacaagaacaacacggatgatgggcagcagcccttctactgtctcacgtggaccattcagtttccatatgaccaggacacttgcttctttgcacacttctacccatatacatacactgatttgcaatgctacctcctgtcagtggcaaacaaccc

SEQ ID NO: 7137 - DNA, 2300 bp, Homo sapien
gcagcaggtgttcatatccttgattttgagaatttcccctcaagtatgtggcagtaaatacaacaagacactctatgtattaatgtctccattgtcttaaccctgttccaaaacaaaattcacctcctttctttatgtgaatgtattctccataaaattccagtatttaaaaagcagtttactgttctgtactttctgttgtatcacaatcaggtaaaagtcactttaaactgaggaaacggcaaattgtgttttaaagctctttgtatttctccagtttctgaccttgtaaatttgtatatatgcactaataaagctttttttataatcctgatgggttatccttttgctcgtcaactcctgttattctgattatgtaaccaggacttgtttttttttctaagcatatacaatgcaaggtgcaaacatttaacaacagctttcaagaaaatgagcaggagatctttaatggggagtggtggggccagtttagacaaacaggcttctagtcccagatggtgctgtgtgatcaaagttttggggtctaatattatctataatatctagattggttaatagccatattagataatattttacctacttaattcctggcaatgatgtaatatggttaacatttcagaaaaaaaggtgctttatagcttttttccccccactgataaaagtaacagatacggttatattcatatatagttaaccaaagacacgtgtttgaattttattgtagtatatttatttttttgttgttggttttttgttttttttttttctggagacagaatttcgctcttgttgctcaggctggagtgcaatggcacgatctcggctcaccgcaacctccgcctcccaggttcaagtgattctcctgcctcagcctcccgagtagctgggattacaggcatgcgccaccacacccagctaattttgtatttttagtagagatggggtttttccatgttggtcaggctagtctccaactctcgacctcccaaagttctgggattacaggcgagagccaccgcgcctggcctggagtaaatttctatgcatataattgatttttttaaacctaatcaaaatgtgtgatttgaatttgttagctctgtttcttaagatttgcagtgtagaaggtaatttttcctttctagctgtgcagtggagagaatgttaaggtgaaaggagagaagcagcagctctcttagagcaaattatgcataacagttatctaaagccaacagcaaaccagcttggaagtatgttgaaggctactggcatcgtactcatcaatgcggtttcgattccgaggctggggctgtgatgtatgaggggaagaaagccgctgcccgccatacatgttgcagaccttcccggggtccccgctccctccttgggggcgaggcctagctccccggaagcgcccgaccgccccgccctttctccgcttcctgctttcggttgctagactacccgggccctcacagaaggcggtggcgggcgggtgcagcgagtttgtccccttgcccgcacactgcttggcctctgtacttaagtgcggtggccgcctgcctcgctggagcttctctgccgcagccatccgtgctgcttgggacgggccggggcgcgaaggcggtcgcatccatcgctctgccctcctgggaagtttctgctctccttccccgctcctacccttaggaaaccccctcaccacctgccccagaccaggttcctctgaaccctaaattcaatctttagggcccactttcccaaccccctgacctttttccatcggcacctaccgagacgacttcgtcgcgtgctcccatacccatttctttcactttcctgtggcgagcatctcctttctcagggaaagggaagcatggggccagcaccttgggaagaagaagcgggaagatacgctgccctccctgtctcagatgcacctctggcctcggcgtgaccaccttgtttagctgaggagaagctgggttggcagggttttctgaagtcaagagggagctggggggcgcccggggaggtattggcagttttttcacttgtcctcttgtggctttgtagcttctcttgtgtaatcagctgcctatttggaaattgggcagggtttgcgactggatgctaatgtcactgactagttttcagcctaccatccagaagtaacatgttcccagctttggaaacgcacctaaagcaggtcggtacacaacacggaaagccacagaaatttcttcggggaactccatttcttcgggaactccaca

SEQ ID NO: 7138 - DNA, 2300 bp, Homo sapien
gcaaggctgaagagaaggaaaatggctccaaacacatagtttttaagtttttaaaacttttttgtattattgtttgttttgtgttcagttcaaagtcttaaccagttttattgtcaaataaactataaatgttatgggggagatcttataaatttcctgggcaagagtgtatgcatacaaagttttcacttttgtgaaatgtaatttttctgtttttgcaaagggatgaggtgattggaattgctttgaccatgctgcctttattctcaaactggcaaacttagcatgttaggtgtattaacctcatcagtcttgaagaacatgtggctcatgagtataacacttctgtagaggactccctgacaaaagtgaagaattaacttctcctccagaacaagtgcaattcagaaggcagctctgcattctaccttgcttgactggaattgtctgaagctttttctggcctcttttctctagtcggccacccctgaagtgctgaggtctaagtggtttacctcgtgctgatagatggccacactctttagagtagttctcataagttctagaactggtagctcggtcgtttcgcacactaggtggcatacaggcagcagcaggtgttcatatccttgattttgagaatttcccctcaagtatgtggcagtaaatacaacaagacactctatgtattaatgtctccattgtcttaaccctgttccaaaacaaaattcacctcctttctttatgtgaatgtattctccataaaattccagtatttaaaaagcagtttactgttctgtactttctgttgtatcacaatcaggtaaaagtcactttaaactgaggaaacggcaaattgtgttttaaagctctttgtatttctccagtttctgaccttgtaaatttgtatatatgcactaataaagctttttttataatcctgatgggttatccttttgctcgtcaactcctgttattctgattatgtaaccaggacttgtttttttttctaagcatatacaatgcaaggtgcaaacatttaacaacagctttcaagaaaatgagcaggagatctttaatggggagtggtggggccagtttagacaaacaggcttctagtcccagatggtgctgtgtgatcaaagttttggggtctaatattatctataatatctagattggttaatagccatattagataatattttacctacttaattcctggcaatgatgtaatatggttaacatttcagaaaaaaaggtgctttatagcttttttccccccactgataaaagtaacagatacggttatattcatatatagttaaccaaagacacgtgtttgaattttattgtagtatatttatttttttgttgttggttttttgttttttttttttctggagacagaatttcgctcttgttgctcaggctggagtgcaatggcacgatctcggctcaccgcaacctccgcctcccaggttcaagtgattctcctgcctcagcctcccgagtagctgggattacaggcatgcgccaccacacccagctaattttgtatttttagtagagatggggtttttccatgttggtcaggctagtctccaactctcgacctcccaaagttctgggattacaggcgagagccaccgcgcctggcctggagtaaatttctatgcatataattgatttttttaaacctaatcaaaatgtgtgatttgaatttgttagctctgtttcttaagatttgcagtgtagaaggtaatttttcctttctagctgtgcagtggagagaatgttaaggtgaaaggagagaagcagcagctctcttagagcaaattatgcataacagttatctaaagccaacagcaaaccagcttggaagtatgttgaaggctactggcatcgtactcatcaatgcggtttcgattccgaggctggggctgtgatgtatgaggggaagaaagccgctgcccgccatacatgttgcagaccttcccggggtccccgctccctccttgggggcgaggcctagctccccggaagcgcccgaccgccccgccctttctccgcttcctgctttcggttgctagactacccgggccctcacagaaggcggtggcgggcgggtgcagcgagtttgtccccttgcccgcacactgcttggcctctgtacttaagtgcggtggccgcctgcctcgctggagcttctctgccgcagccatccgtgctgcttgggacgggccggggcgcgaaggcggtcgcatccatcgctctgccctcctgggaagtttctgctc

SEQ ID NO: 7139 - DNA, 2300 bp, Homo sapien
aaaaaaaaaaaaaaaaaaaaagacgcctacagaagcaaggttcttaggtgcagtgactcatgcctgtaattccagcactttgggagtttgaggcaagaggatcacttgagctcaggaattcaaaaccagcctgggcaatatggcaagaccccatctttgcagaatattagcctagcttggtagcacgagtatgtggtcctagctacttggaaggctgaggtgggaaggatcacttgagcctggtaggttgaagctgcagtgagctatattcacaccattgcactctagcttgaacaacaaagtgagatcctgtctcaaaaagaaaaaggaaaaattacagctcacggctgtaatcccagcactttgggaggccaaggcgcgcagatcacttgaggtcaggagtttgagaccagccaacatggtatcaccctgtctctactaaaaatacaaaaattagccaggtgtcgtggcgggtgcctgtaatcccagctactcgggaggctgaggcaggagaatcgcttgaacccaggaggcagagattacagtgaaccaagatgacacctctgcactccagcctgggcaacaggcttaaagactccgtcttaaaaaaaaattaagaatttgtattctcataacatattcagttttaagcttgtagcttttaaatctttgagcacgtaataaaagctgcgtaggccaagtgtggtggctcatgcttgtaatcccagcactttgggaggctgaggcaggaggatcacctgaggtcgggagttcaagagcagcttacccaatatgtagaaaccccgcctctactaaaaatacaaaattagccaggcgtggtcgcatgcctgtaatcctagctactcgggaggctgaggcaggagaatcattgaacccaggaggcggaggttgtggtgggccaatatcacaccattgcactccaacctgggcaacaagagcaagagtccatctaaaaaaagagctgtatataccactttaatctgtccttgggcttcagacttaaatattctcttaaacagcaaaaatactaactaagttaaatttaaaagcaaggagaagcatcattgtaatacgacatccatgtgtattcaaactagaattttctgatggtcttcgtaagataaaggagataattgtcatttctatgacacagcttttataatttgaataaacttagttggagattggagtatttttattatttattttcatgtgagatgggtaatgtgctgacctcataacaaagtttgagggagacacattgtatgtgagaatttgaagtgcttatgaagtacaaaagcagaggccaggtgctcacatctgtaatcccagcactttgggaggccaaggcacacagatcacttgaggtcaggagtttgagaccagcctggccaacatggcgaaaacccctctcttactaaaaatacaaaaattagctggatgtggtggtgtgggcctgtaatcccagctactcgcgaggctgaggcaggagaatcgcttgaacctggcaggcagaggttgcggtgagccaagattgcgtcactgcactccggcgtggacaagagagtgagactccgtcacaaaaaaaaaaaaaaaagaagaaaagtattggattcacatattctaaaaatgctcgtcatttgtggctaattttatcaagtctagtttaatctcatatttacagagtttagttaattctaattagctttgttggaggtcataaaccacattattaaccttgaaccgactctgtgtttacttgagttcctctgcataatagcatgtcaccaccatcataaacatgttggtattgcattatgcttctagaggagacatccaccaatatttgaaaatctggctggtccgagtgcagtggtgtttacaactaattaatcacaaccagttacagactttgtttcttctccagtcctgctgcttcacttgactagccttttaaaaaaaagaaagaaaatagagaaaatcttaacttatatttacttactgtatgttgtgattagtttaatagaagggagtttaatccttaataattaagttagtcctcaacgtttattgacttagttctgatgtagtccttgtgtactattgtataatgtagactacttggccatacttgattttgtctaaaagttaatgcataaattaatattaaatatggccaaatataaaagtttaatgagtcatttgaggtcatttagccagaaaactgcatttatgttcctggtgaatttttttcaatgtccttttccaaaagtggcagt

SEQ ID NO: 7140 - DNA, 2300 bp, Homo sapien
ctttgcagtgttgtccaatctggagaaagtgaggaggaagaggaacaagatacccttgaactggagctagttttggaaaggaaaaaagtaagcttttgaaagttacttgtagaatgttttttcctcagtactactctacagggatcattgtgcttgacttacaaccattattgggattttgtttttcttatcccatcatctaggtatgttgaagcttatgcagcaaaaactttaaactacagaggtgtaggttttttggtccttgatgatacttttggtagttatcgggggaactcacccccaatatttcaacctaggttctttctattttccataagtgtcggccagctgagaaatagaaagagtataatgagaggaattttacagctgggccgccgggggtgacatcacatatcggtaggactatgatgcccacccgagcctcaaaccagcaagttttttattaagggtttcaaaaggggaggaggtgtaagaacagggagtagatcatgtgcttcaaagggcaaaaaggtactgataagggtctatgttcagcggtgcacatgttgtcttgataaacatcttaaacaacagaaaacagggttcaagagcagagaatcagtctgaccacagacttaccagggccgggtttttccccaccctaataagcctgagggtacttcaggagaccagggcgtatctcagtccttatctcaaccgcataggacagacattcccagagcggcagtttatagacctacccccaggaatgcattccttccccaggatattaatattaatattccttgctaggaaaagaatttagcgatatcttccctacttgcatgtccatttatgggctctatgcaagaagaaaaatatggctctttttgcctgaccctgcaggcagtgagaccttatggttttcttcccttgttccctaaaaatcactgttactctgttctttttcaaggtgcactgatttcatactgttcaaacacgttttacaatcaatttgtacagttaacacaattatcacagtggtcctgaggtgatgtacatcctcagcttactaagataacaggattaagagattaaagtaagaaaggcataagaaattgtaaaagtgttatttgggaattgataaatgtccatattaaaatgaaatcttcacaatttatgttcctctgccatggcttcagctggtccttccattcaggatccctgacttcccacaacaggtagttgataatcaataaagagacttgacattactcagacttatacaaatgggtaccagaaaaaaaccagaaagaatgaataagacctactatttgatagcacagtagggtgactagtcaataataactgtatattataaaataactttaaagaatgaagttggattatttgtaactcaaaggataaatgcttgaggggatggttatcccattctccatgatgtgcttatttcacattgcatacctgtgtcaaaacatctcatgtatcccataaatatatacacttactatgtacccacaaaaaaatgggcaaaattaaaaaataaaaatagagtgagtaggccgagtgcagtggctcatgcctgtaatcccaggactttgggaggctgagcaggagatcacttgagcccagaagttgagaccaatgtgagcaacatacccagatatcatctcttactagaaaaaaaaagtatgatgacatgtgcctgtagttccagctacttggaagggtgaggtgggaggattgcttgagctcagaaggttgtagctacagcgagccatgatcatgccactgcactccaacctgggcaacagagggagagcctgtctccaaaaaaaaaaaagtgctttctgttctcaaagaatttaaatttcaacaacatagtcttgtttattattctgattatacatattaataagcagttaatgacactaacttaattgtcatgttctttgtaggcagagttgcgagccttggaggaaggagatggtagtgtgtcagggtctagtccacgttctgatatcagccagccagcatctcaagatggaatgcgtaggcttatgtctaaaagaggaaaatggaagatgtttgttcgagctaccagtccagaatctaccagtaggagttctagtaaaactggacgagatactccagaaaatggagaaactggtaatttgtgcttcacattaaacttcagagttgaaagatatagaggggaaggaaactcttgtctttttttgtttcctcttcaacaaaacaggagattgtacttttactct

SEQ ID NO: 7141 - DNA, 2300 bp, Homo sapien
aggggtcaatctttaactaccaggcccagggtgtggtgccgggctgtctgcctgtggatttcatttctgccttttagtttttactttttctttctttggaggcagaaactgggcataagacaatatgaggggtggtctcctcccttaagccaaaatcgcaccactgccttccaacctgggcgactctgtatacaaaaaaaaatctgtaatctcagcactttgggaggccaaggcagacagatcatgaggtcaggagatctagaccagcctggccaatatggtgaaaccacatctctactaagatacaaaaaattagacaggcaaggtgctgcgcgcctgtagtaccagctactcaggaggctgaggcaggggaatcgcttgaacctggaaggcagagattgcagtgagccaagatcgtgccaccgcactccagcctggcgacagagagaagctctctcaaaaataaattaattaaaattaaaattaaaaaattaggccaggcacgctggctcacacctgtaatcccagcactttgggaggccgaggcgggtggatcacctgaggtcaggagttcaagaccagcctgaccaacatggcaaaaccctgtctcaactaaaaatacaaaaattagccaggcgtggtggtgggcgcctattatctcagctactggggaggctgaggcaggagagttgcttggacccggagggcagaggctgcagtgagtcgagattgcgccattgcactccagcctgggcaacagagcgagacaccgtctcaaaaaaaaaatggctttagcccaggagtttgaggatgcagtgggctataatcatgccacgttactccaacctggatgacagagcaagacacgtttaaaaataaaattagaaataatcattttaaaagatcaaatgcaattctacgtgtaaagtgcttggtgactgacacatagagctcagtaagtattagatatttttagtgggaactgagctgctgcggatataaaaataaataccactcgcattccttagtttagaggggagacggatgtcaacaggatgtcaagtgccagggagaggctgggcaggagaggtcacgcctgcactgcgtctgcattgcgccctgatgaaacaataaaagactttcatcatgtgatgcagtaattattccagtcagtgcaaaggaaaagtgagggaggtgatgctccaagtggcgggctccagaggcaggagacgggagagggggcagtgttaaagcaagggtaaattaaagcatgttgacgatagtagtacaaaactggtaaggttcctgtatgccatcccaacaattttaggctttttccttgtaggtagtggagtatctcgtgatttttcccagctaataagcgagaaaatatgagacatctatttgtgtgctgcaggaaattacaaaagcgtaaaagacccactgtcccatttaatgttcaatgctatacccaaagtaagccacaataatccgggcgaaacgtggggaagggctcagaaaacagcacacctttcttttttttcttgagacagtctcactctgtcacccagggtggggtgcagtggcgcgatctcggctcactgtaacctttgccgccgggttcatgcgattcgcctgcctcagtctcccgactagctaggattacaggcgcctgccaccgcgcccgactaaatcttttgtatttttagtagagacggggtttcaccatcttggacaagctggtcttgaactcctgacctcgtgatccacccgcctcggcctcccaaagtgttgagattacaggcgtgagtgagctgggcccagcagcacacctttctagaagacagacaacatgaaactctaggccgagaatagccacaagatggaggacaagtaggcaaagaaaaggcttggggaaagcgcatgggtggaacccgacggaagtggggaagtcgttctaattcaggccctaccgcactattggctggactctcaccctttttccttttccattggccaccggtcccttctctgggtcaaaacagccaatcgcctagcgcagttggtaatcccgccctttctcctggtgaggaggagccagaagagccgaagggtccgaggcgcttgcgcaagcgcgtgctccgctggttgaaagcggatccgggctggaggcggtgtcacggtgtatgaatattgattacgcgtcgcagcgcccagggcccagcgcccagcctccagtgcccgcccctctcggccgcccgacgctctctgctcgcgcttgggctcgcgatggggaagaa

SEQ ID NO: 7142 - DNA, 2300 bp, Homo sapien
gggatgagccactgtgcctgccttccctatgattttcttaataacattttcttttaagagtacagtataggccaggtgcggtggctcatgcctgtaatccctgtactttgggaggctgaggcgggtggatcacctcaggtcaggagttcaagaccagcctggccaacatgatgaaaccccgtctctagtaaaactacaaaaaatcagctgggtgtggtggcgggtggctgtaatcccagctactcaggtggctgaggcaggagaattgcttgaactcgggaggctgaggttgcagtgggctgagatcgcgccactgcactccagcctgggcaacaagagcaagactccgtctcaaaacaaccacaaccaagagtacagtatataggccaggcacagtgactcacgcctgtaatcccagcacattgggaggccaaggcagacagatcacctgaggttgggagttttgagaccagcctgaccaacatggagaaaccctgtctctactaaaaataaaaaattagctgggcgtggtggcgcattcctgtaatcctagctacttgggaggctgaggcagaaacatcacttgtacccaggagggagaggttgcagtgagccgagatcgcgccattgcactccagtctgggcaataagggcgaaactctgtctcaaaaaaaaaaaaaaaaaagtacagtatataaaatacaaaatatgtgtgaattgactgtttaggttgtcagtaaggcttctggtcagtagtaggctattagtagctaagtttttgggtaatgaaatgttatatgcagagtttcaactgctcaggagccagcatccctaaaccctgcattgttcaagggtcaactatacatgcaatttagacagtagttatattgtaacatatacagttacattgttatatactatacatagtagtaacgttatatactatatattatatataataattacattgctgtaaaaatattgtaaagttccttctttttagtttattttcagcattctaatctgctaaaggttgtctggtagcacttcgaaaatgttgtacaacagtaagagaaatgaaaatgcttaaataagaatgtggtttttttcttgaatgttgtatttaaatcagcttagttccaagctttttttttatcaagttcttttgctatttccacagaggcatgatatccttccataaagagccgaggctctagatttggacacacctggttttatttctgcctctcacagtttggtcatatttctttcttattgatagagatgacagacagtatttcacaattataatagttaaatgaggccaggtgcagtggctcatgccttgtaatcccagcattttgggaggccaaggcaggagggtcatttgagctcaggagttcaagaccagcctgggcaacatagcaagaccctgtagaaaaaaaattttttaggctgggcacagtggctgatgcctgtaatcccagcacgttgggaggctgaggtggctggatcacctgaggtcaggagtttaagaacagcctggccaacatggtaaaaccccgtgtctactaaaaatacaaaaattagctgggcatggtggtgcacgcctgtaatcccagctactcggaaggctgaggcaggagaatcacatgaacccaagaggcggaggttgcagtgagccgagatcatgccactgcactccagcctgggtgacagattgagatttgtttccttaaaaaaaaaaaaaaaagtttaaagagttaaatgaaattacatgtagtaccttgtaagcacctcctcaactgcagtcggttaaaatactttgatttgacatgggatattgcataatttgtttaagttagcatttatttagtgccctattttctccttccttcatgcatttggaaattagattgaatgttacttaatgttcagtggaaattgacaggttgcgttaatctgatggatacttctttgtattttgggagttcaaaatatttttctttgatgtatagcaaatcgacaaattgaaatcctggaactggaagatctggagaaagagtgttccttggctcgcatccgcctcactttggctcagcatgatccatcagcggttgcagttgctggtaggaattcaagagtttaaagcctctgacttgtcagcaccacgagcacattttaggtccaggcagtgtatgtagcatggtagatgggtataaagcctgggttattactcagagatactcatcaacaaaacaaaatctttggtttcatttgtgtataccttggctacacga

SEQ ID NO: 7143 - DNA, 2300 bp, Homo sapien
ttgctagaatgatgtccttgagcaggtgttctaaggaagtagaaaggttgtctctgcataagctcagagacagtttatagtaacaggaagggaaggcaaaatatgtggttacagatgctggtaggtggggagatgtcattatagaggaagtcctcccttcctccttccttctttccagatgggtgtctttctggccatgctggagcacagtggcaggattgtagctcactgtatcctccaactcctgggctcaagaaacctcctatagctgggactacagaggcacacaactatgcctggctagttttttaaaaatttttattagagatgggggtatgttgcccaggcttgtcttgaactcctggcctcaagccatccttccatctcagcctctgctttaattttctaaatgaagaagcaagctgagagtcaggatgacaaaggaggcaatggaggttataggagttatgaaatattcatttagaacagtaaatggagaaggcaaatacaatgtgtttgctgggcagcattatgggcccactcaaggtacatggtcctgatggagttacagggaggcatgtcagtatgggtgtatagttttctgttttctttcttttctttttttgagacggagtttcgctcttgttgcccaggctggagtgcaacggcgagatcttggctcactgtaacctccaccttccgggttcaagcgattctcctgcctcagcttcccaagtagccgggattacatgagcgcaccatcatgcccagctaatttttctttttttctttcttctttttttttttttttttgagacagtctcgctttgtcacccaggctggagtgcagtggcgcgatcttggctcgctgcaacctccacctcccaggttcaagcgattctcctgcctcagcctcccgagtagctgggattacaggcgtgcaccaccatgcccggctaattttttgtatctttaatagagacagggtttcaccatgttggccaggttggtctgaaactccttacctcgtgatccacccacctctgcctcccagagcgctgggattacaggcgtgagccaccgcgcccggctaatttttctatttttggtagagaccgggtttcaccatgttggccaggctggtctcggactcctgacctcaagtgatcctcacgccttggcctcccaaaatgctgggagccacgcccgacccgggtgtatagttttctccagtcatgttcagctacagatttgaatgtagtcgaagttgtagtttttaccgatgaagagttaggcaatgaagtaatttaatggtattcaggataagaaagaaacaccaaagaagtgtgggacagtgaagattttgtagaacaatggattccaggtagaatgaggggactgcactgccaaagttggtgtcccagagggagtgaagtggaaagatagaaaatgatggtcggaaccagataaatgaaacggagaatgacagggaatggttgtggtcactggtaatagaagtgctttaacttctattggctatcactaaggaacaaaaccttccccgctggagattagcattttcctcgattttgaacatctactcccacaatatcttctaaacacccactatgggcccttactgcattgacagccaagtgcaagatcacgggtggaaggaatggcaaattcctttcacgtatccaagtgagtagcactcaggtaacctcagcaagtggcagcaccaaggtttaccacattacgtttcattatacaggaatacacgaatacagtctcttggggaggggaaagaccaaaaccaaaggcctttccctcactaccccttcctcaccccgccatcccaagtgtcgccactgaagagcgaagggaggatcgccaaagatttacagacggacaccctaaccgagggagaggtgaccataaacccgggatccggcagaggacgccgaaaggccgggactccccggacctcgcccctcctggtcgactgagccccgcgttttagaaacagaaacaaacccggccccgccccctgccctgcggccgctgagaaaagagcaccgccctccggaggcgttccagccggccactggaaggttcccgcagatagagtctgcctcccctgcccccttctcttctggattcctcgctgcccaccctcattctcccggtggaagcctcgcaacgaagggccggagccgcctttctgctcccggaatgcttcacctgtccgcagctccgcccgccccacccccggaagtgacggcgaccgcgcggccctg

SEQ ID NO: 7144 - DNA, 2300 bp, Homo sapien
tgaacaccttttatgtctctgcctcaagaggggaggaggcacagaggaacaaaaatccttgtgaattatgataattacatagtgtttaaatgaagggtggcaaggtgtgtaagtccataggtaaggtttcttttttctttttcttttcttttttttgagatggagtctcactctgtcacccaggctggagtgcagtggtgcaatcttggctcactgcaacctccgtctcccgggttcaagcgattctcctgccctcagcctctggagtagctgagattacaggcacgccatcacgcccagctaacttttgtatttttagtagagatgggttttcaccatgttggccaagctggtctcgcactcctgacctcaagtgatctgcctgccccggcctcctgaagtgctggggttacaggtgtggtgtgagccaccacgcccagcctcttcttttttttttttttttttttgagacaggttttcacgttattccccaggttggagtgcagtgttgccatcttggtttactgcagcctaggttcaagccatccttgtatcggcctcccaggtagcttagtctacagctgtgtgccaccacacccggctaatttttgtagaaactgggtttcaccccgttgcccaggctggtttcgaactcttgagcttaagtgatctagtcaccttggcctccggaagtgctgggattacaggcgtgagccatcgtgcggcctggcaaagtttctttatcctcagtgcttgtctgggtgtgttgtctggtgggaaccacttagaccctgtaagtgaatgtgtattcccatcttgtagatggtaacctgaggcccaacgggtgtctggaggtagtgttggacacctcgtggtctgcatcttgctgcacacagaatccagcctagactcattatcctggcctttgaagtctcccccagtatgaatcccccagcctcccattcctgtttctccgaaggccaagctcgaagcatctgctgcctcgtttctgccaagttggccccacctcctgagacacttctcccctctactggcctggtgaaactcaacacatccttcaaagcccagctcaggtgtcacctctctcctggttggaattaacctcttcctccttagcactctctggtttggccctttctcttgcggcttctcctgggcaagtggcatagcctccctgatcctagtgtcttcctctgtgcatgggcacaggagtaatatctgctgtgatctttaactcctgtcagttcattgacctctttaacaacgtgatgaaagcttccagaagagctaatgtatgtggagtcccacgatgtgtcaggctaggtgtttaggactttactaactactgtctcgtttaatcgcgaatgcagtggacctctctctccacacgtcctagtacgatctttatttcacacgggaggagaggagggtgggtggggtcggccagagaggagaaatgcgtctccagagttcacagggctggtactaccagcagagccccgtccaccatatgccacagctggggttctaatccctggactggcttgtactgggctctctgcctccctggccggcgctcgggggctgggggacagaacacaatgtacagcgtgccttctacaatttcggggttcacgcacccccaagcccacccagggccaggtcaaacgcgccttcgccgggttgctgtctacaatcaggcttggctgcgctctcagtaggggtctcggtcaacctctgcccacccgaacccggcgccgtggacctggtgtgaggctggggagcccgtcctgaggggtgccggctcgaggcgctagagccacggagcctggtcccgggctccaagtcccaggaatgtgggagggctgggcggaggggcgggcgaggcgggagcgcttcctctgcccgcgggaggggatccgcggccggctcggagggggcgggggcagcggcgggcggcggcgaggggctgcggagctccgcagccgccgggccggccggggcgggaggaagcgatgaatattcagagggggaggggaagggagggggccgagcgctcgccgcggctccctgcagcagccccagccgcatgacgcgcggaggaggcagcgggagcagccgcgggagccgggaccgggtagccgcgcgctgggggtgggcgccgctcgctccgccccgcgaagcccctgcgcgctcagggacgcggcccccccgcggcagccgcgctaggctccggcgtgtggccgcggccgccgccgccgctgccatgtctccgggga

SEQ ID NO: 7145 - DNA, 2300 bp, Homo sapien
cattttttcctctacatttcctccttcctttgcccttccctgagactgtggcatttttccttggggaggggaggtgtggagtgtgctcttctggttgagaatcattgaggaaggacatcttgcttctgtgatttcagatttcactgcaatgttgttacctcttgaaacatgttcgcttgaaccgtttgctgttgggtggatggggtttgggagttgggcgggggaatgacctgtttgaaaataattttgggtgctaatttctgggacccatgttcattttctgtctctctctttcgtttttctatcaggaccagtatgttttcctcaatcagtgtgttttggatattgtcagatcccagaaagactcaaaagtagatcttatctaccagaacacaactgcaatgacaatctatgaaaaccttgcgcccgtgaccacatttggaaagaccaatggttacatcgcctaattccaaaggaataacctttctggagtgaaccagaccgtcgcacccacagcgaaggcacatgccccgatgtcgacatgtttttatatgtctaatatcttaattctttgttctgttttgtgagaactaattttgagggcatgaagctgcatatgatagatgacaaattggggctgtcgggggctgtggatgggtggggagcaaatcatctgcattcctgatgaccaatgggatgaggtcactttttttttttttcccccttgaggattgtggaaaaccaggaaaagggagctatgatttttttttccaaaacaatttcttttttaaaaaagactattttatatgattcacatgctaaagccaggattgtgttgggttgaatatattttaagtatcagaggtctatttttacctactgtgtcttggaatctagccgatggaaaatacctaattgtggatgatgattgcgcagggaggggtacgtggcacctcttccgaatgggttttctatttgaacatgtgccttttctgaattatgcttccacaggcaaaactcagtagagatctatatttttgtactgaatctcataattggaatatacggaatatttaaacagtagcttagcatcagaggtttgcttcctcagtaacatttctgttctcatttgatcaggggaggcctctttgccccgactccgcttcccctgccccctgtacatttgtgctccattttttcttcccttttccctcccagttttctccaaagactcttctgttggcaacattttcaacccattggttgggtgagaatggcgactcaaatatcaccttgagaatttctgtgggtgggaatgggagaagcagaggaatcctacagtggcagaaatccttttcttgtccctgtattatcctttttctcatgtctgtatttggtatgaaggattatttaaaggtgcaatatgtgaattagtgattcatgatgttctaggtttttagtaacgttttactcaggttggcattttatgtgtctgtgtctgtatgtgtgtgtgtatgttcagaagcgtggcaatctgtgaacacttcagcgtgaattcagtgtcagattaatccctccttccccaaagtccactggctttcgtctctctctgccgtgacacatatcggaatctactgtgtatatatatatatatatatatatatatatatatatatatatatatatacactaagctctcaaaaacagtcattcctatgaattgaggtgtacaaagtttgaatttgtatcaaagatgtaattattatttttaaaaccttttcactatactgctgctgtaattactttgatttttaaaatgtagattaatttttttttttttgcttcaggtgtgtatccaccaagaatttcaaatttatgtggatttattttattggtacataatctgtaaacttcttaaggcattaacatgaaaagattttttctttttattttatattgtggctcaggttatattttgaagatgttttgagtttatcctccaataggcaatgaagttgacaaggttttatgaaggaataaccaagtccctggagtcctgtggctgttgccacagtaatgtgtcctgctgtaaacaggacaggtgtgtcctgttgagaatgtgagcgggctcttccagcctcctggtccctcctgactctgccacgcccctcacctcactggcacttcgataactgactggacgtgttaatgggtcttttagggttctaaagggtgaaccacacttttaaagccccggctgtggttcggagggttagtgctgtatgccttttatttccctt

SEQ ID NO: 7146 - DNA, 2300 bp, Homo sapien
tcacctgttagagattttaaattatttcaggataagtcatgataattaaatgaaataatgcacataaagcacatagtgtggtgtcctccatatagaaaatgctcagtatattggttattaactacttgttgaaggtttatcttctccactaaactgtaagttccacaagccttacaatatgtgacagatattcattcattgtctgaattcttcaaatacatcctcttcaccatagcgtcttattaattgaattattaattgaataaattctattgttcaaaaatcacttttatatttaactgaaatttgcttacttataatcacatctaaccttcaaagaaaacacattaaccaactgtactgggtaatgttactgggtgatcccacgttttacaaatgagaagatatattctggtaagttgaatacttagcacccaggggtacacagcttggacaggaccaggtccaaagactgttaagagtcttctgactccaaactcagtgctccctccagtgccacaagcaaactccataaaggtatcctgtgctgaatagagactgtagagtggtacaaagtaagacagacattatattaagtcttagctttgtgacttcgaatgacttacctaatctagctaaatttcagttttaccatgtgtaaatcgggaagagtaatagaacaaaccttgaagggtcccaatggtgattaaatgaggtgatgtacataacatgcatcactcataataagtgctctttaaatattagtcactattattagccatctctgattagatttgacaataggaacattaggaaagatatagtacattcaggattttgttagaaagagatgaagaaattcccttccttcctgccctaggtcatctaggagttgtcatggttcattgttgacaaattaattttcccaaatttttcactttgctcagaaagtctacatcgaagcacccaagactgtacaatctagtccatctttttccacttaactcatactgtgctctccctttctcaaagcaaactgtttgctattccttgaatacactctgagttttctgcctttgcctactcagctggcccatggcccctaatgtttcttctcatctccactgggtcaaatcctacctgtaccttatggttctgttaaaagcagtgcttccataaagtactcctagcaaatgcacggcctctctcacggattataagaacacagtttattttataaagcatgtagctattctctcccttgaaatacgattattattattaagaatttatagcggggatataattttgtatgatgattcttctggttaatccaaccaagattgattttatatctattacgtaagacagtagccagacatagccgggatatgaaaataaagtctctgccttcaacaagttccagtattcttttctttcctcccctcccctcccctcccttcccctccccttccttccctttcccttcccttcctttctttcttgagggagtctcactctgtcaccaggctccagtgcagtggcgctatcttggctgactgcaacctccgcctccccggttcaagcgattctcctgcctcagcctcctgagtagctgggactacaggagcccgccaccacgcccagctaatttttgtatttttagtagagatggggtttcaccatgttggccaggatggtctcgatttctcgacttcgtgatccgcctgtctgggcctcccaaagtgctgggattacaggcgtgagccaccacgcccggctttaaaaaatggttttgtaatgtaagtggaggataataccctacatgtttattaataacaataatattctttaggaaaaagggcgcggtggtgatttacactgatgacaagcattcccgactatggaaaaaaagcgcagctttttctgctctgcttttattcagtagagtattgtagagattgtatagaatttcagagttgaataaaagttcctcataattataggagtggagagaggagagtctctttcttcctttcatttttatatttaagcaagagctggacattttccaagaaagtttttttttttaaggcgcctctcaaaaggggccggatttccttctcctggaggcagatgttgcctctctctctcgctcggattggttcagtgcactctagaaacactgctgtggtggagaaactggaccccaggtctggagcgaattccagcctgcagggctgataagcgaggcattagtgagattgagagagactttaccccgccgtggtggttggagg

SEQ ID NO: 7147 - DNA, 2300 bp, Homo sapien
tatacagtttccagggcagcactgggtcaattctacatgcagtacttctatgttcatcaagggaaaccttaaggaaaggtgaaaatgcttctagaaggcaactggacaccagtgcccttgtttgttgcctttgggctcttcctctaaggccaatagtgacctgaaattactaactattccaatcaagtggacaaaatggtaccaaggtcgtcaacatcagacaaattcacttgaggacctatgtgctttgaaagacaaaactgcttttgtaaaggatactgtatttcagaaaaacataatcatattacaactaataacactgtaaaatgctgatgtgttgaatgctactttagaaaaacatgttcaaatctaggaaaaaaatttctcatagaaaactacatatcggctgggcgaggtggctcatgcctgtaatcccagcactttgggaggctgaggcgggcatatcacgaggtcaggagctcaagatcagcctgaccaacatggtgaaaccccatctctactaaagatacaaaaagttagccagacgtggtggtgtgtgcctataattcccagctactcaggaggctgaggcaggagaatcgcttgaacccaggaggcagaggttgcagtgagccaagatcacaccactgcaccccggcctacgtgacagaacaagactctgtctcaaaaaaagaaagaaagaaagaaagaaaactacgtgtcaattatctagctagctagctaactatctagagacaggctttcattctattgctcaggatggagagcagtgggatgatcatagctcactgcagccttgagctcctggcctcaagtgatcctcctgcctcagcctcttaagtagctagggccacaggtggacacatttacacctcggttttttgtttgttttatagagatagggtttcactacattgcccaggttggtgtcaaactggagtctcactgtgtcgcccaggctggggtgcagtggtgcgatctcggctcactgcaacctctgcctcctgggttcaagcgattctcctgtatcagcctcccgaggagctgggacttcaggcatgcaccaccacatacggctaatttttgtattttttgtagagactgggtttcaccatggccaggctagtctcgaactcctgacctcaggtgatccacccgcctcggcctcccaaagtgctgggattacaggtgtcagccagcaagcctggatgagcactttatgttattaaatagcctaatccaagcagggcgcggtccctcacgcctgtaatcccgacaactctgatggccaaggtgagaagatcgcttaaacccagttgttcgaaaccggcctgggcaacatagcgagacccccatctctacaaaaggtacaaaaatttggccaggtgcgcaccgcgcctggctaatttttgtaccttttgtagagaccgggtttcatcatgttgcccaggctggtctcaaactcctgagcccaagccatccatcctcccgcctcggcctcccaaaacgctgggattacagggcccagccagcctcatgttttttttaagcagtccctccccttgcacacttggatagtttttttttattattattattttagacagggtttacctcagtctggcaggctgcaatgctgtggtgggatcatagctcactggagccttcaaccttggggttcaagtagctgggggttgaggtaggactacagagatccggtcgcgccatattgctaggttgctcttggcctgaagggatcctccagcctcggctgcgcccggacatagttttccagttttgaccgatataaacactgtgcttggtctgagttttcaactacccttctccagctagcaacacacaggacctggcggggaggtcgtggttaccaggctccactctgatgataagactgcccagctacaagcaccgtgcagccccagtaacgtcgccgaacgccctcgcctgtgacgtcgccgaaggcccacctctatggcgtcgccgaggaacgtctctcacgcggagccaatcggaactcgcggaggggctgctggggcttccaggagggcgcatgtgcggatgactggccgcaggcggccgggcgggctgtaacccgccgctgaactagcgcttctgtgtccagaggcttcggcctggccgccgtcgcctgtaagctacgaggaggagatttacgacttggccgggcgcagcaaaggccagactctgcgcgaacaggcgctgcgcaccaaccggcaggcacctggcgggcaccatcgcac

SEQ ID NO: 7148 - DNA, 2300 bp, Homo sapien
ttttcaaaactgctctatcaaaagaaagtttcacctctgcgagttgaatgcgcatatcacaaagattgagaatctcagtcacaggagagctgctgtgtatagatgtctgtggcagggggtcaaggtattcatgctgcagaagacaagctggaatctccctccacccctatttcgacccaaccaagggctctggttcctttcataaacctgcctctagtcttccccacctttctctgttcctatcccctctctaattgctggatgaggctgtgctgctgcagccaactgtctggcccctgagcattacatccccgtactccaggcctttattcatcaccaaaacagcatggtactggtataaaaataggcacatagaccagtggaacagaatagagaacccagaaatgaacccaaatacttacaaccaactgatctttgacaaagcaaacaaaaacataaagtagggagaggacaccctattcaacaaatggtgctgggatcattggcaagccacatgtaggagaatgaaactggactgtgtggcatagacaaactttcttattattattcaatgaaacactcacgtaggacctactgggaaggtattttgcagaggtaatgaaaggtcctgctcttgtaactagcaagtgtattcaggtaagcctgacttcatcagtgaaagtcccttaaagaaagacataggcattccttgaacaacatttaaaatagcgaatgggactgtaatcttccaattgccccctactgacttgggaccaaagctttgaatcatgatcactgggatccagccagctgaggatttttcttcctaactgactttaacagggatctcatacttgctcaggcatcccatcaactgtggaaaccagttccttgcacttaattcatatgtgaatctccctaagtatacatatatattatgggttctgcttcgatttttgaaccttgacagactttttgaacctcgacagacatagggctgacagatttgtcttcactgttctgaaactcttgaatataagtcttgtgggggctattggcaaagaattcctctgtcagaatatatttgagtagccgcttctgaaatctcttttcttttttaaattgtcacatgacaacaaaaatatttgttatagaaagaaaaatataatccatccctatcgtttggattctgtatttgtgaattagcctacgtcctaaaacttgtttataatccccaaattaattactatattgcatttctagtcatggcagaacatcatgcaccatgtggagaaaagcattaaaataataactcgtatttcacccacgagattggcaaagttttgtaaattcaataagagacctcaaattagtagagttatttggttagtcagtgatttctcttagagtggtagaaaacaaaaaaaaaagttttaccttcctgttggacttctcttccaatatcctataaatgtactaaagcagcatttaaggctggacgaggtggtttatgcctgtactcccaagcactttggaagtccaagaccagaggatcacttgaagacaggagttggagaacagcctgggctacagagccataccctgactctatgaaaagtttttaaaaaaattagccaggtgggatgatttgagcctgtagtcctagctacttgggaggctgaagaaggaggatcccttgagccttggaattcaaggctgcagtgagctatgattataccactgcactccacaaggagacagtttctctagaataaataaatgtgcccttaaaggaatgcctgtatcttggatgaagctcaataaacagtataaaatgcatcttatttaatttgcagtgtatgtcaaatctgataggatttatgttacatatgattcatttcagtcatggttttttaaggagtgatgataatttaatcagccgtgcaaaggtgtgatctaaatactgcataaacctaatcatcttattctcaacctttctcaatactccacccacttaaagaggtgggtgtggtcttcacagattcttataaaggacatagaagagacaagctcagttttctccaaaggagaaggagtgcacttagagggagctgtgttttggtgacctctgaaactcagtactgcagcgaatgagctcctgaccttgaggagtacttaacagaattatgtctcgaagaatcattgtgggaacccttcaaagaacccagcggtgagtgaaacttatattgataaaattatatcttctttcctttacaaaataataaattagagtgttaaaa

SEQ ID NO: 7149 - DNA, 2300 bp, Homo sapien
ttttaaagtctaaaatatctatgggttgattatttgttttattatttctgatcctggtaatttgaatttctctttgttttctcttgatcagtcttgctatttatcaatgtcataataaaagtaccattttggctatttttcttttctctattttatgttttcaattttattggttttgatcttatatttatgtccttttgtttagttacctcggcttcttgttctagcttcttgaggtgaaggcttagatggctgcttttaaaaatttattttcaatgagagcatttatagctatacgtgtttctttaagcactcttttgatcatacttcacacattttgatatatttttgttattgcttagttctaaatacttggttatttccagtatacctttctcctggattcataggttgactaaatatttgttggcaggtttcccaatatttgaagcatatcttagacatatttatgaattatttattcattcatagcaaattattttaaaacttaattcatagcaaattattttaaaacgtagtgattcaaacaatatgtactcattcataatttctgtaggccaggaaactaaggatggtttagcaggtttcaaagcttcaaagactcttacagagttgtaatcgaggtgcctttggggctactggctcatatgaaggcttggctgaggaaggatccactgccacactgggtgttggtattagtagttatttgaattcagctggaagggacatagagaattacgtcctgtttttatattagttctttatcttggagtcataatttaaaccaaaatacctttgaccatatctgatagttcttcagaattaaagatatatatgtgcatttttagcacttaccagtaaaacagcacagtgtttatagacatgctcttcaaattttagcagtaatacatattacatttgtggtggatgaatttaatccatttattaggtaagttgaaaataaccaacttttaatggagcccattacatgataaaaacctttgctacttcacagaaatatttatgagactctttatctgagtctgctatgacacaaagatccaatatttaactaaatgtatgatgagatgaaggtgttcaatggagccaatggtgcgccaagtcacagaaataacaatggaagcccttaaacactactcatttgttgaaaatcaaaatttctttattgtagaaagttattgaattgatatatgaataaaattaaaaaattaaattaatggatgtattagtccgttttcacactgctgataaagacatacccaagactgggtagaaaaagaggtttaattggactttcagttccacatggctggggaggtctcagaatcatggtgggaggtgaaaaggcacttcttacatggtggtggaaagagaaaaatgaggaagatacaattctggttgaaatttggttggggacacagccaaaacatatcaacggactacagatcattatcattatatctgacatagatacaggtcttgatcaaaagccagtactctaacctaaaattgcagcactacgattacctattttttccataatcaaaatatcaacttacattcttaggttctctgcctctgagcctcagggcttcttggacactgactttctaacaggaaggataaggccctccttaccgggaatatttttaaagaagataatctggggctagttctctttcattctggctgaaatattacttttcttacctatacattttataacataaaactcataatttattattcaatttactttagaatttttcttttcatattacaggcatttcacattatttgtcacttagctacttttccttagcaagagccaagtctttttcctctagggattttctaaggaaaaaggttacggagagattacttcatttgaatttgttccaaatattctaattaactaatctataatgatcttattgtctctttctaaaatttgttgatgtgaaagtcatagactgtgtctacagacatcaaatggaagaattatattcctgatagaacaacccagtacatatcataaaagataaatttctgccgggcgcggtggctcacgcctgtaatcccagcactttgggaggccgaggcgggcggatcacgaggtcaggagatcgagaccatcctggctaacacagtgaaaccccgtctctactaaaaaaaaatacaaaaaattagccgggcgtggtagcgggcgcctgtagtcccagctactcgggaggctgaggcaggagaatggcgtgaac

SEQ ID NO: 7150 - DNA, 2300 bp, Homo sapien
aactcaagttagtaaaataacacttaacaaaacacatttttattaatataattttattctaccaaatatgtattgaatgctttttatatactaggctctgtttatcattttataaaagtttgatcttttaatccacataaatattccatgaagtaggtaataaaactgaaagaaaactgaaactcacagaacttaagaagcttgcccaggttgcacacttatctaccctaagaaaatgttgaaaatgacaattaatggccggcattaaataatcaattgctatataagtaaattaataaataagacaaatgaaaacacaatggaagagagcttgggtaatagtttataactaacttttctgtaaaattacctatgcgatggttaaggatataaataaaatattctttctgaactacactaaaactaattatttagaagaatagcaatgtaagtgaggtcgggtcttgagatacatcaaatgctccagtagaaatctctttcactgatacgacttagcacttacaatcaacacgtcaaatgagatgttgaaaatgtcaggatgcgcctattatacagtgcaatatttttcataatatggtatggaatgtagtctcaataaggagaaaacgtgcaatctttggtggtcatttgctgtttttatgtacaatatctaaatacttttgcagatgcatcctgcctgcctcgtaagaacactaacgtcaagttgtggaaactctcttggtgggctctgaactctgattttcctctaagtagccgtaactttgacattttcagtatatctgtgtaatgtttggtttgggttaatttcttcccaagggtgttaatatgactctcgctagcttgattataaaacaagtctcctaggagttaatctttggattgaagcattattagcaaacaaatgcaaagtcaacacatttttctggactattgagagaaggcattttctttttcctaatagagttgctgagagtacagatacaggactcctgcttataatcttaccaagagtgaaaaaagtcaacacagaaggaagcagagccaacagataattagaaggaaccagttcttataataaaattttaacaacagaatgtacctattttcaaacaattttatcatatttgttttctgttattgctttttacatttatttaactactataacaaatacatgtaaatttactatccataccaaaacttaaactgttaccaaaaattaaatccatttttaacctcttttctatgctgtcccctgtcttacctgaaaggtagccaatatcctgattttgttaatgcataattctcttattgcttaaaaataaaatatatttgcctaagatggatatgttttttaaagatttatctggttttgaattttaaagaatttaacatactatatgtagagttttaggcatagattttactttttattcagcattaagttattaagttttgtattggttattaagcataacattagacagttaacaaaaatgaccctgaaatggaagcctgtgcacaatttgtaaggattaggctctgaaaattggaatgatcattctagttcttgataaccttacaagttgctggacataaaggagtcaatgtgaatagaatcactttttatagagtggagatgtgttatgattttttattcattttgtcttgaggtctctctcctgagagtgcccacagctccagccctgctcagaccaggaattcaaaggatgtagacatggatatttacaatgtgccttttgtggatacttctttgtcctggaggagagcccagtgcctaagtgtctgactaggatcgagaatttcctctcacaggaaaactgtactagcagatgtccttatggctcttgtctgacctgtgcccaatttattcttaccaggactgccactttctgtgacagccctgactggagagggtgggtgtgggtgattgtgtgtcagatgaaacacaatgaagaagtgaaaccaaaatgcatgaaacagaagaaaggtatgactcacaggtttcagagaggtgaagagtgcccacaggagtctgaccaaagtccagaggcagcagggggctcaacaaggggaagcaagaaagagaggatctgtgggtttatgcctttattaaagtccatgggcattatcctttaggttttcctgcgggggttgtgaattgtctaatttaaagaagactggtaagtaaagggaggactgatttgcataactctgacactgactattaggttttatcatagccagcaattgtgagt

SEQ ID NO: 7151 - DNA, 2300 bp, Homo sapien
aatatttttctcattgtgtattaggggacaattttggtgggaagtgggaactatttaatctgtaaaaccaaacatcttataacagctattagtgtgagatgtaaagcagtgtgaagacattggcataagcacttgttttctctatccttccctctctcccctctattacactaactctgtccatgcgacttggttaagactgcatggagattttcctaacagtcatcctagtgctgagggtggcagtaggaggcccacgggactgttcatggagggacatggacatgagaaccacctctgaagcagaaagaagaggaattattttgtctttgtgcaaatcactttgaaatgtctctctatggcaggtttctcaaataaggcaccattaaaatgttggtccagataatgttttgttgtgtgtgctgtgggcagggaccttcatgtgctttgtagaggtcattggagagtgtttggcagcgtcccctctacatgtcaatagcacccccttcctcttgtaacaaccaaaaatgtctccagacattgacaaatattccactgggattcaagtcactcctgacaaagaaacactgctctatgggcaattaacagcttgatttttttctttatatttgaaaacaggaaggggtttttgaaagtatgtactagtttgatcttggggaaggacatgtaacatacttctcctggtcattttaagagagaaaatcttatcttcagaacattttagtaattttcaatctagcatttagttatatgcctcctgtatatctttgaaatcagttgaagaatgggaaaaatacctggctctgttggtctccagtccagattcttttctgcccagagtgctcagctcgtgcctctacaatgatgtgtgcatctatcaagggtcagggagagagaataggaagcttctcaccctcactttacacttgctgtgtgttgaagatttggaaagtatgtgtccctaattttaaaaattccatccttttcccccattccactccatcataatgatgttttgtgaggaatcaggtaagtttatctatttttttgaaataaatatttatgctcattgatgttgcacagattaaatatatgatgcagcttatgtgtgtgagtagaataaatacatatatttatattatacattattatataacattctttatgttcaatctgactgtattataactttccattttatcatttatcgcagtcttatcctttttataactgcaagcatttccattatatatactacatttgtgaccacgtctcttattttatattttatttctaacttttaatattacaaataatagttcaatgcagtagtgggtgtttttcttaatcattttctatgcacatctttgatcaattcttcaaatagattgaaagcagtaaatttatttaacaaataaatgttttaggactgaacagtcatagttacaataagttgtgctcaagagtaccaattccctgaaccatggccaacattgaagagtgtaattaaccaaatcaccaggctaattttatagaaaaaaagataatacacacaataaaatgagcttcttcatctaaaatatatcaataaaatataaacacttgtgaattaacatcttaattaagtatatctccccatcactgtagtggaaaattcagagaggggtaccatatattctaagcattattttctaggatctcaatatttggagtaagctaggaaaaggggatttgattttgatataatcataaggcaaattaaacaactttacctctttcctaatgattctgtgccaatgtctcaactgagaaagattaattaaaagaattctataagttttttaaatgccaatgtttttgtttgatctttgaattaaactgtatgttttatgcatttgtattatacaatgttgaactttttcagatttcccaaaatttctgttctttgctgataaaaattagctatcctacttcttctgatatctttttacaggatacacccaaaactaaaatttagactatataatggagaataagttttaggtttttttctcctctaatcctgcataaattggagacatgggcaaggaaaactgcaccactgtggctgagttcattctccttggactatcagatgtccctgagttgagagtctgcctcttcctgctgttccttctcatctatggagtcacgttgttagccaatctgggcatgactgcactgattcaggtcagctctcggctccacacccccgtgtactttttcctcagccacttgtc

SEQ ID NO: 7152 - DNA, 2300 bp, Homo sapien
gataactgtataaggaatgatttgatacttgatactagctgtcattttaattgaggtttacctcagatgaaactgtgaaaaattccttgaaatggctcagatggcctctgaaaaatatttgcaattcttaaattttcactcttggcacttaaattcagcagtgtttagtaaaagagagtaaggtaaaggacttcaaactgccaaggcaaagattacagtttgtattggtcagggttctccagagacacagaaccataggatgtgtacataactataactatatatatatatatatatatatatacacataccaaaaatacttacaattgtggtacaattgcctatcgtataccatacaggtttgtagcctaggaacaatatgctatactgtataccataggtgtggtttgtgtaagtataccctatgatgttcaaacaataacgagactgtctaacgcgtccctcagatcatatatctgtcctcactctacacatgacactgtacaggagaggaagtccactaggggaatttgttcccttgattatggagtctgagaagttgaacataggctgtcattaaggtagtgtcctggagataccaatatcctggctgagttagaatcagcttcaggagaaagagaggaaactgccttgtctctgccctttatcttcagtctgagctaccagctgattggatagtgtccacccacactgagggctgctgttgcccactcagctcaccaacttacatgactctccggaaacaccttcacagactcacccagaaatcatgctttaccaattctccatgtattatttaatccagtcaagtcaacacctataattaaccataataccatagtaatataatgatatatatttcagtttttaaaaaactgactatatgtcagttcatagtttgagtagcccaaagaagaagttaatttaagccataagaaaaataaacccaacatttttcattatttattttatctcctagtgatcctagactggtttaattgctgtctttttttttttaatctggtcggttggtttgttctggggttgtttttgttttaaagagccggcttctcggtccctctctctaaaaatatgtcatagcaacctctgaccatcttctcatgttttgttacccaatgtaggttttctactcctctcccatagtcattcagttgttatttgaaagagaaatagggacaagcatgtttcattctagaccacttaagattaaaacccgagtttcatgtcgacatccagggagtaggtttttgaacagatttgcattatgctatgggcaggaaccaggagtagaagaggttgtgagtcatctagtcagcagtgtctgctaaaaagcctaaagactctctttgtgtttgaatttttcatttttgttacagaggaaatagtttgttccgctttaatgagcactgtcaagaagaaaatatagctatcacatatcaccacatgttcacggattttcaccaacccagaccccaaaatgacatgctgctctttcttcttcagaaacatgaattctggaatcttgcaagtcttccagagggcactcacctgtcccatctgcatgaactacttcctagacccagtcaccatagactgtgggcacagcttttgccggccctgtttgtacctcaactggcaagacacggcagttcttgctcagtgctctgaatgcaagaagacaacgcggcagagaaacctcaacactgacatttgtttgaagaacatggctttcattgccagaaaagccagcctccggcaattccttagctctgaggagcaaatatgtgggatgcacagagagacaaagaagatgttctgtgaagtggacaagagcctgctctgtttgccgtgctccaactctcaggagcaccggaatcacatacactgtcccattgagtgggctgctgaggaacgccgggtaagtgatgcctctgaagatctatttctatacaggacacatgaaattcttgtaagtctatttccttcgagattggatgatgccatctctgtgtccccttaagcatgtctgttatgagcttccttgacttcacacctctcagatttgacaaacatgaggagaaacaaagcaaactctcttttctgtgggttaatttgtctctcattttgggtccttcgtatatcagagtgtgaatgatactttattgtcctcacttgtgcttcaattcgtggctgttttgcaggaggagctcctaaaaaaaatgcagtctttatgggaaaaagcttgtgaaaatctcaga

SEQ ID NO: 7153 - DNA, 2300 bp, Homo sapien
gctttcatgggctttgatttcatacacccctgagtttgaattgcactggtcaactacatgttgaatgaccttgagatactatcctaagcattaatgttctcatccaaaatatggagctaataaaaagaatcctgtttatagagaaccagtgtatcatgtggctttggagtcagaattttgggttctaatcctgtttccatcacatcctaaatctcaaattctctctttcttagtttccttcatctgtaagaaaaagatcataatgatagtaactccatggtaattttgttagttttttggtgacaattaaatgagttataggtgaagtgttaagaatattgcattacacatagtaagcattatacaggtgacaattattgttagtaaaatttgacaggtagctctagtcataatctaagaataaaatggcagcgtggcaatcaaaactaatttttgatgttatctactgtatgtcagtctccctaaagaatgacacatggaaagataagtaggtagataaagggacagaaagggggggcagaacattttccctatttaatccatacagaaacactatgagatatttattatcattgttgtagtatagattaggataatttatattaagtggcacaaggtcacacagcccccatgcagccaagatgggcatctaatcaaattcctcctaaatcgaagtgatgtcttatattgtctaaataccttgactattttcaaacaagcaaaatgagaataaccactgtcctgctgtagtgctgcatctcattcacacgctttgaggtgataacataaggcagcactttgagcacgtgattaacccttctgattatcaataggcttctcagtgtttatgtcattgggtagttttattgcttacatgagataaataaattgtctttagcactgtcattgtcataatatctattatgtaaatgaggcagtgactcaaatatttttaattcccatcttggccctctcaacatgaactttagagattgatgctttgcttgcttttttttgttgttgttttgttttttacgtatttccaagtctatccttcatggtcaaaatcaaattatttgtacttcaaagtcaagttaaaaatttttataattctgtaagtattttgagacctcagaagcagtgtttaacagatttttctgactcaacactttgtattatactaccataacaataaatgcaacaattgttctttacttataaaatttaatcagtgatgatgccatatatagtaatgttatttaattgcaagttaacatataactaaatgttttgctgactgtacttggtcagtccactaatgtttaatgagcatttccaggaagccaaggagttcgataaatgccagaagtattgaaacaagtagttaactaattttatcagcttagtttagtatgtgaacagggtttatggaattacactaagctcttttctgtcaaaaatatcctcagagctggtatttactgacatttgtttttatttcgctaaagcttctgctttacagtaaaaaaaaaattagccggcatatttcatcacaccactctatttactcagtcaagagacacagcataccggtatctatcaaatcctgaaaacaagaagcagatgttctaaaattcttattcaaaggaacactctataagtcagtccatttttaataatatacatattttctttacttaatgtgatcatcagtctgttcattaatttattacttttttaatactctgggccagtaattgtttaatattttgggtgcaaaatggtaagccaaatcagacatgatccatgcacataggaagtcaactgttcaatggaagaaatagtaatcaaataaaatataacctgcaaccatgaaatatgatattactaaattctgaaatatatttctcagagtttatagttcaaaaaagtttgagcttgctttctttatcttattgccatttatttatttttaaacaataaaataactttataattacatctaattatttttcttttttcatcattatagcattgtagggtattagaaattctcataaaaggaaaacaacacagaagatggaatttacagatagaaactacacgttggtcactgagtttattctattaggttttccaactcgccctgaactgcagattgtcctgttcctcatgtttctgacattgtatgctataattctgatagggaacattggattgatgctgttgatcaggattgatcctcaccttcaaacccccatgtattttttccttagcaa

SEQ ID NO: 7154 - DNA, 2300 bp, Homo sapien
gttcaattcctgggtatccttgttgactttctgtctcgttgatctgtctaatgttgacagtggggtgttaaagtctcccattattaatgtgtgggagtctaagtctctttgtaggccactcaggacttgctttatgaatcttggtgctcctgtattgggtgcatatatatttaggatagttagctcttcttgttgaattgatccctttaccattatgtaatggccttctttgtctcttttgatctttgttgttttaaagtctgttttatcagagactaggattgcaacccctgcctttttttgttttccatttgcttggtagatcttcctccatccttttattttgagcctatgtgtgtctctgcacgtgagatgggtttcctgaatacagcacactgatgggtcttgactctttatccaatttgccagtctgtgtcttttaattggagcattcagtccatttacatttaaagttaatattgttatgtgtgaatttgatcctgtcattatgatgttagctcattcttttgctggttagttgatgcagtttcttcctagtctggatggtctttacattttggcatgattttgcagcggctggtaccggttgttccttttcatgtttagtgcttccttcaggagatcttttagggcaggcctggtggtgacaaaatctctcagcatttgcttatctgtaaagtattttatttctccttcacttatgaagcttagtttggctggatatgaaattctgggttgaaaattcttttctttaagaatgttgaatattggccccctctctcttctggcttgtagggtttctgccgagagatccgctgttagtctgatgggcttccctttgagggtaacctgacctttctctctggctgcccttaacattttttccttcatttcaactttggtgaatctgacaattatgtgtcttggagttgctcttctcgaggagtatctttgtggcgttctctgtatttcctgaatctgaacgttggcctgccttgctagattggggaagttctcctggataatatcctgcagagtgttttccaacttggttccattctccccatcgctttccggtaccccagtcagacgtagatttggtcttttcacatagtcccatatttcttggaggctttgctcatttctttttattcttttttctctaaacttcccttctcgcttcatttaattcatttcatcttccattgctgataccctttcttccagttgatcgcatcagctcctgaggcttctgcattcttcacgtagttctcgagccttggttttcagctccatcagctcctttaagcacttctctgtattggttattctagttatacattcttctaaatttttttcaaagttttcaacttctttgcctttggtttgaatgtcctcccgtagctcagagtaatttgatcatctgaagccttcttctctcagctcgtcaaagtcaccagctttgttccgttgctggtgaggaactgcgttcctttggagaaggagaggcgctctgctttttggagtttccagtttttctgttctgttttttccccatctttgtggttttatctacatttggtctttgatgatgctgatgtagagatgggtttttggtgtggatgtcctttctgtttgttagttttccttctaacagacaggaccctcagctgcatgtctgttggaataccctgctgtgtgaggtgtcagtgtgcccctgctggggggtgcctcccagttaggctgctcgggtgtcaggggtcagggacccacttgaggaggcagtctgcccgttctcagatctccagctgcgtgctgggagaaccattgctctcttcaaagctgtcagacagggacatttaagtctgcagaggttactgctgtctttttgtttgtctgtgccctgcccccagaggtggagcctacagaggcaggcaggcctccttgagctgtggtgggctccacccagttcgagctacccggctgctttgtttacctaagcaagcctgggcaatggcgggcgcccctcccccagcttcgctgccgccttgcagtttgatctcagcctgctgtgctagcaatcagcgagactccgtgggcgtaggaccctcggagccaggtgcgggatatagtctcgtggtgcgccgtttttcaagcccgtcagaaaagcgcagtattcgtgtgggagtgacccaattttccaggtgccgtccgtcaccccttgaatgtgtactttttatgtaaatttaattgtttacctgattcatcagatttatatt

SEQ ID NO: 7155 - DNA, 2300 bp, Homo sapien
ttccgtctttggtaagttttattcattcatttgaatatttattttttcatatttagcattcattctgcaggtaattgaaattttcagttagataaaatccttaaggttttgaatcttaaattttctgtaagttaacactgtgccttattatgtgattccatttacaatatttccacctaattttgctgaaagttgtacacttatacattttgatagttaatttaatttctaatttcttcaaacatactattttctaaattatacttataattcatatctataagtattcctcttttattgagaaaactatccagctgatattctaagagtggtagaaaaaagagcatatatgttgtataaaaatgcagtttttaaatacttaggattattgtttacagtacttatccatattgtcatatctgttggaaattactaaagatcatttagaaaatcattaaaaaatatgcattttcacgttatatttaacaatgctagttagtgaataacttgagataaacatttactaaaataaataaataaaaatagtgcttaaacattgcagaaatgctgcatcaaagaaatcaattagaaagtttttaaagctttacctgatcactgtgaatcaaaatatattacactaagtgtctatcactgttctatctatctatctggttatgcttcatatacttacgtaactatctaatttgttaattgttaaagaaacaaaaatacttcattgtaataaagtatttttcaatacactccttcaatacactcagggattctagagaagtaattataattatatcttggatgaaataagttaacttgtccaattaaataaagccagttattgtcaactatgtattttcacttttcaccattgttgtctttgaaatattttaattaaaattaataaggggtataaattacacatagactgaatcaatatttgtttctcatcatttctaaaactacaatccatttaataggaaataagagtgggagatagttgattatgaaacaggtgaatagctttgaataggaggtgcaggtgtgtattgttccaattgaaattacatttttagaaagtcttaaattgtctaaactaccttttataggatgaataagaggaagaagtatcacagaatatttggtgagtatatatattcatgttctaaattattgagtttgttttattgcctaaaattatttgaagtctcagaaaaaaaaaaaaaaaaaaaaaacaggaaggctccatttcatgcaatatgtgggattctaggtcctcaatctcagagtaaatgattagggctactctcccaccatgattgcagggaggattacctagagttaagaatccccacttcttttagtaggtgtcattcaagagacagggtgttatttcatgagtttcagagtttggtgttgccacaccatgccacccatagtcacagaggccagtctctggctccctggcattttccaatgtcatcactgtgggtccctgatccaccttacttcattattgtggccactttgctgtctataataatgcaactgtagattaattccctctataaatagaaaatacaggcaattttagaaagttttcttatttactcaaaaacaaaccaaaaaattaccagaaaggagtttcattgaatggtaatttaatattctaacaatatgtattttacatactgttcatttaaattatcactagtgttttatcagttttggtggcactttgttatggagctagacatttcagagacagatgctgtgagaaaaaatcatttttacacatcgatttctatgaggtataagcacataaagtgtcactggaaaaaatattagagactgtctagcctacttgctaaatttattgatgaaaatcctcagaattcaagaaagaagattatttacctgaagaacaacatcagtagttgtctgtattttatccttgtgcatgtgtatgtgtataaaatatgtatcaatttaaatactttatatatgtaatatatatgtattttccccctgacaaattatgagtctatctttttttcacagtagattttgtgaaaaagaaagaaacatatggctgatgataattttacagttgtcactgagtttattcttttgggattgacagatcatgctgaactaaaagctgtgctttttgtggtgttcctggtgatttacgccattaccttgttgaggaatctgggcatgatcctcttaatccaaatcacctccaaactccacacacccatgtactttttactcagctgtctttc

SEQ ID NO: 7156 - DNA, 2300 bp, Homo sapien
atgttattctagaaactgaattctagatcataccatgttattctagaaaccctttggaatggattgaacaaagaggaaaagagtaggagacacaagcaagtgagtaaagagggcaaaagcacaaagatcttgcacatctttgtaagagtctaacttttactctgaataagtggaaaagtcattggatggagttcttagaagagaaaactaacatgatctaactggcattttaacaggaccattttggctgccatgtggaaagactcaagtgggataagaataaaagcaggaagaccaattagaggccaatcatggccccatgtagagtgaaaacactggagctgggagaaactagtcatgttctagatgcattttgaaggtagaatctaggagatgttgctaattaataagcgacagagtgtaagaaagagagtggtcaagaataatataaaacgactctccctaacatggaataatgccatttactgcagtggagaagactgaatgaggatcaggttagggaggattgttagtaaaatttttttcttaatgataacacttaagcaaataatatagctcttagaatacaatgataaaacagtattccctgtgaactcaattttcttaagatgcccaggagacattagggaagaaatattaattgggcattggaatccatgagtctcacttcagggaggaggcatagtcaggggaggtaacattggagtcatgtgcatatggaagcatttaaagtcatcagattggatgagattaccagaaactgatggcagatggagaagaccagtggttcaagcgctgattctggggacactccaaagttcaaaagtctgttctgtagcactgagacacatgcagcaagagaagtagaagcaaaccagacaggtatgacaacctgaaaaccaagtaaagattttccagcagagaaggagtgagaaactatgacaaacgctgcaggtagatctaatcagaagagaacttcatcattcggtttaatcatgtgagatcattgcaacttgaatggagtagaggtagcaaaagctcaagtggaacaatcttatattgttctatatttactcagaaataacactgtttactaacattgatgtttattaatgctaatattgagagttgagtgtgaactgagtgtttttcctaggtcccaagaggaagatcatacaaatacaaatcatgtacacttgaattttaacttatttacctacaaaatgacttaggttaatgagaagttagtctgtcaagaattgtctttacagtgtaagacagatgtatgctagatatattttgctctacccatttcaatagaacatttgtagttctatatgaagagaatcctgaagagagtgggtagattttcaagtcatcataagaaatactgtagtatacataaattacatttaaaactggtgtttcaattattgttattattgtgtttattatagaatatgtgtaaaatatagtaaatactgtgtacttcgtaatttcatcattgtatatcattcttctgtacacattttccccaaaacattgtatctattctcttttccctttatacttttcttagtattttcttaggcctatatataatattatgagatatgaatttataatgctttcataatgtttcaatgcatagaaactagaggaaaaatactttattctttttaaactatatttaaaagagggatgcccagtattttaaagacaaacaagtgatacttaaaaatagaaatgtacacatttagcaaaagagaaaattgacaaaaggaagaggatcaaagtataagaaaaatagcaattataagtacatcttttcttcacttgaacagtcattcctaaaggaaaaacataattaaacaacttaagaaatttagaattgaatacataattgcaaagcctgattgttgcaaaatgaagactttctaaaacaaacaattagattgttggttctagacttcacgaaacactgcaaatgtgatcttatgtaacataattctacatattcatgacagtaatgcaaactgagctcattttctttccccataggtgagattccttacagccatgcagaggagcaatcatacagtgactgagtttatactgctgggcttcaccacagacccaggaatgcagctgggcctcttcgtggtgttcctgggcgtgtactctctcactgtggtaggaaatagcaccctcatcgtgttgatctgtaatgactcctgcctccacacacccatgtattttttcactggaaatctgtcgtt

SEQ ID NO: 7157 - DNA, 2300 bp, Homo sapien
gaaggaagaaactctggacacaccatctttaagaactgtaacactcgccgcaagggtccgcagcttcatacttgaagtcagtgagaccaagaacccaccacttccagacacacttttgatcttttgcaatggttaagactggacactctgagcctcgcctgctcgtgtggcattggcctcataccaagctttggagcctacttgcataaattgctttctacccagattgcaggatttgcatggtaaactctccagcagtagaaatggaaaggactttgagtcaagggaggaacacagagcaggcagcacaaagacacacatatccagagatatctcggggatattttgcaagccttctcctgagggctgttgatggacttgaatccattaaaattgctgcttctctaaaagcttgactcactgtcctagaaacaatgtatatcagggtggactacaactaggatttggatgacagtttaacaattcaggtcctgacttgaaaaaccactatagcactccagcacgtcttttttcccaccacaaaaacaataatgcttggaagttcataagcaagtaagctgagtttttgattcagcaatatagtcaggactcattaaataagggtgggaattatccctatgccaaggagccaaatgctacttgaatgtaaacatgacttgggaacacagaaggtgaatctcatgtacaacaggatgcagaactgagaagcaaacctcaaggagggccttgcaagtgttaatgagtgaatgccatccccaccacagccagcctgagtgcatgttggagaccgcatgccccaggtttcctcccacacagcacagaaaggaatggtcagagttacgcagtgatttacattcaccctctgatcgggaagcccagaaaacatggactaaatcccaatacagtggagttagagataaatatctagggctgctttcctctttatttcatttcctgctcatagcaaagaatctggtcatggagagggaagcctaattctaacaaatctactcttaaacaaaactatttcgcagcccagggtttttgcagggacgataatgttttcagccagactctgcccagcaattccagaatcatcagggataagctcgcaattcaataaaaggctacagaagcaaactaggcatggatgtcactccacaagaatacacaaagattgatcatggcaagagtgtgatgaacaaaaacagtcctcatatctagatttacagccttctcttctcagctccccagtccaggcaaaacatttagccgtggtcaatttaatgctatgcctcctttttctgtctccaaaaaagaaaggtcagaagtgggatgaacagacccttgcaagaaaatcggagtggaaaataaaccgccctctccggggagctgaaaccagaaaatgtatgacaactgagcagctcatcagatggaggggagaaataccaaaagacaagagagatcagggaaggtatgggcagaaatgagaagaaaaatttttctaaagtagaaaagtgagtggctcctgtaagttgcgagtgctagaaaataacagaggacaggtggaaaataggcactttgaatttgcacttaataggcttttggtaaatgtaaaaaacagtttcttcctttgaaaatgtttttaaaaagcaagatattcaccaaagacatatgaatgcccattaacagatcaaaatgtgttgaaacaaaattgtgattaaaaaggcatcgtattgactctaccaaaatggcgagtggcagcaggggacacacagagatgctgctgtccctgcagttctcaatcccagtcccaagaggttcattacgctaacggaacttctgtgctgcgtgactgcatggctaatttgcagccgctatccctccagctaaaaaatgtctagacagggaggctcctgacacaaatagagacattaatgattaacatgaaattcatctttacatcagtagcaggataatggaagtttataggaataaaaggcccgttgtcatttggcagtttgtgaggatgagcacatcatattttaaggtttagggtctttagacacatactcccttagtatactaaggacctggaggcaatcttgccagacttcctctgcaggcatctttaattttcttgtatcataaatttttatcttacattctatacaagggggaatcactgagctgatgagtgagcctaaccatttgcccgtaagtatgaggctttgttgttttatattcagtgtgaatatgataactcacataacctctct

SEQ ID NO: 7158 - DNA, 2300 bp, Homo sapien
ctgatcctctttctctgcccctgtccagttgcccacccttgtctccccctcttctcctcgctctatccccaggatcctgtgggcggctgtgaattttgccctgtgcttccttctctcctctctctttgtggtggggtccacagccagttctcctgttgctcaaaaatgtggaggcagttgctaagagacagcgaaacgtcagtacctggccctcgaggaaaaaaaaggggagtgaaaaagggagagaactgggggagggatggagggagggagagagagagggtgggaaggggggagggagggggaagacctggctctggcggaagccttataccccagcagcctgggcaccagctgagtttcagaaagaagcattcagattctgtgaactttcttccgagcatcctgtctctgtgatttccctttgggtgaaagaaggggcagggggaccgcaggacgggaaatcatagaagatgctggcctgggatccgggagacaaggaggaggagaggccgggggaggggaacagcctgggaggcaatctgttctgaagcaagcaaggagcaagcggggattccaggaggagggagggagacccgcgtctgccgcagattgatggctgtgtccttggaacggagtgagtaggctcctggggcctgtgggagtgcgagggggagacctggggcttagaaaaatgagtctgcatgaaggggagctggggtgatttccaggtgggcgggattgaggcttgaagcggtaggaaaataggcagcgccaggccgagggtgaggggaggaccgaggacagcaggtgggcaagggagaagcgagagggcgcggggcgcgagggctgaggctctgggcgtggcatcactctcggtccctctgctgggggcggcgaggagagtgcagtgtgtggaaagggatgctgggatgaagggtgtgcgctgagaggggggcgaaagatgctgggggtcgactggggaggggtctgcagaatcgcctgtgcagaaggaagctggagcgaaaaccgcgaggcgtgagcacggggcagggcaaaatacgggggagtcacagaatggtgtgtgagtgagtgtgtgtgtgtgcgtgtgagagagagaggagtgcttagagtgtttgaaaggggtgtgcaaacccccagagtgtggatgcagatttttcttagggagttgttcaagggtggcgtgtttggtactaatgagggtggggttatgagaagaagaagaaaatgcatctaacccaagacaggaacccagaggaggatggctgcaggttgggtcagggagggctcgtgggtaacagcaatgtgagcctggggtctgaacctaccatggcccacacctgacagacagtaagcagagaactttgtggttgggggagcaaaggaaagagacaaagataagccaagcgtcctaggtgaagggacaagggagtgtcaagggcacaggatttctctgcctgagtgctttccttgttgacagagggaatttggcctccacctgctgaacacagaactgcgctgaggaaggcactggcttggagaagatgccagagctctgccagctgacactcagcctgcaccttcaggactcatgacttcttctggccccagaggcccagacagtgggcatcacctggggtcctcctctctttgggaaaaaaagaggcttcctggggattccagcagccactgaggctgaggactctcaggcttttaggaggcccatggagactcacttcctcccgggcccttttcccaaaacacccaccctgggacccccttggactccagcccaccaggccaccaggacaaatggcctctgagaccttcaacactgaagacccaggtgcagccccggcttcctaatcagtcccagacgtgggacaggacttaagttttctcagaagaagtgccaaggatctttaaagggcacgtttcatctccttcagcccctccctcccagacacagcaccaagaggaaacatccagcaggcatgggtgagagagacacaaaagatctgcaggaactcttccaggacttgctggcagctgacctagccccattcttgtcccctccctttctcaggttttgatcatcattccagaccctaggggacctcaactgggtgtcttgccccctaggctccggaaggggacctcccgtggatctcaggaagccctctggtgctcagaggctcctgggaaagtccctagccatgataccacatgctcagaagccccaccttcacagacgctggccccagatgtagctgccttcc

SEQ ID NO: 7159 - DNA, 2300 bp, Homo sapien
agaacacaaactcgggggccaaagacatgttttacttatcatggtctgtgcttttttttgaaatgaaaattgatttccaaaatttacaaatatgaaaatttcttacaaaaatccataatttgaaattatcttggaaaaatcctaagacacagtcatgctggggtccagctttctgcgtggcaaccagagactagagctgaagaggcctccctatgatggaatgggcaccctccagtttgccacagtctttaccattctctgttgtctcaaactacactcttggcctgttttttttttttttttttgcaggtatttgagtttgagttccttgatctctgcatatgattttctgatccactctccctccagaaaatggattccagcttttgtagtaacttaagacaaatatatatcgtgagacagggtcttggctgtgttattcaggctagtcttgaactcctgggctcaagcagtcttcctgccttggcctcccaaagtgctgggattataggcatgagccaccttgcctggccaattccagcttttgtaagtcttttgccttggaagtggctaaggctcagctcctgcttttgttccatctcactattacccaacgtcaggtggcttccccaactcttcaaggttgtggaaagggtgcgtattttttaaaaaaaatcttacgtcgtgcatcttccttccttcctagaggtcctggagaggtgatgagctggggcaaagtgagcgtctacggaactttccccacagtatcctccagtgactgagtctttctctagagacccccctcctctagctcaacttcctgaccccctgtggtcttacagaaacctcttggtccatggaggatagtaaaaacctgagaactgaaatgtatccatgttctcaccacgtagtaattcttacacttgttcttccatctatggattccccttttcactcacctcctacatcatccatccacttactcactcaacagccattcacctggctgggcgtggtggctcatgcctgtaatttcagcactttgggaggccgaggtgggtggatcatctgaggtcaggagtttgagactagcctggtcaatccccatctctactaaaaatacaaaaaaattagcctgcaatcccagctactagggaggctgaggcgggagaatcgcttgaacccaggaggcagaagttgcagtgagcctagaccagcctgggcaacaagagtgaaactctgtctcaacaaacaaacaaacaaacaaaacagccattcacctacgacatgccaggtactgtattatgttcgtgtttggagaagaagaaaagcaaacaatcaactgtagcataattcactttattaccttgggcaaaacattgaccttgttgggcctttgtttcctacagatttaatgacttgtttagagataattttgtcctgggtttcttccatcctgtgactgccctcaaccttctaaagcatcctgtgccttccgcaaactgcaaactgcagtctacactagtgtaggggtatttctctagaaaccacaaaagttctcagagggagggtcaaagccaaggggtagagaaagatgaagcgagaggcaaagtgggagaagaccctcctgtgacacctggtctgggtgggggctgggggtgcaggaagggagccgagggggccagacctgcctgccaggaggacctgccagatgccctgcccatcctgcgaaatcttacaccctccttgctccctaccagccctggctccagctcaagctggattgcaatctgcataatgtgtcccatttagattggatggaagggggtgagaacaggagggcggagagcactgaggagggagtgccctaaagggcaggcaggaagtggtggccagaggaaagtggagggataggggctggggtgaaggtgggtggcagccagaaaggagaggcggggccaggaaagccgacttgcaaaaccacagataatgttcagcccagcacagtaggggtcaatttggtccacttgctcagtgacaaaaagaaaaaaaaagtgggctgtcactaaagattttgactcacaagagaggggctggtctggaggtgggaggagggagtgacgagtcaaggaggagacagggacgcaggagggtgcaaggaagtgtcttaactgagacgggggtaaggcaagagagggtggaggaaattctgcaggagacaggcttcctccagggtctggagaacccagaggcagctcctcctgagtgctgggaaggactctgggcatcttcagcccttc

SEQ ID NO: 7160 - DNA, 2300 bp, Homo sapien
cactcgccactctctgctcctcaaggccacctccagagctcactgacctctgcctgagtggcttgggccacctctcgctttaggagtggatttttttttttttttttttttttgagacggagttttgctcttgttgcctgggctggagtgcagtggcgcggtcttggctcactgcaacctccaccacccgggttcaagcgattctcctgcctcagtctcccccaagaagctgggattacaggtgcctgccaccatgcctggctaatttttgtatttttagtagaaacagagtttcaccatgttgtccaggctggtctggaactcctgacctcaggtgatccgcctgttttggcctcccaaagtgctgggattacaggcgtgagccagggcatttcacatctctttagctcatggggcctgcccttagccttcttttgccccaccccagggagaggctttgggcctggcctctgtagtctgggtggggtgctgttgccaccccctccctccaaattctccctgattttaagctggctgtcagggtgagctggctttggcccccagccagggctgctcccaattctgctgccttgctgtacttctgctgccgccactgcctcctcccccaatgtctctccccagaccactttaatttccatctgtcagcagcttgtggaaggacagactaccactcatgctctctctccctgccccctcttcctgcttggtattgactcacctgccccactctcctcctgctttaatcccagtgggaacctggggcctggcttccaggcactgccgtgccaggctttcccacacctctgtgcgtagtatgagtgtgtgtgtgtggggtgggggtgtggggatgcggggatgcgtgtgtttgtgtcaggtgtggctctgtgccgtgcctgtagatgtggtgggtgcgaggtccatctgggggagtgacaaacagcgcacaagctctctgcctgagtgtgtgtgatggtgatgaatgtgaatgtgtcattttggggagtggccgctggacagggcgggcagtatgagttagtgagagagtgtgtggtgtgcttgtgccgtgtttgtattttgtttttagatggggtcttgctatgttgcccaggctggtcttgaactcctgggctcacgtgatccccctgccctggcctcccaagtagctggaattacaggcgtgagccctgcaccccatgtccagctgtattgtgttttgaggaagcagcagacagaagatgcatatgctgcatggaggtccaaggtgacccagcccctcatttgcttggcaaacatttgcttagtccggcgcgtagccaggctctgggtcaggtgctgggggcataaaggcagaaagggccccgtttttgcccttgaggagctcaccgacaggctatggggacaaagaaccacaggaaagaagcaggaactggcatggattggagcccagggctggtagggctgaggcggccatggtggctgggagggggcagggcagcttcggaagcagaattgaaccaaggggacagtaccaccagggacggtgtggtgcggggagctttccagaagagggagcagctcgttcaaagccagcagcatgtgagggccgggtgtcttctgatggtccctggttgctctgtgagcctggggaatgaagaggcataacgtgggggctgaagacaacatgagtccggagaggcaggtgggccagtacctggctcaccccaaggagtgtgactgcccgagcacgtggccctgggagggaacacattgctagcatgcaacagcagcaggaataatggctgctgcttctgcggtgcgtgctgaccaggactgtgctaagtgctttagatttttctttcatccttgcagcgactccgtgcagttagaggagcctgagctgtttccaggggagggggctcacccgaggtctcagggatttgaacctgccagactggctcagctcttcacctgtgtgctgtgttgctcaaggccctgaccgtgtccttggagtctggaaaaagcatgggaaggagggcaagggagagtttgggggctgggggaaggagcttgtgaagtaggcttcagggcagggagatggggccttacgatgatctcgttctctctctgtcccctttacagccctggcaggtgcccggcccgccccccaccctccggctcccagggcctgctggaggagatgctggcagccagcagctccaaggcggtggctcggagggagtcagcggcctcgggccttgggggcctgttggaggaggaag

SEQ ID NO: 7161 - DNA, 2300 bp, Homo sapien
ggggaagaagggcctgggtacttataggaggatgggggtcagatggggcatgggggaggacgggctggaaaagctgtcattggtgttggaaccttgccttgcaagggaagtcgcagagaggctttgaatcttgacctctcctaatcaaaaggaaagtgcactgcctgccattcctgtgtgaagaccactcctctcctggctgttagccaagtattgcccaagagttgtaaacatgaccatgggaccatcgattgagtgcccactgcatgccaagcactatgctgagtgcttggtctaaatgatctcatttaatcctctcacaccagccccatgcaataggaattatcctcgtttaaggatgaggacgctgagacccagagtggttaagtgatttgctcaaggtcacacagctttctgttgccaaagtggggctttcaggcactaggcagcgctgactctgctggattgactcccaccctgatggaatctaatcgttgtttctttgtctgtttttttttcttattcccagggactccttggctggtcccagaaagatctgcagagtgaatttgggatcacaggagacccacagcccagcagtttcagtccttccagctggtgtcaaggtgcttctcaggactatggccttgggggtgcaagccctagaggagacccaggtctcggagagagggactggaccagcaagtatgggcaaggagcaggggaagggagcaccagggagtgggccagcaggtgtggcatcggccaggaggagatggaggccagcagcagccaagaccagagtaaagtgtctgccccaggggtgctcacagcccaggaccgggtagttggaaagccagcccagcttggcactcagcggagccaggaggcagatgttcaggactgggagttcagaaagagggattcccagggcacttactccagccgggatgcagaactccaggaccaggaattcggaaagagagattcactgggtacctacagtagtcgagatgtaagccttggggactgggaatttgggaagagagattctctgggtgcttatgccagccaagatgccaacgagcagggccaagatttggggaagagggaccaccatggtaggtacagcagccaggatgccgatgagcaggactgggagtttcagaagagagatgtgtcactcggcacctatggcagccgggctgcggagccacaggaacaggagtttgggaagagcgcttggataagggactacagcagtggtggcagctccaggacccttgacgcccaggacagaagctttggaacgagacccctgagctctgggttcagccccgaggaagcccagcaacaggatgaggaatttgagaagaagattccaagtgtggaagacagccttggagagggcagcagggatgctggccggccaggagagagaggatccgggggcttgttcagtcctagcactgcccacgtgccggatggggcactcgggcagagagaccagagcagctggcaaaacagtgatgctagccaggaggtgggagggcatcaggagagacagcaggcaggggctcagggccctggcagtgctgacctggaagatggggagatgggaaagcgaggctgggtcggtgagtttagcctcagtgttggcccccagcgagaggcagcatttagcccagggcagcaggactggagccgggacttctgcatcgaggccagtgagaggagctatcagtttggcatcattggcaacgacagagtgagtggtgctggctttagcccttctagcaagatggaaggtggtcactttgtgcctcctgggaagaccacagctggctcggtggactggactgaccagctgggtctcaggaacttggaagtgtccagctgtgtgggttctgggggctcgagcgaggccagggagagtgccgtgggacagatgggctggtcaggtggcctgagcttgagagacatgaacctgaccggctgtttggaaagtggagggtctgaagagccggggggaatcggagttggggagaaggactggacttctgatgttaatgtgaagagcaaagatttggctgaggtcggggagggaggaggccacagccaggccagagagagtggcgtggggcagactgactggtcaggtgtggaggccggagagttccttaaatcaagggagcgtggagttggacaggcagactggacacctgaccttgggctgagaaacatggccccaggggcagtctgcagtcctggagagtccaaagagcttggggtgggccaga

SEQ ID NO: 7162 - DNA, 2300 bp, Homo sapien
gggctgtgctatgagaggggctgaaaataagggcgttggggaaatagagtgagccggtcagataggcggtgggggtgggcaagtgggatacttgggattgagatgatgcagaggttgcagccactggtaaggatgaggtctagggtgtgaccttgagaggatgggtcgcacagtcactgaggaagaggaggtcaacgaaccagaggctggaagggtcgcatctggctatggagatgactgtaagctatcacaacaatgatggagagggttgcagtgatgcagcggttatggttttcaaggaatgatgggtgcgtaagggtcaataacaagaaagaattgtgggtgctgtagtttaagggcacgagctttgacattagaacgttgcagaggggagtgagcatggagggaacagaagggaccttgagaagcaagcaggaccctttattttgcccaggcctagtaggtgatgatgtgggagaattaacgacatgggagagggcggccagggaagtgtgacctctgcagagggcaaaggtcagatggagccagagtcacttcattgtctggggacaggtggagtgccaggtgcttggtgccttgtttgtccccctcttctctccacgtcctccccactctctgccgccatcatcccatgagtcctatgccgaggggccagtgcacacatttcccttcaccctcacctaactgggagatgagcattgttgccaccagccctaatgtacagatggggaagctgaggctcagagagaccaagtgtctgccatatgtgagggagggcacatgctggtaagaggcagtgctgggacggctcaagccaggcgctgtcacaccccccagtgccttttgcctgggtcccatagccttcctgcttccttggcaccttctgtgccatgaggggcaccccctgcacgctgtagccactcccccgagctgctctgtagctgcactgcacctcgaatcctgcttggacgcgaaaccctctctcccctcacgactcccacatgctgaggtgcttcaagagccagattcacaatgttccttttccctttataaagcaggtgttatggaccccgaactgtggcctctgaggagatcctcacatgagctttgggttgagtgggtgaggggttccaaccacctgagacgaaaggaattatgctttgtgaataaggataggcgcattctggggaagaaggtctaaagggggctctgtgagaagtcctgccttgagtcgtctgtggggcccctcccagctatcccaagaggaccccctcgggttccagttgcctcctcccagcctgggagaagctgacctggggtctgtgtggggtcggaggggaccctccccgccccgctgagaggtgagtgacggatcttgacctttctttctcttgcagatttccaagccctggattccctcaagtccagccccctcctcagagaatggaggccctgccagcccaggcctccccgcagaagcctcaggctcaggccctggctctccccatcttcacccgcctgataagagttctccctgccactcacagcttctggaagcccagactcctgaagcttcccaggcttctccctgccccgctgtgactccatcagctccaagtgcagccctgcctgacgagggctcccgccacacccccagcccggggctccctgccgagggggctccagaggcccccagacccagcagcccaccccctgaggtcttggagccccatagcctggatcagccccctgccacctcaccccggcccctgatcgaggtgggtgagttgctggatctcactcggacgtttccatctggcggggaggaggaggccaagggtgacgcacacctccgccccaccagcctggttcagcgccgattctctgaaggtgtgctccagtcacccagtcaggaccaggagaagctggggggctcgctggctgccctgccccaaggccaggggagccagttggccctggatcgtccctttggggcagagtccaactggagcttatcacagtccttcgaatggaccttccccacgaggccctcgggtctgggcgtgtggcggctggactccccgcctccctcccccatcactgaagccagtgaggccgccgaggctgctgaggctggcaacttggccgtttccagcagggaagaaggagtgtctcagcaggggcaaggggctgggtcagctccaagtgggtcaggaagttcctgggtgcagggggatgatccaagcatgtccctcacccagaagggcgatggggagagt

SEQ ID NO: 7163 - DNA, 2300 bp, Homo sapien
gcagggatgtggaaggagaacagggagaggggggagaaggaaccactcccagctgcgggagggagggagagagggaaggagggtgagtgggaagggggaggcaggcagtggggcggagcccaggttggggaggagcgggtttttcccgtctcccgtgaggtgattcacagacagacttcatactttgcagctctctagctctgctttgagtagacacctccagcggggccgtcctacccaaggggcactgtggggactgtaagtggggtgtcttggagagcttgtcagaggagggagcagtgagtgactccctgaagcgctaggactttggggttaggagataagagttggggaggatctttgaagagttgaggatatggctgttgggaacctcccttgacctcctcctacccccccccccccactccaagttctctcttcctgtcccacactctgcctctgttagaaataggagacttctctctgctaaacctactggcaacgcccaactctttttttccttctcttctctctcttttcctaggtctgcagccaccccagctcatacctctctgcctccccgctctcaaggagggtctgccgcatgtgatgaaagtgtctactctcagggaaagctcagccatggcttccccactgccccgggagatggaggaggagctggtgcctactggctctgagccaggtaccaatgggtgcagggtggagccaggtggctgggaggggggtgggaaggacagaggctgccccctctttctgtcttggggggtggttgagtgatgattctgttgagatagggaaggagtaccaaggcagtacaggatgagtttgaaaggttctcagcttctcttgagactcttcagaactgtttgggatcataaatctccaacaggtgtaagagcagacagggacctttgagatgatatggatcaagctgcatgctttgcagaggggaaaactgaggcccacagggaaaaatggagtgtacaagtgggagtttgaacccagacctcctggctccttgtgtagactcttttcttctatttagccaaatgtgtaggaggtacgggattccatcaggaggactgtggacgagggtacttccaaggtcatttagctttatatagaaggtagatttctggtcctgtttttttttttcttcccatagcagatttacttttgtttgacttgggtcaatagtaagtttgcattcccagtcacacaccagatgacagtggggaggtggcctgggagtgtgctgtgggtgggggaggaggcagcctggaggcaggatagagaagctcagctgagattgaaagtttactatggatgatagagaagagtgtcacataaggtgaaaaaactagattgggaatatgggggggctgactgcttgatagggacaggcaggcatttgtttattggctcatttgttcattcattcttttgtttaattataacttatgctaggggcaaaatacagtacaggaagaagtaaggtgccaggtgggtccttaaatagcttcagcttaaaaggggaattggctaaaacattttgggagtttgaagaagggagaagatgctttggggatgtgtgtagaaaatcaaggaaggcttcatggaagaggtggcatatgacttgtgcctagaaagatgtgaatattcttaaatcggagggtgggagatgaggtggaacaggaaacaaagaagttctgcttcctggttcttctgacagctcccccaccaaccctttccttttggtaggtgacactcgggccaaaccccctgtcaagcccaaaccccgggccctgcctgccaagccagccctgcctgccaaacccagcctgctggtgcctgttgggcctcggcctccccggggtcccctggctgagttgccttctgccaggaagatgaacatgctggcaggaccccagccctatggtggcagcaagcgcccccttccctttgcaccaaggcctgcggttgaggcctccactggaggagaagccacccaagagactgggaaagaggaggctgggaaagaggagccaccccctttgacacccccagctcgatgtgcagccccagggggtgtacggaaggcccctgcccctttccgcccagcctcagagcgcttcgcggccaccacggtggaagagatcctggccaagatggagcagcctcggaaggaggtccttgccagccccgaccgcctgtggggttcccgcctcacctttaaccacgatggcagctcgcgatatggccccaggacctatggcacg

SEQ ID NO: 7164 - DNA, 2300 bp, Homo sapien
tccagacagcccattgcccggggctgttccatcttcccgttggccctccctctttccagcagtttacgtgctgtccctgccgacctctctagcctcggatccggctggagatcctggggtccataggggcgaccccgcctgcgccgagtcccctccggggctggagctgcccagcccttctggaggccttatctgccaggggtcagctcgtttctaccctgctaccctctaccccctggtctcttgagggtggggagtgctcagaaccgctgcgaatcgcagcttctggccacagccttggtggccttggtcacctggggcccctggctggggtctctgagttgctgtggccacctccgcacctggggactctgagcccgccttcattgctgcagcccctcataccgcagaggggcccatcagaaccccaggtgaaaggatttttttggttctgagccaattaatttccatctccaaccacccacactatgttcctagtaataatgttcaaggacaaggaaacaatcttgtgttttaattttattttttctatcatgtgcccctccccccaccacacttggcctggctctgcacagttattcacccacccacagtgggcagtcttccgtggtggttaactgaccaatgggttgacagtactgggtttctctactgtcttcataccctctcccatctttgaaacacctggggcagggtcagcgttaggggaggggtgttggattttgcagaggatgagcactgggggtcccttttaaggatttggtgctgtcttcccagaccagctggagtgggtgactttaagtgaggcaatgccccttgcaggttggagaagtttgggttgtcctcagggctctgcataccaggtgagggaaacttccgccttgcatgagaggtgcagggccctatcccccagggtctccatgtttttgtgggtgggagagtgcttcaggagtcaggatgggaactgaggaggtggttggagtatctgaagaacaggtgacaggactagggcctgggagagtgaaggaatggtctgggaatgctggtagcctggggtcagggaagaggaggaggtggttatcagggatgttagctcattggtgacactgaatggaatcacagtaataataggcaacatttgttgaacacttattatgtgctaggcattgtgctaagcctatttcatgtactatttcatgtaagccccctcagggtctcaataatcccatttttcagttggagaaactgaggcttggagaagtcacagggctagaaagtggtagacccacccagcactgaatcttggtatatcagatcctgaagctcatgtgacaggcttctaccaccaggctgtgcctcttggtttaatttcttctgtccccctcagaactccttaaagccaaccctaggctggtgagtgaagcccacataaccccttttcatacataggctgtggctgctccaccctgactgtcgtggaaggtggagccccagggaattttcccccaagtcactccaccccccggatgttctcaagccctgtcccgttctcccagcccaggcctgggccggctcctccttcctcttggctaggccctggaaatccagtgggaggccattgctatggcaacaggactaggccctggctttacctcatcaaattccaagctgaagccaagcgattgagaaattaaagaaaaaaatatattccagatgtttactttttattccttatttttccgtgtttggatgagacagttctgagggaggggagagagtggggcagggatgtggaaggagaacagggagaggggggagaaggaaccactcccagctgcgggagggagggagagagggaaggagggtgagtgggaagggggaggcaggcagtggggcggagcccaggttggggaggagcgggtttttcccgtctcccgtgaggtgattcacagacagacttcatactttgcagctctctagctctgctttgagtagacacctccagcggggccgtcctacccaaggggcactgtggggactgtaagtggggtgtcttggagagcttgtcagaggagggagcagtgagtgactccctgaagcgctaggactttggggttaggagataagagttggggaggatctttgaagagttgaggatatggctgttgggaacctcccttgacctcctcctacccccccccccccactccaagttctctcttcctgtcccacactctgcctctgttagaaataggagacttctctctgctaaacctact

SEQ ID NO: 7165 - DNA, 2300 bp, Homo sapien
atactctcccttggtgccctccaggctgacgcagctatttacgttcagagtgaaatgggctgtgtggctgggattgggaaaggccttgttaaagctgggagaggtttggtcatggtgacaggggacctgaaggcccagctcctcttccctcttgccaatacagggacaagtcaaagaagaagaagaaagtaaaggtaaagatggaaaagaaatccacgccctctaggggctcatcatccaagtcgtcctcaaggcagctaagcgagagcttcaagagcaaagagtttgtgtctagtgatgagagctcttcgggagagaacaagagcaaaaagaagaggaggaggagcgaggtgcggcaggaatgtggggcctgtgggctgggcagggtgaggggcatgtgtgtctgtgtggggttggtctgtaagagtaatgagttggagtggatggtggaattctgaggttctgaaggggggtgctgtagttgggggcggtagggaattgcgggcccttcactgaagagtgggtggggcacccaggactccagcttttcccttaagacacctttggttttcaggactctgaagaagaagaactagccagtactccccccagctcagaggactcagcgtcaggatccgatgagtagaaacggaggaaggttctctttgcgcttgccttctcacaccccccgactccccacccatattttggtaccagtttctcctcatgaaatgcagtccctggattctgtgccatctgaacatgctctcctgttggtgtgtatgtcactagggcagtggggagacgtcttaactctgctgcttcccaaggatggctgtttataatttggggagagatagggtgggaggcagggcaatgcaggatccaaatcctcatcttactttcccgaccttaaggatgtagctgctgcttgtcctgttcaagttgctggagcaggggtcatgtgaggccaggcctgtagctcctacctggggcctatttctactttcattttgtatttctggtctgtgaaaatgatttaataaagggaactgactttggaaaccatgtcctcatgctttctttgtagccttggtgtgttgctcccacttttattggtggtgtttactgctctggtcagactgggcagggccttcctggccagccgggaagcaagtctcgaggtacatcctgttctgttcccggctggacgagcattggttttcacccgcctctgcccggatgggccacctgagagtctagaaatgagagctgatctgattaggaagtttctcccagttacactccattagccaaccaagctagggggaggcagctcttggctgcatccttacctatgagtcaagggtcttccaaggctttcgataatgaaatcaggattgactgtccttcccgcagccgggggagtggaaacctgagcctggagagtcggggaggatgagcgtgtgcgtagagtggtggtggttgcagcctggtggtggtgcaacaaagtacggagttatatgtgaagcttttgttcttacgggaagaagggggtatacaaacttcagtgtagggaggaacccatgtctgagaaggggcctaaaaggagataaaggtcactaatgaggaatgcagagctgccagacttcttcacggtggctctaaatctgaattgacacaggagggtggccacgttgcgcgcgttctcagcactcaggtggttgtatcaggaagccgcttcagtcagccggcggctaccttcttgccggcgtagctcgatgatactgtgctctgtgcaggcggcggagcccgggaggggccgccaaggcagtttctctaggcagtcgtctcggtggccattttacccgagcgctcccggctgaattgcgtcagtttcgccccggtctgagactggggcgggcccctcatctgcaagcctcatgaataattgagtgctgggccgcgcctgtttgccgacggtgggacgaattctgcacgggcttcccactcccgggttccaaccggctcatgcatattcatgaagcgccctgggggcgtggacctgggcggagttggggcggggccccgccggggctcgcagtggcttcgtcccgcggtgacggcggcggcggcggcggtagcagcggcggcggcggcggggactggcatcggggccccgagccgagcggagccggaccccgggcgagcgcgtgagtgcgcgggggcggtcgggcgaaggagggggcggggtccgggatggggcgggggaggggcatggaaggagtgggtgctttcca

SEQ ID NO: 7166 - DNA, 2300 bp, Homo sapien
cccgggctggagtgcagtggcacaatctcagctcactgcaacctctgcctcctgggttcaagcaattctcatgcctcagcctcctgagtagctgggattataggcacccgccaccacgcctggctaatttttgtatttttaatagagacggggcttcaccacgttggccagtctggtctcaaactcctgacctcaagtgatctccctgccttggcctccccaagtgctaggattacaggtgtgagccaccgtgcctggccggggatgttttcaccttgttcaagtttcctcaaatctgagaagtgtgctaaagtagtaataggccctcaatatctatttattaaacccagttgaatttattttgctagataatgctggaatagccactactcagaggttaaagctatgagttcaggggagaagggtgcattcctgttgtctcttaccccaggattgatttagcaagctggtgtattgattgtcagggaaatcttgagcttacatattctgtactaatgtcttcatgtaggacacatatcaatagtcattctgaacatacagtcactgtgattatgacagaagataactggactggtggtgttaaggaggtctgggtcctacctagccttgttgccaacgcactgagaccctgggcaactcactcccctttgggtctcagttttcccatcagtaaaaggaggttggggtagaaaaactaaaacatcttttccaggtctggtctctgatgttgcaaaatgcactctgggattatacgggggagacctggcttccgcaaccacaggatgatgtggtttcaaatcagttctggctccaaggtgaatctgacaccaggacttgaactggataaggccgtttgccagcctcttggaggtacctataattttcggttaaggatgtgaaaattttgggtgtagacagtgaacttgacagttcagccagaaagcagtgcacccacgatgacaccaacacccgcatactctccgcagccagtgggagaggtcgtttcctcccacaactgttcaaatacttctcttcttgtcccatcgactcctttccatgacatagaaactattttgcagagaaacgggcacgcatcattccaatacacacccccaccccacccctgtactaagtctgatacaataaaactacacaatttctctttagtatctagtctcgactgaagaagtgtctgtagtttctaaagagccctacacacattttctaggccggattccccctgggtgagagaggcttcacggcaaccacccttccctcaggtcctccagagtcgctgacgctctatgcgactgtctcgcaggcgggcccgactcgcgtctctctagccagctcatcctctctgtggcctgtgtacggcttccggtggcgggacgcggggccgcgcacgcgggaaaagcttccccggtgtccccccatccccctccccgcgccccccccgcgtccccccagcgcgcccacctctcgcgccggggccctcgcgaggccgcagcctgaggaggtaggtggtggtcgtccccggtcccaggaaggcaggggccccgctcccccacgggaccctcgacatggaccattccgcgttcgcaaccgcggggagcgggcgaatccattatgtggggcgggggtgaaccgtgggtctggggccgcggggtggtgggagcggtgcgagggaaaccctgcactctgagctggattgggtcgcgtgcgatgtgcgggctcctggcagaccctggggttccgctgctcgttgccatggctcccgccggagcggccagagcgggcgtcgggttgggtgtcagcggtattccgggcccggttctccacccaggcctggacctggaccctcgggcactgcagcgtccgtctgtaggtttccaggcagaggaaatcctgagacatccaggcgcagctgggagttgctacctggctccatccgtgagcacagcgaggtgctgtctttcatgcttatctgtcttcctcttgaattcagattcccaacctgctgagcatccgcacacccactcaggagttggggcccagctcccagtttacttggtttcccttgtgcagcctggggctctgcccaggccaccacaggcaggggtcgacatggcagagacactggagttcaacgacgtctatcaggaggtgaaaggttccatggtgagaatggcttggacaggtgatacaagtagagagaaggaaggagggtagagtttttgtccattaatgagagcttgctttggtaacgttattttgga

SEQ ID NO: 7167 - DNA, 2300 bp, Homo sapien
ggtctcttgaaagtttttctgggtcttctggggtgtgatgagtaaagagtcacatatttctaactccagctggtaatgagcttcgctctacctgtagcatagcagttagcacgtcttttttgttttgttttctttttattattattcttatactctaagttctatggtaaacctgcacaacgtgcaggtttgttacatatgtatacgtgtgccatgttggtgtgttgcacccgttaactgtaaatatacccgtcatttacattaggtatatctcctaatgctatccctccccactccgcccaccccgcgacaggccctggtgtgtgtgatgttccccaccctgtgtccaagtgttctcattgttcaattcccacctatgagtgagaatatgcggtgtttggttttctgtccttgtgataatttgctcagaatgatggagtccagcttcatccatgtccctgcaaaggacatgaactcatcctgttttacagctgcatagtattccacggtgtatatgtgccaacttcttttttttttaactgtcactttatttattaaagtcatttgttagattatgttttcctgaaaggttggggctgggtttttttttctgttttttttttttttctttctttccttcccttccttttttttttctttttctttctttctttttttttttttttttgacagagtctcgctctgtcacccgggctggagtgcagtggcacaatctcagctcactgcaacctctgcctcctgggttcaagcaattctcatgcctcagcctcctgagtagctgggattataggcacccgccaccacgcctggctaatttttgtatttttaatagagacggggcttcaccacgttggccagtctggtctcaaactcctgacctcaagtgatctccctgccttggcctccccaagtgctaggattacaggtgtgagccaccgtgcctggccggggatgttttcaccttgttcaagtttcctcaaatctgagaagtgtgctaaagtagtaataggccctcaatatctatttattaaacccagttgaatttattttgctagataatgctggaatagccactactcagaggttaaagctatgagttcaggggagaagggtgcattcctgttgtctcttaccccaggattgatttagcaagctggtgtattgattgtcagggaaatcttgagcttacatattctgtactaatgtcttcatgtaggacacatatcaatagtcattctgaacatacagtcactgtgattatgacagaagataactggactggtggtgttaaggaggtctgggtcctacctagccttgttgccaacgcactgagaccctgggcaactcactcccctttgggtctcagttttcccatcagtaaaaggaggttggggtagaaaaactaaaacatcttttccaggtctggtctctgatgttgcaaaatgcactctgggattatacgggggagacctggcttccgcaaccacaggatgatgtggtttcaaatcagttctggctccaaggtgaatctgacaccaggacttgaactggataaggccgtttgccagcctcttggaggtacctataattttcggttaaggatgtgaaaattttgggtgtagacagtgaacttgacagttcagccagaaagcagtgcacccacgatgacaccaacacccgcatactctccgcagccagtgggagaggtcgtttcctcccacaactgttcaaatacttctcttcttgtcccatcgactcctttccatgacatagaaactattttgcagagaaacgggcacgcatcattccaatacacacccccaccccacccctgtactaagtctgatacaataaaactacacaatttctctttagtatctagtctcgactgaagaagtgtctgtagtttctaaagagccctacacacattttctaggccggattccccctgggtgagagaggcttcacggcaaccacccttccctcaggtcctccagagtcgctgacgctctatgcgactgtctcgcaggcgggcccgactcgcgtctctctagccagctcatcctctctgtggcctgtgtacggcttccggtggcgggacgcggggccgcgcacgcgggaaaagcttccccggtgtccccccatccccctccccgcgccccccccgcgtccccccagcgcgcccacctctcgcgccggggccctcgcgaggccgcagcctgaggaggtaggtggtggtcgtccccggtcccaggaaggcaggggccccgctcccccac

SEQ ID NO: 7168 - DNA, 2300 bp, Homo sapien
gtacctccaagaggctggcaaacggccttatccagttcaagtcctggtgtcagattcaccttggagccagaactgatttgaaaccacatcatcctgtggttgcggaagccaggtctcccccgtataatcccagagtgcattttgcaacatcagagaccagacctggaaaagatgttttagtttttctaccccaacctccttttactgatgggaaaactgagacccaaaggggagtgagttgcccagggtctcagtgcgttggcaacaaggctaggtaggacccagacctccttaacaccaccagtccagttatcttctgtcataatcacagtgactgtatgttcagaatgactattgatatgtgtcctacatgaagacattagtacagaatatgtaagctcaagatttccctgacaatcaatacaccagcttgctaaatcaatcctggggtaagagacaacaggaatgcacccttctcccctgaactcatagctttaacctctgagtagtggctattccagcattatctagcaaaataaattcaactgggtttaataaatagatattgagggcctattactactttagcacacttctcagatttgaggaaacttgaacaaggtgaaaacatccccggccaggcacggtggctcacacctgtaatcctagcacttggggaggccaaggcagggagatcacttgaggtcaggagtttgagaccagactggccaacgtggtgaagccccgtctctattaaaaatacaaaaattagccaggcgtggtggcgggtgcctataatcccagctactcaggaggctgaggcatgagaattgcttgaacccaggaggcagaggttgcagtgagctgagattgtgccactgcactccagcccgggtgacagagcgagactctgtcaaaaaaaaaaaaaaaaagaaagaaagaaaaagaaaaaaaaaaggaagggaaggaaagaaagaaaaaaaaaaaaaacagaaaaaaaaacccagccccaacctttcaggaaaacataatctaacaaatgactttaataaataaagtgacagttaaaaaaaaaagaagttggcacatatacaccgtggaatactatgcagctgtaaaacaggatgagttcatgtcctttgcagggacatggatgaagctggactccatcattctgagcaaattatcacaaggacagaaaaccaaacaccgcatattctcactcataggtgggaattgaacaatgagaacacttggacacagggtggggaacatcacacacaccagggcctgtcgcggggtgggcggagtggggagggatagcattaggagatatacctaatgtaaatgacgggtatatttacagttaacgggtgcaacacaccaacatggcacacgtatacatatgtaacaaacctgcacgttgtgcaggtttaccatagaacttagagtataagaataataataaaaagaaaacaaaacaaaaaagacgtgctaactgctatgctacaggtagagcgaagctcattaccagctggagttagaaatatgtgactctttactcatcacaccccagaagacccagaaaaactttcaagagaccttttccccctgacccatgccactgggggcaactcaggaaaggaggggacggcgcagaactgggtggaatttggcagacactcaggaatgaagagggtccttagctcaggcaggctattaggtgactgggggatgggaaattgcaaggggctttagggagagtgtgagcagctggtgagctgggatgaggatgctgcagaagagaacagaacagaaacagtagacagagtgcagataaaacattagtcccagagggctccagccagctacatcccaggcaatcaggagcccaggattggagaccccacccctgctgtgacatcacaggggagtggagtggagacgaacaaaaagggggtcccccgccctggtcctggcctcttggaagccagagtatcaagagcagagaatctcactaggattgcatggcttaaagggacaggctccccattcctccaacccctctaagctgccccctccaggtcgtgatctcgtctccctgtcctgtaggacctccctctcctgaggccaccactgggcccccttctgagtgtcccctgagcactctctcagcatgaactgcatatccgacttcttcacctatgagaccaccaagtcggtggttgtgaagagctggaccatcgggatcatcaaccgagtagttcagcttctgatcatctcctactttgtagggtgag

SEQ ID NO: 7169 - DNA, 2300 bp, Homo sapien
cctcccgggttcaagttattcttccacctcagtctcctgagtagctgggattacaggtgcccaccaccacgcccggctaatttttgtatttttagtagagacagggtttcactgtgttgggcaggctggtctcaaatacctgacctcaggtgatccacccgcacatgcctcccaaagtgctggaattacaggcatgagccaccgtgcccggtcctaccaatctgcacattttaattgacaagggtcaccctccactcatgtgccaggcatagttctgagaagcatcccacaaggatgcctctgagttcaccctgacaagtccactagctcttggcagagacatctggcaaattcaaggcttgagacatgctggcctctctttaaagtgcagcaaattttgtctagagcttggtcagttaaaattttgatgttttgttttgcattaatttcaatttttaagaaatgttgcattaaaatgttatttatcttgaatagtaaatttcttagtgtccccttaatttcttagtgtgtctgagttgagagcctcccctgcctgattctagtccagaccctggggtgacagaagactggtgggagatgggaggtgaggaggggagtgttggttggagaggatgatctacagagtgctggagagactctgtatggagcttttcatgctgcctgtttgccagccctgaagctatgccttgaggttgggcaaggtggcatatcctagatcagagatcctcaactggggccatttttctccccagaggacatttggaaacatgtggagacatttttgatcatctgcgggggtggggagaggggctactgacatctggtgagtagagaccagagggaccattaaactttctacaacgcccaggacagcccctccacaataaagagttatttgacctcacatattaatagcacaaagttgaggaaccttgatctagatccacagcacagaagaaaggatgtagatttttcacacattaaagatgagaaagcttgtgcctgtaatccctgtgactcaggaggctgtggcaggaggattacttgagcccaggaattcagggttacagtgaactatcatcgcagcactgcactccagcctgggtgacagagcaagattttgtctcttaaaaaaaaaaaagatgaggacaggcacagtggctcatgcctgtaatcccagcattttgggaggccgaagtgggtggatcacgaggtcaggagttcaagaccagcctggccagcatagtgaaaccccatctctactaaaaatacaaaaaattagccagctacttgggaggctgaggcaggagaagcgcttgaacccgggaggtggagcttgcagtgagccaaaatcttgccattgcactccagcctgggcgacagagcaagactccgtctcaaaaagaaaaaaaaaaaagatgagaaagaggaagggagagaaaaaagagagagaggaaagaaagagagaaggttttggagtcaaaaagacttagaaattccagttcttccacttcccatggaaccttggcaagttgccttctctctttctctgaatctcacattttgcctctgtgaagtaggggtggtacctggtggagatgatgcggagatgagggtgaggggtgtgttgcacactatgcccctaggatgggtgagagcttgggagcactgaacctccctttcccctcttgtttcttccccccattgtctcccaccagctccctgggatctccacttcactctctgggattccaccagcaggaggctactcctggagttaaggcgtgttgttcagactggggcattttagggggcataaataataattatgcctggacaatggacataacatctagggccttctgaagcaaaccagggtgtggggtacccaaacaaggcagtaggccccaggaggcaggtccctgcagtcccagcagagagcagggcacagggttgagaagactgagcaaacttcattatcagctcctttgtcccccactctgtcctggagcaatcattctggcctcttcccacttccccaaaaacccagtataaaggctgcttctggcccctgaagccagaggcactgagagtggaggtctcagactcttggaaggtgagttcttttctggctgcccaggcaggaccagtgtaggccctgggaagaagcagcacctcatagggcaaacacgtaggaggcctgtccttaggaacatcatagctaagcagacctgtccccgcaggggcaggagtctgggctaagggtgatactggagagc

SEQ ID NO: 7170 - DNA, 2300 bp, Homo sapien
tctgctctgttttactatgcatggacttccttctgaattagcagaggatgtttcctagcttggtcttaacccttctccttttgtttgacctcaatttactcatcttacaaattaggttgtaagctaattgaatacaggatctatgcttcactctgattttatctccacctggatagcatcatttttgacacacaagcaggcatatgggaggggagagaagtttggtgccagaaagaactggatttgaattctaaccctgttgtttacgtgagtacgttacttaaccattaattacttcaatgtatatttattaagtacctactatgtgccgggcactgtactaagcaccaaggatacaatggtgagtaaagagatgcagccttcaccatcacgaaggaagacagatgttaatccattaaccaagtaatctcacaagaaaagtaaaatgactaactgataaggacaagcccctggagctacaagagggtgtatacagggcatcgatccaataagggcagtgttgcggggagatcaggagccacacagagcctgggttgtctcacttggaaaatggggtatcaaccacctacctcactaggtttttaaaatcaggttaaatgaggtaatacttgccatgaacagtattttgttgattgatgattgattgaaacggagtctcactctctcgcccaagctggagtgcagtggtgcaatctcagctcactgcaacctctacttcctgggttcaagtgattctcctgcctcagactcccaagtagctgggattacaggcagccacccctatgcctgactaatttttgtatttttagtagagacaaggctttgcaatgttgaccaggctggtctcaacctcctgacctcaaaagatccacccacctcagcctcccaaagtgctgggatcacaggcatgagccactgcatccagccacttgccatgcatggcatttaaaaatgttcagtaaatgttaccataatgaaggctggtaggttggccaactgagtggtctgattcagaaggaaagaagttagacatacgtgaacatttcctgtacttgaagatcctcaggacagtgactcctagacccatcttccatcacagtcagctgggaagcttttaaaaaaatgcagacatctgaccttcacgctagacctattagccaagcagaagtttctgggcagggcatctgcatatttttaaaaatctttaataaggcagcctcaaaattacagattcagcacgcatttaccataaccactgaagaaatgcaaagttataaaaagaagataaacaacaatctgtctcctgctttcttccctctcctcccctgcttctggaggcaacaaggtcaactatttggtgtgattccttttagcattccctccatcaatggtcacataaggatgctcacagataagcacctatgcgggggttttttttttccttgtaaaactattcacatactaaatactttcctcagtatcttgccttttttcacttcatgtcacagaaacatctcttcaggtttatagatacaggtccagctcttcttttcatagccatataacattctgtagaatagagaggacacattttactcagtgtccgattgatggatatcaatattgttttcatttctacaaatagtcaaggaataacataactctgtaaaagttttattacttataggcgcatttatgcctaaaggatagtctcaaaagagtgaaactgatcaaatgtgcatttttttattttaataggtatggacagatttgttctcaaaatgtttgtggcagttcaaaacaccagtaaaacaggggagatatgtattttggaaaagcacccaaggcgattctgaagtgtagcccaggataagaaccattgcccagagctgttccagatggcccctgggttcctgaagtgggtatcgggagagaaatcttcactgaatgaatgagtgggctccccagggaagtgatgaaatggtccttatcagccttgctatctccctctgacagaggcaaactctctctccctgggggaagttcctccaaggcctctatataagaagtctttgtgagaggaagcaaagaaggacctgggctttgggaagatctaaagacccaggaaggtctctgggtgggtgagtgctttctctgctgtggtggagctggtgacagtttattctcccaggaggtccctggctgtggctgacagtttctggagggctggcaggcgtctacctgtggctttcaggttatgaggatgtcagcaggggcag

SEQ ID NO: 7171 - DNA, 2300 bp, Homo sapien
tttgttgaaccaatcagtcaattaaaaaaaaaaaggtgtgagatgatgaggaaggaggcgaagagaaaaggatgaagacatcgggtgcaccgtcagaccttattataatcacttctctctctgatgttactcattaatcctcattggagccacgcaggagagtgatcagaatagcatctgccttttctagctgctggaattcgaaccaaagaacatgggaatggttcagaggatattctaatttcctgtcccatcagttcagtaagacttgtgttagtggaggccacgtcttctgcagacattgatgggagatgtggagtggaggctctaagagtcaagagaggtaacaagataaggtggacagaaccctggacgacctgccccgtgtcccgtgcttcagtcctggatgtacagatagcccatgagctagatctttctggcaggctcctgcagattaacattctaaaatctgtctctttactttgacttttttctgtttctcccttgctacttccacacttactgatccccccaggagactaaaatgtatgccagagcagaagatagggcatgcattaatttcagagtctttgtgtcttgcagtaaaatagaaaatcttgcatcttaagccctgtttgtcctgggatgctatatttttgtggattttctcccataaataatgttattttaagaaaagacttgttttctctaatgtccaaatgtttgttaagacggggtgatgagagcatacgtttcagagttgggaaggtactgcagctttgtagaatgaccgtgggcaagttcctttgaaattcctccccagagctgcttctctggctctgtctacataactgcagactagaaaatctactaccctacaatctgcctatagcacctgcgccatgcagggacctcatacacccatcttatacttcttttatgacaattcctataattaaggtactattgtcctcgtcttacaggtggggcagccaaagagcttgcctcaggttgtataactagtgagtagcttggggtacaggaccccagccacccttcctccattcagtcaagtcactagggtggttgcagacttttatcttttgtgctttggtggtgagctggaaaatcctcagttctggctgtcccctatcgtaacctctatttcttcctcttaaaaaaaagaggagtgggcttggaatagctggagttcctgggccctcaggggatccaggtagctggggttgggagtctgcagactgcatctaatacgcaagaagctctccccaaactgagcttttggcaaggaaacggccacacaggccaaagaagacgtcagctcacgtgctctgggctggaaggatagtaaggcagctgcttagtaaggcctcacgctgatcacaagctccgatgagcaattatatatgtctttgattaataaaaaatggggcaatgaatggttaatcaatgcagtctggcgggaaggctctttcagaacctggggggcgggggtgaggcagggagtcatctaaggggtttttgggagtgaaaatatggggcagtcctccaggggatggtttctgaaaagccctcagtcctggttcttggcttcctgattctgtggttgggatttttttggcagctctgggagtgtgaaactgggagagacggttaagctggtgagcaaataggaaaaatatgttccctgccaacccagcggtcaaggcaaaatgcacaaatagagtgtgtgtgtccctatgccctcatgtgctgtctgtgtgtcctctgggtgctgggtgtgacattttccctaggtgggcctgagcgagtaacagcattcaactaacttggttaggggaggcagaggcaagggggctgggaggctgaaaggcagcgaggagggagggaaagacaccgctggggttctagggggttctagagggagaagtttcaagagggagaggtaaaaagggcgcgggaggctgtgagcaagggaaaagaagaaggaagtgatggagagtgggaggtctgccccagccccttccgggcgggcaggagggggcggaggcgagcaggggactgggaggggctgcgagaggcgcgaatgcgaacctggcccgtgcggaaagggcgcggagagccccggcgcggagcaggcgggtagggcgaagggtcccctttcgggcgccatggggcgccgagcgcggcctggcccctcgggctcctctgcggggagggcaggccgcaggctggagcggggtgcggaggctggcggggagcggcccccggaggctttcctg

SEQ ID NO: 7172 - DNA, 2300 bp, Homo sapien
aagccatccagtgggaaccatggaaataaactcttgcaggagaatggcgatggcttggaagcagatgatgcctctgtgagagatgatgagtgtctgcatagagcagtggccacggatagataggagagatattaaggggtgaaatcaataggacatgattgattgatgtgggctgaattcttaatgccctcacttagatggcgacgctggcctcaaatctttccactttcttcaccaccctgtgctctagctggttcctaaatgttattgttttgttgaggttccgtgcctttcaatgtgctgtgctagcatctgcctggaagaccattcccacactccagaaatcttgggtttctttgtctgtctctcccacaagagaatgagccccttgagagcaggcactgaatctcttctctacgaatcccggcacttggcacagagcctgaggtaccacatgtatttgttgaaccaatcagtcaattaaaaaaaaaaaggtgtgagatgatgaggaaggaggcgaagagaaaaggatgaagacatcgggtgcaccgtcagaccttattataatcacttctctctctgatgttactcattaatcctcattggagccacgcaggagagtgatcagaatagcatctgccttttctagctgctggaattcgaaccaaagaacatgggaatggttcagaggatattctaatttcctgtcccatcagttcagtaagacttgtgttagtggaggccacgtcttctgcagacattgatgggagatgtggagtggaggctctaagagtcaagagaggtaacaagataaggtggacagaaccctggacgacctgccccgtgtcccgtgcttcagtcctggatgtacagatagcccatgagctagatctttctggcaggctcctgcagattaacattctaaaatctgtctctttactttgacttttttctgtttctcccttgctacttccacacttactgatccccccaggagactaaaatgtatgccagagcagaagatagggcatgcattaatttcagagtctttgtgtcttgcagtaaaatagaaaatcttgcatcttaagccctgtttgtcctgggatgctatatttttgtggattttctcccataaataatgttattttaagaaaagacttgttttctctaatgtccaaatgtttgttaagacggggtgatgagagcatacgtttcagagttgggaaggtactgcagctttgtagaatgaccgtgggcaagttcctttgaaattcctccccagagctgcttctctggctctgtctacataactgcagactagaaaatctactaccctacaatctgcctatagcacctgcgccatgcagggacctcatacacccatcttatacttcttttatgacaattcctataattaaggtactattgtcctcgtcttacaggtggggcagccaaagagcttgcctcaggttgtataactagtgagtagcttggggtacaggaccccagccacccttcctccattcagtcaagtcactagggtggttgcagacttttatcttttgtgctttggtggtgagctggaaaatcctcagttctggctgtcccctatcgtaacctctatttcttcctcttaaaaaaaagaggagtgggcttggaatagctggagttcctgggccctcaggggatccaggtagctggggttgggagtctgcagactgcatctaatacgcaagaagctctccccaaactgagcttttggcaaggaaacggccacacaggccaaagaagacgtcagctcacgtgctctgggctggaaggatagtaaggcagctgcttagtaaggcctcacgctgatcacaagctccgatgagcaattatatatgtctttgattaataaaaaatggggcaatgaatggttaatcaatgcagtctggcgggaaggctctttcagaacctggggggcgggggtgaggcagggagtcatctaaggggtttttgggagtgaaaatatggggcagtcctccaggggatggtttctgaaaagccctcagtcctggttcttggcttcctgattctgtggttgggatttttttggcagctctgggagtgtgaaactgggagagacggttaagctggtgagcaaataggaaaaatatgttccctgccaacccagcggtcaaggcaaaatgcacaaatagagtgtgtgtgtccctatgccctcatgtgctgtctgtgtgtcctctgggtgctgggtgtgacattttccctaggtgggcctgagcgagtaacagcattca

SEQ ID NO: 7173 - DNA, 2300 bp, Homo sapien
gatccgaaaacgagaggggcgggaaaggaaatttaggggcacagagaggagctggggggccgagaaggtccgaaaatggaaccagcagggggcacccgagagccgaggtgcccacgggccgggagcctgggaatgaaactggggaagagggggagagaaagggaggcagagacaccgagacacacagagacgagagacagagacgcagggagccccgcggggaggaggagagagacgaagacacagagagacagtgagaaagacagaagaccgggcagggaaacagacgagtagagacagaaaaggtccgagagagagtgagggagggagggaacagagagacagagaccacgaaatatgagtaagagtcgggggagaaaaccagagaaatcgaatgagaacgcgagaagaacgagagaccgtggagggagcagagaatgaatgggaagaataagaccaacatttatcaagagccgactgtatgccaggcactgcattggaccctggcacggataggaaaggaggagccgcggcgcgggcagcggggcgaggggcttctgtgctcgcgggagcggcagcccagggggctcagcagccccggcaccgccgcacctgaggctccagcagccccaaccccgccagcgctgcctggccaccgtacccgaagcggctcccccgagggccccgagcctatcctacgccggggcggctccgcggacgcgccgggccgagtcaagacctgggtcaaccgccctgcagcctttgtagggaagtgcctaggtgatgggtctgctgataccgcctgtgaccaggccatgaagggccagaggggctccagtgagaccataatccgcccctctttaaaagggggtagaggaagttcacgcgaagccaacagtcttctccccagctttgggtcctctcctgcacccccgcgggagataaggtctcccctcccggacacatcatacatacacaaaaaaacgcacacactcgcacgcgcgcccatctcgcacccgcttgtaaatgcactaaggggcatacacacaccgggcacatatttctttccacccatccccaagatcgcaagcgcaaaacctcgcacagcctcacgtttcccaccagctcagacatgcacgctggcggactttcagcggctcacccgtgtgcacactcacgtgcccccccccccgcttccccaagcccgtacaaagggtaacgggcaagcatcctgagtcacacctgcacaagcatccttgcgcgcacgtgcacgctcatatgcactcgatcttgcacgcacaaactcttgcatatactattcttatagtcgcacactgggcttgaggtctgggagtggaaggaaaagtggaatcttggagctgtcccaggggacagaaatgctggaggctgggacactggcgcgagggacgcggctgggggcgggggagggggtgacccagaagctcatcttctcctggaaagttgggaggggggaacaggacaagtccacggcgttcctctaaactaccgcattcccccaagaagggatttctctagaagagtggcgccgcgaggacgatcgaacacagtcctccgggtcgcttaagcgggggggaggggggcggggtggagggggttagaaagccgctcccgcctcctagtggtcgagaaagggttaagtcggcaagccagcaaacgagggaggagccagcgagtgcgggaaggagtgggggtggttgggaagagcttcctcgctgtccccactctccctcggctagcagcctgggcacacggacagacggactgacggactctcgagcggacagcgcagctagcggggcgcgggcgctgggcgtcgacggccagccccagccttccccgccccgtcgcgccccgccccgtcccgtcggggccgatggctcctcccgaggcccgcagcccgggcggcgcagggtagagcgccgcggcccggccacgcagcccggggactcccgggccctcccggagccccgcggggtccccgccgtgcatccggcgggctcagggagcgagtgggagcgccctccccccgctgccccctcccccgagcatcgagacaagatgctgcccgggctcaggcgcctgctgcaaggtaagaacgccagcggcgggagagcggagggcatcctggggagagaagcagggcgtcccctctttcagggattgagggtggggcagttggggaggtggggtaacctggggaaggggaaaagctcagcgctggggccgcgcccccgccgccagggctgttctcagcagga

SEQ ID NO: 7174 - DNA, 2300 bp, Homo sapien
atcacttgaactcgggaggtcaaggctacagtgagctgggaagtcaaaggtgcagtgagctataattgcaccactgcactccagcctgggagacagagtgagaccctgtctcaaaaaaaaaaaaaaaaaaaacctgtagagaaatgacagtgatcataaagatcactaaattatagggctagcctgatccccaaaggctgtgtggtccaacccctaagtgcttcctggaggtgtctgagcactttccccacctccttggcagctggtactgaagaagactctctgttgtccaggacagttccttccatggctggtcaacactcaggatctgccaggcctttgtgttcttccttatgtcaacacacagattcctttatctttactcttctgccaactgcatgacctttggatatgtaaagtcaggggtcattttcactactgagggcagatgtcctctaccaccccctagtatccaggcattatcacatccccttgtccccttgttggtttttttgtttcctttttcttttcttttcttttctttttttttttttttgagacagggccttgctctgtcacccagactggagtgcaatggtgtgatcatggctcactgcagcctcgaccgcccgggctcaagcaatcctcccacctcagactcccaggtagctggaactacagacatgcatcgccatgctcggctgatttttaaaatttgttttgtaaagacaaggtttcccaatgttgctcaggctggtcttgaactcctgggctcaagagatgcacccaccttggcctcccaaagtcctgagattacaggtgtgagctactgcacctggcctggtttgttcttttagcagcacctgtcactctagagctgagaacttcctgtctcatgtagtgtggatgcccagctcctagagtacgtgcttaccacatgacccaccaggagggtcagctaccccttcctcagatccttcaggagcactttctctgggccaggcactgtgcaaagctctttgtttactgtctccaatttaatcctcctaaggaggtcgtgggttaggcattctttggtccggtttacagacaagaagaaagttacttggtcaaggtgcacagctagtaaggctggtggtgggaattcagaccctggtctgtctgcctgctccaggtgcaccctgagtttgcccttggcagtgctgccaagtgacaacttggaggcctgggggcagccacctcatgactcactgagcattgagtaaagcgaagcagccctttgtctcctatcactagcttttctccttaacttgtcacaactccaagttggcagtttaccgttaaggacaagtcctccaagtggacttctagaggggactggagggcagtgcctggttctcattctgtgcctcagcttcatcacctagggaacgggatactttattaactgacttatggggctgttgtgtttagaacagtgcctggagcatagttaagtgctcaataagtattagctattattttatcagactatcatttatcgggaaagcttcctctaagttttagtgttctttctaaatttcttttttttatttagagatggggttttaccatgttgcccaggctggtctcaaacttgtaggcttaagcgatctgcctgtctcagcctcccacagtggtgggattacaggcatgaactaccacgccgggccattttaatgaattcttgttatagccattagagtaccactcactgcctttgcctttgcctctagatatgggggcacttcttgttgggggtccacaaccccctaagcttggacactgagtgcatattacaacttagtaaatacttttatgtccagtatttcatttgagctagttgaagcctcaggctgtgtgtgcacaagactctcccagggtcaggtactaatggctgccatttctggagcagccccatcagaggagatgtgactctagggtacccccaaaggcacttggcatgggatttgaaagcaggccgcctgactgtgggctgctgtctcctgtgcccagctgttcctggtgtcatgtgctgagccctcccttccccctcctcagctgagagcagcaccaacaccacccaggatgagcagcgcaggtggccaggctgtgaccagcaggacgagatgctcaacctgggcttcaccattggttccttcgtgctcagcgccaccaccctgccactggggatcctcatggaccgctttggcccccgacccgtgcggctggttggcaggtgaggtggctgggctatgggg

SEQ ID NO: 7175 - DNA, 2300 bp, Homo sapien
tctcttggcttggtggctcatctgttcaggggttcccttttatctgaggccttcttggagctttctgtagtcattcttgttttgtttttgagacagagtcttactctgtcacccaggctggagtgtagtggcatgatcttggctcactgcagcctccatctctccagctcagtgatcctcccacttcagcctgctgggtagctgagactgcaggtgcacaccaccatgcctggctatttttttttcttttttgtagagacggggtttcaccatgttgtccaggttggtctcgaactcctgagctcaagcgatcctcctgccttggcctcccaaagttctgggattacaggcatgaaccaccacacctggccaccagtatcactctttttttaaaaaaattttatttttattttaagttctggggtacatgtgcagaatgtgcaggtttgttacgtaggtaaatgtatgccgtggtggtttattgcacctatcaacccatcacctaggtattaagctcagcatgcattagcagcactcttaacacacaattaaactcacatgtaatgagattacttctcattactccacaccatagtagtctattttacagatgaggatactgaggctcagggaggctgagagatttacctggagtcaatcaattgttgatctggaagcatccgatcaccaggtcttctgaaataatgacagcagcaacaattaacattatgcttactatgccaaatgctatgcttagcattttacctgcatcacaatcgcgattcctttgggcagttaggtaggttccattttaaccgaatttaaagaggaggaagctgaggctcagagaggtaacttgccctaggtaacccagggtagtcagttaaaaagtcaagactcagacctcgatctgactaactccaaagaaacccgtgccactctgcctctcggaaaacactgcttccagctgcacagttcaaaaccccacccaaggcggccctgaatcgcggtcagtcggcttcagccgaatcgcactttgttttgaacaaggatacagagggcgctgcctgatgttagtctgggggcttgggggagaagatgggggtccagggtggaaatgtaggtgctggggctgtgccagagggagagtgtccgggaccagcgggcgagtcacgtgcgcgtgaaactcgacctaaggggaggggaaaagaagggagcccccgcccccacctcggggcgcagctccggacgcgtgtaaatacaactatcaactccgcagatccacttcatccaagcccagcttcgcagacctctggcgcccggcgggttcccagttcccccgcttcttccgaggagacagcggaggcgaggccaccgggctgtcaggctgaagctccgtggccgccgggtcctgcacgcagagaagaccccagcgccggcgcggctcagggctgggcccacgggactccggacgcgccgcgaaagcgttgcgctcccggaggcgtccgcagctgctggctgctcatttgccggtgaccggaggtgagcagcgtgggcggggagggggcgcgcgtagggtctccggctatgcgtcggctgagagacaccgaggccggctcccgccgacactgccaggcttcccaaggaaagaccgttacttgcgcccgcggtcccgcggcacagtgtcccatctcgccaagcgcgtccttcccttttcttttctctgacccctccgactcttctcttcctcccgggtccccgctcgctgcacttcctctgcttagagctgcgcgtttgccagagttccagcggacctcctggagcgcttgaacccaaagccccgtttcacagatgagaataccgagtccccctggaagaagtgactggtacttcctcccctctctctgggtctttcttgcccttctcctctccgctttcctcggtctcatcccagttgtcgctccccgcccccgcgccgcccgcgttccctctcctcccgccgaggctgcagcggccgcggcggggggagctggggctctttccctccctttggtaaacacacccgcccgccagcccatccgccaccgctgcccttataaagtcagcagccgccagacttcctgccgaagtccgagccccctcccggggctggaggggggcaagcgggttccgaggtgcaaagcctggtgccccgagccctgcggagtgagtgaggggcgcgcgggggaggagggaaccgaggagagcccgtcctgggtctccctccacgtggcagctgttggcttggcccgagagactgt

SEQ ID NO: 7176 - DNA, 2300 bp, Homo sapien
ttgaaatgtgaatgttgatgagtgtgtgtgtccatgttcacacaagcatttttgtcaagagtagatcaataacatatttcttctttttttttttttttttgagacagggtctctgtcacccaggctggagtgcagtggcgagatgtcggctcactccagcttcctggacctcccaggctcagggatcatcctacttcagcctccccagtaactgagactacaggcacatgccaccatgctcagctgaattttttgtagaaataggggtctcactatgttgaccaagcaggtcttgaactcctgggctcaagtgatcctcctgcctcagcctcccaaaatgttgggattacaggcatgagccactgccaccgcgcccactgtcttttgtattctcaaagggatccatgactctcctagcttagaaagttgactctaggtccccctgtgtagagctgaggagtttgaccttgatctggaagttctgggaggcagtattgcattttaagaagttaaaccatcagagcctgacatgtgctttggccaccgagaactccttgtgccattcccacagctaagcctttgctcttgccattctccttctgggaggaatggaaggagccgtacttaaatgccaggccgacctgactctgcatcctacctctaaccttgctccagcttcaagcctgcagtttctccctctgtgaaaagctatgaggtttaaatgggaccatgatgtcttgaggaattaataacagtatttttattttggaaagtgccctgtctatggtagccattagttcctctcttggcttggtggctcatctgttcaggggttcccttttatctgaggccttcttggagctttctgtagtcattcttgttttgtttttgagacagagtcttactctgtcacccaggctggagtgtagtggcatgatcttggctcactgcagcctccatctctccagctcagtgatcctcccacttcagcctgctgggtagctgagactgcaggtgcacaccaccatgcctggctatttttttttcttttttgtagagacggggtttcaccatgttgtccaggttggtctcgaactcctgagctcaagcgatcctcctgccttggcctcccaaagttctgggattacaggcatgaaccaccacacctggccaccagtatcactctttttttaaaaaaattttatttttattttaagttctggggtacatgtgcagaatgtgcaggtttgttacgtaggtaaatgtatgccgtggtggtttattgcacctatcaacccatcacctaggtattaagctcagcatgcattagcagcactcttaacacacaattaaactcacatgtaatgagattacttctcattactccacaccatagtagtctattttacagatgaggatactgaggctcagggaggctgagagatttacctggagtcaatcaattgttgatctggaagcatccgatcaccaggtcttctgaaataatgacagcagcaacaattaacattatgcttactatgccaaatgctatgcttagcattttacctgcatcacaatcgcgattcctttgggcagttaggtaggttccattttaaccgaatttaaagaggaggaagctgaggctcagagaggtaacttgccctaggtaacccagggtagtcagttaaaaagtcaagactcagacctcgatctgactaactccaaagaaacccgtgccactctgcctctcggaaaacactgcttccagctgcacagttcaaaaccccacccaaggcggccctgaatcgcggtcagtcggcttcagccgaatcgcactttgttttgaacaaggatacagagggcgctgcctgatgttagtctgggggcttgggggagaagatgggggtccagggtggaaatgtaggtgctggggctgtgccagagggagagtgtccgggaccagcgggcgagtcacgtgcgcgtgaaactcgacctaaggggaggggaaaagaagggagcccccgcccccacctcggggcgcagctccggacgcgtgtaaatacaactatcaactccgcagatccacttcatccaagcccagcttcgcagacctctggcgcccggcgggttcccagttcccccgcttcttccgaggagacagcggaggcgaggccaccgggctgtcaggctgaagctccgtggccgccgggtcctgcacgcagagaagaccccagcgccggcgcggctcagggctgggcccacgggactccggacgcgccgcgaaagcgttgcgctcccgg

SEQ ID NO: 7177 - DNA, 2300 bp, Homo sapien
caatcagaaatctcttctccatctctataattttgtgattttgagaatgttacttaaatgaaatcatacagtatgcaacctttcataaggcccagtagatattgcaagattcctcttgtaagaaaccatctccttttcccacgcagtttcttaactttccataatgtttcttttttgcggggagtggggggtcggagtttcactcttgttgcccaggctggagtgcaatggtgcgatcttggctcactgcaacctctgcctcccgggttcaagtgtttctcctgccttagcctcctgcttagcctcttgagtagctgggattacaagcacccgtcaccacaccgggctacttttttgtatttttagtagagatggggtttcaccaagttggccaggctggtctcgaactcctgacctcaggtgatccacccacctcagcctcccaaagtgctgggattacaggcgtgagccactgcacccggccaatgttgactatattttcaaaggcaaaaaccaaggcaagatatgtccatctgtacaagagtatcatagcagcattattgcataataggcaaaaactggaaacaatccaaacatccaccaacgggagaatggatagatgaattgtggcatactcatacaatcaaacactagacagcaataaaacagaaggaataacagatgcacacaacaatatggaggaaatcttacaggtacattgagctaaagaagtcaggcacaaaatagaaaataatgtataattccatttacacgaagttcaagaacaaggaaaactaattgatggtgatagaggtcagaatagtggttaacttcgagagggggtattgatggggaaggaacacaagataactttttggggtgcaggaagtattttatatcttgatctggatggcggttatacaaatgtacatatatagatacatatatatttaattaagcttaacattcgtgtattttatgcactttatgaatgttataccccaatctttaaaaatcagggcacaagtttggcaaagatgagtcttcaaagcagtagaaaggtcaattgtttaaaattaggatggtcttggacaattagggaagcttatgatgaccacacagaaaatgtctagcccaccttttccaatgggcaatgtgcccttgcgtcattaatttacatcttgtaaatttattttaccaggaaattgtgtgacaaatcaagggactgagtattgtttccttgtttccttctttttagtggggaatgagtgaatggtgcagtttgaagaacacattaagtcttgaaagttggaaagttcaccagtacccttctttccctcacccaagattagccctggtggcagccgaaattgcttttattatctctttgtggctgaggacctctaactgttgaagaaaacatattttacacgtcttgtctttctgcgaacaggaagcctatctcgcttatctttgcaaccccagacggggcttagtgtgacctacacacagcagtaatcgcacaacgtcccgtggagcactgcttctcaaatttggctgtacatacgaatcacctggggaattttaaattgtattgctgcctgaggaattttaaactgtactcccagagattctgatttaattgaaatgaggtgagtcctgggcactgggatgtttaaaaacgttccaggtgattttaacgcgaaacaaaaacagaaccgctgtttgggggcgttcttccttctccacgcctgatttgcgcacaggagtcggctgtctggaacgggggtgaggttcacaggtgtctgtcgccacgcctcttcctacagaaccaataaactgaagccgctcggtgacatcccaaaggacttgaattctgatcgggctgcagacgctctgcaccccgcccaagcttctatggtactttggtgtcctctctagcactggcaagtcgccttcctcttcgcccggcgccagccgctccctctctatgatcgccgagttcccggcgccgtctcgttggtatttaattccggaagcgagtttgaatcaaagaagaggcgggactttcctcccggaagtaacccacgtgcttccgctggagcctctcgggaggcgggtaacgttatagtatttgtcagaagttggggtctccgtgggcattgtgatccgtcccaggcagtggtaagtgacacatgacctctgaattcaatgtggccctgatgatggcgtcgccatttcagaggtgtagcctttgggctgggtcccggtcgcctctgttcagcgtatgatcccattcc

SEQ ID NO: 7178 - DNA, 2300 bp, Homo sapien
agatgtggaactagaacccaggtctccctggggcttgttctgacacacaaaggtctgcattgtgaaaggacatgaaaggcacaccagtgggctgccccactgtgtggggacttaggacccagctatatccatgactgttaattcacctcgggatgcagcgttcctgtaagaaaagaaaaggagagctacgatacgtggacagaggcttttgctccagtttccatagacactgccccgtttgctcatgctgttccctcttgttagaacatcttcatcccacgctcttacttctcgctgactcatcatgtttcacaatacacttggatttttctctcttccgggaaacctctgcccctccctgaagagggataaagtgaccctcctcatactcccagagtaccaggtgattctctatagcattatcattaaaaatcaggggctgcattctctccctctgtcccagtagtctgggaactaactcctcaggagcagggactcccctttctcatcctggtgtttcctattggcaatgcctgccactcagtagtaggcgcttgttgactgagactattgatcacaggcaggttcgaatgtctttgttccctcatctctacccctgttaagggattacggagtgtcctattcatttcgggcatatagaaaatgctgttaaagttcattgaattgaatgaaacaattaatcgttctgcaaaatctgagcagagaagtcatttggtttcaaaatacttggataaaaacattacggtggctcacgcctgtaattccaacactttgggaggccgaggcgggtggattacttgaaaccaggagctcgagaccctgactctactaaaaatacaaaaatgagccggtcgtggtggcgcgcgcctgtaaatctcagctactcaggaggctgaggcacgagaacagcttgaaccgggaggcggaggttgcagtgagccgatatcgccactgaactccagtcagggcgacagtgaaactctgtcagaaaaacaagaaacaaaaaaactgtgaggtactgagatcacaaactggtgctcaaaatatactgatttcctttctcgtctggactaaacgggggtagggaagggtgagaaggaggggatcggccctcccaacaagtctcatcttccccagatgctgcttggtgctcaggggctgcaagtactctgtccttgcacagagggttggggactccagctgtgcatgggggcacacattaggcccacagcttgtaatggaccagtagtaaagtaagggaggggaagcagactctctcttggaaaggaggctcctgagtccttcttggggcttcccccaccaactgtttcccaaaccagcatacagtaggcacttagtaaatactaaacctagtaaaggactgaatgatggtagaccgaacccccaaagcaaaagagaaagggtccaacagcgcctccttgcggtgctctgccccaagccacggggagaaacgttgcagcccgcgccgaacgccgggcagcacaaaggatccccgactgccggggagcggtgctcggagggcacaggtctacgccatcccccacgcagtttcggagatggagcgctgggcccatggagggaaggcggcaggctcggcggctccggcagcttgctggggcaggggctcaaggcggcagtccgatagtggaggccgctgagaactgtcacggagctgcgtctgtacagcgagcatcccttatttattcagggcgagtgtgtatttggggcggcgtgcagggggctgacaaagaccggagagctcccggtgcggccgccggcggagcgaagactggaacccgtatgagcgccccccagcgcccctgagcgctcgccgccggtgcacggcgcaccccgcgggaggcagggatcagcaaagccgtgcgccccgaggcccgcccccgtctccgcacaaagaccgtgagtcccgggtccgagccttccgcgcggggatcgggcggttgtccggcgggtcgtccttcgacggcctcctggcctcgccggagcgggtgcggggaggcccacgcagcgacggctggaggaggggtgggcggggctgccgggggtggggtccccggggcggggcggggcgcgctgtgtcgcgggtcggagctcggtcctgctggaggccacgggtgccacacactcggtcccgacatgatggcgagcatgcgagtggtgaaggtaaccgcgtataggatgacccctttctcttggctcccctcgcctcccgcattccctcctccctccatcccctccgc

SEQ ID NO: 7179 - DNA, 2300 bp, Homo sapien
cgccattacacctggctaatttttgtgtttttagtagagacgaggtatcgccatgttagccaggctggtctcgaactcctgacctcaggtaatccgcctgccttggcctcccagagtgctgggattataggcatgagccaccatgccaggcctcggacttagaattttcttttctttttttctttgagcggagtcttgctctgtcccccaggctggagtgcaatggcgtgatcttggctcactgcaacctctgcctcctgggttcaagcgattctcctgcctcagcctcctgactagctgagattacaggcacccaccaccatgcccggctaatttttgtatttttagtagagacgaggtttcaccatattggtcaggctggtctcgaactcctgatctcaggtgatccgcctgcctcggcctcccaaagtgctgggattacacgcgtgagccactgcgcccggcgacttacaatattctaagttcctccacttccctcagcttagcctcacaatggtcctggcaagcagataggagtttccgccgaccacccaaggccataactgcacatgggggcagatgtggaactagaacccaggtctccctggggcttgttctgacacacaaaggtctgcattgtgaaaggacatgaaaggcacaccagtgggctgccccactgtgtggggacttaggacccagctatatccatgactgttaattcacctcgggatgcagcgttcctgtaagaaaagaaaaggagagctacgatacgtggacagaggcttttgctccagtttccatagacactgccccgtttgctcatgctgttccctcttgttagaacatcttcatcccacgctcttacttctcgctgactcatcatgtttcacaatacacttggatttttctctcttccgggaaacctctgcccctccctgaagagggataaagtgaccctcctcatactcccagagtaccaggtgattctctatagcattatcattaaaaatcaggggctgcattctctccctctgtcccagtagtctgggaactaactcctcaggagcagggactcccctttctcatcctggtgtttcctattggcaatgcctgccactcagtagtaggcgcttgttgactgagactattgatcacaggcaggttcgaatgtctttgttccctcatctctacccctgttaagggattacggagtgtcctattcatttcgggcatatagaaaatgctgttaaagttcattgaattgaatgaaacaattaatcgttctgcaaaatctgagcagagaagtcatttggtttcaaaatacttggataaaaacattacggtggctcacgcctgtaattccaacactttgggaggccgaggcgggtggattacttgaaaccaggagctcgagaccctgactctactaaaaatacaaaaatgagccggtcgtggtggcgcgcgcctgtaaatctcagctactcaggaggctgaggcacgagaacagcttgaaccgggaggcggaggttgcagtgagccgatatcgccactgaactccagtcagggcgacagtgaaactctgtcagaaaaacaagaaacaaaaaaactgtgaggtactgagatcacaaactggtgctcaaaatatactgatttcctttctcgtctggactaaacgggggtagggaagggtgagaaggaggggatcggccctcccaacaagtctcatcttccccagatgctgcttggtgctcaggggctgcaagtactctgtccttgcacagagggttggggactccagctgtgcatgggggcacacattaggcccacagcttgtaatggaccagtagtaaagtaagggaggggaagcagactctctcttggaaaggaggctcctgagtccttcttggggcttcccccaccaactgtttcccaaaccagcatacagtaggcacttagtaaatactaaacctagtaaaggactgaatgatggtagaccgaacccccaaagcaaaagagaaagggtccaacagcgcctccttgcggtgctctgccccaagccacggggagaaacgttgcagcccgcgccgaacgccgggcagcacaaaggatccccgactgccggggagcggtgctcggagggcacaggtctacgccatcccccacgcagtttcggagatggagcgctgggcccatggagggaaggcggcaggctcggcggctccggcagcttgctggggcaggggctcaaggcggcagtccgatagtggaggccgctgagaactgtcacggagctgcgtctg

SEQ ID NO: 7180 - DNA, 2300 bp, Homo sapien
gcagctgtacccagaatattccctttgctgtctgcttcaggttagcccctggtgtgtgtcaataatttgtaagggttaataaagaactgttgggtcaaacagacctggtccacatcctggctctgtcacttactggctttgtgatattaggtagatcaattaatttctctgagcctcattttaacttgtttaagatgggattaatatagcacctacttcataggtgatgagaattagtgagaggatgaatgtaaatgcatggtgagcactcagtgaattaggttgctttccaccaccttcttttcctttggctgacccatttcccagaatccacaagctcatagtccctttgagcccaccagcttgagcactggggatggagaaacgttgttttgtgtgcagctgttcaaacgatggctctgatgttatataactttcccatggtttaggaggttcccaagtggcttcagagaataaagcacaaagctggggaagactctttctgggtcttgtccaaggacccccgaggagacacacaaatattctcctgtttctgtccttggtcagtcccttagagtagcagttctggtgctagcagcaaactttcctgaatgctccaaacacagccagaggataggcctgcagtgagatgacgatagaacatgatagctatattaggtcatcagagacaacctgtttgttttgcagatgaggcagagttatcagatttagcaaaaatacaaaatgccaattatatttgaatttcagatacacaacaatgacaacaaaatttattttaccataagtatattccaatgtaagcatttttaccataagtatatcccaatgtaagtttttttttttttttttagagacagcaagtgtcttactctgttgcccaggctggagtgcagtggcatgatcaatgctaactgcagccttgaactcctgggctcaagggatcctcctgcctcagtctcctaaaaggctgggattacaggtatgaacccccaggcctgcctacttcgtgtgttttatctggcaatgctgagaggacagctagatgtcgaggacagccagatttcgaggacagccagacgtcaagggggaaagcaacttgctggctcacacagccagccaggtctattgtggagccctagtcgcaaacacatacaccccagctttcaagtttttaaatatttatttagttagttatttgttttttgagacagtcttgctctgtcacccaggctggagtgcagtggtgcaatttcagctcactgcaacctctgcctcccagattcaagtgattgtgcctcagcctccctagtagctgggactacatgtgcgcgcctgcactgcccagctaatttttgtacttttagcggaaacggggtttccccatattggccagagtggtctcaaactcctgacctcaagtgatccacccacctcggcctcccaaagtgctgggattacaggcgtgagccaccgtgcccggctagctttttttttttttttttttttaattaggttgaatgcttgttgagctgggtgcctcacatccgttgtctgttatacaaagaactactgattatgggtctctacgagcaaaaatggcagaacacctacagggcacaggggagatgggagcagggattaggcttcagaatacttctccaaatgagggtgatcagggcccgacatttcactgctctaaggctcagtatcttaactatcaaatgggtacaatggggcacaaagggttactttgaggaataacggaggtgagcaatttccaaaaagttcattcctttaaaaactgcggagcacattttgtgtacatgctgtttttattgttactcatgaagacgcgggggaagctttggttgtgtaaagctgagaactgcacccaagcttccccgttcaccccacctaccaggggatttgggctaaattcctggcctggcccacaaagaagaccaagcggtcagtcccattccgtcccatcctgatttacaggaactcacaccagcgatcaatcttccttaatttgtaactgggcagtgtcccgggccagccaatagctaagactgccccccccgcaccccaccctccctgaccctgggggactctctactcagtctgcactggagctgcctggtgaccagaagtttggagtaggtttggtgctgggcaggggtggggagtagggtggaaagcatggagtgaagaggtctagggagggggtctcctcacccccgccttcctgcccgccttgatctcgggggtctctatag

SEQ ID NO: 7181 - DNA, 2300 bp, Homo sapien
ctgaatgctccaaacacagccagaggataggcctgcagtgagatgacgatagaacatgatagctatattaggtcatcagagacaacctgtttgttttgcagatgaggcagagttatcagatttagcaaaaatacaaaatgccaattatatttgaatttcagatacacaacaatgacaacaaaatttattttaccataagtatattccaatgtaagcatttttaccataagtatatcccaatgtaagtttttttttttttttttagagacagcaagtgtcttactctgttgcccaggctggagtgcagtggcatgatcaatgctaactgcagccttgaactcctgggctcaagggatcctcctgcctcagtctcctaaaaggctgggattacaggtatgaacccccaggcctgcctacttcgtgtgttttatctggcaatgctgagaggacagctagatgtcgaggacagccagatttcgaggacagccagacgtcaagggggaaagcaacttgctggctcacacagccagccaggtctattgtggagccctagtcgcaaacacatacaccccagctttcaagtttttaaatatttatttagttagttatttgttttttgagacagtcttgctctgtcacccaggctggagtgcagtggtgcaatttcagctcactgcaacctctgcctcccagattcaagtgattgtgcctcagcctccctagtagctgggactacatgtgcgcgcctgcactgcccagctaatttttgtacttttagcggaaacggggtttccccatattggccagagtggtctcaaactcctgacctcaagtgatccacccacctcggcctcccaaagtgctgggattacaggcgtgagccaccgtgcccggctagctttttttttttttttttttttaattaggttgaatgcttgttgagctgggtgcctcacatccgttgtctgttatacaaagaactactgattatgggtctctacgagcaaaaatggcagaacacctacagggcacaggggagatgggagcagggattaggcttcagaatacttctccaaatgagggtgatcagggcccgacatttcactgctctaaggctcagtatcttaactatcaaatgggtacaatggggcacaaagggttactttgaggaataacggaggtgagcaatttccaaaaagttcattcctttaaaaactgcggagcacattttgtgtacatgctgtttttattgttactcatgaagacgcgggggaagctttggttgtgtaaagctgagaactgcacccaagcttccccgttcaccccacctaccaggggatttgggctaaattcctggcctggcccacaaagaagaccaagcggtcagtcccattccgtcccatcctgatttacaggaactcacaccagcgatcaatcttccttaatttgtaactgggcagtgtcccgggccagccaatagctaagactgccccccccgcaccccaccctccctgaccctgggggactctctactcagtctgcactggagctgcctggtgaccagaagtttggagtaggtttggtgctgggcaggggtggggagtagggtggaaagcatggagtgaagaggtctagggagggggtctcctcacccccgccttcctgcccgccttgatctcgggggtctctataggcttgcttccacctgggacttctgcctcctcctaccccagcccctcccgcctcaggcctgttgtgctcagccccccaggacctcccctcccccacgcctctggcctcattgtttggttaaagcaggaccccctccccctcccaccacctcccctccgactgaacagatggacagagacccgggcccacggggagaggaagggccagccggtgccgggaaagggaagcggtttggggaaaacaaaacagagggaggagccagggagaaggtggccccaggagggaggaggagggaattcgctaagagggactggggcctgagacggaatgggggcgggccccgggcggggtgggggcccctgggctcccagggtgggagctggctccgaggctggctggctccgcaggtccgctgacgtcgccgcccagatggcctccaggctgaccctgctgaccctcctgctgctgctgctggctggggtatgtggtcccttgtgggatgggggacgggggtggagacgggaggcgggatggtgcggggtgcgggcggtggctgaggattaacccttcaggctccggggaatgaggagagctcctcttgggatcat

SEQ ID NO: 7182 - DNA, 2300 bp, Homo sapien
aataaaattaaaaagccacttcctcagtcacggtagcacatttaagggctcaacagtcacacgtagctagtggctaccatattgtttgatgactgagagaaacatgctcacccatctaaacccaaagaatggacctagaggcacgaggaacagcgaaagtgagacttttaatgacagtcttgcaagatcaggtgtgtggtaggcaggcacacccaggacagttacaacaagcaatttatcccctagtgcacaaatccctccccccgttcctcataggctgagtactatggggtcacaatcttccccagcgtcgcctgttggttgttgggttggggctttaggtgttttctttagggttgccccattgcattttgttgcagcccataatgcattgcagccatcttggggggtccttcaactgtttgacttatgacccaggtagttaaggcaagctgataaagttagctatctttcaagctcaactaaactgtttggttcgggtgagggcagctaaggggccccaaccagcagatgccagctattaaggtaggggcttagtggatcttgttctcctgtggtttgtggacccaagcctatctgagacattttattttgaaaagggaccacgatatatgtaattttctacaatgatgcagatatagaacatttccatcttctcacagaaacttctatcaggactgcgctgtcctagaccaacgttttgcaaacgaggaaactgaagctaaaaaggaaacatgacctcgccaagctttttttttgagatagagtttcgctcttttcacccagactggagtacaatgatttgatctcggttcactgtaacttctgcctcctgggttcaagcgattctcctgcctcagtctcccaagtaactgggattacaggcaagcaccaccacgcccagataattttggtatttttagtagagacgggttttcaccatgttggccaggctggtctttaactcctgaactcaggtgatccacccgcctcggcctcccagaatgctaggattacaggcatgagccaccgagcccgatcatagctcactgcaacctggaactcctaggcttaagcgatcctcccatctcagcctccctagtagctgggaccataggccacaccacgacgcccagctaatttttttatttttcgtagagatagagtctcagtgtgttgcccagggtggtctggaactcctgggctcaagcaatcctcccacctcagcctctcaaagtgcttggattataggcgttagccaccgcgcccagcctcgccctgcatcttaatggcagatctaggcctaaaaccccggaccttactccaaggcctgacatatcgccctcgtccttgctgccgccttcctctctgggctcccccacctcagagccccttgtgggcgcacagcacgttggcccaggcggggcagggctggtctgaggggatgtttttgacggagcggagctccagatgctgcacattcctgatcgggtcaggcctgccctgcggcactcggggaattagcttcggtgaagagccccagatcttctttctagagctgccctcttcctggccagcccaagaagcgcgggcgttcaggaacgctctcccaccgccttgggtgaggctgaaaggctgagtggatcccctgttgcagaagtacttctggtcaaggaggggttggagacgggcaggaaattgcaccccttgtatcttccaaggtctccaaatccagcacgaggggcatctgggaacagggtttctgccagccccaccttggggccgcatttggcgggaactggatctgccttcacctgcagccctgtgcggggcgtgacggaaagagcggggagaggggcgtcctggtgcgggggttgttgaggtgagaagccaggggagggggctccgggagcgccctgacctcgcggactgttgggaggcggaggggatgggggttgggggagaagaggggagcctggcagccaatgggagggaggatctcgtttcaaaagggttaacccacagccaatgggagcctgggggagcggatcctgctcactccattcaagaatcccaagtattcaagatggacggcagggagtgtggaaggagaaagggggcgaggggggaagagcgagatcggcagaggagagggtctccgcggcccaccggcctcgcaacctcggtcccggccggcgggtggcggggcggccgctggggatccaagcccggcccgggagaggggctggcggggtgcgagagggcgtgagcgaggggga

SEQ ID NO: 7183 - DNA, 2300 bp, Homo sapien
tgcaaaatgtcacattgggtctattactccttcaggagtattaaaccaaggctttgaggcttggtacaagtttgggggcacagtttgccatccatgacaattagtacatctgtcttttccctgcttcagggctggtgtccaagctgaaatgggaaagtgtatcatcttaaatgtgtgtgtgctccctcactctgcatccatctcttccttcaccagccttgccacctcctttcctccagccctgccaccctcactgcatccttgcccagccctgtccttcccccaggttcttcgtatctccttggccccactgccttcctccttaacaacctgcctctccccttgcccaccatcgccgccttgtccctcggcccccactcctctagccccgtcccttgatgcctaccccctcccttccttccgacccgcctcctgtgtctcccagccctgctctgacgtgggaggtgagggggggtgggggggatggatgactcacagtgttatgatgcagttccacaacacacagccacattcacccacagaccgaggtacagaacgagagacaacctctgcccccccagcagctggccagctttgcagccccagtcttgagcccccaactaccctccccccacccacccccatccccttcccaattgaaggagcggaaagagaagagagaagagtgagcagagagattgagagattgagagagagagagagagatagacggagatctctggagcagacctcaaggtgagggggcagcccttctccaaatgaatttttttctctttgcaaatttcctcctcctgctgcgtgttgctttctcccctttgcaaaagcattattcatccaccctttgtcctcccttccccctccccgctgcctccgctcctctctctcggttcctccatccctctccaagctctgacgattcccgcacttatttcccggcaactttggctgcagcatcaggcatcactgtttattgttttgctgctggtgcagacccccaaagcctgccctgggagctggcggtgctgctaattatttggaccataccatactgagaataccagcctggggggtgccaaaacctcagagcagatgagaaaatccattgtgagcaggtgtccccccccttttcttttcccccctgagaagcacgagattcgcacctggttcctccagcctccgcctcggcgcctctgctgtcagctgtcagttgcccccgccagccctccctctcccctttctcctacggtccagccccgtctcacttcaggggaacatctctccccagcactcggcttgcctttgttttttctccagtcatttgcccaacttgcttctccctgtgatccgagatgggtgaaaaaatgacccctactcccctttgtgattctctggccttctgtgcagcctttccttggcttgactgggaattaggggagagggagggaggcgtgacggccggaggctggagaaggagctcaggattggggacccaagctgccccattctccatgccccttgaagaaggtgtttcaaggtggtgcatgtcagaggggaactcgctggcaaagttgaaggcaaacctgtgaagcagagactgaaaggtggtctcttggcaaggagggcccgtttcctgcagccggagcccaatgtcaccctgaactcagcccaaggtgtcttcctgggacccagcccggaggagaggacctgaaactgaagatagtctctatggaggttttgcggagagactgcctggcggccttcagagagagtggaacagctgggtgcctgtggccactgcggaggacaggacgaggagagcctgtatgccctggctaaccagagccaacactgcctcttctctgcttagtgctctagcattgccagagtgcccagctggcatctctgaaccagacttaggctaaccacccacagtgggctgggaagccctatgaaggagaaagcagcagctcacctgcttatcggagccaacaggggccacctcccttcttatcctctgcctccagcaccttcagccactcggaggctggcgcgtgggcagaaggcaatcttcctctattcctaatcagaacccagcaattacttcatcttcagtcacccacagagtcactgctgtttgtccctgcccctgggagaaggtagaaagaaacattttctgccttgtgccccaaagcacagctgttaaaaataagagtcccccttctgctgttcgttgtggccgttgctctcaccctaccacacagccctgcccagcccaggaa

SEQ ID NO: 7184 - DNA, 2300 bp, Homo sapien
cagaagagtaagactaaggcacaaagattatcagtaatttgcctagtggttcctgccaagtaattggcagagctaagagtctaattcagtctctttgagaccaaagccagacacttggttcatgtctgaagatgcaactcaactgctctattaatcagagttctctagcgggatagaactaataggatagatgtatatataaatcagagttattacggaatattgactcagatgatcaccagatgaggtcccacagtaggctgcctgcaagctgaggggcaaggaagccagtccgaatcccaaagttgaagaccttggagttcaatattcgagggcaggaagcgtccagcatgggagaaagacgtaggctcagaggctaaaccagtctggtctttccacgttcttctgtctgcttttattctggcctagctgacagttgattacattgtgcccatccagattgaggtgggtctgcctttcctagtccattgactcaaatgttaatcgcctttggcaataccctcacagacacacccaggaacaatactttgcatctttcaatccaatctagttgacaatattaaccatcaccagtccaccccttgtcaacttgaacccatacacgtctcctgaaatcatacatgatcttcaaataaagacaataataaggtcataattacgcttaacataatacagctatcctttgtacaaccggaaacgcaccaatccccaacccaaatgctattacatagagttaacaacacttaagtgctgatatcaagtcagtaagtcttatgtcacatgataaaggcaaaagaaaggaaataaaatgaagatattttcttaatacaagtgtatatatgcacaaacatgttcctaacaaaaggaggaggaaatactcatgacaattacagtcctcattttctgcagctggtcacatggtcatagttcgtattgatgactaccttctttgactacccattctgaattccgtttgccttcagcaagcacctcagcagattatgttttttttacctggtggagtgacccaaaccttcattcctgaagggtctgggccatttgtcatcctgcctggattgggctgttgcagtttcccattgaccttaatcacagggcatggtaatattaagagacgccctacgtgatctcctgtattccacgcatacttccttaccgccattgtggagtagtagactgatttcatcttgatagtctgggtcaaacactgtaactcccttcttagcaagttggcttaaaagtaagaagagcccaaagtggccaggtggcaatcttaacttccagtttaatggaatcattgttgtgtctcttggtggcagcattcctccctctggaactaagacctctaggccagcagaacataatgccgcggaaacaactgctattttggaaacatctaaatgcacgggtctgcactggacattgcagtcctgggatgtagagagtaatttcccagaaggcctgtctcaggaagtttacagcccaatagagaacttcatataacgtaggtgtctccattcatgaagcacgcataatatggaggtagctgttaaggggttcctgcatgcaaaatgtcacattgggtctattactccttcaggagtattaaaccaaggctttgaggcttggtacaagtttgggggcacagtttgccatccatgacaattagtacatctgtcttttccctgcttcagggctggtgtccaagctgaaatgggaaagtgtatcatcttaaatgtgtgtgtgctccctcactctgcatccatctcttccttcaccagccttgccacctcctttcctccagccctgccaccctcactgcatccttgcccagccctgtccttcccccaggttcttcgtatctccttggccccactgccttcctccttaacaacctgcctctccccttgcccaccatcgccgccttgtccctcggcccccactcctctagccccgtcccttgatgcctaccccctcccttccttccgacccgcctcctgtgtctcccagccctgctctgacgtgggaggtgagggggggtgggggggatggatgactcacagtgttatgatgcagttccacaacacacagccacattcacccacagaccgaggtacagaacgagagacaacctctgcccccccagcagctggccagctttgcagccccagtcttgagcccccaactaccctccccccacccacccccatccccttcccaattgaaggagcggaaagagaagagagaagagtgagcagaga

SEQ ID NO: 7185 - DNA, 2300 bp, Homo sapien
ttgcatggaaaaaggcgaggataagcccactcagggagaaaatttgcaaatggaagactggaactgaatttttaaagaagagtggaagattaggggacacacaatagttaattgaaaaactaatgcataggccgggcgtggtggctcacgcctgtgttctcagcactttgggaggcggagatgggcagatcacttgaggtcagaagtttgaggtcagcctgaccaacatggtgaaaaccccatctctactaaaaatacaaaaattacctgggcgtggtgacacacgcctgtaatccaagctacttgggaggctgaggcaggagaatcacttgaacccaggaggcagaggttgcagtgagctgaaattgcaccacttcactccagcctgggcaacagagcaaaacctcatctcaaaaaaaaaaaaaaaaaaaaaaaagctaatgcatatatgttcaatgaatgaaataattaaagcaaaccatcaaagaaaaactcagaagtgataagtgaggatggcactgcttggggagtgctgctaagtagggccagcaggagaaaatctttctggcgaaccagaaaatcttcccagtctcctcaatatgaattaactacgtgagccggactgaaaaaagtactcacctgtaaagtggagatgacaattatagtacctactgcataggattctggctacgattaaatgaatttacacctgaaaagtccatagaccagtatctggcatataacagtatataaatgtggttttttgttttttgtttttgtttttttgagacagagtctcgcgctgtcgcccaggctggagtgcagtggcaggatctcagctcactgcaagctccgcctcccggggtcaggccattctcctgcctcagcctccctagtagctgggactacaggcgcctgccaccacgcccagctaatttttttgtatttttagtcgagacggggtttcactatgttagccaggatggtctcgatctcctgacctcgtgatccacccacctcggcctcccaaagtgctgggattacaggcgtgagccaccacgccctgccttaaatgtgattttttttgtgagacagagtctcactctgttgcctaggctggtgtgcagtggcgtgatctcagttcactgcaacctccgcctccccggttcaagcgattctcctgcctcagcctcccaagtagccgggattacaggcgcccgccaccacgcctagctaatttttgtatttttagtatagatggggtttcaccatgttggtcaggctggtctcgaactcctgacctcaggtgatccgcccgtctcggcctcccaaagtgctgagactgcaggcgtgagccaccgcgcctggcctaaatgtttactattattataaccggactcagaaactctgggtttgagtcctagctctaccaatggctgttaatgtttgggcaaacctctgcacctatctgagtctcctcccccatctgaaattggatataataaagctgtctttacagggtggctgtgaaagaagatgcctgaaagggatctgaaaaatgttaagtattgcacgaatgaatgatattatagccccttccgccccagcctataataaaaacgtaaaagctgatatcagatttttttctatattacaggcattgtacttagtactttacaggcacattcctgcaatcgtcaaaacaactttaggaggttgggcactgttattatcccaactttgcagacaaaaaacgatatcacgcttgagcccaggaggtcgaggctgcagtgagccatgttcgcggcactgtactccaacctgggcgagagagtgagaccctgtctcaaaaacaaaaagaaaaaaaaaaacgatctcagagagatgaagcctgtgatttgctcaaagtcacacagtaatgtaagcagtatagcaaataatataagattccaaagcccaaggtagtaaaaagaggattatagacgtggtggaacctgttggctgcggggcaaatgactgacctgtaactgtcagggatttatggagggaaatgagtgcctaacaaaaatcctcgtttagtgggagagaggttgttgggtaatgactgacttgtagctggaagaaatcatcggatttttattcttttattaaagaaaaaaaatttgaaatgccttccatgtgccaagcactgtgtcaggtgggagatgacagcttggtgaaacctctgtcaggctgtcttcctccgctttctctatccctgggtttccccctgcctaaaaaggattttgtgcttcgtggct

SEQ ID NO: 7186 - DNA, 2300 bp, Homo sapien
ctacgtgagccggactgaaaaaagtactcacctgtaaagtggagatgacaattatagtacctactgcataggattctggctacgattaaatgaatttacacctgaaaagtccatagaccagtatctggcatataacagtatataaatgtggttttttgttttttgtttttgtttttttgagacagagtctcgcgctgtcgcccaggctggagtgcagtggcaggatctcagctcactgcaagctccgcctcccggggtcaggccattctcctgcctcagcctccctagtagctgggactacaggcgcctgccaccacgcccagctaatttttttgtatttttagtcgagacggggtttcactatgttagccaggatggtctcgatctcctgacctcgtgatccacccacctcggcctcccaaagtgctgggattacaggcgtgagccaccacgccctgccttaaatgtgattttttttgtgagacagagtctcactctgttgcctaggctggtgtgcagtggcgtgatctcagttcactgcaacctccgcctccccggttcaagcgattctcctgcctcagcctcccaagtagccgggattacaggcgcccgccaccacgcctagctaatttttgtatttttagtatagatggggtttcaccatgttggtcaggctggtctcgaactcctgacctcaggtgatccgcccgtctcggcctcccaaagtgctgagactgcaggcgtgagccaccgcgcctggcctaaatgtttactattattataaccggactcagaaactctgggtttgagtcctagctctaccaatggctgttaatgtttgggcaaacctctgcacctatctgagtctcctcccccatctgaaattggatataataaagctgtctttacagggtggctgtgaaagaagatgcctgaaagggatctgaaaaatgttaagtattgcacgaatgaatgatattatagccccttccgccccagcctataataaaaacgtaaaagctgatatcagatttttttctatattacaggcattgtacttagtactttacaggcacattcctgcaatcgtcaaaacaactttaggaggttgggcactgttattatcccaactttgcagacaaaaaacgatatcacgcttgagcccaggaggtcgaggctgcagtgagccatgttcgcggcactgtactccaacctgggcgagagagtgagaccctgtctcaaaaacaaaaagaaaaaaaaaaacgatctcagagagatgaagcctgtgatttgctcaaagtcacacagtaatgtaagcagtatagcaaataatataagattccaaagcccaaggtagtaaaaagaggattatagacgtggtggaacctgttggctgcggggcaaatgactgacctgtaactgtcagggatttatggagggaaatgagtgcctaacaaaaatcctcgtttagtgggagagaggttgttgggtaatgactgacttgtagctggaagaaatcatcggatttttattcttttattaaagaaaaaaaatttgaaatgccttccatgtgccaagcactgtgtcaggtgggagatgacagcttggtgaaacctctgtcaggctgtcttcctccgctttctctatccctgggtttccccctgcctaaaaaggattttgtgcttcgtggcttgtccaggcaagcaggccgtcgcgggacctagaccgagacagtgagtctctctttctcccgggcctcccttctgtttcctgggctgcaggggagcaggaaatctggggcgagattcccgccgcggacgcgcactgccgaagcctggtccctcgacctgtccctgcccagcgcgggggcgcaaccgccacgcctcctcacccctccctccggctgcacgaataatgacaacagccgcccctcccacctttggcgtcacgttcaaaacaatcctttgactacaactcccagaaggccgagcggcttagcgagtgcacccgctctcggctgctccggcaaactacacatcccaaagggcagcgcgcgaccgcgtgtcctttcacagcgcaagtgcggaactgcgtttgtttccggcgtgggtccgggcaagaaccgcttgtagtttggtttaaattctgcacgggaggaccttctgagtttacctgttgggctcctggctgcgcaggtgagttaaaaaaagggcaggaacacaactgtcacctccttggggtctggggacattttggtgtctggggagattttggtgtcttggggagattttggtgtctgg

SEQ ID NO: 7187 - DNA, 2300 bp, Homo sapien
ggtgggaggatcatttgaggtcaggagttccagaccaatgtggccatcatggtgaaaccccatctctactaaaaatacaaatattagccaggtgtggtggcacatgcctgtgatcccagctactcaggaggctgaggcatgagaattgcttgaacccgggaggaggttgccatgagctgagatcgcgccactgcactccagcctgggtgacagtgtgagactccctctcaaaaagtaaaaaataaaatatcaatattgtatcttcaataatttacctttcatatggtctaaagaggtttttgttttgttttgagacggagtcttgctctgttgcccaggctggagtgaagttgtgtggtctcggctcacggcaacctctgcctcccgggttgaagcaattctcctgcctcagcctcccgagtagctgggattacaggctcccccgaccatgcccgactaatttttgtatttttagtagagggagtttcactatgttggccaggctggtcttgagcacctgacctcgtgatccgcctgccttggcctcccaaagtgctgggattacaggtgtgaaccaccacgccaggccaggtctgttttaaaaatataaagtcgttataaagaactctcaagtgtgttgcaataaatgctggattgacgctgttaacaagaataaactagaacttataatatatgccatgtcagagaaggaactagattccagaaaacagaaggtagttctcttttaccttactgcctaatgctagtgtcagaaccacagtaaagccagcaacatttgagaccaaacccgaggacagtcctcaggattttacaggtgaggggcctcggcttcagggaagtggcttgtgaaacacctttttgagggaccattatgtaatagctagagttgctttcgaaaaaagaaatagcctcgagccgaatggggagagaacatggggcattgctattgggttcacagctgtcttgggctaatcagggcaaagcgtagcactatgacctatgcagagttagctcgccagggacagtagctattctagagaaccttttgcttttagctttgtattctaggattgggtgaggtgagggatgcgggcgcccatcccacgtgtgacagtgggaaactaatggaattcagggagttcacttcccggctcgcactccgggggcgggagggtgctgccaccgcctcaggtcgcgcgctccttaggcttccctctcacggttagcgctacggctccaaggctggcgcctgctcttcttcatctccctccccggcccttggcaggagcctcgccctacattggctcttcaagtccgggcgtccccttcatgtgggagacacagcccagaccattccatcgccctggattctgcccggaccagcgacctcgccggactgaagatttctccagcaagattgttttaaataaagtttttgccatcaaaaaaaaaaaaaaaaaaaaaaaaggagatgggaaggagaagagggaggcctagtcgccaaatggttggccaatccgccgcgaaggggctgaagcaggaagcggcgatagtcgtcggtaattggctgcgctggaagcctgtctggactgtaccacctcagtaggagaggggttgctgaattcgagaaggtagctgcttgcttttgagtacttctagtacacacacataattcttttcttatttccgggggtttttgcttggattcagtgggaatacaacaggacgcaggagaagggaagactcgcctggccatttcctcattcctgactcctgtgcattaggccaatccttgtctcttagttgtccccgcaaccccacggccttacgtgcgcgctctcgtcttctcgcgtgcgtacgtcgttgtgttgctgcagccaatcaggccgcgaggtcgccgcggtcgccagggttcgcgcgcacgccccagatcggagtcggggtgggggctatgggtgaatgggagagtgagcggggttgggcgcggcagcgcgagccgcatgaatgagacaaacgtgcgccgcgcgagacgtcgcgcgagcccggactagggagccaatgggaacgctggaagggttcgagacccggcactgagggcaacggccgcgcgccggctccgagacgagcgacgcctggcgggagcgcgcggcagcggggcgggcgtggagcgtgcgggggccgcgcgctgcttctctgaggcaggacggcactgccgggaggcggcggtgacaacgacggcggtggtgacgggcaccgggctcgcgggtgagtgcggagga

SEQ ID NO: 7188 - DNA, 2300 bp, Homo sapien
tgagagttaaataatcattaaatcagggactagagaggatttatgttttctaggactataacagtttcttagaatcttttggcgctcactgtattctaatactgctgtttggccctctgaaaccctaattttaaagagagaaatgaatcgtaagggaaggcacctttgccttccatgccataggtgagagaggaagtggtacattatagggcacatttatattttgttatctgaatcttctgatttttttttttttttttttgagacagagtcttgctctgttgcccaggctgtagtgcagtggctcactgcaacctccgcctcctgggttcaagtgattctcctgcctcagcctcctgagtagctgggactacaggcgcccgcccggctaatttttgtatttttagtagagaagggaataaaactactttcttttaaaattctaacttaaaatttttggcttgcagattccaagttatcatctctgggcaggtagtggatgaaaaggtagaaagggtttgtgtcaccagaggggcatgtgacctcttgagttctgaacctgaggtgattcagtggaatgtcctcgggcattctgtagccttcaattttaaagagtgggataagggactgcgtcaccagataatgtgagtaaagtgcttttagatcaccagatgaaaagcattttataaaatcccaaggtgctggtgttagtttgttattgtcatcaacagaaataattgttacttttaatcatattggggcaggtggggctcagttaccttaggccaatataggaataataaactgttgaattgggaaaaaagaaccaaccctatgctatgcttattcagtttctcatagagggcatcatggctttctctgcaagaacatttcttacccagtgttctaatgggtgattccaaaagaccaaaaattcagcttctacctcttcaggattgtaactaaaaagcatagaggagcaaaagaaacacacagagaaagaaaatgagacttgctttcctaattttgaggttaatttttttcttttttcactataacaataaacactcttcttgtccaaagagaaatctttgttctaggactgcccttcactgctgtgcccttgtttgtgattttgatattcttggtatttgttactaccatctatgtcaggtgagatgggccccttacaagagctagtcctttgatgtcctttggccaggtgaagccatgttctgcttccaatctgaacagagcaaaggattctcaagtcagttttcctctgaattcagagtcccttcttacccacatacatgtaagtgaaatggaaaacagtctttctttcagaaagtactttttaacagcagcctgtggaattttagccttggtgtctaagaaataccctgaaagaattctctgataaagatacttgtttttctccaggtgagacacagtaacctggttgaactctgcatctggaaagctgaagactgaagaaagataagagacattgactagtctggaaacagggacatctttggaacttcgttttcatccacagtaaacttttgaagtgtcatcaattggaattgatttcttcatcttattctgcctattgggaagaacatggcttcaaggattttaagtttccctttagttttacatgaactttgtaggaaacagagcccttaaagggcttgggaataacaagaagagattgaagacagagaagcttgccctgttttccttgccccttcaaagaaaaggatttacagctcaaacttagaacagctgttgtccagctttagccatcaagagagaaataaattaaaccaccattgccagactacaagccctggtgaagtcagggtgtgggagtggtggcattgagaagactacctaaaagagacaaagactgcagtaaacaaagctcctctttaaagttggaaggggcctcaggttccttcttggattgaaatagaaatagaaacacagggcacacctcttttaggtgcagctcacattttatggaactgtagtcgtggaggtactatagtatctcagaagaatttttctttgcccaaagtttttttgccataccctgatattctctccttcttttgaagacctgcctccatccatgagctgtatcttgatctgtctgactgtccatgttttccacctgcaaccatttgcatgtgtacagcctactgtttgtctccagtttttaaactgtacaagttgtgtttcttaatcttcccttctgccttgttctggggaggtggttattcatcatttgg

SEQ ID NO: 7189 - DNA, 2300 bp, Homo sapien
ctcgaactcctgacctcaggtgatccacttaccttggtgtcccagagtgctagggttacaggcgtgagccaccatacctggccccactctgccaattttatttggtcttgaaaacaggagtgctgaatggatgggcagaagaacccgttctacctgagatggtataggtctggtagtcctgtcaatgagtcagccagccttctgggctgtgaccactccctaggcttttagagctttatgattattgccatagtctaaggacgagccccaacatctcctgttctgagctctggcctcatcttccatcaaaggcaacagattcagacaggccacttggggtggtcacctaggaatctggcaaagtaccatagcaacggaaagcctctccttaaatcaagcagaatttgggatatggcaagaacgggctctgctcacacatgcctctccttggtggggtgttcccttatagtgctgattggaagcaatggttctgtgaatctaggagcaaatattgtccatgaagttgttatttgcatcatttctagattctggcactgtgggggcagactttattttggcaacagatactggaattccattccaggattacacactttatctggaccaagttgatatccagaaggttgtagggtaaagttcatcatccagggataggttggcaggatccccaagaaactgagttgctttgcctaaaaatgaaactggctgggcatggtggctcatgtctgtaatcccagcactttgggaggctgaggcgggcaaatcgctttgagctcaagagttgagtccagcctgggcaacatggtgaaaccctgtctctacaaaaaattagccgggcgtggtggtgtgcatctgtagtcccagctacccaggaggctggggtgggaggatcactggagctcaggagtttgaggctgcagtgagctgtgatcttgccactacactccagcctgggcaagagagcgagaccctgtctcaaaaaacaaaactgaagaaagagtcgagtcagaaagattgacatgggcctgcaggaggtttcatatcttgttcttactctcattagtttctctcagagatggaaactaaggtgaatatttctttcagaagctcaagaggccacagtggccagttgtaggaatgagacttttaaatcatgggcacctcagtgttctaaggatttaatttctttttcccttctaattatcttcccaggctgtaggagtcaagtgagtcaccctttctcttcttccccaggcggaaattgaagtgacaacttagtactagggaggggctctgacctggatgactggttttcagtttctctccctccttcttaaggaacctaggaggtcaggctttggggtgaggcggtgcaggaactcttctttttgcttatattccactccaaaccctgccaatgtatggagacatcttttctgaaccaaagaactcacagaggaagaagcttccatggggggctttctttgaggatagtatagaactatgactgaaggtctgtttagtccctaaaattgatgcccttgctccagcttcgttattttgtctgctaattgtgtactgacatatcaagagaaccaaacagctaatggatatttactatctaaaaagcctggcatataataaatactaaaaacttttcaaaatgaatggctgaatggaatttgaataaatagatggtggtggtaaagatttgtgagatgctttgtgacagttttgtctcttatcttgatttgcttgtatctcgttaaggaactgagttcctccaaactgctctgagtcagtctcagggctgtgctttttgttttggtgggtgcagataccttttcttcacagaatcccagactgctgtggtttaattctctggaatcatatgctgtcttgttctcctgtcctcttcttcctttccttcagtgagttcttcctttgctttgactggttcagataaaggggacaaggacagatgctgtcctcattctggagattaagttctcagccacaaagtagattagagtatttatccactgtcttggtagtgggaacttctccctgagctgagacgagagtgtttgatactactgacaaaaaagtagcacatcaggttcttccaaaacttccagctcccaggaaatcagcagagaaaggaagagctcttgaagcattcctacgtagattcaaatcctgaaagaaactgagtttaattctggactagagaattgtttttttgatcaagaaaagttaccttaaagcatatcttgagt

SEQ ID NO: 7190 - DNA, 2300 bp, Homo sapien
tttttgtgtttttagtagagacgaggtttcaccatgttggccgtgctggttttgaactcctgagctcaggcaatccgcccttctcggcctcccaaagtgttgggattacaggcgtgagccaccatggttggctgggcaaaggattcgtgcctggaaaaaaaggttgatgttagttcctctcttggattgctatagttcactcatataaatgtagatactgaactcttatgcaaactcattatgtatgtgctttgatatgtaaactatttctttaaaatatattcatatacttaaaccaaataacaccagcagatgcatacaagagctacctcttgagtcattttatctcgaacctcacttcccaatgcagaataaattgctccctcatccatgttcccatagtgttgtataaagacctgacctcacagtcttatagttcctagttcctagtctcactcattagactgtgaattcctcaaaggcagaagctatattttaaacatcattgaatccctagcacttactacagttctggcatagttgtttttaattgacttttcctctctacagctgaggaggatgaggacaaggaagatgatttccgagctcccctttacaaaacagtggagataaagggcatccaggtgcgcatgaaatggtgtgccacctgccgcttttaccgtccccctcgatgttcccactgcagtgtctgtgacaactgtgtggaggtaagcaccctgggtggggtaagacttcatgcttaaccttcattgtcttcatcctaaccatataatagattcttagctttggatgtggtatagtcctgtctaactacgttggccacatggtccagctctgtcaaatggtgttaataatgacatggcatgagaggcagagcataaatattattgcaggagggaagctttaactcaatatgggcataggctttcttttttatttatttttactttttgtagtgatgaggtctcactgtgttgcttggactatctcaaattcctggcttcaagtgatcctcatgccctggcctcccagagtgctgagtgctgggattacaggcatgagccattgcactagcagggtgtaggctttcttgacaccaagatttatagttctagccttctatctattggctcagttttggttatttatcctggctttgcattttctcttccagaaaatcatgctgttgtgtttcaatttgttgtagttgttttcctgcctgtccttctgcatcccttgtcctttttccattccattttcacttagctataagcagttacctgccaaatcttccttctaatcctcttttcttatgaatcttgatgtttctgcaaaacctctgacattcgtcacttttagagttccttggtcacataggataaacattgagagccggccttggtcttttttatatatatatatatttatttatttatcgagacggagtctcgctctgttgcccaggctggagtgcaatggcgcaatctcggctcactgcatcctccgcctcccgggttcaaccgattctcctgcctcagcctcctgagtagctgggattacaggcacgcgctaccacgcccggctaatttttgtatttttagtagagatggggtttcaccatgttggtcaggctggtcttgaactcctgacctcgtgatctacccgcctcggcctctcaaagtgctgggattacaggcgtgagccaccgcgcccggccaatttttttttttttttttttttaagagatggggtcttgctatgttgcccagtacagtggctattcacaggcagtcatcatagttcactacagccttgaactcctgggctcaagccccagccccccaagtagctgggactacaagtgtgcaccactacgcctggttggccttggcctttgaccaacctctggaaggtctcccttgcagatttatagagcaaaataaactggatttaattttgaactaattggtgaccatgatcaaaacttagctgccatttgtttctcttcttgacagaagtaatttaatgctatggtccagggatgcctctcatctgtctctctttgtccctaggaatttgatcatcactgcccctgggtgaataactgtattggtcgccggaactaccgttattttttccttttcctcctttccctgacagcccacattatgggtgtgtttggctttggcctcctttatgtcctctaccacatagaggaactctcaggggtccgcacggctgtcacgtatccttcaaggccttttagattgtgggattgg

SEQ ID NO: 7191 - DNA, 2300 bp, Homo sapien
actctttccttttgttcacttcactggagtccaactgattttctgtccctcagatattctaagctttttctcacatcagggtttctgacctcatttcttgtatctacaattgtctctccctcctgtccatacatggctggccctttgtctatgcttacattttagttcaaatgttagctatgtgaagagagcatctctggccactctagctaaagtagttctgcccctcaattttttttttttaagagacagggtctcatctgttgcccaggctggagtgcagtggcacaatcttggttcactgcagcctcgacctcctgtgttcaagcgattctcctcccttagcctcctgagtagctggggctacaggcatgcattaccacgcccggttaatcttgtatattttgtagagactgggtctcgccatgttgcccatgctggtctcaaactcctgggctcaagggattctgcctcggcctcccaaagcgctgggattacaggcgtgagcaacgcgcctggccaccttcaatttttatcatgttttcttttcctagcattaaccactttctgacattatcttgtttacaatgcctcctccactgaaatgtacatcccaaaaaaggcaagcatcttgtcagtcttgttcacaactgtctccagcatttagaaaagtgcttggtacataggtactcaacaaaataattttttgaatgaagagtttggttcgattcttatcccttttttgatcagaccaggaaatgccggaaccttagaaggaagaatggcaacttgccccaaaccaatagcaagtctgtgggagacctgtaactaaaactttgggtccccaaagatattaaatcaggcctctcgagttccaaactcaaaccctggattttgtttgttttgagacggagtctcgttcgcccaggctggagtgcagtggagcaatgtcggctctctgcaacctccgcctcccggggttcaaacgattctcccgcctcagcctcccgagtagctggaattaaaggtatacgccaccacgcccaggtaatttttgtgttttttgtggagacagggtttcatcatgttggccaggccggtctcgaactcctgaccttaggtgattcgcccgcctccgcctcccagagtgttgggattacaggcgtgagccaccgcgcccagccctaggtcattttttagagagacataaaccagtgtcagggacacagcctggacatggtgcaaaagacagtaacggagatgcactacgcccctgcccgccattcatccctttggttgaattcaactcatcctggttgaattcaagtcatccctctgcttgtgaatcctaacagcgcttccgacttagggctccacagtccgggtatgcgttgcctaggttacctcgcacctccgctagccggctgagagccacgcccatcacctcctctctaagatttgattggctggctttggcaaggccgagtactcacctggcagttccctcatgaggtaaaaagggccacagccagctcctgacttgtccgcgccaggaggagccgtggccgcggtgggaggcggggccgtgccgggtcccccgcccgcaggaggcggtggcgggggtggaggctttcctggtccgaagccgagtgcggttgggggcggtggtgggtcagcctgagccccaaacagtgccgtgaaattctccatcgtaccctccgccccggcgctgtctccgtgtctgccgttggtaattttcattggacaatgctttcaaggagtacccccccgccctttctcaaggagccgcttgtcattggatgcctcaggcaccgcctaccttttttcaacaactacttccgtcgccttatgagaacgttcaggaagtgctatttaaccttattagagtcttctgctagctctgcttgctacagtccaataaaatgacttaggcggataaagcgacaactagactaaccaataaaatattaagttcttttttgggttctgacctaccacagcgttcagagaactacatccgggtttagaggccgtacgtttgcgatatagcccaatagcagtcgttatggtgggggaggcggggcgagacctacgacgccggcgagcagtggccgttacggccgaaaagatggcggtcttggcacctctaattgctctcgtgtattcggtgccgcgactttcacgatggctcgcccaaccttactaccttctgtcggccctgctctctgctgccttcctactcgtgaggaaactgccgccgctctgccacggtctgccca

SEQ ID NO: 7192 - DNA, 2300 bp, Homo sapien
tctacaatgccatcttctgaaatgagacacaacaatttaattgaactggactatcccccaaaatgagaggctggtttaatgggatcctttgccgctcaattactagcccgatttctctctccacagacaccaactcagcttatagtgaaacttctaaggaagtttcagacaaaggaaataaagaagaccagggactcacaccccaaaatatggcatcctgtatgctaatcattttaaattaaaggtccctggaaaccagcagatactggaagcagctttactctgataactaccttatctgcctaaagtccagacctgtcaaagaagacaacaattacttctggtctcttccctgagttttcattaacttacttcagtacaagaagaaagatggaagcctgtcaacacacctggacagatttttgtcagaaaccattgtctgctctgcaggcccaacagtcattgtcccaggccactgtatgttctccaggccactgaatcaccctaaaaatcatttacgatccaccttaaaatcacccacattttcccatctcccatattcctatgaaagagggtatataagcatctgtaccccactgggtcattctcctgcaattccctcatgctatgcacgttaaaataaaatttctatgcctttctcctattaatgtgccctttgtcggttgatttttcaacaaaccctcagagagcaaaggggaagcttttccttggcccctacatgctatatggcagaagggaaagtgctttaagtttatgttccgagcagtccctccacccataccaaggaagcacagcaaggagcttgggacacttcccaaagaaatcccaaagatttctttacaacgtattttttacaattcctttacagtagcccccaaattttatccactttcgcatcttcaggatcaagcagagtgcctagagtgtacactctagaaatgtttattgaattaagaagcggctgacagtgttgtgcaggtagtgtggccagaagagtagtttcaagtcccaggcactcattagttgtatgacctggggcaagtcacctaaatataccgagatccatttcttcaccaatgaaacaggaatattactacttgccttgtctaccttactggctcctcaggaggctttacataatgagcggcactgtaaaacgttatacacgtgtatgtacagttttgatagggctgttaattagtctcaatggtgaaacagaaagaaacctggactcaacagtcaaaagctgttgggccgttgtgcatgggctacgactaacatgttccgttttcccatcttaaacacaaagtttagactcgatgatggttcggaccctgcacttaatagtctctaagtccgctacaggctcggaacctcaggtgtcctcagagaggtaaaccccagggttcccagatacacctgcaagggcagggacagtcaaggtcgcggggtactaacacgcgggaggctcacccagtcaaagtcacacgggttaccgtcttcgcgttgggtgggcagaccgtggcagagcggcggcagtttcctcacgagtaggaaggcagcagagagcagggccgacagaaggtagtaaggttgggcgagccatcgtgaaagtcgcggcaccgaatacacgagagcaattagaggtgccaagaccgccatcttttcggccgtaacggccactgctcgccggcgtcgtaggtctcgccccgcctcccccaccataacgactgctattgggctatatcgcaaacgtacggcctctaaacccggatgtagttctctgaacgctgtggtaggtcagaacccaaaaaagaacttaatattttattggttagtctagttgtcgctttatccgcctaagtcattttattggactgtagcaagcagagctagcagaagactctaataaggttaaatagcacttcctgaacgttctcataaggcgacggaagtagttgttgaaaaaaggtaggcggtgcctgaggcatccaatgacaagcggctccttgagaaagggcgggggggtactccttgaaagcattgtccaatgaaaattaccaacggcagacacggagacagcgccggggcggagggtacgatggagaatttcacggcactgtttggggctcaggctgacccaccaccgcccccaaccgcactcggcttcggaccaggaaagcctccacccccgccaccgcctcctgcgggcgggggacccggcacggccccgcctcccaccgcggccacggctcctcctggcgcggacaagtcaggag

SEQ ID NO: 7193 - DNA, 2300 bp, Homo sapien
cccctcaccaagcaactccctaccctgatcctgttccaaggtggcaaggaggcaatgcggcggccacagattgacaagaaaggacgggctgtctcatggaccttctctgaggtacctgaaaggaagggcaggtgcatgaagggtgcagaacagtaggtgggctttcaagccctacccgggtttgattcacagctctgccacttgcccattagctttgagggtgtggactagttactagacctcatgttttaattcatttagcaaatatatattatgtgcagacctgctagtactgggtaacaatcattagttaagatttggtctcaggccaggcacggtggctcacgcctgtaatcccagcactttgggaggccgaggctggcagatcacctgaggtcaggagtttgagaccagcctgaccaacatggagaaaccccgtgtctactaaaaatacaaaaatagccgagtgtggtggcgcatgcctataatgccagctatttgggaggctgaggcaggagaatcgcttgaacccgggaggtggaggttgcagtgagctgagattgcaccattgcggtccagcctgggcaacaagagactccatcaggaaaaaaaaaaaaagattctgtctcgaaggccactgcacctattgtctgtaggtgttaggttccctgtcagttaattggaggtaataacccctggcttacagggttgttttgcagattacattaaataatttaggtataattcttggcacggtgattggcacataatgggtatttaactattagttgacttttctgggtacctaaaaaagaggaaggttagggaagatttttgtcctttgcttactccttcctttcccagactttgtgtaaaatacctcttacttcccaggctctttactctcccttccaacccagatcctgacgtgtgcatctcttttgtgcaggagaatgtgatccgagaatttaacttaaatgagctataccagcgggccaagaaactatcaaaggctggagacaatatccctgaggagcagcctgtggcttcaacccccaccacagtgtcagatggggaaaacaagaaggataaataagatcctcactttggcagtgcttcctctcctgtcaattccaggctctttccataaccacaagcctgaggctgcagccttttatttatgttttccctttggctgtgactgggtggggcagcatgcagcttctgattttaaagaggcatctagggaattgtcaggcaccctacaggaaggcctgccatgctgtggccaactgtttcactggagcaagaaagagatctcataggacggagggggaaatggtttccctccaagcttgggtcagtgtgttaactgcttatcagctattcagacatctccatggtttctccatgaaactctgtggtttcatcattccttcttagttgacctgcacagcttggttagacctagatttaaccctaaggtaagatgctggggtatagaacgctaagaattttcccccaaggactcttgcttccttaagcccttctggcttcgtttatggtcttcattaaaagtataagcctaactttgtcgctagtcctaaggagaaacctttaaccacaaagtttttatcattgaagacaatattgaacaaccccctattttgtggggattgagaaggggtgaatagaggcttgagactttcctttgtgtggtaggacttggaggagaaatcccctggactttcactaaccctctgacatactccccacacccagttgatggctttccgtaataaaaagattgggatttccttttgattgcgcgtttgtgtgtttctgtattagaaaagcctgacaactgcagaggaattgcccatcttaagggcaaaggccatcctatttggtttcaccaaatgccgggcattgatccccaggactggcaagagttggagaagtctagtttccataaatctagaatagcggccacatgttgttaggtggtgggtttactctgggattggcctgcggttgccagggaggagagtttggcggcagatggtggcacacaacatttagcgccatgcaaaggtacagaaaagattgcgcgaagcgaggctagcagtcggacctagtctccgccccttcctgctgtgttcaccatcccagcgtcccctgtcccctccacccgaagcgatgggtggttccgtcaggcgcttcccgcaccttcccgctccctgcttgcaaagtggttgtgccccaaggtccgcctccaggccacgtgggtgctgcgggcc

SEQ ID NO: 7194 - DNA, 2300 bp, Homo sapien
ccgcggccctgagccaggcgctgcgcctggaggccccagagcttccagtaaaggtgaacccgacgaagccccggaggggcagcttcgaggtgacgctgctgcgcccggacggcagcagtaagtggggacctggatgtgggggagagggacgtgggtgaaagggacgtgggttccgaagacaggaagcgctattcttagaaaccacggcagtctcatgacttcagagacgtgctcgtgggttccgaagtattgtaacttcgcttcattctggcctttcaggtgcggagctctggactgggattaagaaggggcccccacgcaaactcaaattccctgagcctcaagaggtggtggaagagttgaagaagtacctgtcgtagggagatttgggtagaagccctcatgctgaggtttgaaatgggaagtggggggcgcgaccgctgttgaggaagagaaggcattgatcttggtgtggctacaagtacccacctggcgtgggtagctcacgcctgcaatcccagcactctgggaggtcgaggcaggagtggatggccaacacagggagaccctatttgaaaacaaaaaacaaaaaaaagacacaatattgttttctgtctagtgtgccctaagtggaatttatgtcctttgggagactgtagttgacttgccctgggggtatggacaagttttccatttggaagtttatttcatgttacttcatttatgcttatccctaccctcttctgtttggttcttgggtgttctgttactgtcctgtgttaacactgcattacaataccattaaatttggttacaaggattttgaccttgtctttgtccctagtgcttcatacagtgctttggcatgttgttctgcacttattatgttgagtgagatttggaggaaggatgcaatccttgagcttcagggtttgtgagttcaagggttggggaacatgtcttcctcagtccttaagattgcccagatcctttctctaaccttatttcccttctcatttttgcagctttgtgtccctggtgatgttggaacattaatgatggaacatggccaaacttcagtcatgatcctgaagccatggtttcttccctgccagaaatgaaggttcagttatgaggcaaccctctagtaaggcattgtaaaagttactggatttggtttaataaaagttgaaataaagtatttgagtaatagagtaaaacttaatcttaagggatggacaaagccagccttgtggagttggtagtccttgtgtttttcatagcccaagatagccatgtgacctggaacttttaaaaaaaaatttttttttaagagccagagtctcactttgtcacccatgctggagtatagtggtgctatctcggctcactgcaaccattgtctcccaggttcaagcgatactcctgcctcagtctcctgagtagctgggatcacaggtgcacaccaccacgcctggctaatttttttatttttatttttagtaaaggcggggtttcaccatgttggccaggctggtctcaaactcctgacctcaagtgatatgcctgccttgacctcccaaagtgctggggttacaggcatgatgagccaccgcacctggcctgacctgcaacttttatgatctctggtaaaacatgagaaatacttgtaaaaattatgggagcaaagtaaataatttattttttaaaaaagcaactgtatctttttcaacttactttttggaagtaatgatggaagtacatcttcttggcccctgcagaggttttagctagacttcctaatactggcagtgaataagccccacgttgggtgctggacagcatccatcactcccacccacttagtattccacccaacactgcttcacaccttcctctggaacattttcttaaacaataccccaccacagaggagggtgttctttctcagcttttcctaaattaccagtgactggatgccttatgacctgagagatctggccttggctgttacctatgacccaccagaattggggagcacacagtttgtttcagttgtcactaaccggaaaatagattacaaataagatggtacaagttcataattttctatctatggtacccttggcttctgcctggcttctgaggcttagggaagggaggaagggacctacaaagagccagggtacacctgcctcttgtgctgagggcacgtgccagcttctctgccagtaagccttttgctagctaacatttcccaccctcccaaggcccctaacctgccctcccctctccactat

SEQ ID NO: 7195 - DNA, 2300 bp, Homo sapien
ttggcaagagtcttaacaaaccttctaggttttcacagatcagactcctgtaggtgagataatacatttcagaggcatggttacatctaatttgttttttgtctttgaaatggcaggggaattttgaaagtgagagataatagtatgagttgaggaaacatcagcccagaaattgtgccaaggatatctcaagaaagaaaattatcatagtggttacatgtgggagctcagagataagcctaggtttgggtcttggctctatttattagcctggctgtataatctcacacaggtgacctaacttctctgagtctcactttcctatccatgaaatagaataatagtacttaccttgtagggttgttttaaagattaaatgagtcagtgaaggtaaagttgcttagcacagtgagtgcctggcacaaaataactaccaagccccaaatggtaactattattatccttcaaccttcctcatttccattaccactgagactcaactgctacaatgctgactacttatattcttcctgagcaccacatcccagctccacaggtataatcttcaagttaacacttttaaggaaacattactgggtataaaattatctctagtaagtcgtatgcgccttttctctgagctcactgtatcacactaaccagcagagggtgcacaataaagaagagaagcctctgactctgcgggaaggtctctcacagaaccaaggacgttgccacccttggctgggtgtacttgaccaaagcgagcctgactgaccctggtagtaggcaaagaatttggcctttacgtttgtatagttaattaccaggctaacaatgcagcaaggatagtaaagcattttacccctcccaaaacaaactgagtattctgacttcaggcttatgtccagctttttagctccgaaacccccccactcactgcacagctgtgttcctttcctggaatgcagttttctatcaggtagcactgagggtccgaacagttcacgtcaaaactatcaggaaagaagaatgaaaaggtaaattaagagaaggcgggcttggctgggcggggtggctcacgcctgtaatcccagcactttgggaggccgaggcgggtggatcacctgaggttaggagtttgagaccagcctggccaacatggtgactccccgtctctacaaaaatacgaaaattagccgggcatggtggcaggcgcctgtaatctcagctactcaggaggctgaggtgggagaatcgcttgaacctgggaggcagaggttgtagatagagccactgcactccagcctgggcgacagagcgagactccgtctcaaaaaaaaaaaaaaaattcccatcccagtgagagagatgtggatggaggatggcagctgttgcaagggccctggggaagcttctcaatccacgatcgcctggccttgcctccagacccaacttgaaatagcttttcggtagactttgctcctgttgccttctctgtgcttgtcctctgtccagcctgccttgcttcctctcaatgttcagcgttgagtcaggaggctgagcaaagatgcgcaggtgggccaacggctgagtgcttcacctccccatccagaagcaagggaatcggtgttggcggagaaagcagggcttcagggagagccctgcaaagcggggtggcccgcacgcttgggcgccctggcccaactcctttgaagaaagactcctaggcgcgagggtttctgggaatggaccgtggggatccgggaggcccaaagtcaggacttcccgtcacggccacctccgccagcatagactttgcaggcagcccctggcgcccttgtatccctgcgggcttcagcacccacatgcactgggtggtagtgatagcgagggttgtaaggccacgcggccagcgccacacacctcgtgccaccgtcctagcgcgctgcgcgtcgcagagccctacgcccctcctcctcccgagtcctcgggcctacgtcgtccggcatacgtcatccccattggccgaaggctcccgggagaaccaatcagaacaggaggagcgctttgggcgggaggctaagtctcgagggacttgagggctgagggaagatggctgggctgcaagaggcagggggatgggcccgtcagggaggaattcttgtgaaagccgtcgtctgcctcagcacttgatgaaaacacaccgaaaaagagggtagggatgctgtagtagagcaggcgccaaggcggttaagggtcatgtccgtcttccctttgaagaggcagtagatgccctt

SEQ ID NO: 7196 - DNA, 2300 bp, Homo sapien
atttgagtaagtgtacttacttacagaggtggagtttgaagctaggcagtttgtgaaaacctatactcttaaagtttcatatttctttcttttttttttttgagacggagttttgctttgtcacctacactagagtgcaatggcatgatctcggctcactgcaacctccacttcctgggttcaagcgattctcctgcctcagcctcccgagtagttgggattacaggcacccaccaccatactcggctaatttttgtatttttcgtagagacggggtttcgccatgttgggtcaggctggtctcgaacttttgacctcaggtgatccacccacctcggcctcccaaagctctgggattacaggtgtgagccactgtgcccagccaaggtttcgtatttctattctagattttgataacttgatgaagactcatttggcagcagtctatagggtaagttttagattagtaagaaagaagaaggaaatctttgattcatcattgtctttgttttagtaatcagggaataaccataaaatgctaatctttgtcaagcatgttaaaaaaaaaatccagcctctgtccatcatggtctaacagtttaaaaatatgtcctaactcagaaaaataataccccaataatcctttatttaggtcaaatgtaaaaagagaatgtataagctagatcatcttaagcttgaagttcacaaagaaataaaatgttcttttttttttttttgagacaggagtttcgctcttgttgcccaggctgtagtgcaatggcacaatctcagctcaccgcaacctctgcctccccggttcaagcaattctcctgcctcagctttccgagtagctgggattacaggcatgcaccaccacgcccagctaattttgtatttttagtagagacagggtttctccatgttgatcaggctggtctcgaactcctgacctcaggtgatccgcccaccttggcctcccaaagtgctgggattacaggcgtgagccaccgcgcccggcataaaatgttcttgacatgagatttactttctttacctatgctgttattccctctaaatatattgcttgtttattggatttcatttcctctttccaacaaacccacattattttgatttggggacaaattgggaagacagtgattttctttaacagcccagtggattctgcttccttctaattcaaagtatggagattaaaactgttaacaagtctaggcattaaaaaaaaaaatagctctagatggggcgtggtggctcacgcctgtaatcccagcactttgggaggccgaggcgggtggatcacctgaggtcaggagttcgagaccagcctgaccaacatagagaaaccccgtctctactaaaaatacaaaattagctgggcatggtggcacatgcctgtaatcccagctactcgggaggctgaggcaggagaatcgcttgaacctgggaggcggatgttgcggtgagctgagatcgcaccattgtactccagcctgggctcgaaactccatctcaaaaaaaaaaaaaaaaaatagctctaatgcaattaatccaaaacagtgaaactgagtttacctcagatatcccctaccatcccagtcaacatatagtagtcctgtttttaggatttctctctcctttctttcccgtcttcctttagggaaatgctttggggtaggaagcaacaaaccaaacagcagcaggcaagtaaaatcagctcttttctatttccccactgggatagtacagaagagggagcaagaactcatcatcaaagagaactgagacttaggcgtaccattctaaaaagcccttgttccttgtctcccttgcctcttccgcccccctcagctctgcagtaattcctcagagattgtacagtctctccactttaaatataaatatataaatataaatatatatatgtataaacttccccctgtctttctctcctctcttttttttaattttctataataaagtttcctattggataaggtcagctccctgatttatgcctggttcctattggaagctcacaggggctgacatcacttaggaaagcgaagggggtagggctgccagatcagtttgtcaccacccaggctcccttgcctttggctgggtgcaacttccattttaggtgttggatctgagggggaaaaaaaagagagagggagagagagagaaagaagagcaggaaagatcccgaaaggaggaagaggtggcgaaaaatcaactgccctgctggatttgtctttctcagcaccttggcgaa

SEQ ID NO: 7197 - DNA, 2300 bp, Homo sapien
gaatgggagtttccagtggtagtactgcatgaagattcatgagactataaagctctttggaaaccccccaacttagcccttccaactttccttacatttttatggctttccaaaaaggttgcatgtaagggaaattatctaggtctgtgctgtttattcagcaaatagtttttgagcacctgttatgtgccaggcactgttcaaggcactagactaaactaaacttatcccaaaaaaccctctgccctcgtggagtttacgttcttatgttccagagaccctgtctgccagagttccaggcctgattttcaattttgaggaaagtgctaagactaaagagtgaatggttcttttatgagtactgacacaaggactccaggccacacatatcttcttgaaagcccttttcctgtttgaaaaaaagatcgtttgtatttgatagagcaaaagaaggccacaaaatgaattgtcttcttgtgggctgtgtttcagaacggccggtttgtgggcgatgctgaccttgaaagacagaaattttcagatttgaaactcaacggaccccaggtaattctttggctcaagacctgggttgcttcattcatattttcttatttccccagcctataagagcatatttgtgtcttgtaaggtgcctggcacattgtacatactcgtcaattagtttcttttatttacgaaaacaaagaagtggagctccaaagtatatatgcagttttgttttggaatgaattttaatgaccattgatctttatgactattcctcctccccactgccaccccatttgatccctaagtactgcgtttcttttctagagacagtaggcttctactttgcagcaaaaaaccctacctaaaatctggctggtcttgagccttttagacggtatctgaagagtaacataaagccagtcaaaagatggctcttactgggattttcaggtttgtcttaaaagttctttatttttggccaggcatggtggctcatgcctgtaatcccagcactttgggaggctgaggtgggcagatcacctcaggtcgggagttggagaccagcctgaccaacatggagaaaccccgtctctactgaaaatacaaaattagtcaggcgtggtggcacatgcctgtaatcccagctactcgggaggctgaggcaggagaattgcttgaaaccaggtggcggagattgtggtgagctgagatcatgccattgtactccagcctgggcaacaagagcaaaactctgtctcaaaaaaaaaaaaaaagttctttattttagactgggcacggtgtctcatgcctgtaatccaacactttgggaggccaaggcagagcaaaactccgtctcaaaaaaaaaaaaaaaacaaagttctttattttggccaggcgtggtttgctcattcctgtaattccagcactttgggaggctgaggctggaggattgcttgagcccaggagttcaagaccagcctgggcaacatagaccctgtctctacaaaaaaaataaaattagccaggcatggtggcgtgagcctgtagttctagctactcaggaggctgaaatggcaagattgcttgagcctgggaggttggggctccagtgagctatgatcatgccactgcactctagcttgggtgatagagtgagaccctatctcaagtaaataaatacaagttatttatttattgggtgagctgctcttttgagggatcactcagatatagatgaaactgcatttaacacagttcatgttcacttagatgaccacagctgggaagttaaatctactgtctgtcacttggatgttgatgtggctatagttagttcatgtttgttaaatgactacaactgggaaattatgtctactgtccttttgtacaagttcaaaagatgacagccacccatctaaaaatcctgaggcctatagaagatgcatgaggagtccctgtctccaggtttaccacttatgcttcttattaggatggcttgttatacatagcacttaatagtagtttcttctcttttctcttttgcatataggatcacagtcaccttctatatagcaccatccccaggatgcaggagccggggcagattgtggagacctacacggaggaggatcctgagggagccatgtctgtagtctctgtggagacctcagatgatgggaccactcggcgcacagagaccacggtaaactaagacgtgtgtaagatctggaagtgataagaggtcttttcttctctattaggggaggggttaagcacttaattaagatgga

SEQ ID NO: 7198 - DNA, 2300 bp, Homo sapien
tttctttgtgccacaatgctaggcttatggataatccttctgagaataatttggcttcagatagacactttctgtagggagagaatacactgaccagccaacacaatgttggtcacgttgaaagttacatttctcactcttagtaagtggtgtctggtcttggcaatgattttgggaagcctgcaccattcctacctatactagtcatttctgggtgagttcccctttcttgaaactatgacatcatcttgttgctcacgtaccactcaccaggagatctttgagattggcaagtaggttttgctcatattagtatacgaactggcatgtagctgttgttcagatcgcatctgttgaatgggtgtgaaccgagacatttctgaagctacagagcagattgtaaccaccgctggcacctcaatgcttaacatatgctaagtgctacctttaacttgctaaaaatccaagggagctccaaatgtgttacatcttaagaaattcttgagcattttgcaatagcccttgctgttgccgactctggttttccaaaaccccagagtccctaaaaatcaaaggacccacctcatttcatacaactcaccaacagagatcactggacagaggtgggctgggaagccgaagagctagaaacaatgaagggcactggcttgacagtcagcaaacctggatcttacaaacgctagttactgattatgtgaccttgacaaattgagtcatctgtctgagcttcacattcctcatctacaaaacgaaggtaacaaaggttaatgataatgtatttgcctcttagagtcattgtggatattaacaatggaataaccagggcctggtacttaaaccctcaatgactgttagttggaattgctattagtgataatgatgatacaatgcaagcctggaaggagcagttaactttggagaaaagctggctcccacgtcctctgtgtaattttgcccaatatagggccaaagactcaccaaaaactttgaagtaaaagaacttgtctgcacatatctggtaggacagcttccttatggtaggctgggaaaagtctgacagtgagcccctgcactgacctgaggagcctgtaggggaaggaaagcaggaagaagatgagcaggagagaagagaaaagaacaggcattcactcatgcactcaacaactaagataaattgaatggatcctgcttagaatctgattggagaggaaaaggcatgaactcgaacagtctgaagtagaaagagttcagcaatgatgtgacaaaggcgatgatcccagggctggcatgaaccaagaattaagaactagatctcagcttgaggagcagggatcagggaaggctgtacggcaggtttgggactcctcaataaacaggccacactgtgttttgttcttatcctcctctatcaaaaaaaaaaaagtgctctcttaatttcatgactctttcttaagtttaatattcaactgaccatagcacagccttccaagtaactggaattacaagcatgagccaccacacccccctactttttgtacttttagcagagacagggtttcgccatgctggccaggctagtctcgaactcctgaccatagctcctgaaatattttttgctgataaacaggttaaagaaaacttaatacatcatatgggcacccactaggtctgcccaccagaaatcacactctacactgacaaccccttcccctctgctccaaaagcctcccagctttccttaggcaggagggctggagagcctccaggtcaagtggactcacctaagatttttatgttacccatcccctgatattagattttcttgttattttgctttacttgtgtttcttctaaatagcaaataaccggcttgatttttatccagtttgaaaatttcccatctattatagtcaaaatctttactcagctgccccatgacaggagagctcaattctcccctctttacctttgaaaaggaaaaacccagatgaaggggctgctttcaaaggagtgggaagggataatggtgaaacacctgaaggacagccacagtcggaagctgtttccatccttgggagaggaagcagagctgaggaaggcagccactgcccacccatggctaagcagggagaaatgaatacctcaacctcactttccccctaccccaagtctcccagcaagtctcctaccagaaggcagagggcagggcagctctttgacacaatccacaaagatcagcccttctggagctcagagctattacagagaagcctggagag

SEQ ID NO: 7199 - DNA, 2300 bp, Homo sapien
aaatggccatattgtgtagaacaaaggaacatttagaagttgcacagaggcaggcttcagtttattacagaaatgactttcagagaatccagtctttccacagcagagcaagcaaaccaggagataatgggattccctgggcattgaaggtgacccagtgtctacacactgtattggaaattcaagtatctaataactggggatcaaattggccatttttgaggtcccttcttgcagttagaatttatgacttataatagctctgatgtaaatattttaaatattttattataggtggagtgttcagattacaaatattatagagagcagtattcagatgataactatatgacatgacggatatgctgattagcctgatttgatcattccacaatgtgtatatgtatcaaagcatcacattgtacaattattattgtcaattaaaaacaaaatataactttttgaaaagatgatatgaatgtaatagactacaataaaattctcagaagttgtcattgtgacacagatttcaaactgtctctgtataataatatagatggtagactagcctttagatgtgtgcctgttgtagacttccatatgctatgttcttgaatgatagaattatttccacagtgcagcccaaatcttagatacgaagttgttttatataaggactcctaaacaagtgatttgattatgaataatcttaaatctttcattgcacggcaaagtgaaagtagaaaatgaagaaaatgtataaataacattttcaagctgtattatccattcgacatataattattgagtgtctaaaatttgcacaacattaggcgtgcttatatgggatgatcaaaatgtaaataaagcagaatggctgcccttgaatttataaataataatgatgattatcttttattaggttgccattactatggacagttcattgtgatatcttacattactattgcatttaaacttacagcaattcttttgtctaagtataattattattcccatttttcaaatacagaaattgaggcttagagaaattatatattacctaacatcatgaagccaggagctggaattattcaaaccacatcacttcccttcactgctgatttcacattgatacactgcccctcctccacatgatatagtataatgtgcaatatgctaagtggcattagaaaccactcaaagcattattgaagttcagctcaggaaaagagaccaactgaaatagataccacttgttagctgttggaaaaacagcagagagccatttctgccctaggtgctcttaatatttgtagctgcctactcatatttttccccatgcttgtgacactgaggtgggtttgtgtgaataatttttactggaagtggtgcctctgggtagagatttctcttcaaatctcatattcaatgacaggaaatattaaaatttggcacgttgaaacaaggccacacattacgtcttttccaccttatttaatatgagttggtctgggaaaagaagtggaatggatgccctttgcaaattacgtctgtttattaaaaggtttttgtggaaaagatatggcttctcccagatttcacattagcttctgagaaatatgaaaaatagatgggcttagactttcataatcatgcccaaattcacaggaaggcttcttagatttccaacatcttgggatcacatattttctcatacctccacccacgccaggaggaaacatatgataaaacaccttgtttccttcaagccttatacttctggtcagataaggatagaaaaaccaatagtagacagggctttgctttctgaggcgtatccctgacactgtcatactcaggcctctgttagccctttgcttcatgggtaattttttttctttcttcacttcccatcactagttttgagagttacattgacatatcacttattcaataccccaggagatattgagtgtaaatattaggttggtgcaaaagtaattgcagtttttgccatcaaaatggcaaaaccgcaactacttttgcaccaacctaataaatatgtgaatgaataagtgaatgaataaatggcttatctcccttaccttaatgatttctagccccaagaattccttgacactttcttgtgaatttgctgaaagaattgaattttcattccactctttctgaaaatagctcctgaatcccacccacttcctctgccatttttcttcaatagtatcttacatagtttggcccaactcttggcaggtagaaattgaggtgtagatattaat

SEQ ID NO: 7200 - DNA, 2300 bp, Homo sapien
tgttcattcctttttattcttttttctctaatcttgtcttcatgctttatttcattaagttgatcttcaatctctgatattcttctttctgcttgattgatgttgctattgttactagtgtatgcttcatgaagttctcttgctgtgtttttcagctccatcaggtcatttatgttcttctctaaactgattattctagttagcagttcctgtaaccttttatcaaggttcttagcttccttgcattgggttagaacatgctcctttagcttggagtagtttgttattactcatcttctgaagcctacttctgtgagttcatcaaactcattctctgtccagttttgtttccttgctggtgaggaattgtgatcctttgaaggagaagaggcattctggttttcggaattttcagcatttatgcactggtttttcctcatcttccttgatttatctgcctttgacctttgatgctaatgacttttggatggggtttttgcatgagcatccttttagttgatgttgatattattagtttttctttgttagtttttttctcactgtcaggcccctttactgcaggtctgctggagtttcctggaggtccactccaaacctgtttgcctgggtatcacaagtagaggctgcaaaacagcaaaaatagctgcctgctctttcctctggaagcttcatcccagaggggcacctgccagatgccagctgaagctctcctgtatgaggtgtctgtcaacctctgctggaaagtgtctctcagtcaggaggtatgggggtcagggacccacctgaggaggcagtctgtcccttggcagagtttgagcactgtgctgggagatccactgctctcttcagagctggcaggcaagaatgtttaagtctgctgatgctgcacccacagctgcccctttccccaagtgctctgtcccagggagatggaagttttatctataagcccctcactgggtctgctgcctttctttcagagatacccttcccagagaggaggaatctggagaggtagtctggcaacagacactttgctgtgctgtgatgggctttgcccagtttgaacttcctggtggctttttttgcactgtgcagggaaaactgcctactcaagactcagtaagctcgagcattccaggttgactttagactgcagtgctggcagtgggaatttccagccagtggatctgagcttgctgggctttgtgggggtgggacccactgagcaagaccacttggctacctggcttcagtcgcctttccaggggagtgaacggttctgtatctctagtgttccaggcaccactggggtatgcaaacgaaacaaaacaaaaaactctttcagctagctcagtgtctgctcaaatggctgcccagttttgtgcttgaaaccccaggccctcaggtgcctgaaggaatctcctggtctgtgggttgcaaaaaccatggaaaaagtgtagtatctgggccagatagtaccatcccttatggcaaagtccatcatagcttcccttggctaggagagggagttccctggtcctttgcaattcctgggtggggtgacactgaaccctgcttcacccttcgtgggatgcacccactatctaaccaatcccaacgagatgaactgggtacctccattggaaatgcagaaatcatacaccttctgtgttggtctcattggaagctgcagactgtagctgttcctatttggccatcttgccagatcatcaaagagattctttatgaaataatttcactgagaaaaacagtttaaccagaagatactggattcacactttagtgagggctctacctaatttgctgaagagctatcttatgcctaattaaaaatggaaaaaataatcctaaaatttctatggtaccacaaaacacccagaatagccaaaaccatctgggcaaaaagaacagaactagaatcgtcacattacctgacttcaaattatactacagagttgcagtaacaaaaacagcatggtactggcataaaaacacatagaacaatggaacagaatagagaacctagaactcaatacatacatctacagtgaactcatttgcaatgaaggtgccaagaatatacactggggaaaggacaagtttcttcaacaaatgatgctgggaaaactgaatttgcagaagcgtgaaagtaaacccctatctctcacatatacaaacaataaatcaaaatggattaaaggcttaaatataagacctcaaactataaaactgctataagaaaatattgaaaaaac

SEQ ID NO: 7201 - DNA, 2300 bp, Homo sapien
ccttggaagagactaaatttacttcaaagaaaaactgaccaaactaattgagggactcccctttgagaatacagtgccaactctagagcatattcctttctatatgtttatattcactggtggaaaatccctgtcctgtgagggtgggttttattttttaaacatcctagaagttactcaaaaccaaaagtaaataagtacgtgatcaattttagtaatggcatttccagggtttttaaaaagcagaactttttacttgtgagtagtttccttattgctaaaacactggtcctgaagtcagtatctctttttgagcaaataaaaccacttccgttcaatgtgggaagaaagtgttttcacttcttaattacatcttagtgaactctggattttctttgacatttaaaaatagttaaattctattgaatctcaaaatagctaatcctttttaaaaaagttttagcacctgtacatttctttttaagggctaaaactccaagtttattttgtcaaattgccaaggcaaccaagaacattgccatattaacacctgcgtgtgacatcgttgagtgaagacattgcaaagaggatgtttaaaagttgaatgtgtgttctgcatagtctggcgctctcagacagccaaacaggatagaggccagatggttccgtatctgtgtggcctcccacatatcttacatgcatttggagttcctattttatagaattaactgttgccaattccttgtaactctcacaacccccttattatccattccaacaaaggacatagatataataaagtttggcaagaaacatttaatccatttcagctctcccaagtagtactattcctctatcaatctaaagacatcaaattttgtcctatttttaaaaatacctccagtgaaggagttttcgccagtaacttatctcagaatcaaggattctaagagtctggtttttgttataacaaataatcacacaattatttttaagaccacgggaagaaagatattgtactgatcttctcaatatcccttttgcagaaagattagtccttgtgaagcttacttttataaaaagtaaactgtaggacagtaaactgacaggacataagaaaatcagattctctgataacctgacaagcttttctaaacatttacttataatattttgagatgaacaaatgattaagaggaatttttctttgagtcttggctttcctaattctagataataatcatttgagctttatttatagcatctttcttcagagatgctctaagaacagccatctcatttgtcttcaggaggcaaatgtgaaattgtgtttcattttttactttagaaatgaatttgtggctgggcgcagtggctcacgcctgtaatcccaacactttgggaggtcgaggtgggtggatcacctgaggtcgggagtttgagaccagcctgaccaacgtggagaaaccccatctctactaaaaatagaaaaattagcctggtgtggtggcgcatgcctgtaattccagctactcaggaggctgaggcaggagaattgcttgaacccaggaggtggaggttgcggtcagccgagatcgcgccattccactccaacctgggcaacaagagcgaaactccatctcagaaaaaaaaaaaaaggaaaaagaaatgaatttgtaaggtttctaatggagagccagggtttctcctcctgtaaacaaagtaataaaaacaattttaagaagctttgtcatttttaaaaatgattcaatcatctaagtctagaaaataaaatggttatgggaccaaactaaaaagaaaaaaaagaaaaattagtgaaaaggagaccctccttttaatttcttctgattaaaaattttaaagtgtgcattggatggaaggaaacgaggtatgatataatcttaattgtacatagtgcctagtatataacacgggaagcagaaagtttatctcccaaacaaatatgacaatgagttattgaaaccacaagccagtttatttatcaatgatgtcagtactcaaagttgtccagttaaaatctacttcctcttgaaaaacaaaaatacactgaaggaagatgcaaagagctaaaagtggtatcatgattccacagcagtgattgtaagacagtgagccacagggaaatgggaaaacgtgaaaagaaacaagtatcaggaccaaattagagaagatatgagtagggccatcactagaggtgaaaatggagaaacctaagaaaaccagtgttggcatgaattatgcaagtggaaaatacatct

SEQ ID NO: 7202 - DNA, 2300 bp, Homo sapien
ggggtccttgggccctcggagccctagcacaaggcccactactcagttggctcttaatcaaatctgtgaaacgaattataaagttgcttttctactagaccttgttgggacaccaaggagccggcgtcggttgcttaacttggatgcggtgcctgacctagagggaggcgaaagggttgtgagcgtgacatgactggtgacctacaccgagaagctgaagggtctcttaagctctgcggccggaagccatctgcttctgcggtttatacaatagcaactttatcagaggttacttttctgcacgctagcgtatgacattaatttgtcttcctgattcatcaaagggaatttccgttgcagttggtgatgcagtgggcctctcccatttcttttttcttttcatccattacaatcaaggaacgatttgcaagaacatcctttacccctggaaaataaggcatccagggctaaaagtcccaaaagaaagaagctggaaacaagatctggggatccaattttaaatttcacattaatcattcagttaaactgtagacaagtgctgaagtacatttttccttccagtactttgactcagataccacttcatattagacaaatgttttatattctctactgagtattttccattttcatagggctaatgtcattttcagttgtaataatcgattggcatagtgtcaatggaaattttttaagattgagtttgtagtgagcagacttttggaaggaacagtgctgacatccaatggatgctcaaagtaatacagaggaggaatctcctttcaaaaaaaaatgtacagacagtggaatggagaatgaattattccctaaaaaaaaaaagccactgtgggctggatgtggtagctcacccccggaatcccagcgcttttggatgccaaagtgggaggatcccttgagcccagaacttccagaccagcctgggcaacatagggagaccaccctctacataaaaaataaaaataaagcttttaagctaacctggtggcgtgatgggatgcacctctggtcccagctactccagaagctgagaagggcaaatcgcttgagttcaggagttcgagttggaggttacactgaactatgatagtacctttgcacgccagcctgggtgacagagagcttgtcttaaaaaaagtaaagaaggctacggtgttgtagaggaaagatcccagactttgcaattatagtaagtagcaaagctaccaattaattatcttagcaagttgctattacatgaacctatttcaccattggtaaaaagggggaaaaaatctatttcacagggccataattatagttccttacgtattgcttttttatagtaggccttttgtaaatgtttaattcaaggtgaataaatcacagtggtaaaaaaggtgaagagttaacctcagtgttactttccaaagaaattgctataaggcagtgtatctaggcagggattatgcttaattgagatgcacacagtttaacatctggtgtcaaacctggcttccttctttgtgaccaccctatagatgtttgcttttgggaccactgagtaaaccaggccctgagaatccaagcatgaatccacttctgccctacttttaaggatttacgttccatgcaggaaagcagataaccataatttctgaataaataagacaacaaaatgaaatggatgctggtcaactctgatgcaaattttaagaaggagactatgcctctgtgtctcccagcttcacagaaaaaaaaaaaagaaaaaagaaagatgctcagagtggggtacctacacttggaaaaaacgcaagtataagtctgccattcccatgaatccaagatgaatcctggcacagagtaggtcctcaaattttgcaaaattaattttgaatctttatcaccctggccaatgcactgccataatgcaaatcttactatctacctttctatgtcagtcacatttttaaaactgtgtaacctatgaaaaaaaaaaaaaagctcaccaaatcaaaagagaggaagtgctaagcaaatacaggaaccaaaaaggtttatagaggctgccttatgctgtctcatccagttcctttgcggtcctcttcttcagcacatgccaaagctgttcctcacggcctgtgagacaagagcatcttggatgtaggacaatggaagagttaggtgagtgaggagcctgaggagaaactctgagggagtgaagacttggctgccatctccttgtgtggtggggtatacttctggctagactgagggtagta

SEQ ID NO: 7203 - DNA, 2300 bp, Homo sapien
agttctgggctcaagggatcctcccactttggcatccaaaagcgctgggattccgggggtgagctaccacatccagcccacagtggctttttttttttagggaataattcattctccattccactgtctgtacatttttttttgaaaggagattcctcctctgtattactttgagcatccattggatgtcagcactgttccttccaaaagtctgctcactacaaactcaatcttaaaaaatttccattgacactatgccaatcgattattacaactgaaaatgacattagccctatgaaaatggaaaatactcagtagagaatataaaacatttgtctaatatgaagtggtatctgagtcaaagtactggaaggaaaaatgtacttcagcacttgtctacagtttaactgaatgattaatgtgaaatttaaaattggatccccagatcttgtttccagcttctttcttttgggacttttagccctggatgccttattttccaggggtaaaggatgttcttgcaaatcgttccttgattgtaatggatgaaaagaaaaaagaaatgggagaggcccactgcatcaccaactgcaacggaaattccctttgatgaatcaggaagacaaattaatgtcatacgctagcgtgcagaaaagtaacctctgataaagttgctattgtataaaccgcagaagcagatggcttccggccgcagagcttaagagacccttcagcttctcggtgtaggtcaccagtcatgtcacgctcacaaccctttcgcctccctctaggtcaggcaccgcatccaagttaagcaaccgacgccggctccttggtgtcccaacaaggtctagtagaaaagcaactttataattcgtttcacagatttgattaagagccaactgagtagtgggccttgtgctagggctccgagggcccaaggaccccatggaaccagatttagtcgctgacctctaggagctcacaggtgagtgactcacacaccggaagacgagatcaataatgtagacatgaacgctggctagccagtcccagaggaggtgtcatctgaccaaaccaaggcaagtctgggcagttacgcagacaccccgagaaaggtacgccaacgcccagataaaaagtaagaaaaagtaggaaaaaccctcccatcagaccagcaattggctcgacgcttgagcccggatgtacggcacgcgtcgcgacctaacccggaaacactgcctcccgaaaaaaaggtaaactctagactgcggaaagtaaactacctttcccgtcgtgactcagttagaacctcccggcatcctctccacctctggtttcccatctatttttcctaaagcctaggcgaaataagacttcatctcccagaatgcccttggttaagttaacggtgcgcatgcgccaagaggcgggccctcgttgcccccacaaccccgcctccgttttgccgccgccattttttcagagactttcatccggcaaccgacggggctttttttcttaaaggagaagcgacagctcaaaatactacccccttctccgcgcaagatctggcggcgctggggacagaaaggccaaagacaggaaagtggggtagggtggaggcggaagaacgcccaggctacttctgcggcctaaagaagaatagaaagagcccttgtggtatcagtggctcctcagggaggcaggtgcgcgcgcagccagtctagggtttgcgtgaggcggggaaagaggtgcgatttcttctcacccgcctccctcgcgagacctgcccctcgcactgcccctagcgcgcgttgaagtctggaggggggaaaaaggtcactttgggattgtcgcgagacacagccgtttaacggtgagaacgggtgcgcggggaaggaaacctcgcgcgctccccttttagccgtttcctgattggctgaaggaaggggtgggggagggaacctggggcgccgctgcgtgtaagactgcgaggggcggggtgaggaggcttgtcctcttttccgattggcccgctgagcgtctgtggcgcgcgcgcgcgcgccgccagcggtagcggaccttgagtggcagggggtggggggggcgccctcggagccgggcggaggggaggggggaaagaggagcgcagggtgagagtgagccgcaggcttcgggaggcgagggggcggggggagcagcgccgaggccgccgcctccgcctccgccgcctaggactagggggtgggggacggacaagccccgatgccgggggagacggaagagccgagaccccc

SEQ ID NO: 7204 - DNA, 2300 bp, Homo sapien
attttatatgaaagactccatacttaaaatcgtagcagtgggcttttaacctgaccataataagtggcaaatttctcaaaagaatgagaagggttgcgaaaaatttagaaaagtgaaaaaaaaaaaaagctacataaacacactagtacatctggctcttgagctaacgcgaaggcgggggggaatcatttttgaaggctatgatcgggctgtgtattccctaaagggcatgtgatgtaatactggagagccgcctaaaggaaagggatagggtgacaaagggggtgcggatgccagaaagagggatgagcctgcgggtgtcagggaggaggtggatcactagcgagtgcaggggtgtatcaaaagatgatttcggggagtggggaaacggcccgacaagcgaaggtacaggagcgagatgagggtggcgcagagaggaggcacgaaggctcccggggaaacggtgtgacatctggcgtgcggagccggcagggggcagaccaggcaggatgtcacgtggagtaggcgctacgggagccgagagggttgcgtacggacagaggggggtctttcccaccgcctgaaagactgttactcacaggagtcgcggactcttcttgccctgaactggagacggggacttcgcggcctggggctgctgcccggggacgtcgggaggcctggcgctggggctgctcctccgccggcggggatactcggccttcctccggcgggacacagctgcggcggcggcggccgcagcggcccggcctcggtcccgacctcccctcagcacgcggctgctagtggtccctgcaggcgccgccgcgaccgcctcagggggccgttgttggggctcctccggagccgccttggccgcctctcccccttcctggtcctgctgctccgggggtctcggctcttccgtctcccccggcatcggggcttgtccgtcccccaccccctagtcctaggcggcggaggcggaggcggcggcctcggcgctgctccccccgccccctcgcctcccgaagcctgcggctcactctcaccctgcgctcctctttcccccctcccctccgcccggctccgagggcgccccccccaccccctgccactcaaggtccgctaccgctggcggcgcgcgcgcgcgcgccacagacgctcagcgggccaatcggaaaagaggacaagcctcctcaccccgcccctcgcagtcttacacgcagcggcgccccaggttccctcccccaccccttccttcagccaatcaggaaacggctaaaaggggagcgcgcgaggtttccttccccgcgcacccgttctcaccgttaaacggctgtgtctcgcgacaatcccaaagtgacctttttcccccctccagacttcaacgcgcgctaggggcagtgcgaggggcaggtctcgcgagggaggcgggtgagaagaaatcgcacctctttccccgcctcacgcaaaccctagactggctgcgcgcgcacctgcctccctgaggagccactgataccacaagggctctttctattcttctttaggccgcagaagtagcctgggcgttcttccgcctccaccctaccccactttcctgtctttggcctttctgtccccagcgccgccagatcttgcgcggagaagggggtagtattttgagctgtcgcttctcctttaagaaaaaaagccccgtcggttgccggatgaaagtctctgaaaaaatggcggcggcaaaacggaggcggggttgtgggggcaacgagggcccgcctcttggcgcatgcgcaccgttaacttaaccaagggcattctgggagatgaagtcttatttcgcctaggctttaggaaaaatagatgggaaaccagaggtggagaggatgccgggaggttctaactgagtcacgacgggaaaggtagtttactttccgcagtctagagtttacctttttttcgggaggcagtgtttccgggttaggtcgcgacgcgtgccgtacatccgggctcaagcgtcgagccaattgctggtctgatgggagggtttttcctactttttcttactttttatctgggcgttggcgtacctttctcggggtgtctgcgtaactgcccagacttgccttggtttggtcagatgacacctcctctgggactggctagccagcgttcatgtctacattattgatctcgtcttccggtgtgtgagtcactcacctgtgagctcctagaggtcagcgactaaatctggttccatggggtccttgggccctcggagccctagcacaaggcccact

SEQ ID NO: 7205 - DNA, 2300 bp, Homo sapien
actggccatggccgtgggagtactgggagtaaaataaaaatatcgaggtatagactagcatccacatagagcacttgaacctcctttgtacctgtttggggaaaaagtataatgagtgtactaccaatctaactaagattattatagtctggttgtttgaaataccatttttttctccttttgtgtttttcccactttccaatgtactcaagaaaattgaacaaatgtaatggatcaatttaaaatattttatttcttaaaagccttttttgcctgttgtaatgtgcaggacccttctcctttcatgggagagacaggtagttacctgaatataggttgaaaaggttatgtaaaaagaaattataataaaagggatactttgcttttcaaatctttgttttctcttattctaggtaaggcatattaaaaataaatatgtaaagaagaaaaataaaagttgtcttcatggaagcaacttgtcttccttggttgtactgagttacagttatcctaggggtgaaacatgtgatgctgctaagcaaaccaaatgccctcagaacaggtgttatgtggggcatactattgtttgcttttgttgagaatcaggtggttaatttttgactgttcttgatttctaatgctgaaatgacatgattctgttattcagcaaacttggaaatcttgatgttttgacaactgcctcctaggaaaactggccatatgttaattaacctagtagatggaaaattaaggattatgtgaggttaattttaccctgataatgacaaaaccttgatagcatttaatattaatacttcttctcaaaattgaatgtttatatcaagtactgatttttattttaaaaaagaaaaaactataatccttctgccttccaaaagccatgctgtgatagctgcccaggctgctctgttacatctcccatttattgtttacttttataaatttgcttctaagatggtatgtgtttcagcttattggcaatatctatgatataaataatgaaagctaattatttcatttagcccttacccaataagcatcattttctaagttaaatgcaatagaatgacaaccctccaagtaccttttaacttttatactgtcatttcaaagcccagctcattctcttattttaagaagcatgtggtatgactgggtaggggagaaaaaaggaaagcatgttgtcacttgagtgagactgctttagaaatgttaccaagttagcgttgggtgtttcctgttctttggaagagaacaggcctaaacagtaccttcctcctcctatgtagctaccaggaaggcaccgtgattgaaattagagatgcttccttgcttgatttttaagtataaattaaattacctttaaaaagtacgtaaggttaggagtgaaaaaaatcctgtttttaaaggacttcacacaccctttgtttcttgaacaagatgtgaactacctaaacagaaaatgaaattggaaagtcagtgggagagacaactatagaatcagacttctatttaaattcaagcctcgttacttgattttgtgcatgttatttcttgaagtttcagtttcttatatggagaaataacatttacctcagaaatattctgaagatcaaatggaattgctttaaagtatttagcttactgactgacccatggtagatacttaataaatggcagctgtgtcaataacaattttattgaatgaacatttcgccagcctatgagaaaaaagacatgggaagcataagggagaatgataataaaatgaactaattctaagtgtgtgagatagattacattaggcaggggtgccatgaggattggtatgatagtgaccttgttgctaagtgcaaaagcaaaacaatgacatagaaacaagtgtgctaagtactgagtggaggagagagatggaggcagacgctgcaggggaaaaaaaatctgattaaaaagggccctttgattccacaggcacaaaaatccacagccaggaatttgctacctcctctgagtcaggcagggcgtgggggtggggtgcacaatcccattagtagagaatgcccagtgggtttagtctttgagagtcacatctcttatttggaccagtatagacagaagtaaacccagctgacttgtttcctgggacagttgagttaagggatggctttcacagagcattcaccgctgacccctcaccgtcgggacctctgtagccgctctatctggctagcaaggaagattcgttcagacctgactgctcttacggaatcctatgtaag

SEQ ID NO: 7206 - DNA, 2300 bp, Homo sapien
gcagggggcagtgtacatatatttctgcaatataaatttttctctccactgtctcatgagtcttatgaaaactgacttgacctagaaccttagggaaaaaatattcactaaatatttcatgcacgcatttgtatatgcataatgcactgtattaaataattatttactaaataaagcatttctatgtgcttaccatatatcgggaagttgtctaagcaattatgactatacatatctaaattaagaaaagacaatcttagttctgatgctacttaggatttataaggctggaaaaagcattgctcccacagtagtgatgagaaaaatctgaataaactacaaaatcagtcacgttctgaaattcattagggatctgagggcatgggcaatcaagtatcctgaattccaattaagcataggccctgcttaggtaagaaaggacacaggaggaccacttaatttttctttaagaccctgcaaagattcctaaggggaattatttaattccctttattgatacagaaatggaggcaagaaaaggtgaaatcatttgctcaaggtcacacaataggtaagtcgtacaatcaagatgtcagcctgttagtttgggggtagtcatgctgcaagccactctgctatgctacctctgtcatcattgctagcacttcaattcagaccccagagaaaaaccacttagaatactaagactgatgctggagctcccgaaccttttcccttgtatctgatcccaaaatgtgtgaggtttatgtctgttatcacatataacatagtaagaataagaaccacagagtcaaacaaaagcaagaaaaatccttggttacctagtacaacacactttttacagctagggcaacagcccagggaggttaagagactctagtcaaagatttgagggtgagagacaccactgaatcctggtctattgcctggctgtgtgagtgtaggagctaaagtgacagaataggaggggtctggtttctgggcttgggataaaggagtaccccactcttttgttgcagttagatatatcctttgtgagatatgaaccctattggagtcaagagatccaccgggttaataaatgatagaacaatctcagtcgctttgaagaaagagtaatggaaggttataatgacttcaatctcaggggaaaagatggagaattaatgttctaggagtggcagggctcctagacagtacagagaaaaatatgtgaaaacttgctctgtgctgatccattaagtgaaggaacacacacacactttttgtccctctttctcaacctagcctcttgtgtccctgctcctctgattagagtgtctgttgcttcctctacaataaagatatttactaacctgggaatgaggtggtgagaacaaggacctggagagtgtcaaactccccatcttggctgttttacacagtgaaattgaggctcaaattatctttgctgtgaaccctcctttcttttctgagcaagtggaaagtatagtaattaggacttcggagtgaaaaagctctgggcttaacatctaaccagttcaaccatgctgagatctcaatggtccttctctataaaagtgagactaagaagtgctcacattgaatcattgtcagaatgtttcactgcagcttcaaaatgggcatgggagggggcacaacttgtctttaaaaaggaagattctaacagctttcatcactccatgcaagtaatttgctattttattgcattctgcaaatcagatatcattcatatctttcccactgccttgcttctattacagatacttgaatgggaaagaggtgagggtagtgcctacataatctgaccctccttccagtatctggcctgttggtttcacacagctttggttttcatggtatttccatgacctgtgaggacaaaaagcattgtgatgttttaaaaagagaagctcaggggcatacagccagcctctcaaccatgcagagccaattacttcaacatgggcccgtgagaggcagggctgaattccactagaactgacaccagattcttttgccagcctagtacaaggtccacattacaagccaaagctcagaaatttctggaggtggtgtatcaaaatttactctgcgagactctgctgaactggctgcatcagggagaaatttcatctcccagaagggtgttgctcatcgtttcttcccggaaacatctgcagagactagcttttcaggtgaggactcattacaaagtatcagatacataggatgaacaagtctagagatctaatgta

SEQ ID NO: 7207 - DNA, 2300 bp, Homo sapien
aggtgataccagctctcctttgactgacccagctggtgtctcagtatgtcaagtgtccccccagtccacaatttctgagcctaattcagcactaggactcacttaagagttgcagtccttatggtttacactgcctttcacgtttacttggaaacacagagaactttaggccctctgtggtgaggttttcagtcactgaagttttgactgctgggattggtgattcccctcgggttaggactggtttaaatgctccctctgcctccatgggcaggtgtcagctgagtttggtctagttttcctttgtgtctaacatgacagcaatgagttcaatgcctcataattgctgtgttctttctacccccgtgcccagagatatactgtgcaccacactactgctactgaggttgggagggatggggattggtgattcaagactgttttttactgtctcttcagtgcctctttcagggatatgaagtcaaaaccaggtactatgagtgctcacttgatttttggctctcatgaaggtatttttttctgtgtagttgttaagttggtgccttgtggggtatggggaaatgattagtggagccttctattctgccacttgctttgcttctcctccccattataaactatataaaaaaaatttaatggctcaagaaattacttaagtaatactcagtatagaaaaaaaatatgtgttctctcaactatccacagtttgctgtcaattatggaataaaacatatgtattgactagttgaaatggaccattttttaaaaaggatgattagtttactgtataactctataaactttgatatgtatttaacaaaataatcgtttacaattatgaatatgtaaaattctttgatagattatgtgaaccacttttggttcaaaaagtagagtaactaaaactataaaactcaatgccttacatagcaagaatgtgtagatagtattaaattatcactgataatttttatatgtcatctggagtagatgatttaggtttgtaagaagatataaactgcctaagggtagagaatcactctctatggaatcatagtgtcattaaaataattcgatatttggcctcatgttccagacattgccactggttagttttgtgacctgggggaagacatttatttttttctcagcaacagcttccttatttgtgtaaaaataactcttgcttttctcatgctataaatgattacaatttgtgaagtttctttcacttccagaaagtgggtgaatttttttttaattagagatagtatctcaccctgttccccaggctgaagtgcagtggtgaaatagcttactgcgatctcaagtttctgggctcacgtaatctttccatctcagtctgctgagtagttgggactatagacacatgccactacatctggctaattaaaaaccaaaattttaaagactggggttttattaggtcgccctggcttgtatcaagtttttgccctcaagcgaccctcctgcctgagcttcccaagtagttggtattaccgatgtgagccactgcacccagtataaaaattttataacttatattttcccatgttttaatctcaatgtcttcaaaatgtaatgttgatcagattcttttagatagctttttataacatacagattgccaggcactctgggagcctctgatttacctgatctggaaaagttcttgtattgttaacaaacaagcctaattgatcttgaaggaggtggtgtgaggaacacactttgaaaaacaatgtttgtctctattccactacaaagctaattccagtccccctgaaacttttctccagtaattgatttttcttcttaaacttacaatgcccctccctgttgctccactttagacaaccagaggacaaggtatatgaaactgagttctcattattacagtaacttccttgaggcatttttggctttttccaagccacaaatggttgaaagtattaagccaagtattttgcattgaaatcaaactttccaactctttgtttgctctactgacatcatttaaataaggctgcagctgtgctatttttgccaacaatggaaaattgacttaatattgttctagaatagcctttcagctacaagaggttatatataaatcaaaagcttcttgagtaaaacttcttagaattgtagaagctgctcaatatggaacatattctcagtcctcctctggtctacaaagcctgtgatttcttgtctatggacagaacgtctggtttaatctacaggaacccataact

SEQ ID NO: 7208 - DNA, 2300 bp, Homo sapien
gtcctcttctttccctgagaggcatttgcataactcaggtgcagccagaccagagatggcctgcctgatgttctgggccttctcctttaacttcctgaagctccaattcctccctctccggtgagactggggacatgtatccatttgagcttgactcctcaggggaagttagccttggtaaagggtggtagattggaacacgtgaggtgactgcaaaactggcttttcttgcctttcctgtgactttgcctttgtctctttaccttcctatgccgttgatttttctttcactttgggtttggcttgagctacaagcattttacagtatgctgccagacaggtttgcagccatgctggttgaatttgaattctatttagccataaatcgatataggagaatttgtctggatgccctgactgtcctccaaccgtggtcatcaccttaaatacatggccaattgtttccctatctatagtgccttcagccagccagccaacactaaaagagagtcatactatttcacagagagttcttaacatctgaggggttaccttgactccataattcctcacatagcctttcttaaaattttttaacgtgcattctaatggggtgggtctcaataattttcttcctatttcctcccagttatggcacagcacacttgctcagacttttgcttcagaccgaatcccttctgaacttgggcatccatttctccatttgtcaatccccaggatttttaccaggtctctgaggcagtgatagaatcaggtgaacatctcaatgtgagatgcacgtagaattgtaaacttccttccttctttctcactctagagggaaaacaaactacgtgcaattgctttgaatgactttgggtaaagtcacaggggagctgcctgcttttctgaatgagccagatagtctggggtttaaacgccctctagaggtttctcattggttactttgtttacaccttacggaaatgaagtagtggcccgcaaccagtttgaatggttgcgggaggggaccaaacagaggtactttccctttttcatctgcaatgcagtggaaagcgggaattggtggcatgatttgcaaagggagtaacctctgatccttttgttacttgattgtggagaggtgggattttccttttgattgagttctaggaagtgagtgtgaatcatccttaggttccctgcctccagatcctgttctgcctcactccttcagatctggggcatccctctccttgccagcctgcccctccccttggctcccaggaggctcctcaaggctgtctttgatgactcaggagaacctgaagtggggaaggcagccaggtcttgtttaaattcttacaatatattttaagacaaaagtctggcatatcttgtcagagttttctacatagattacctgtcacctgtgaattaagataattgtactaatttctttcttatccagaagcccttttatttctttctctttttttaatttcactggccaaaacatccagtgaggtattgcttctcacaagatggcattagctgtggggtctgtccacagaccctgacccaaacgacctatgaataactcgtacgctgagacactgatactctgttttgccagtcctgctgagtgtccgaccgcctgcacaccaagagaggtttgtcactgtggctggccctgagcagcttgcactccaggcatttattttgtatagaattaacaacagaagctttgaataaacacacttatggataattaacatggttgattgtagttctactaacgattaaaactcaggtaccatggtttaaagtaaattccattagggggcaatatctttggtcaatctcaccctgagagggccatctggctcaaagattagttagtggaggtagggtaatcagacttaaccggggaagcctctattgtccctagtatttaccctatgacctaatgctctaaggtaagaaccagctgccttcagcctgtttaattattacaagctatgtaacattttggccttccaaaaaggtttgtaaactattccctgttgctttccctaatgtttccctttaatatttctggcaccattctgagtgaatcccaacatttccccgtttttgttttcggtatcatgtctttttgatttcagattgcagatatgtacagccataggattgtcaggtgaggtggtcactgctcttattccggctttgcatcctagaattagcaaataatacaagacaattatgagtacaattagcaacatttgtttccagtctaa

SEQ ID NO: 7209 - DNA, 2300 bp, Homo sapien
ggtggacatatgcacacattctttctcatgttaataatttatttggaccacaccatttattactgttcacatttttccataaaactgctggttttatgccttgagaggttttagcaaagtgtttttctacagctgattgaaatttgtcatctgaatttagaaaattatgggtaaacaaggtttgtgccagtagtgttgcagggtctttacctatattcccctttttctgattttttactattgcttgacctttggagttatatgggatgcctgtggaatgttgaatattccacgtgtgataaaattgttgaaattgtcagctggcataagctggtccattatcagctttaatctttgtgggctatcctataaatgcaaaagttaaaagatgtttaatgacatcttgagtagactctacaggcagagcatgtgcattaattaaatgagtgttattatcaatggatacacacacatatcttagttttccaaatttaggcatgtgtgtaatatgtttgccataactgcttaggttccaatcctctagggttaacacttgttgaaggaggggacgtgcctgtgagctggcaatctggacattgtaggataattgttgtagccagcctctgagtaagttgaaattgtttagataagtttctccaattttggtggaaaaattgatgcgattgggtggctaggcctagcagtgatgtcatcacctgaaggtctgctcgttcattgacataagccaatgggccaggcagtgagctgtgggcttgaatatgtgtaataaaaacaggatgtgtacgttggtccagcaattgccgaagtcagaaaaagagtacacagagtgtgcaccagagtaaacttaattgaggctgtaaaagttctttaacaaatacacagagtaacctgagctctttgagtgccagtaaacctagatccagtgattggattatgtggtctctattagactactgctcttccatgtttaccagacccatcagtaaacagtgttaaagcatttggtatgggggattgcaatacggctttgaattgcattttacttaaaggaattttgatgatatcgagtcataacttagcaattgactgcattaatcattaagatggcaagctgaaataaataacgtgaagtttaaaaagaaaatctgaaagcatctttagaagcagagacttaaattatatattttaaccatgtgcttaaagccacaggcagaatagcttaaatgttgcaatggagttctcaggctgaccaagtttatggactttaatctggaaaacagtcttgaaaacagtgactcactaactggggaacttaatttgggactcttttagcaagtatgaatcaaagactatctgtaatcagtgggttaagacagtcattcatgcatgttttggctacacttacatataactcttcttcaccttttgagaagggcacaatattttcaccttttaattgaacaaatatcatttaattaggtttaaagttctcctctaagggtaatgtgtggttttacatgcctaacttttaattattctttaattcatgggccctccttaatctctctcccttcagaggctactgttttacttaaactggatttgtagagctacctcgggggtaggagagagataacagcagtggctattatctgaaaagaggtttttcaaattcttacattttacttaaattttagcagagaattataatttgggatgtcacttgtaaacaaggagcacaggaaattttgctgtgggctgtctgcaaagctagagagtcaggcaggtgcgtcctggggctttggctgctttgcacttgtaaaagcgctgctttttgcctgtgctggctccctcccgcaggcacccattggctgttcctggccagggtggaccccagcctccccttgggctgactttgttgtatgtgcctctcgcccctcccctgcaggctagctccaatggtggcttagctcttcgttgcctctgctgccatgtgggcggagttttagttttttctcactgcttgcttggcaatgcagctctagcttctaatgcccttttttaaccctttaggtatctgatcgctttgccaattttgcgttactgggcaggctaagagatcttcttttaattcagcctgcttaagacgggaactgataactgtagtgtatcctctgccttttttcttatctattggaggaagctcaggtaagacctccttttcctctctgttaattccgcctggtgattagggcccagggaagacgaggtgataaggc

SEQ ID NO: 7210 - DNA, 2300 bp, Homo sapien
catttagcattaggtatatctcctaatgctatccctcccccctccccccaccccacaacagtccccagagtgtgatgttccccttcctgtgtccacgtgttctcattgttcaattcccatctatgagtgagaacatgcggtgtttggttttttgtccttgtgatagtttactgagaatgatgatttctagtttcatccatgtccctacaaaggacatgaactcgtcattttttatggctgcatagtattccatggtgtatatatgtgccacattttcttaatccagtctatcatttctggacatttgggttggttccaagtctttgctattgtgaatagtgccgcaataaacatacgtgtgcatgtgtctttatagcagcatgatttatagccatcccattactgggtatatacccaaaggggaggagtagtaatttttaataggatggccaaaggaggccttattgagcaggtggcttttaggtgaagacttaaagaaggtaatagagtttttataggtctaataagaaaacagaatgcaggcagaagaaaaagaacagccaagtgcctgaagcagagaggccaaagagagtgaggtctaggacctgactggacagatgtcagggaggtgactggagtctaacttagagaactgttataaacaatttgtacctctttctctaaatgagattgggagttgctgcaggagttgcacaaagacatgacaaaatctggcttttgttttaaaaggagcatcctcatttgttattgacggaagactaaaggcattctccatccagaaaagactgctaagaactgtgaagcatataaaagtttaccctacttggggcaatgtttcatgaatgctgacagataacacaagctttctgggtcaaagacagagttttatgactcattcaacagggagaatgatttttgtgtttgtgtcagtcatccttgctccacaagtcctacagaggaaatacagaaaggcagattaatgttgcaagtgcaacagatgtgtgttgaagccaaggaaccctgaatttaggtcacctggatgttttataatgaactgcaagcaaacctgtctgaactttgctccagagggggacattatctttcttatactgatcagtaagcagacctaccctctgcttcagaagaaagcaatatctctagcttccaagctgtcctctttagaaacatccttgaaaagatagtcaggagaaaaggctgtcaatgtctctgctcataagacatacagaaatgtgagaggccatgaagaattttctcccagccagaattagcaggatgtcataatggattggatgtaaagtgggaggggaaaagatacttaagaataactccaagaatttttctttgaacaggtgaagaaatggagttgccatcaactaagttgagaaagactacaggtgaagtaggctgggtggagagggtggataagaagattgatttgagacataatgagtttgagatggctattggaaggaatccaagagatgtcaaacaggccgttagatacatatgccttgagtttggaaaaaatttgagtagtaatttaaatgtattagtcattggcaggtagattgattttaaagctatgggaccagatgggatcaccgggaactctgaagtgatccaaaattaagaaactggggaggaaagaagggtccacagatgagactgagaaaaagtagtcagtaaagttaaagaaaaaacaagagagtgtgttgtcttggaaaccaagtccattaaaggatgatctattaagatgagaagcaataattgaccactggatttaataacacagagatccctgatggttttaaaaagtgtttcagtagaatggtagcagcaaaaacccaattagatgaggttaggagggggattggagatagcatgtatagacaatcctttcaataaattttgctacaaactgttgaaacaaactaattacagcctgagaaggactctgtacttcttcatttgagtccttgtgggtaaactgtaacgtagcttaatcatcagacaaaattgaaaacctaatttagtagtgtgcacctgtaacaatactccagtgttggccaatcccagcagccatacttcaactactcatagactgctgaatgttcaaactgtgttcaaataaggcaagcgcccagttgtaaccaatctctttgtttctgtacctgatttctggttcctgtacatcactttaccttttttgtctataaattcattttgaccacgaggcacccccggagcctcggtgaatc

SEQ ID NO: 7211 - DNA, 2300 bp, Homo sapien
ttgatatttttacccattattcattataattgcttttctgtagtcttcacagtgaccactgactgtgtgctactcatatttacagactgtcattcacaaatttataatttctctttagtggacattaaacttattttccatatattatgaaaaattattttagttaaggaatgaaattctgatacataatacaacagatgtgaaccttgaaaacattatgctaagtgaaataagccagacccaaatggaccaatatcatcggattccatgatatatgaagtacccagaataggcaaattcctagagaaataaagtaaaagttattttatatacatatataaaatatatatattatatataggggtatatatatatatacccctagccaggggctagggagagagggaatgagtaattgtgatttcatgggtatagttgccatttaggatgacaaaaaggctctggaaatggataagcaccatgaatgtatacaataccgctgcattgtacgcttaaaaatggttaaacggttagttttgtgttatgtgtcctttacaacgatttttttaaagaaggtggggaggggtctccccaggtttttagcagcttcctgatttagaaaagaaatgttgatggtaggaatacaggtagagaacacttttatttgggtagatgttagaagctgaggccagggtggggtcacaagagcaatattaagtatgaggagaggccctcaacaaaggtcattgcaaggggatggagtagggaatgcacaggaggggtattttggacaaagattggcagctgataggtgtgggtattgttctcatgtatcagcccaggatataatgttcccagggcaaatggaacacaagtttttttgcggggagtgatatagcatggtagatcttgaattaaaacttttaaaatcttgaccaaaagctcaaaggagaagacaatagtgaaacacatgggtatgggcaattttagttaaatcaggtgagaaacagagcaaagaaagcacttggagatggggggaagaaaaagaccattttttttttgacagctacaagaacagcagagtcagacaggggataggctcatgtcagagatccagttttatttactaaaagttccttgggtattcaaacattctgaaattatgagatcttgcaaaaggatgcctttgtttaaacattgcttcatctagctacagaacatagtttaactttgaggcctttgaccccagacaagataaaatatgtttcaccttgcctattacttaacacatatttgttaactattttaacttcatggataaaaaatttcaaaaatctgtgttaactgatttgcaaatgattgtttcaaatatctgattcgtgggttccttctcttacattaattttgttgtaagttcttcacatttttaattatttttacatcattgaatataattgctaaatctctatatgacatgttgattaatatgaagtcaattaaaaaaactaacatatattaaaacttgttcttactttattccaggcataatgctatgcattttatacatattacattgtgtaatctcaatcctttggaaaacatgcattctaatttccagttccaaagttgtgagaaaacactttgaggttctgattggttaagcaacttaacaaagaagtatgagatggaactaaaatttgaaatcagcctaagctttgaacctatcagttgtgatgatcaccttctccaagttattgttaaattattggcacatttctaagaattctgaatgatatttcaacaaaagtttacagatatgtgttaaaatttttctatctgtttttaatttttgtaatgaaactgggataagttccaaaatggccgtaggtttgaaatatttggccctgagaaactaaagaaaatctatgcctactcctgctccaagttttttagtcatacctgttcttagagggctgatattttctgttgcagatgaaagaagaattctcaggcatataatgaccaaaatacaggaaaaaacttatgatggtagtggtggagtgttctgttacaggcatttgggaagctcacagaactcttaatattcacttttaattctttccacaagggaggaagggcatgggttttggagacagtcatatatggtttcaaaatctgactctggcatttatctctaagaacttgagaaatttacttagtccctctgagatttggtgtattcagaatgaatatgatactaacagtacctacatcacgagtgttacttgaatggagatgta

SEQ ID NO: 7212 - DNA, 2300 bp, Homo sapien
tccctttgcagctttgccctgagaggtttgatgcaatcccactgcaatgggaatccgtgaaagagtagggatgctcagggaatctgttgggccactaggaaaaactcatttctagctaatgcttatacggggctatggaagttgtctaacatccctggggacagagtgtttgccctgaaaaggaacattcccttggcacaaagcatcttgttggctggattttataataaacgtgacaagaatgcttttggccagtaactggtggttaggtcatattgtggtttgcaaacccataaagaggaaaaggcctctcatgtggttgggagaggtgggaatggatcatgcactaaggtcaggtctggtgaagttagggaataaggccagtgtttacgaagagtgattccttcatgaacccataaaagatgctcttgaaccctaatagtaggatgatgtctgtatttagagttgcagacaacatgttctgggaatacagaggaaggcaccactgcctctaccctgagagtatatcacagagaaagattaatatttggactagatggctgagagatgagtaggagtttgatagaagagaacaggggaagtgtctggatgtacaatggcagaagtggcaggaaaggctgaggagaactggcctctgggggtgggttatagatatgggcctgggcaccacattctggagcttgcaatgggttatgtaaaagcttagatgggacggtcttttcctctcctcctgtgggttcgtagtgggcccacctcactcactgctgcaaacaagctgcccccatttgagagagagctggagtggggtctctaagcctccagcaaccacttaggagccatccttgatgccctggcagctaactcttcacatggagaccccgtagtccatcctatcttgggaagacaatgcacacagggggaaggtaacatccccctccagattccagaggctccaaggagcctctctctctcttcaagaaaagaaatagtcactgagccacgggtggaggtgaacatggtttgggaccaacaggcggctggatggtttcacctccacggtcatacaatggtactgggagatgaatgggggtagggcgatctagaatcatttcaacctcaacttacaatggggtggtgcttggtagttgactcattgtggccccatttaatatttgcagtcaccagttggggtaggtgtgactgttgctcccatttcacagattaggacaggatagtttgctagaggtcacaggactagttggggaaaggaaagggtgtcaggtaggattttaaccttagagcctcacgctttcttaggctctttcagggagaccttgggcaaattcctttctctcttggtgggggggtctccatttcttatttgtaaattaaggagttcttccagtttgtgattctctgtactttaacttggataggttttttaaaatggggattatgggaaccccactatatttaagtagagtaggtctggggtgaggcccagtaatctgcagctttgaacaaaccccggcatcaacaaaactggttgagatactcaggaaagtttatggtgcatgaaaatcttattgcgagcatccaaaacacataacactgagctccatctgcagagatcctgttttgatacccttggttggactgtggctgggtaatttgcatttgtcagaagtgaggccagtcagctggtcaaccagtcctcctgtcactctgtgaccctcccccggtgtccgcggtgcttctttacttgcatcttgtgggaatgacatctgcgcaggcagccccttttagcaccgcccctggcacaggagctgagctcttaaaaaccaagcccagccctgagtttgcagatactcagggaaggggaaggtgcctttccgcatttggtgtagtcccgcattctgccatatgatggcgccagagaacgcgcctaccgggatagggaggggcaaggaggcgaggaaggaaaaaaaagagacaagtgaagattgacatccattaaggccaatggtagctcaatcttctgttctctgactcccaagcttcccattctcttaggaggctgcatttgtggcgctaaaaaaagggatgggcgtgggagattccaggacttgtgctcgctgaagatacaactgttagtccaaggtaactcccgctcgtagtggctcaaccctctttgtcaattcaccttcctctaagttaactatggctgctccacctgtctttagggaaacctactccccatcgcgctgggtgttttggag

SEQ ID NO: 7213 - DNA, 2300 bp, Homo sapien
agcttccctgtcttcctgtcatcatgtgttgaatgtccacttccctccttatttttcagttggagtggattagcatctccaattcgacatgtcaaaagtagaattttacacacacacacacacacacaccccactcctgacacacacagcatctctgtcctcagacttccccatccttctagttgctcaagtcaaaagcccaggaatcgtcattgagccctctgtttctcttatttatggaacatccataagcaaattccaagggctggcccttcaaaataaatgtggaatccagccatttctaacacttccaccattaccatctgaggtcgggctccaacatctttgcaatcctgggacagactcttagctgccttctcccttccacatctcttcttgtcctcccagagtctttaccccgcacaaacgctgctagggtgattttttaaaatatgtcagggtatattacccccctgcttcaaatcctccatttaaaataaatttcacatttatagcaaaatccagacttcttcatatggcccaccaggggctttatgctaatggaatgtgcagatgctcctccctgaggagcaccttttaccagggcaaattctctatctccaatgatgtcaggcaatttcgacaacaccattctctaccatctcttgcttttcatagatttgtttcctccagattctacaaaaaaagaagatcaagtctccttgtgcaatgatttactctctgatgtatattggtgccaggcacgtgtactgctttcagatgattcaagaataacagcgatttaagaaagctgtcgttaagttttctcttctctttgtctgtatgacattatttttacaattatacttccaaagtttgctctttccgaacacctcaagacccgtgtaatttaagcagtgattttaggggtctctgtatattttatattaatttcagaaacatgctcatgattattccaccaaaactatcaactgttacataaacatctgtccttctatgagttacaaaataattgtctccatccccacttaaccatcttctctccttctttgagcaacttctgaaaaataacacccaatactgatggcatctcattctattcagcttctcagacagtaagacgttcttttcttaaacagtaagatgttttctcaagccccatgcaaagcacttctttgatatcagtttggggaggtcgtactctggagccttcatccaaagggtaaagtacagcactcagtaatgcgcgtcctgggaacgaggcctaagcagtgctggccactgcctcctccaggctggcattgtctgtgttcgccagccccgccgcgaagttagctcatttgtgatcaggccaagtccctttagatttcacgcagacgcgggtgcagcctgctctgggacttgaagtccgctggagcctgggcctctgcattatccgggtggagctctctctgctgctgccgccaaaggatcccgcctggatgctcatcccgccaccgtcgcccaccccgccgctgcagaaaggcagcaactgccacacacctaagcaacttggcgggctattcgccctgcagctgccgccagcgcgcggctcccgccagcgcgctggcaatcaaaagtcggagaaagcgcgaaacctccaggcacctcccactccgcccagctaccgcgcagctcctccctagcctccactgggagacaggggacgcccatgagcgggaaagagcagggcggtgattgcttagtttatcctgggacacgggaactggccgtggactgagtggtgccggggaggggatcactgagaccgggaagggtcatccagacaaatagggagggtgggcgggttggcgcgcagtaccctcggcccggccttcagacccacctgcgcgcgctgcgcgctcatccggtccttcccttcaatcactgtctggagtgatgataattggcttccacagtggatgagagatgagtcatttacatccaatgagagaaaaacagcctccagagactcttcgtccattggccagcgagagtgtcagttcccaggctcctgccgcgcacgggcgagcccttctaggcgggaaaagttcagctgagagatataaaagagcagtctttccagcacctgcaaatccagagcggcgggcactgacgggcacttgcaccgtgtggacagactctccggttctgtgagtggtttttcttttcccgggtcggacctggagttcttagggggatggctgacaagggcagtaggcagaaggacctcagcccaa

SEQ ID NO: 7214 - DNA, 2300 bp, Homo sapien
ttgcaaatatatataaagtttaagaattgttattttaggccctttccgcaataagccaacacataacttatcatgccataaatgtttttaaaagaaatatgattaaaattatacaaaacgacataaaaatttcagaaagaatattgataaatatcttggtacatagtagatttagttgcacagatattaggtggtacaagttttatatcttctataataataactttttattatctccttgtgcactaatatttcaatatgtcaaagtcatttgaataacctttctagtaaatctcaacttcgtagattgaaaacttttttaaaagctttatttaagtttagtggtacatgtgcaggtctgctatatagataaactcatgtcatgggggtttgatgtacagattatttcaccaccaaggtattaagcctagtacccattagttgtttttcccgatcctctcccttcttccatccaccaccctccgataggccccagcgtctgttgttcccctctgcgtgtccatgtgttctcatcatttagctcccacgtataagtgataatatgcagtatttgatttctgttcctgcattagtttgccaagaataatggcctctagctccatccatgtccctgtacaggacatgatctcattattttttatggctgtgtagtattcaatggtatactgagttttctttatccagcctaccactgataggcatttaggttgattctttgctattgtgaacagcgctgcaaggaacatacgtgttcgtgtgtctttatgaaagaatgatttatattcctttgggtacatacccagtcatgggattgctgggttgaatggtagttctgtttttaagtctttgaggaattgccacactgttttccacaatggttgaactaatttacactcccacctagtatataatccttccttttggaaacaaattttatcagtatattcaattctgaacacccatgttttagaaaatgttaagcctattgtcctttaatcactatttgcttacacattaaaatgtaaaacaggcaaaagagaaagaaggaagaaaggagggagggagggaaggagaaaagtgagaaagaaagaaagataaaagaaaaaagaaagaagaaagaaagaaagagaagaaataaagagaaaaaagaaaggaagaaaggaaggaaggaatgaagaagaaaagaaaaaagagaaagaaagaaggaaagaaaaagaaaaaaagaaagagaaagaaagaaagaaagagaaagaaagaaagagagagagagagagaaagagagagaaaagaaaattttctccagattagaattattggctgctattgtttggatgctgggtactagctgtgattaccctttgtgaatgtaggaatgcacagattccaaaagtgagtctcatagaaaaagtcagcattcaaatatgttttaaggttactctatccaaaccccaaagaacccacagaagatgaagcagtaattttagcttctcttggtgtattgtacatgcatttaaggccagttccttccttcaaattcccatgtgttttgtagttaccaacacacctttcaaccctatctgtttatatacatcatatagtcctctgtcaattgcataaaagttgtcccctttgtgactgtaatcgccttttccaatacacatctactcagaatgcaggtccttaaacagcaggctgccttgaaaaccctctccaatcttcttcgatcatcagctttgagatgcatattcctagagcccatatcatcttcttcatcactatcataaacgtctccacatattgatgaacgtttggagaatcgatttatgacaagggagtttactcttcctgcatccgcggcttcttcgtgattttgtcctagtcaccgggcctatcccacctgctggggatgccgccccctcggaagtgcctgaaatctccccacttacccaactagcctcagcgcctcctgtgtgctgcagcagatggcgcgctgcagaccccagcctggtgcctccgcgactcctccccaaccatgatttacaggcggggacagccacattcctgcgccccaacttccacctccgcttcctgcgcgcgcgagactcaagctgccacagtggctctgccgccagcgtcccagctcctcccacacccgagtttttatttcctgctccctctccagcccggcccaggccagcctaccggcgactaggatgctttcgctttcgctctcgctttccaatactcgggactggggaaaccgggagaatagaagcagg

SEQ ID NO: 7215 - DNA, 2300 bp, Homo sapien
gtgctcactcactgcgcgcctcgccagcactcggcctggaatccagcgctcaacgcagttcccgctcgtatttgaggaagcaaaggctccagagctccagctgggcgggaaacggagcaggtggggctaggggtttgaatcgcccgccttttgggaaaaggttgtctgcgaaccaattggttactttctttcacttttaaatcagccgtgcctcttccggcctaaacctcaggtagctacagcgtgcagtacttgacgctgtgtttatatcagacagcactgccagtctgaaacaaaactttctgaatttcctaatccccagagccagcgtgagaagtagacttgagcctgttctcttcccttgaacttttcttttacacgagtacaacaaaaaacaagaacagagacaagtcgtagtgttgctagtgataaggcagatttttcaccaagcctaaaaagcttttaaaaatctggtcccataaccaaaggggttcctagaaagatttctttatgcctagggacaaaataaactcagcgcttgaaaaactgagcaaaaagaaactggagttcaacctgatgcaagatctactttctccacctttgagatcagggagagcctcaagaaggttgaagggacttcagggcacacactgattctgagttgagggttgggaggttgattaggtcttgctggagcctccaagaatgtcaaatgttggctcccagtaatatcaaagcaacctgttgataagacaaagctaagtttcttgctcacttaggtaatggagaacaataacttgacagaatttaagtggtgtctcagagagggaagagcaagtttgggctatatgtattgagattttgaagtcccattgtaagtctaatatttaatgaggggaattggttagaattgagtcagctacgggtaaaagtttaggattggtagataaaacaaggctaggattttgaggtaaaggttcaaagtcttagaatgtaaactgttctttgatgttttccattgaagagtggttggatctttgaagaagatactggattaagcaataaagatatttgcaactttccggtccctggcaaaagtttcttgaaatagtaaatgtatgttgatgaaaataatggaataagaagtcaggttaatgtagttggcaagctatgtgagtgtagatggcttcagttctcacaatagtgaacatacctgataatgtactcaacatttgtcacttagagtattttatcctggaaagaagcgtagttgggaaaacgcacttgagatgatgtttgctgcacacagaattcggacacagagatgtgaatctccttaggaaccattttcataaagttaacattgggtcttaatagacatcagtttttaaaaattagaacaggcttgggcactgcaaaagaaagacacatccgttcacttggctgttctttttaagtttccagggagagcgtcagtgcccctttcaacaataaaagcccgcaggagtgcagattttatttaccctgtccccaccagcatcctgctgcggccaatgaatcctggcaaaactccaggtcagccccagaaccaaagagtaactcacctaagaggaaggtccgttcccaccaagtctcagacgcctgaactcgtgatttttagggactttcccttccagtcccttggaatccagcactttggttggagaacagaactcacttggggaatggcgcgtctggccaatggaatgaaagatactggagtttgtcttttctcttcaggcagcaactcacctacttcggaagccgattggctgcgctggggacacctgttggcgtgcaaaaaagagtggttggaaaggcaaggccgagggggcgcgcctaccctacccacccacagcgctcctccttgacgccgcgagcaggaccctgtctcactgaccccgtgcccacggcggtccttgcctgcttctattctcccggtttccccagtcccgagtattggaaagcgagagcgaaagcgaaagcatcctagtcgccggtaggctggcctgggccgggctggagagggagcaggaaataaaaactcgggtgtgggaggagctgggacgctggcggcagagccactgtggcagcttgagtctcgcgcgcgcaggaagcggaggtggaagttggggcgcaggaatgtggctgtccccgcctgtaaatcatggttggggaggagtcgcggaggcaccaggctggggtctgcagcgcgccatctgctgcagcacacaggaggcgctgaggctagttgggtaagt

SEQ ID NO: 7216 - DNA, 2300 bp, Homo sapien
cctccgcgactcctccccaaccatgatttacaggcggggacagccacattcctgcgccccaacttccacctccgcttcctgcgcgcgcgagactcaagctgccacagtggctctgccgccagcgtcccagctcctcccacacccgagtttttatttcctgctccctctccagcccggcccaggccagcctaccggcgactaggatgctttcgctttcgctctcgctttccaatactcgggactggggaaaccgggagaatagaagcaggcaaggaccgccgtgggcacggggtcagtgagacagggtcctgctcgcggcgtcaaggaggagcgctgtgggtgggtagggtaggcgcgccccctcggccttgcctttccaaccactcttttttgcacgccaacaggtgtccccagcgcagccaatcggcttccgaagtaggtgagttgctgcctgaagagaaaagacaaactccagtatctttcattccattggccagacgcgccattccccaagtgagttctgttctccaaccaaagtgctggattccaagggactggaagggaaagtccctaaaaatcacgagttcaggcgtctgagacttggtgggaacggaccttcctcttaggtgagttactctttggttctggggctgacctggagttttgccaggattcattggccgcagcaggatgctggtggggacagggtaaataaaatctgcactcctgcgggcttttattgttgaaaggggcactgacgctctccctggaaacttaaaaagaacagccaagtgaacggatgtgtctttcttttgcagtgcccaagcctgttctaatttttaaaaactgatgtctattaagacccaatgttaactttatgaaaatggttcctaaggagattcacatctctgtgtccgaattctgtgtgcagcaaacatcatctcaagtgcgttttcccaactacgcttctttccaggataaaatactctaagtgacaaatgttgagtacattatcaggtatgttcactattgtgagaactgaagccatctacactcacatagcttgccaactacattaacctgacttcttattccattattttcatcaacatacatttactatttcaagaaacttttgccagggaccggaaagttgcaaatatctttattgcttaatccagtatcttcttcaaagatccaaccactcttcaatggaaaacatcaaagaacagtttacattctaagactttgaacctttacctcaaaatcctagccttgttttatctaccaatcctaaacttttacccgtagctgactcaattctaaccaattcccctcattaaatattagacttacaatgggacttcaaaatctcaatacatatagcccaaacttgctcttccctctctgagacaccacttaaattctgtcaagttattgttctccattacctaagtgagcaagaaacttagctttgtcttatcaacaggttgctttgatattactgggagccaacatttgacattcttggaggctccagcaagacctaatcaacctcccaaccctcaactcagaatcagtgtgtgccctgaagtcccttcaaccttcttgaggctctccctgatctcaaaggtggagaaagtagatcttgcatcaggttgaactccagtttctttttgctcagtttttcaagcgctgagtttattttgtccctaggcataaagaaatctttctaggaacccctttggttatgggaccagatttttaaaagctttttaggcttggtgaaaaatctgccttatcactagcaacactacgacttgtctctgttcttgttttttgttgtactcgtgtaaaagaaaagttcaagggaagagaacaggctcaagtctacttctcacgctggctctggggattaggaaattcagaaagttttgtttcagactggcagtgctgtctgatataaacacagcgtcaagtactgcacgctgtagctacctgaggtttaggccggaagaggcacggctgatttaaaagtgaaagaaagtaaccaattggttcgcagacaaccttttcccaaaaggcgggcgattcaaacccctagccccacctgctccgtttcccgcccagctggagctctggagcctttgcttcctcaaatacgagcgggaactgcgttgagcgctggattccaggccgagtgctggcgaggcgcgcagtgagtgagcacacagggcgctggggtgctccgcggggcgcggtcacgggcgcggccgcggcgggctcgagtcccggctggg

SEQ ID NO: 7217 - DNA, 2300 bp, Homo sapien
agttttgatactttccatttttatgactagaaataaaagtagcccaataaatttttaaattactttttcttcagtttgccttctgtttcttttccagaaaattctacccccattttctcccttcccttctttcacactgagacacttctacattgcctgttattgtgccacctctgtgttgtataggacatgctatggaacaggcattttcttttgagacagcccaactaaattttgaatactggtttcccctctaactagctatgtaatctagggcaaatagtttaaattccttaagtcctgtcatttgtaaaatggtaataataatggcctatgatataattagtcgaggtatccttgttttctttttgttcttctaattctgaaactcgacattttaatgagtggtattgtttaggttggattaggaacagtccccaaataagggagaggccgactaggcattttggaggccaagctgtgcaagaagaccagaaagaacaaagctcagaggttccttgagcctggtgcctttaggggcctgaagaagaacagatctcacactttttcttttgctttgtatttagaactctgttgggagaaagataaaggtagaaggatgcaaaattctaacaatgggagaaatgacagctgcaaggagagggagggggaagcaactcttctaaaacataaaagggtcatatgatatttatgaaaaaattgattatttcaaaaagattcacaatcccattctctaacacataatctatttttactttcccgcatcctataacttggatcttgataagactcgattcgttgttttatgtggtttgcaatctcaacaaaacaaaatttgtgttctttgacaaggataatgcataatcctgacttcagtcttcccttttagtcagaacctacctatttaaggttattttccatattaactattgatgatcaaaataagtctaactcgtgtttttcctagtgtttcataattttagttacagaaacgatgcagataaaattaatctaacatgcgtcttcctgactctagtacgttgaatctggccagaaaaaccacatttgctctctacgtaggtaatataaatccatcattagcgaaattgctgcatccctttggactgggtctcattagcagaggttggagtggccactggccggcacacgacactttaggccagcagggggcgggtaagctccagggcactcgcccgagcagcagggggcgtgtcttctgcttccttgacggacagctaaggatgcgggagaggatgaggtaataggagccggggcaaggaaggagttggggtgcgcgcgcgtgtgtgtgcgactgtgagtgtgccagtgcgtgcgcaagccccgagacaatgcgtgtctccagttcgcgctgcggacactgatcatgctgcattaaggaaaaaaaaagagagagagagagaaaattacatttgggggaaggaggctgcaaagttgcggctgggcgacagtggtggtcccggggccgtgtcatggcgggtcgcttctctgcatcaaggaaccagggaaacacacgcgggcgcgggtttgccttagcgccctgcttgggaggggtggttcattctggaaggaactgagcagagccacaggcagggggagctctcccagcggcggggactgcaattcgtgcggcgaaggggtggggagggagggagagaggggaggggaccagagcgtgccattccgagcgcggccgtgcggcgagatcccaccccggcgtctgcagaggccgaggcgcaactggtgcgagggctgggtccttgcctcgccgtcagccccagctcgcggccgccggggctcgggccgcgcgcccgccgagtggcttttgcaaggcgggggcctgtttgcagagagccgggcatttgcatgaagcgactcgaccccacagagcagcggcagcagcagcggaccccggcggcggcggcggcgcgcggtcccagccaggcggccccggtgtcccggccccggtggatgcacggctggggaggagcccatgggccggagctgaggctgcccggggcggcggggcgcggggcagggggcgcggtcgaggcccggaggcggcggcgcaggaggaagcggaggaggtcgggcgctcggggcccgggaggcgggccgcgcagcgccgcagccccgggctcgccatgctcctggcctcggccgtggtggtctgggaatggctgaacgagcacggccgctggcgtccctacagcccagcggtgagccaccacatcgaggcg

SEQ ID NO: 7218 - DNA, 2300 bp, Homo sapien
ccttgaaactacctgtcctggaagtcctacctggagggggctgggacaatctgcggaatgtggacatgggacgagttatggaattgacttactccaactgcaggacaacagaggatggacagtatatcatccctgatgaaatcttcaccattccccagaaacagagcaacctggagatgaactcagaaatcctggaatcctgggcaaattaccagagtagcacctcctactccatcaacacagaactctctcttttttccaaagtcaatggcaagttttccactgagttccagaggatgaagaccctccaagtgaaggaccaagctataactacccgagttcaggtaagaaacctcgtctacacagtcaaaatcaacccaactttagagctaagctcaggttttaggaaggaactccttgacatctctgaccgtctagagaacaaccagacgaggatggccacctacctggcagaactcctggtgctcaactatggcacccacgtcaccaccagtgtcgacgctggggctgctcttattcaggaggaccacctcagggcctccttcctccaagacagccagagcagtcgtagtgccgtgaccgcctctgctggacttgcctttcaaaacaccgtgaacttcaaatttgaggaaaactatacctcgcagaatgtcctcaccaagagctacctctcaaaccgaaccaactccagggtgcagagcattggaggggttcctttttacccaggcatcaccctccaggcctggcagcagggtatcaccaaccacctggtggccatcgaccgctctggcctgccgctgcatttcttcatcaaccccaacatgctacctgacttgccaggccccctggtgaagaaggtgtcaaagacagtggaaactgctgtgaagcgctattatacattcaacacctaccctggctgcacagatctcaattctcccaacttcaattttcaggccaacacggatgatggctcctgcgaggggaaaatgaccaacttctctttcggtggggtttatcaggaatgcactcagctctcagggaatagggatgtcctcctctgccaaaagttggagcagaagaatccactcactggtgatttctcctgcccctctggctactccccggtgcacctgttatcccagatccacgaggagggttacaaccacctggagtgtcatcgaaagtgcactctcctcgtcttctgcaagaccgtgtgtgaagatgtgttccaggtggcaaaagctgaatttagggctttttggtgtgtggccagcagccaagtacctgaaaactcaggactgctttttgggggcctcttcagcagcaagagcataaaccccatgacaaatgcacagtcatgcccagccggctactttccactgagactctttgaaaacctcaaggtatgtgtttctcaggactatgagttgggaagcaggtttgcggtcccctttggcgggttctttagctgcacagttgggaaccccctggtagatcctgctatatccagagatttaggggcaccgtctctgaaaaagtgccccgggggcttcagccagcacccagccctcatcagcgatggatgccaagtgtcctattgcgtcaaatccgggctcttcacaggagggtccctgccccctgccaggctcccacctttcacccggccacccctcatgagtcaggctgccaccaatactgtcatagtgaccaattctgagaatgcgagatcctggattaaagactcccagacccaccagtggaggctgggagaaccgatagagctgcggagggccatgaatgtcatccatggggatggtggtggtctgtcaggaggggctgcagctggggtcacagtgggggtcaccaccattctggctgttgttatcaccttggccatctacggcacccggaagttcaagaagaaagcatatcaggcaattgaggaaaggcagagtttggttccaggcactgcagcaactggagacaccacttaccaagagcaggggcagagtccagcttaaatctctccccgaaaatggtttctctcatctccagtgtggtcattgctgaccactctgttttcctaagcattgaaatggcaagtgcaaccaaaagtaggtatattcgtgacttcttgtttaggtctctgggccaggaaattcatactgttacatggataaggttgggattggggagagggaacagttgggactagaagcaaaagtgattctgggactaaaataggaagcagatgtcctttcccaatgtgtgttgctgtc

SEQ ID NO: 7219 - DNA, 2300 bp, Homo sapien
aagagaaagcagagggtaacaaattgtcagcttgtctccaaagcagtgtgagagtattctaattttgatgaaccatcccagaaatagtttgaagagaagtatgtaggtatttcaacagacttattggaagtactcaagggcattcaactctcatttttctaattctgggatcatgctgctgaggtataaatttatggctaactgatttataaattaactagaacatcctgtgcaaagatttggttctttagccaaatacagactaggcactggttcataaattaatccctcttaggtggctggtgtcacttcccagaagcatgataactgtggcacaaatagaaccagaatggccaggtgtggtggtgcatgactgcagtcccagattcctgggaagctgatgtgggaggattgcttgaatccatgagttctgggctgtagtgtgctatgccagttgggtgtctgcactaagctcagcatcaatatggtggcctccttggagcaaatcaccaggttgcctaaggagggctaaacgggtccaggttggaaatggagcaggtcaaaactcctatgctgattagtagtgggaccatgcctgtgaatagctactgcactcaagcctgggcaataagcaagaccctgtcttggaaaaaaaaatatacccggaatgcagtatttctagatttatagaacaccatcatggttttgataataactggtgaagcccagcctgggaagcaagataactagcctcattctttctaaaaacacttctttgctgcattaataaccaacagaggaattcaactccttggaaccttccttccaggatgcatacaggtgatggtgtagtgatacctgtgaattgcaacatgactttttcagtctcagtactgtatctagttcatggtataatcttgggaatgttaaggatgcaactgggagcttcactaagtcctctggattccctggctaccactaagcatactaagacatagcctaattgtcccaaagaattaacagagttgggtttcaatcaaacctgtcaccattgttttaaattatgggctctaatagagctggcattggaacttgaaaagaaactcatgtaattatattcttctaatgatatagcaaatgaatttttgcttttagaaaaaatattgggtagtgaagagccacattcttttttatccacctaaactgattacacacacttagcaatggaacaaaaaattaaaggtataacaggtaccaacttcatacaaaatgcacacacacagaggatatataaatgtgtgtacacatacacatatgttccttggcccctgtctgctgttgataaatcaaaatctagataatagtgtggttttgtcttgaacatttctatctgaatgaaaacaacacagtgtaggagttccttgccctcgctttgaatgcttaggacaatgcaaattggggtttcccagcatattgcaaccgaatcctcttcaggccctgtcagctgtgctccagacaatgccatccccaaagacagaattgctatggttcataacagtgaaacccacaggacaagtgtccaagagtttcactcctttcttttgtggaaacagcctccaccctcaggcaaagaggaaacccagggttggccttgactaacagcttgcataggtatggtggagccagggtgtttcagtaagggtggtgtggtcatttgcctctgcatttatagtaaaagaaaactgataatggagtcccaagagacagcagtcagggaaaatatgaaacatcaagtccaagagaatgagcaaaaagcaaagccaaactttctggtggaggaagcagtagggtgtggggtcgggatttttttctaagtgcacacccctgcagcagagtaaccagccagagctgggggaaaaattaggatagctacctgttaggcatgtaggggtgtgtttgcatgtttagtacggcataaattcttcaaagacctgatggtctttaatattccaaccaactctcgtttccccattttgtcattaaattagcttaaagaggaacttgtagcttttagagaactcatgagttttccgcttcatcatctgcttctgttttctccatcttagtttgcccaaagcttgctggccgctgtgtagggctggtgagtggctggggctgtctgagccatgaacaacttcagggccaccatcctcttctgggcagcggcagcatgggctaaatcaggcaagccttcgggagagatggacgaagttggagttcaaaaatgcaagaatgccttg

SEQ ID NO: 7220 - DNA, 2300 bp, Homo sapien
ccatttgtaacacatttatttcagttccaggctgagagccctggggcagttagcaggacacatgattgtcagctggcaacagttggggctttactcaattttaataccaatctcatctgattgtaattactccaccactgtcatgttcctccacaaaatgttttttaaaggatacatttattcactgaatcaaatatcattactgatttatcttctatgaaggatgactgttctctttgttaatgttcacaatcaagatcttgggctgaaaagatcatccaaggagtctgaagtatcacagcgtgtgggaaggtgggaaccaggatacccattcatttccaactgagatacagagaagtgagtcacagaatttgagccctgctctcctgactgcccagccaaggacactgatttctatagcccctttacttaactctgcctcttaagcattaaaacgttcttctaaacctctgagtgttttgtgggttctgagtgttttgtacgttttagccaagttaaccacttgtctgcaaatactgactttcctatgaattctttgaagattattgagtcagaaaggaaaaatacagccccaaattcccagacttttaatgcattaactgcctattgaaatgagaagttcttcacaaacttatattcccactaacaagatcgcacataaatatgcattaaagtatgtactaagaaaccctctgtccaacggctcatgcatatgaagtccgaacatgggagtttgccagttgcattcatcaagtcgttttgcggagtcagatccctgatggaagagctcacaggctctgccttccaagtcctgggtccctaactggtaaccttaggctagggtctgtggggagaccaaccctggcttccaagaaaaccacattccatggactatcagaaatagacacagatttgggtgacaaaggaggctctgcatttacattttatttttgtgttcttgtcagttttgagatgattaacattaaacatttatttgagaaacaacaggcagaagcaacaattcaaacatacttcatattgtagtcaggcgaaggaacctttaaaaatgaacattcacaattttaacgatggtttttctcccacatgttcacttacttattttcccagccatattgtctgttccgttaggtgaagagtctaaccaggtcaaatgtgtgggtgagaacaatgtggaagatatattttttaagtgggtgctgaagggacttttcccgcatccagtggtagggcttgtggttgccctcaggaagacaacccaaatccctcacagaataggtgcactaatctacaaaaggcggaaggttaacaacagcaacaattttgtggttgttcatttgccatttattgttctgcacagacacctcatgaacaccaggtggcgatgtcctctctcagagcaacaccaaagacttcaaaacactccagttacaaaccgaacaattcacattaggacattcacctgcctctcccagaacccccaatctaatgccggggaccacagagaaggaaaggggtcaggggttctttcttgtaccacatgcgcattcccccaattctctcatgcatacaatagtgcatcaccaagacgagtacttttgaccaagtataaaaccacacagacaaccaaatttaacaaaaagcggaagagaatgaaaacacaaaggcacccacagccacgtatacacaattaaccttttaggggatgggcacctgacgaggtttgtctccacttacatttgccatccctggagactctggaagggagaaactaggctgctggtgctaagaccatgaaagggaaggcatggaatcccctacttgggccaggagagcacagcagggcttctggtgggaaaacaccctgtgtcaaggtagtagatgcacagggctcagctggcagggttctcactgaaatctagactgcacctttccaggttggcacaagagaaagggcagaggaatgctccccgccttgctgggcgtagtgttagaaaggaaattcaagatccctactgcccagaaagccacacaagaacagcacgaggaggaggaaatctcactggacatctgcagagaggacaagaaatggggcacccacacaatcaaaaccccaggggaaaaggcttgaaggtatgaaaacgacctctccaagtggtattgccacaggcacagcggctccctttccatcttgagtcctcttccttctgctcctggccacccctttccccacctatactttcttctccctgacgtgggga

SEQ ID NO: 7221 - DNA, 2300 bp, Homo sapien
tccaattaagcatttgattgtatctctttaagttttttttcaaatttagaacaatcacccctgaccatttttatgacattgattttccttgatctttatgtcttatcttctataaaatagttgtcttatagaatgcttcacgttcttgatttatctgattatctccttggggttatggttcaactggttcctccagcccagtaaactggagtttagatccaaagccttgattagattaactttcagtattttggcaagaaaacaccattaagtgatgctgtatactttatgctgcagcacactgggaacttcataaaaatgttggttgtccaagggttactgatacacattggataactgggttaaggtggggactgccagatctccccattgtaaaagtatgtttctcctttgtgatggcaagtaacctgtgagatgtgtttggcaacacaactcacatgtttgtagctatctacagtttatcaaacacattcaaacgcacttaatcacaacagcatccctgtgaggttttattcctgtttaacataagtgaaaactgagacttggagtgcttaaataattttctcaaagtaatagacccagtaagtagcaaaagcaggactcaagcctaaatggattaactctagctcagttaaaaaaaaaattaatcccaaatagcctacatctaatagcagattttattttgctctacacattcagagaaattcactagtaatgagctatacaaatgatccctgatagtaaaaattgcagatttttaaagagtattctctctccagaattcaataaatacttcgcttcttttgaaacgattttcttaaaaaggatactttaatttattgacactgggaagcacattggcaaagaaagtcaatttcttttacagtatctaatagctatttctattgcctgttcaaactagcaaaatgtaacagatgctagattccctaaagtacggcgctttaggttacatttgcaacaatagcttacatctaaatgttacattagttactgaatttgtaatcttcacaaatgtgtgaatagtcagttgatcaaaaataacgatttcctgctacaagagaacgcatagcagaaaatgttcccaacacaaagataatgtttgagatgatggatatcccaattacactgatttgataattatacattgaatacatgtatcacaatatcagatgtatccctgaaaatatgtacaactatatcagtttaaagatataaaaaaaattttctgtccaaagttaaatatgtacaactacgatatatcagtttaaagatacaaaaaataataattttctgttcaaagttaagcatatacatggcacctatgatgctaaaaccaagggcctttaggtctggaagagacacataaagtcaggtcctcgcgaatctacttctgaaggggacagaatcggtataggcatatgacagtctagaatcaagacacaaggggtgtggagcgataaagagcaaacagggaagggaactagggggaccatggatccaggaaggggctggaaaagctacttctgggcacccctggaatctgggtatccagcttcgagttagaagggggtccttcaagagagcctcaggcgggggctgactgccgagagttactctgtcctccaggttcttcctaacaagaagctacgaagttcttattcagaaaaacggaacacgacatcacacccacgtgaaaaaaacgcttttaagaggccaagtcactttcacctcccaccaacttgccaaaggctgaaagcaggcggacacgcccccaagcgctcttctccgatttcattggttgccccggcctgctcctcattaggtctctctcactggtcagcaatgccgctttcacagccaattctcagaaccaatcatctccaactattgccccgcctctccaccacgtgagtggcataggtgccaaccaataaaaaaagaaaataaggatgtaaagacgagactccttccctttttcctcaactcgttcagtaaatggtagaaaaggtggagcagctgataccaaccaccaatccatgagggcggaaaaggatgatgagaagagcgatgggagggggtgacgtggcagtgacaggcgcataaactgaaatgaatggcggaaacagcagccaatcggcgatcagattggccgggcattccgcattctcccgtcctccctgagcgctggaaacttcaggaaagcaccaatgagcttccccaaaagtctgattggcctttatctgaaccaatcaaaggtg

SEQ ID NO: 7222 - DNA, 2300 bp, Homo sapien
tgggattacaggcgtgagccaccgcgtctagactattttactgtctttgcctgctagaatagaagtcagagagagacaaagaatggtggtttgaggaattttttaagttatttcatatggttttctacattaaaaaaaaaaaaatctcagtctttctataatgagtttgtctttagctagtagtcctaaactgtgaaattgtttaactaatactgtggttctgacctagcatgctgtggcctgcttttgtctcccttcttagacctacagcttactccttgatgtggaggactatgaaagacgttatctcctaagtctggaagaagagcgacctgccctaatggatgacagaaagcacaaaatttgtagcatgtatgacaacttaagggggaaattgcctggacaagagaggtaagcatcgtgcagtttgaggaaaacattaactggactccttcctctgtcataactggatttcatacatttttgccttttaggtacacttccctaccatctctgtaagctcagaatctatccttttagcctaactcaaatgccacttcatttaaaatacgaattatcttttccagtgaggaaagaaaaaaaaagtctttatcctgaatttattcattcaacaaatacatagtatctgctggggacagtgctaggcactagagatatagtgggtaacgttattgggtttttgtgcttacagattgcacctgatttatgattactagcatgtttaaccttgtaatctttatatatttcctttattactaagatcagatgtacaaacatttatacttcctgggatttccacaaaatatttatatcctatcgaaacccttcagtcttccaatggggaatccctcacctaccccattatctgcaaaagaatcttgctgatgttaaatgttctgtaaatcctgaatacttattcgatgtattcaagagaactacaacttctaacaactccctttctttttacccgttcaagagaattacttatccttctaagccaggacatacacaaaaccaaacataagaataagcactttgttttcaacacaccgtgtctggagttaggctgacagggaactggttaaataaatggtttatccatagattggatgttatgcagccattaaaatgtatgtagttgaaatatatttattgacatggaaataagttgttgagtgaaaaaagtcaaggtacaaaaccatatgaattatatgggcccatttttttatgaaagaaaaaatatataatacaaagcaaaatgttgtttaaaatggtaacactaattaactctgagttgacgaatgtttttattttcttttttcttttttttttttttaagctgttgctgttaaccatatggtatttgtgtggttacttaaaagttaagagaggaggccaagcactttgggaggctgaggtgggcagatcacttgaggtcaagagttcagagaccaacctggccaacatggtgaaaccctgtctctagaaaaatataaaaatcagctggtcatggtggcgggcatctataatcccggctgctcaggagactgaggcaggagaatcacttgaacccaggaggtggaggctgcaatgaaccaagatagcgccactgcactccagcctgggtaacaaagcgggacttcgtctcaaaaaaaaaaaaaaaaaagaaaaaaagttaaggaaattagtgcatacagttggccaagttttttttaaccatataatttgtgaaatgattattttctacatttgtaagacctgaaaatttactttttatttggttgagatttggagaagtgattcctactgttttatagtacaggttattagagaatgaaaatgaatgcagtatattcattcagtaacatctaagaggaaaaaaatgagggtttcttaattgttcttgctgacctaagctggcatttttcttccttgcaggcctagtgatgaccactttgtacagatcatgtgtatccgaaaagggaagagaatggttgcccgtattcttcctttcctctccacagagcaagcagctgacattctcatgacaacagccaggaacctccctttccttatcaagaaggatgcacaagatgaggtgactatgcaagatgggacatctttcttttgagtctttataagtgataagatttctagaatgcaaacttattttcctctcctcttcccttttgtatttttgtctaatctttggctgtgtgatttgattatttaaaacaaaacctttagtatttcaggcctatatttttaatcccatattt

SEQ ID NO: 7223 - DNA, 2300 bp, Homo sapien
ttttattttgttggaattttttttttttttgtctttgcagtgcaatttgagggctctttgggaaagcttaccgtttctagtgtgaataatccccgaaaaatgattgatgctgttgtgacatctcggagtgaggatgatgtaagtgtcaacacaattgtctgtttaagaacgtctgatttgtgaccacttcttttggggtcaccatggaatgagatcaggcatggtagagttgtttgtagtctaacccggggcctcccacctcgtcatgcattctagttttccacagatgtgctgcagtattaacaccttcatttctaaggcagccaggcagggactagggtggcaggagtctttggattgggtagctctggctgcaaacagcatgtatttactccagtttgatgttaaaaaaattatcattttctatgtgttttaagattttcaggaagaggatcagaaagaataattatggggcactaggcttagtacctgggtgatgaaagaatttgtacaacccccatgacataagtttacctatgtaacaaacacatgtaccctataacctgcacgtgtaccattgaacctaaaattaacgtttaagaaaaaaaaaagattttcatatttcatatgatttccttatcctctactaaggttgccctttgcctatctgtgaatggaatttaatagtttgtggattgattcagtcaactttgacctttgttcatactagggttgttttagattattaactttcagagaatcaattatcttctcaaagtattgtcacaaatgaacctacaaatgcgcacttggtaaattattttaacagagataaagaatttgcattgaatagtcttctcttttttaggagacaaaagaaaaacaagttcgagacaagaggagaaaaacccttgttataattgagaaagtaagtttagaatttgttgctgtagttagtttcaaatacggaactgtcaaatgtatgtatatactagaactgaaacagtgagcaatcagtcaatgttctttggttttaattcatgaatatattgctggtaagtgactattgtgtaccacataactttggaaaggattatggtatgtttcacctattggcatcatggaaagaacactgcagttaaagttggaagtgtattgggtttttgtccaagcttattcagttaacagctgagtgtctgggcaagtcacctttctaagcctgataaaatgggaatgaaaattacattgtcctacctgtggattaatttagttcacagatatttactgggcactattctgggtgctgaggaaaataatggatattaatagttgatttgtaaaatgtaaataccacattgtaaggccatacaccatagtggttgaaagtatggactctagaaccaagctgcaaatcatgtctttttccatttctgagtctgtaacttaaggcaagttatttaacctttctatgctgtcctcagtttctttatctgtaaaaatggagatgatagtagtagttttctctttggattgcttttttttttttttttttttccttttgagatggagtttcactcttgttccccaggctggagtgcaatggcgagatcttggctcactgcaacctccgcctaccgggttcaagtaattctcctgcctcagccacctgcgtagctgggattataggcatgtgccactatgcctggctaattttgtatttttagtagagatgggatttctccatgttgttcaggctggtcttggactcccaacctcacgtgatccgcccatctcagcctcccaaagtgctgggattacaggcgtgagccaccgcgtctagactattttactgtctttgcctgctagaatagaagtcagagagagacaaagaatggtggtttgaggaattttttaagttatttcatatggttttctacattaaaaaaaaaaaaatctcagtctttctataatgagtttgtctttagctagtagtcctaaactgtgaaattgtttaactaatactgtggttctgacctagcatgctgtggcctgcttttgtctcccttcttagacctacagcttactccttgatgtggaggactatgaaagacgttatctcctaagtctggaagaagagcgacctgccctaatggatgacagaaagcacaaaatttgtagcatgtatgacaacttaagggggaaattgcctggacaagagaggtaagcatcgtgcagtttgaggaaaacattaactggactccttcctctgtcataactggatttcatacatttttgccttt

SEQ ID NO: 7224 - DNA, 2300 bp, Homo sapien
ctttgtagaagatatgtaaaaatatgactatcttttgcttctaaaaggtctccttagaatagactctttttttttttttttttttaatgtttttgagacagagtctcactctgtctcgcaggctggagtgcagtgacccacacgatctcggctcactgcaacctctgcctcccaggctcaagcgattccactgcctcagcctcccaagtagctgggactacaggcgcctgctaccatgcccagctaatttttgtatttttaggagagacagggtttcaccatgttggccaggctggtctcgaactcctgacctcaagtgttccacctgccttggcctcccaaagtgctaggattacaggcgtgagtcaccgcacccatcccgaatagacttttgtagtcccttaagttaacctgtatgaagttatcctctactgacaacattctttaaaatttcaagtcatcaggatgaccaaactgagaacctcttttccgtttttcttagatctcaggccccaatgtttagaccggacacaactcacctccatccacagcaccgtcgactcttgcatcagagacagcaacagaatagaaggtaagtactcatccgattcctttatggcttcttaattcagcttttaattttaacagtgtaacaacatgctatttagttgttttgttttttttagtaagtttacttcatatccataaacctggatgtattatcaacatgtaaatatgaaaagcataatattgagtaaagaagcaaggaacagaattatatgtaccatttatgtaaaactaaaaggcacacggaataatactgtgtaatatttaaagacagacacacaagtaataaacgtagaaaaacatttcagggaggatacatccataccaagggcataatagtggttcctctatgaaggaagagaagctggaaactgggtctagaggggtacaacagggcctctgtcagtgtagcactgtgttattttaatattactttaaaatatttgaagcaaattcaaccaaatacatttttttctattgggtcttggtgatgggtaaatggatatttatgatagtatttgctgggctttttctctgcatttgaaatatttcgtgatttttaatgagttaaaacaatttatgtagacttcagagctaaatcgcctgtgttaaaatcccttagtccaccactagatgtatggctttggacaaattacttgatctctcttggcatcgatttgttgtcttaagtggggaagagaaaactacctacctcacagagttattctagagcttatacaaaagtccataggtgaatatgcttagcatatggtaaggtactcaggtcttagttttatttcttcattatttattacatagctctttcctcttaaattctattaagacttagttctttttcactccccttttaagaaaagcaaacgggaatctttaaaaaaaaaaaaaaaaactggcctggtttattcctctgttgttaaaaagcgtaattaatttgcccacatggaatgaatgtggtgtatgtttttcagtcagcatcggaatctcaatggtgcgggagatagaggaagtcaccggagcagtcatcaagatcatctccgaaaggatccatatgccaatctcatgttgcagcgggaaaaggattgggtctctaaaatccagatgatgcaactgcaaagcactgatccctacctggatgatttttattaccaggtaaatactctgtgctagttttgaggataatagtttggtcccctacactggtgagggtattcatttaaatattggtacaattaaatatttgtaaaattttcttttgaggtacttagcatcttgcactattcactatcagtatatttctagagctgaacttgtgttactgtcactggcataaattatttgatggtaaacaacagtcgtgttctgtgcttgtgttacaactgaaatcatcttctcgtggtagaattactttgaaaaactggagaaactgtcagctgctgaagaaatacaaggtgatggccctaagaaggagcgcaccaagcttatcacccctcaggtggccaaactggagcacgcctataagccaggtaaggtcctcataagaaaaatgcccataataaaagaaatttgagaagctgctgatgtgattaaatatagacaagtgtatatgtggaaggatatgcaaagatgtttcaaagtgattttaaaagtaccattgttcttaataaatgcaaaaatcagcctttattcacgtctggactgaacgctttgacatg

SEQ ID NO: 7225 - DNA, 2300 bp, Homo sapien
agcagaatggaataagattggagagaactggagtgagatgcgttggaagtaaggtctagctccagagcagctgatagagggttctgaagattgtaatctgtgctgtaatgggattccaaaacagaaaaaatgatgccaacataccaaatgcagaaacaaccttaatgtcagtgctacagactttatagtagtgtgcagtaatagcagacatagttaagataaaagaggaaatgccccttcctcttccctagcctgttttcagcacagcagccagagtgattcttttaaaagttaagccaaatgaaaatttccattggcttcccatttcaatcatagtggcccagaatgagctccctcctcatgacttcttgacctcattttcttctactctccccaccctgctcattccattccagacacagtcctccttgccgtttctcaaaaccatcaatctctcaccttaaggcctttctttatactgactgtccctctgcctggaaccctcttctcccagatatccaaattgctaaccctcttactctttagaatctttgctcaaatgtcatcttctcaatgaggcctacctctgaccatctatttaaattttcaatctgcctttcttcctttatattcctacagcaatttcatcttctggtatagtatctaatcattatgcttattgtctatcatctctctctttcctgcttgcatgaaagtgttatgaaggcagaatctctgtgtctttttgtacaccaatgtatcccatgcgtctaaaacagggcttgtcacataatagatgcttaccaaatattaattgaatggaacgaatggattcaaaagcatgtaaagaatgtggcacttaaaatctaagaggaagttgtatgctaatgctatgagttttaacttccctttaaagtttttgcttgaaatgtcatagaatctcaaaaccaactagtagtactatacatatctatcaccaatttgggaaacagtttcagaatatagtttggacattattgataatgttttaagctattaattcacatgtttgaattttattcctggtataatgttatttgcttttacttataaaaagcatgctttacgtgtcccttagtttaaaccttatttcctgtttctaagtgtaaacttaactttctacctatcttctggaattattcatttgcttagcagaagaattgtgtaggccgggcgtggtggctcatgcttgtaatcccagcactttgggaggccgagatgggtggatcatttgaggtcgggagtttgagaccagcctggccagcatggtgaaaccccacctctactaaaaatacaaaaattagccaggtgtggtggtgggcgcctgtagtcccagctactccagctacttgggaggctgacgcagagaattgcttgaacccgggaggtggaggttgcggtgagccgagatcacgccactgcactgcagcctgggcgacagagtgagactctgtctaaaaaaaaaaaaacaataattgtgtaaaacttttttgtaccactatgaactatttcttacatgaactgtgtcatcttatagatgatgattggcaggaagcacatgagcgcctggctgaattggaagaaaagctaccagtggcagttaatgaacaaacaggcaatggagagagagatgaaatggacttgttgggtgaccatgaggagaatctggcagaaaggctcagtaagatggtgattgaaaatgaactagaagatccagctattatgagggcagtgcagaccaggccagttttacaagtaagtaagttactgtgatttgagaactatagcagactaaaaattaaagtgaagtattgaactttgccattttattttatctattataatgagagatttacatataccatagaaaattgataatatatttcctgatgatagaagttctagagataaacttggggaataatgtatattctggagccctataatttcgtattctaaagcagcttgaggctcttttggaaccttgttccccagcagcagataagtcacccagagagtatacaacatttcagactctgtatgttttccttttttgttagccccaaccaggaagtctgaattccagtatctgggatggatctgaagttctgaggcgaatccgaggaccactgcttgctcaggtattaaatattttctctttacataaaatttataatatccaaaaattttaagttcctgtcgtcatcctttccttactgaaggggtttataggtctttcatttgctagaattatgtcgact

SEQ ID NO: 7226 - DNA, 2300 bp, Homo sapien
gttacactttacaggccacactgtatccattgtaaccactcaactctgactttataacattaaagcaatcaaagacaatatgtaaataaataaggttggctgtattccaataaagcttgctttacaaaaacgggtggctggccagattggactgtgggccatagtctgctaacccttgatctacatggcaccaattctttggtaattattaagatgtactgctacttagttttttttgtttgtttgtttgttttttgtgagacgtagtctttgctctgtcacccaggctagagtgcagtggtgcgatctcggctcactgcaagctccgcctcccgggttcacgcaattctcctgcctcagcccctcgagtagctgggactacaggcgcccgccaccacgcccggctaattttttgtatttttagtagagacggggtgtcactctgttagccaggatggtctagatctccttgaccttgtgatccgcccacctcggcctcccaaagtgctgggattacaggcgtgagccaccgcgcctggcctgttacttagtatttgatgttttataatgttccatgcatgcttgaaaaccaataaatcatcttgtcccgacgctccacttctttaaagttcaggcctggcccatgtcaacatttgcttttgttattctggcacagtgattaagacactcggtttttaataatcagacaaatctcagctgctagctttaccacttgccattgggtggttggaggcaaacaatgtcgctaatcctcaggttcctcaactgtaaactgagaaaataacagtacctacctcatggggggcacataaggaaggattcaatgagataatccattttataaagcgcctagcagagtcccaggcagccttcaatcgttagtagtgttaccatcatgaggcaggtgtaattatacccattttacaagaaactaaggctcagagaggtttaggtaagttgcccaaagtttcctagccagtggcaaagcacaagctcccacccagaacttttcttcacaaattcagcgtttccgatactcaaactgatccagacacactaacatttaggggatttactgtatgccattccgagacgaggctgcattttaagacgcccagggaagaaacggattgcgaaacccaaaagaattcattctttgtgctgcaagttttgtctgaaaggaaaggggcaagaagggcatggagcgtgctagaggtaacaaaccacccaacagaattctggaaccagggggccgaagcttctaagctggacacattcctctgtgggttcgatcctctaaggaagtggagtcacccagcggcgcaccacggcccgaagaccctgctgctgcgtggccagcggcccacggccgtgcggcccttcgaggctctgcagctcctcgcgcctaatgagcctggcgcttaaaaataccaccctagttaaacctcccggaacctgtcttcagcatttcaaaaaaaaaaaaaaaaaaaacgggcgccgtcatcactttgagccacataaatcacagccctgacctgctgtggattcagcaggcgacgagccgctgaaagtggcgacgaagtccgcccctttcgaagaccagcaactttccattcttttttccctgcgcaaggcgcagattgcaacggggagacccccgagcagcctgaggagtgagtcggacgttggaaaaactgcccgggaatctcatctttcccagcccaggctaagcgcaggattcttcaaagctatatcctgtgacaatcacaagggttttctccgccccacgggtgacggagaactcgtgaccggcccctgagctccaagccgagcgcctagagggcgcggagaaagagggggcggagctacaagcccagatcaccaggcagccgaagacgggcagcgcgtgcgcagtctctcgccacgggacctccttcccgccgctgagactaggaagcgggacgccaaatctgtccctgcgcagccgccgccgccgggcgccgagcggggtggccgccctgcctgaggcgcgcctgcgcacgtccccacgcacgctccggcgtacggcggcggccaggggtcgcgagccggtggaggacccgcgcgcggaggagccggggagtcagcgcttcttccctccctccccctctcccctccccgctccctgcccccctccccaagaatgttccgctacgaggtgagctgttgcgaccggaagtgacccctccctccctcccgcgcccctctccctcactctctctccgcgcgccggtcctgtg

SEQ ID NO: 7227 - DNA, 2300 bp, Homo sapien
ataaagcctgaagatgattttggcagttttcatcacttggtgaaaaccaataaaatacaaattatccgtgttaaatgaaaagtcctaaatgtatgctactaaaataaattatggtcaggcagaattgaaaactattttaaagctatatgaaggttttatgtgatatcaaattttgtggctaaagtgatcaaaattatttaatgaaaacatagtgtccaggtgtggtggttcacacctgtaatcccagcactttgggaggccaaggcaggcagatcacttgaggtgaggagttcgagacccacctggccaacatggtgaaaccccttctctactaaaaatacaaaaattcgctgggcgtggtggtgtgcacctgtaatcccagttactcaggaggctgaagtgggggaattgcttgagcctgggaggcagagattgcagtgagccaggattgagccactgcactccagcctaggcgacagagcaagactccgtctcaaaaaaaaaaaaaaaaaaaaaaagaagaagaaaatatagcttacaggtcatgaaaaataacagtccctcagaacaaaatatttccagtgtaatgtggttatttgggggtgaaatttgcacaatgatatggagctggagaaaatctagaaggtgactggtataatgagaaggttcaaatataacctcctggaggaagagttggggtacttgttttagagaaaagagcactgaagatttacagaagatacaaaacctgtcctaatacatgtgaggagctgttatgtattaatataagagagctctagagtaaaaacaagaccagggggagaaagttgtttgtagatagagaccttagctcaaggtaagttatagtacttaatgactacagttgtccagtaaggaatgaagcatcttatgagttaatgctctctctccttggaagctcaagcagggtcaatgactctccaagatgctgaagaagagattcttaaagaacataagatgcaatgatgctcattttcttcttctcctgtgttttacttgttaaataatattttcctccattattagtatcctttttattactggggtactctttcaaagttatgaacactgacatgagttttcattttggtaaataaaacaaaaaatgtaaagttttttttctggcaatttttttttttttttttttttttttgtgagacagagttttgctcttgttacccaggctgatgcaatggcacaatctcagctcaccgaaacctctgcctccctggttcaagtgattctcctgcctcagcttcccaaatagctggggttacaggcatgcaccaccacagccagctaactttgtatttttagtagagatgggtttctccatgttggtgaggctggtctcaaactcccaacctcaagtgatctgcctgccttggcctcccaaagtgctgggattataggcgtgagccacacacccacctatgcatgtcctttcagcaaaattattagtagcatcccatttcactctcagaagtgtcccaatttaagtaaatcataggatcatcctacctagaattttctcaatgctttccttagggcatctttcagttccttgttcctcaaactatagatcaaggggtttaaaatgggagtgataaatgtgtaggccacagataccacccggcccatctcaggagagtagctggaactgggggacaagtatataaagctggtgcagccatactgcaggaggaccactaagatgtgagaagagcaggtagagtaggcttgctggcgcccttctgctgaccggatccgtaaaatggctaccacgatgaagacataggagatggagatcaatgagagggggatgctaaggacgatgaagctgatgatatacagagcagtcttgtgaacgcgtgtgtctgcacaagccaggcgcatgactgcaggcatgtcacagtagaagtggtagatctcatcattgtggcagaatgggagatggaagattaaaatggtgagtggcagtgacaacaggaaccccagcaccaaggagcctaccagcagctccacacacaaggaccagctcatgatgagcctgtatcgcagagggtgacagatcgctataaactggtcataagccatgactaccagcaggacacaatcagccccacccaagaagacaaagaaaaacatctgggtgccacatcccgtgatggaaacaggagttttgcccattgaaaggaggtttgccaaggccaatggggtgatggaagatgtatagaagatttctagaactgccagattag

SEQ ID NO: 7228 - DNA, 2300 bp, Homo sapien
catagagatgcctggtagaagtgcaattgctctcccagcaccccgaggccagttctgcatttattatttatttttattaaaaatataatttttaagacagagttttgctctgtggtccaggctggagtgcagtggtgtgatctcagttcactgcaacctctgcttcccaggttccagagattcttctgccgcagcctcccgagtagctgggatttgtaggcgtgcactatcacgcccggctaattttttgtatttttagtagagatgaggtttcaagatgttggccaggctggtcttgaactcctaacttcaagtgatctgcccgcctcagcctcccacagtgctgggattacaggcatgagccactgcacccggccagttgtgcatttattaacatgttcgtttcagcattcctgattgcctatatatgtgtgtacactttgtgttttcctctggacagggctagctttactggtctcctcattcattaatgaattaaagtctttgatgtgtgtgcattttatatttgtagaggagtcatgattttactcttttcaaaacaattatcctgtaacaggaaccctctgagcagaggcagacaggccacccttgattcctgctgtggaaagagaattttttactccagaccccaatggtccttttcagattcctaacgtgaagggttgttcatatctcggcctctcgcggaagactctattttcttgaagcgcggggaactacgtattcccactaacaaaaatctgttaaggggcagggcgcagtggcgcacgcctgtaatcccagcccttcgagaggccgaggcgggcggatggcttgaatacaggagttccagaccagcctgggcaacatggcgaaaccctatctctacgaaaaaaacacaaaaattagccgggcgtagtggcgcacgcctgtaatcccagctacttgggaggctgagatgggaggatgggttgggcccaggggatcgaggctgcagagagcggtgatcgcgccactgcactcaacttgcgcaacagaatgagactctgtctaaaaaacaaacaaacaaacaaacaaacaaacaaacaacccccaaactccccaaaaatgtgttaggggaaggaggtgggacagtgtgtatttctgatctactcgcctttcctagtatgaccaccagggggcgcggaagccctcctggtactaaggcggggacaacctgcccagcgagcacagcgggcagaaggaagtgtgccggacgcgagagagaactacggccgagacccgcggggccggctcaaagcccgacctctgccatacgcaccgtatctttatgggagccgatgaggtcagcagggagcacgcgttcagatggcagaagagggcaaagtactgctagaattacaaagatatttacagctttttaacctgaaagcacagagcagatcctattcttcagaattaaatcttcggctcgccagtcccgtttatggatctccactctgatgaatgtgccatttgttcccaagaagacaaatagggtagggagaagagggagaggcggggagaagactcgagataaagggacgatctgcttttcggaagcagaagccgcctgggaaccacctgcacaccaagcaggctgcgaggacggggagcgctccagtgcaaagttctgtattttaaagcccctcctcgctcacaggcttcacagcgaactacgaagtgggtaccatctctgatttacagacacgggaacggggtcctcttgagaaacgatgctttcccaaacgtctgcaaattgtgagtgccaagtgtctccactggcactaacaacatcgagctgcttacgtttctcggagcggtcccgatttccaacaagcaaaagatccaaattctctgaccaccctgaccgtcctgtatctccagatctccaggtctttcctctggacacctcctccatccccccactttcactgccagcagccctgaggctgcgcgggatcccgctactcggaatgccttcctcctggcgggatatttttagaacactcgactgccacccaatgtagcccacatcacattgtcttatttgttttcgggagcttgtccccgcctagcaaggagtcggctaagaactggatcctagcgaggagcccggcacagacagcgaatgaccgcagccagacagtcgctcttgctcttcctcggccctgcggcaggatccgccggtgcaggggcctctccccggactccacgcgtgtctggagggctctcgggttagggaagggggctttggagac

SEQ ID NO: 7229 - DNA, 2300 bp, Homo sapien
atgactaagcacaagcctgaggcagagaggccactcccacaataggcaactgtccctttgcttctctcacttccccagctacctgcctcctccgcagccctgctacacagaacaggtgaaacaggaatgaaggtctcatccaagcaagggagaaaaaggataaactcttgtaacatcatcccagcagtccctgacatctgcattttcccaagagcactcacagttattagcatatttcaccatttattaagtcccccgtgccatgcaccctaaaagtgttcttaagcatcttctgttgcatttcgaccttacaactacccattttacaaatgacaaaacttaggctgggattttaagggatcaccagtaagcagtggagccaggagacaaccccagttctaatccagtccagtgcttcccaaactgtaatgtgcccatgaatcacctggggaaatggatgaataattagattctgattctgcggggctagactcaggcctaagctgctacacttgtaacaagctccaaagtagatggactaaactcttgagtgtcaagggctagattttaattctattaaggtagaacctgtgccactgaatctccaaggcttagcactggacctccccatagaatacactcaataattatgtactgaatgagtcaatgaatatctggcttaaaaccctatgcgttaacccttttctgtatcaagttccattgtatcagctgatcctcccaacaaattcctagggtatgatcattcccatttgatagataaggaaacagagactcacagtaagtaacctaaggctttacagcttttgcgcagccaaggctggaggtagtctaccttcagatcctttgacctaaccacagctgttccaaaagatacggcgggggagggggggacaatgacacccggggataacaattacagaccaccggttggagaggagctgacccatcccagcatgtgaccggctcacagctccagaggtcaccagagagctctgagctgctccctgggggaaggggcagccaggcctgtagcacctcaggagagaaacaggaaagggagaaggaggctggtcctgggcatagtgccaggcagcagtgggcaggtggtgaagggacccctgacctcccgggcccaagcacccgcttcgggaaccagctctggacagacactgtccagcttgcggggtgggagagttagaggcgttcaggaaaatcattgcctagcgatgaatcaccgggcacatgaccccgcaggggaggggaggggagggtgcggaaccggcgcgggaagcggtgggggcttggggagggcaagcctccggctcgggcccccctccagcctcgacttggggagcaaagggaagcccctctcccatgcagcacccctcctggcagcaccccgcctgcggcgaaactcacggccttcagctgctccagacggtccttcatcctgaagcccaggcgcccggaggcaggtagcgcgtcccaggtgagcgcgtcccaggtgagcgcttcccaggtgagctgccggaagcggcggccgggcccgccggggcgaaggagctggaggcgcaggcggcggcgggcggcggccgctagctaggaggagcgtccgaggccacgggagcctccgccgcgcagccccctccgcccccaccggcgcctcgcgctccaaatccggctcccgggccggcgccggcgcagcgctgatccgccctggacccgcccctacctggccgcgcccctcgctccttcttaaagggcccgcgtcccgccaccgcccggccgcccggggcgtctccaaagcccccttccctaacccgagagccctccagacacgcgtggagtccggggagaggcccctgcaccggcggatcctgccgcagggccgaggaagagcaagagcgactgtctggctgcggtcattcgctgtctgtgccgggctcctcgctaggatccagttcttagccgactccttgctaggcggggacaagctcccgaaaacaaataagacaatgtgatgtgggctacattgggtggcagtcgagtgttctaaaaatatcccgccaggaggaaggcattccgagtagcgggatcccgcgcagcctcagggctgctggcagtgaaagtggggggatggaggaggtgtccagaggaaagacctggagatctggagatacaggacggtcagggtggtcagagaatttggatcttttgcttgttggaaatcgggaccgctccgagaaacgtaagcagctcgatgttgttagtgccagtgg

SEQ ID NO: 7230 - DNA, 2300 bp, Homo sapien
aggctgaggcggaagaatctagtaacacccagttactagagaggctgaggcggaagaatcgcttgaacccagcaggcggaagtggcagtgagccgagatcgcaccactgtactccagcctgggcgacagagtgagactatgtctcaagaaaaaaaaaaacaaatcaatgaagtataaatgtgtgtgtttatttctgggctctctatcctattcatttggtcagtgtgtctatttctctgccataccgtgctgtttcgattacaatcaacttatgttttgaagtcagggagtgtgatgcctccagctttgttctttttgttccagattgtctgggctattcagggtcttttgtggttccaaatgaatttaagggttgtttttcctatttctgtgaaaaatggcattggaattttgatagggattgcactggatccgtagattgcactttttggctcttttgaaataaacaataaggtagaagttttggggtaccaaaagacttagagaccaatcaaaccgtgattttagtgccacttcatttttcactcaaaacaatattgcacaatattcaacttgaggactaagctctgattttttatcttgcccaaattcctacctaagggaatcatgccctacaaaccataaattctcatcatataggttttattttaccctatatattgtgacttacttttcaacatgactctggcataacattatgagacaaagaaaaaaatatttaaccccaaaatatatttctttgccatatcttgaaattgccctgcaaagtctcttgcgggaaaaatccatttctataggtattctctttcccctttgttttccttccttccttcccagatccaggagacaatcaactaagagccaggcatatttttttttctctgtcttgcccagtctggagtctggagtgcagtggcgtgatctcggctcactgcaacctccgcctcctaggttcaagtgattctcctgcctcagcttcccgagtagctgggattacaggcacccgccaccacgtccagctaattttttgtatttttagtggagacggggtttcaccatgttggtcaggctggtcttgaactcctgacctcaggtaatctgcccgctttggcctcccaaagtgctgggattacaggcgtgaaccactgcgcccggcctccaggcaccctttaagtcagataaaaaaacaatttacaacagtctttctctaaagtctgctatctaagagcttcctctgcataataaaacttggtctctacaatcatttatgtttaacctgaacattcctttctatccatcccaggtctttggacaaactcaaccaattgtcaaccagaaaatgtttacatttacctatagcctagaagcccaccttgacttgtcccgcctttctgaaccaaaccaatgtatttcttaaatgcatttgattgatgtctcatgcccctctaatatgtataaagccaagctgcacttctaccaccttgggcacatgttctcaggaccccctgagggctgtgtcacaggccatggttgctcatatttggctcagaataaatctcttccaatatcttacagaatttcactcttttcatcaacaatattgttcattcactgagatctctggaatcacagactgtgctcaaattctgatggtactgttttcctgttgtatgacccagaacaagttaaattatttcaccctcaggatggaatctgcaaaataagtataatgacttatctcacagattcgttggcaggactaacgaatgaggtactcaatgacacattgcaattgccctatacatgttaaaccattgctaaatctggtattctcctaatgtctttgaggggtcccctagaaaatcatctcaaaggctgtgaatcgtaagggaccaccttgctaagcaaccggcaggcactaacagttgtactccgcagaaaaataaataaataaaacaaaagactccccgccccgccgccctcttcttctggggaaagactggagattggaaggagaaccctagagagccaacagggcccctgggcgtggctgggcggacggcgcctttgaccgcaggaactcaacctcccccggaactcaacccccgtcgctcgagtttctttcgcttccgtcgggactctgcggagtggacccgagtgaacacaacttccggccccactgagcggtgtcctgagccgattacagctaggtagtggagcgccgctgcttacctgggtgcaggagacagccggagtcgctgggggagctccgcgccgcc

SEQ ID NO: 7231 - DNA, 2300 bp, Homo sapien
gggattagggcatgggcatttggcggtgtgtgggcagtgccattattctgcctcctactccttcacacagcatgcaaggctgtccaccaagtagatgccaactgtctttccagcctcatcttccaccatgtaccatgtattggatatatattgctgcataacaagtgactttaaaacttaggggcctaagacaacatttattatcccacagtttctgtgggtcaggagtccagggagggtttacatgggtcctctggcttaggagggtctctcccagggctgcaatcaagatgtcagctggggctgccttcatctcaaagctcactggggaagggttcttttctccctgaatatcggctggaggctactctcaggggccatatgtgggcttctccataaggcagctcacacttagcagctgccttcatgagagcaggaagggcaagagagagaaggcaagcaagagggaaatcggtcttttgcaaccacatcccatcacctttgctgcattatattcattataatagaatgtggccccaggccagcccacactctagggaagaggactacacaaggcatgaataccgggaggtgaaaacacagggccatgttagaagttgtccagcacaccccagtatgtaccctgtgctctcatctcacaaaactcacccatgtttcccaagggggaaaaaatgctttattacccatgtcttacatttgctcattaattcactcattcaaaaagtattttatttctactgtgagctaggtagtgttgtaagggctaaggatagagcagtgagccaaagagacaaagcccctccctcgtggagcagacattctagtagggagataaacaaacgataaacaaccacacacttagtgcgacagagggcaatgagttatagcaggcgaggggcatgaggggtgtcagtggaggtgaggatgtaggatcttatgtagggtggcctgggaaggcgtctctaaaagcttacctctgagcagagacatgaaggatgtgaggaagccaccatgaggctatttaaaagaagagggtcctgggctgagggggacatcatgtgcaaaggtagctgatgtgttcaaggggcacaagaagttctgtgtgatgggagcggtgtgagcaaaggggaaaacgcctggagctgaggtcagaaaggaaaccaggagccagatcttctaaggtcttataggtcatgaaaagggctttgacttttatgctaagatgggcgccactggagaatatccccttaaaatgagctactttacatgcaggaaaaaaacaaacaaaactcctttctttataatttcaacataccattttcagttctcccttataaagaagtataatttgcattataatgtagctacacatctgaaatatgtattcttaatggatctcacattttctaattacttactttaaaagataatatctgaaagctttgggtgtttgagatggcttttatctccagataaggaaagagaaatcaaacaaaaccatttctgggaaaccgaggtccatttcttgcctaaagtcaaacaacttcaaagagtctaggctagaatccaggtccaggtagacatcattaatttcacaaagccagatgtcacctggcagatccctgcctgagagcctaaaaggacatgttgtaaagcaggtgtctaggatcataaaatgagctgatgcctatgaatggcctaaatcccagtgaagtagttactaaaaagcagcctggtaactgattggatacaataagggctagaagaggtcttgttgatactagcacattatccaaacttcctgatgtctgacccaggcctttggtaaaggacattttctcaacattgccttcactgcatacccagccccaggtttctcatatgactgtgcaacctagaagtcaccttcagacaccttggagggtctatagtcggtaaacttagataagcaaatgaaaatttacttacttgtatcaggaaaggagaggtcagcacaggggcagttaggagaggctgggttggggacagattatttaacaaagggaagcacatataagagaaggtaaagaaatattccacttgcaaatcgcggtacctgtggatgagagacatagacgagagagtgagatggcctggtttgccctctacctcctgagccttctctgggctacagctgggactagtacccagacccagagttcatgctgtgagtatgatgtttttccaaggaggtcagggaagcagttgccctggggaaggggctgtgacctctgacactg

SEQ ID NO: 7232 - DNA, 2300 bp, Homo sapien
tcaaatacatggaaacagagagtagaatggtggtttccacataagttttatataaatatgtgagagagagaaagagatttattccaaggagttgattcatgcccttatggaggctaagaagtcccacagtctactgtctgcatgcagtaaaagtcagtggagtgattcaggccaaactgaaagcccaagaaccaggggagccgatggtgtaaatctcagtttgagggctggagaagataagatgtcctagctcaaacaggctggcaggaagcaaaaaaagggtgaattcccccttccttcaccattttattctattcagggtctcaatagattgattgatgcacacctacattggagacggcattctactttccagagtccaccaattaaaatgctaatcctatctggaaacaccctcacagatacatcgagaaatagtgtttaatctgggcactcaggtgccagtcaagttgacacagaaaattaaccatcacagaggtacaatgcaaatagtggctcattaagtcatgacatccttagctaggctgacagtattctctaatagttctcagaagaactgtgataggcaacacttctcacatgtagcaactgccctggcagggcagaaattcacatttgatgtatagctctctggttttcctccttggttaggaaactctcatggaatctatcttaggagaaaaatcatagtttggaaaccactatgccaaagatcccctcatgtgctgggttctccaatactgcctgcttcaatttcagacttacaacttttacttccgtttttaaatttttttatttcaatttttgtaggtacatagtaggtgtatatatttatggggctcatgaaatgttttgatacaggcatgcaatgcgtaataatcacatcatagagaagggggtattcatcctgtcaagcatttatcctttacgttacaaacaatccagttatactattagttatttaaaatgtacaattaaattattattgactatagtcaccctgttatgctaccaatagtaggtcttattcattctttccaatattttgtacccattaaccctccgcatctccttcccaccactagccttcccagcccccagtaaccatcttttcattctctatctctatgaattcaattgttttgatttttagatcccacaaataagtgagaacatgcaatgtatgtctttctgtgcctggcttatttcacttaacataattatctccagttccatccattttgtcacaactgacaggatttcattcttttatatggctgaatagtactccattgtgtatatgtacatttgctgtgttcatttatctgttgatagacacttagcttgcttccaaatcttggttattgtaaacagtgctgcaacaaacatgggagtgcagatatctcttcaatatactggtcttctttcttttgggtatatagccagcagtgggattgctggatcatatggtagctctatgtttagttttttgaggaagctccaaactgttctccatagtgattgtactaatttacattcccaccaacagtgtacaaggcttcccttttctctacatccgtgccagcatttgttattgcctgtgttttgaataaagccatttttagctgagatgagaggatatctcattgtagctttgatttccatttatctgatgatcaatgatgttaagcaccttttcaagcactttttcatatgcctgcttcccatttggatgtcttcttttacttccatttttatatgttgtatgtgtttgcatgatcaaatctactttatcaggaaacataaaacataaagtgaaacggaaaaaaaaggaaagattataggaaacagtcatttgcctaatatatcttcactgcacggaaggcaaataatagatatgaaacccgaaggtttaggacaggagacaaaggaaagttattgccttattctccctaaccacatccttcaagtcttcttccttatttattacatcacatggacaaatacacttgaccacacctcctgacattgctcaatatttgcttgagtgaaaagaggctgaggcaacctgaaggaggagctctcattaccttctgcccatcacttaataaatagccagccaattcatcaacattctggtacactgttggagagatgagacagtcacaccagctgcccctagtggggctcttactgttttcttttattccaagccaactatgcgagatttgtggtgagtaaactttgagctaaaattactctagagtgatagtctactg

SEQ ID NO: 7233 - DNA, 2300 bp, Homo sapien
tgacaagtttacatcattcaatttcaaaaaatgtcgaatacccacgggcgaataatcattgtttgtctgatagtcattctttaagtaaagatggtgttctatgtaacaagtggctagttcagctcacagctccaataactgcacagattttccttgagacactcttcatactttgatacgcagcaaaagtgtattatgcatactttctattttatcactctgaatagtaaaaaggcatgcattcaacggttggcatttaataaaacagatactttttactgcttcaagacttaagtgaaactggctttttccctttactgtgagtgcacaggggtgaagaatacaatggtgactaacaaactaacacattcttatgctactaccttgattggtgctcaagaggcaggagcatttcccaccactgtttttgcacacctgtgcaaatgtcgacattatgaaaaagaaaatgtgttattgtgaaaatagatctgatcccatggacccctccatcatctaagttccaattattgagaagcactctagtagaagaatggccttatttgttggatatatacttcaaaatatttacagtcaagggaacatcttaccagcaacctgctctcaaaaggtccaggaaaaagaaagtttttttgtactatagttgcaacatttccctaagttataaattgttttaaaatatttgttttatctctgctttatctccattttacattaaagttatatttaaattccattactgtttcacagtaaaattctgtattaaaattggaatttttggaaaatgaactttgttcattctgcggctttgagtaatccttgaaacattgcataaagtcctgttactaactgtgcttcaagatacaggaaatagtcatatattagatattttttgtacgctattgacttgagcaagacagtttacatttgctatgtcttattcacaataagtttagagagaatatatctcctttttacagcgtatgaacagcagccttagcttgtttaactttctcaaactgaaatacaagaaactggccaatgattccttttggaacaatattagatgtttacataggcaagatttaaaagctgcatatgaagttaataaattttagatcctgaaaatgttcttaacatcagaaaaatgtttaaagaaatgaaagatgaaaaaataacatgtagacttgcccttctctttctctaatactctttccccattggtggttgggcgactggattctccaggctttcctgatgcagagcactgtgtgggtcacagctttggggatctcactgtccacaagagaatgtaatgtcagaaatagaagtccttcttaaatgcatagggaagctctgtgcatgtagtcatttgacagcagactgtaacattgaaaatataattcagatatgactaaaagcaataataggcatttaattcagcctctttgaattttatttactgttagcctttgattttcaattacccttaaaaccacgcagtcacattcaggccgtgactaacattttaaaaaaatacaataaaaatctttggctggaacttttattctacttcagtattgaaaaaatcataaatataaattattatacatatacagttatgtgtatatatatgcatataaaatattctcttgtctcaggtttgaaatgactaaagttaccaacaccttaatttagaaagaatcaacagagagggaattgtcaactttcctaataccaatagacttgactttcctttgggtgcctgtcccctcctagagatttatgttcctggtcaagtcagtttatcatgtctgctttgcttcttccagccaaacccatagaaatgaagaaataatagtcttttgatttcaagtatgaaagatctaggctgttctcatattagatggaaacttaaaacacctgaacgttagctagtaagaacagtttcctgtaatttagtatttactggaagcattgtgtgccatgccatcctcctgatgtttgtaacaggacttgtaaagactgttatcaaataacacttttttcttgatatgtctctttgagcttcagtgtttggataatcaagagagtctcagcctttaggtagctgacactgtgataagagcatcctgtgaactacccaaataaggaggaaaacgaacgcagctgagcatgggatgccatataaaaatcacttaaaccagtcgccactccttgtttcctgagttgtcctgtgctggaggtctgctcagacgaaggtctccatggcgttagaagtc

SEQ ID NO: 7234 - DNA, 2300 bp, Homo sapien
acatgttgtacatggtaagtatattaaatttttatttgtgaatcttcctttgaaagcagtttctcacaatcattctctaaggaattgaagaaagagctcaatcatttttattatttactttgaactcatgtgaagatcttagttattaagacctttacatgcattctgtcatttatactttataccccaaagtgggcactatgatcttcaacttacaaatgggagaaccgaagtcttagagtttaagtaacttcctttcatggctttttctacagctccaaattcaaaaagagcatgttgaaagcatccactctttcctttcatttcttcagatttctttctcttcttcgctgaaggcattttcttgtcatctctttcttcttcagtattccatttgcaatggttctggataaaacggggagggaaggatcttatctttaccaccttccttttggctatttccttctgacttctgtctctgtctctgtcttctctttcatcagtcccttccttcgctcctaaatgtagaccctggagagccgctgccctagggctcaggtgccagctctcttagcagaagcacctgtgcagaaattttctggcaactgggcccctgctcatttcatattcacaatctctgcccacacactatgttttggtcttggtaactggccctctttctctttcctgtgatcacgtccccactgacgctcctgtttgtaggactaggacctcgctttccttgctgtgaacattcttctctgtctcacagactcccctggggcatggatcaggggctgtgccctcattctttctctcaggcctggccctgtgaccttcataaggattgtggtttgaatcttcacgttacctacttccttactccttgtcacttggctctgatctttctattgcctattttaggacatttatttaggataagcatataatttggccacttttgaaactgaaaggaggccgggcgcgatggctcatgcctgtaatcccagcactttgggaggctgaggcaggtgaatcaccggaggtcaggagttcgagaccagcatgaccaatacggtgaaaccctgtctctactaaaaatacaaaaattagctgggagtggtggtgcatgcctgtagttgcagctattcaggaggctggaacaggagaattgcttgaacccgggaggcggaggttgcagtaagccaagattgcaccattgcattccagcctggatgacagagtgagacgccatctcaataaacaaacgaaacaaacaaacaaatacaaaaaacctaaaaaaaccaaaaaacaaaaaagaaactgaaaggaggggttttaacaatcatattaggataacaggcacacttcgggcttcaccattgtacaaaacagagattttgcacagggcttttccagttaaattttaggaaagctgggtaacatttctataccatagttttctctaccataacatcgggttaatagtagtacctgggtcctgggttattgtgaggatgagatgaattaacatatgtaaagcattcagaacaatgacctgtatgtagtaaccatttaatacatttaaacaataattagcattattattatatctgtgatattgggcaaagtaattaacctctctaagcatgtaagaattgaatgtcatcacgcatataaggtacatagcaccgttgctggcacatcatgtaaaataagtgcctgagtgaccacctccctcctccagatgcttctcttacagtgtgactttgtctcttcttgctatgcacctaacactgttctacctccaacccacaacctcttcccacttgtctacccatattgttgcttgtgtttcctgttccagcaatgtgttaagcaacatctgaaagccagaagacagttatccctcacaccagtttcctaatcatcactaagccctggggaaacacaatggatcagcgaggccccaaatgcagatgtgattagcacactggtcagtcagcccgcaaaacactttcaccaagtcctctaaagtgttgcataaggcaaagataacgttaagtctgtggaggcttccgttatcgggaaaagatgctgtagtgatcttttctgagtgtctcctacttgcgacaaggtggacttgggaggaaagccgtctgccaaagcctgaagcctccaaggtatagattccctctccatagacattcccctttcttttatatctttcgttaaaatgcctcccagtggactactggggatgtctgcaaaggtctctgtttggttgctatgtagaggtt

SEQ ID NO: 7235 - DNA, 2300 bp, Homo sapien
agaaggaggcaataaggctgggtgccggggctcacgcctgtaatcccagcactttgggaggccgaggcgggtggatcacctgagatctggagttcaatctagcctgaccaacatggagaaaccctatctctactaaaaatacaaaatcagccgggcgtggtggcgcatgcctgtaatcccagctactccggagactcaggcaggtgaatcgcttgaatccaggaggtggagtttgcggtgagccgagatcgcgccattgcactccagcttgggcaacaagagcgaaactccgtcaaaaaaaaaaaaaaaaaaaaaaaaaaagaaaagaaaagaaaaagaaagataaaatgaaaattcgtggctgggcgcagtggctcactcctgtaatctcagcactttgggaggccgaggtgagtgagtcacctgaggacaggagttcaagaccagcctggccaacatggtgaaaccccttctctactaaaaattcaaaaaaattagcccagtgttgctgcacactcctgtagtcccagctacttgggaggctgaggcaggagaattgcttgaatctgggaggcggaggttgcagtgagccattgccctccagcctgggtgacagagtgagactctgtctcaaaaaaaaaaagaaaaaaaaagaaaatagaaaattatcgaggctatcattttaattttaagtctgctctcaaatgttaccttgtctgggaattccttccctgaactctacatatcccctatcaggcagaattgttttacccttctatgtgttccaacatcctctggcctccaacatattgggtaataatatatcatttatctttgttctattctgcttgattgtggactagaaggacctgggattttggcattcatctgtgcatgcacagtgataagggcagtgcctggcatggaacactaagttctttttggatgaacgtataagtgagaaagttctattccttaattccaatagcaccttgtttaggtccaccaattcctgaagacaccatgggaagatgacacctgagttaataaacttagatacaaaagctataccaatatgtcttttagtatactctgtttatgcaaatatcttagtttcctgcaaaaagattttctttttcaccccccacccccaccaaaaaaaccacacatgattagaggtgtgatttttagtatcttaaatattattgaaagccattcaaggttatgtttataattaaactgaaataaaagagattaaaaccttctctgaattttatctgtactgattttgctatggtctagctagttatggtatttcaatgatcacatggtttagccctaattctaatttaggcatactactcaatccaatgctgtttagatttgctcatgggatttgttataaagttcatgtctctcagtgttctcactatcccattcttgccactgtaaagatctaagcaccatcagtctaataatttagcagacaatggagtcttcttagcttttacacactatcaggtatggttcacagcagttagaatgcagcctgttgtatttccaagaccatctgctgcagcgaatcatgtaaacagtttccaaaagacggaaagagagagaaagatgatagatattaaagtcagagatggatctggagatttagagactaacacatactcactcacatacaacagcacttcagttttgggtctatgtgtgaaaccaagcatgccttaaacaaggaagacaagcttttcaaaggtgcaattggataacttctgccatagaaatggctgaattgggacacaagtggggacaattccagaagaagggcacatctctttcttttctgcagttctttctcaccttctcaactcctactaaaatgtctcattttcaggttctgtaaatcctgctagtctcaggcaaaattatgctccaggagtctcaaattttcttatttcatattagtctttatttagtagacttcttaatttttctattcatcacaagtaaaagcctgttgatcttaatcagccaagaaacttatctgtctggcaaatgacttatgtataaagagaatcatcaatgtcatgaggtaacccatttcaactgcctattcagagcatgcagtaagaggaaatccaccaagtctcaatataataatattctttattcctggacagctcggttaatgaaaaaatggacacagaaagtaataggagagcaaatcttgctctcccacaggagccttccaggtaggtacaaggtattatttttttctaccctcagtcacttag

SEQ ID NO: 7236 - DNA, 2300 bp, Homo sapien
aacaaaattaatactagtggtctgtacactaaaaagtggttaaaataatgaattatatgtgttttgtaccacaatttaaaattttaaaaataaaagttgagaaattgatttaaagaaaatattgttctgtttctagcacacctgcctttacacagaacacacaaaaacccttttgctcctaggtcagtagctctcaacatgaatgtgaggggattttgttctccctccatcaggagacatttgacaatatcagatactgtttctggttgttacacatagggtgggattgtgctggcataggccagggagtctgctaagcatcctacagtgcacaggatagccacctactgtaaagaattacccagtccaaagtggcattagtagcttttttgagaaacctgtcccagatcattaatcagaacgtgttattgatataccagtcttctcccttgtagttaggttggtagaattcagactctggaaaaaactgggaatgtaaaaggctgaatgagtgtaagctgaaagacaagagaaaggagaattgttttaagcttactaaagccaaaatggaaaaaaaaagaggggggaggattggggggtgaggaagacagtcaacagaccgcttttaggccatcattccgaagggttctgtgctaggaaccttacacgtgttgtctcacataatccttaaaactcagaaatgattttaaattaaatagcacagagaggaaaactgactggagagggagcctttgcttaggtaggcaactttaactggtttattagcacattcccctgaagggaaagggggtgtgattgctcctgaagagaccaaagagactgggctcctttttaatcaaagctcaggaggagagctgcattccactgtttcacagatgctgtgagggtgacaaagatgcagggcacccactggaaacacagacggcactctgcgaaagaggaaggggcgccaggagcttgggtgagcaaggttggaggtgattctgcccctctccccaggctttctgtgtgagtccattcctcctctcagatttattgttagaacttaagacaagccaattacatttcataatgtctgtgtcattcagacgctgagaactaatccagccttctaaatggtgcttcttaactcctttcttcaacaggagagttaatgtgtggaattaagtgcagaatccatggccctctgtggtgacggtgatggttcaggttgtgtttctgggttcattctggaagctcccccaaggaaaggaggaaggaagcttgcagggtggggctttgccattgccctgactggctctggtttccttgcctgatacattgaagtcagcttccaaagaatgccacccaaggttttgaaggggcacagtgcctctgtcctcacaaaaccagcctgcatatgagtttactgaattcatttaggtcctgctgaatctttcccatttgttccttctctgtttcaatatttcaatgcttccctggaggggcccaacctttctggagggcaaagatctgttgttagagaaaaagagcagccagaggaggaagatgacttgagggtaggcagcagttgggcaatcagtattgaaaggttgctttcagcctgccaagacttggggaattagaaaagcaagataaaacaaaacaaacaaacaaactatatatataaaaaacaattttttaaaagtttttttatgttctatattactattagctatatattaatgaatgttcctttaaagcagtgtagtcattattgctattattattattatggttagttatagacagtggaatattgttctttctctatattatgattactagcactattactgttattagttacatgttattgaaagcttcaaagcagcataggctttttataaatatttttgctcatctttatgacaattctccagtgttggtattgctcctctatttaacagattagaaaactgaagcttcaagaacagacttgcctaacaacaggaaacttgtatgtctcgaagtggcaattcacacataaggctccatgactcctgaactctcacaaatattagttggctcttttcatggttttactgaagttgctagaagtttacagaaaaggaagtgcaggaacatttcacaaatctacaatctgtgagtatcacatcctgtatagctgtaaacactggaataaggaagggctgatgactttcagaagatgaaggtaagtagaaaccgttgatgggactgagaaaccagagttaaaacctctttggagcttctgagga

SEQ ID NO: 7237 - DNA, 2300 bp, Homo sapien
cactgtaatctcccttaaatcctttcttgaaatttttcaacatagctcctagtggtcttactttgtgcctggcccatgcttcctgaagacaaaacaccatgctcacactgcaaaacaaaaatgggtaaaaagggcacacacacacttttgcagtttacaccaaaccagaatcaaaaccaaaatcagagtgtcaggaaatccaagccgggtcaaaaccaaaaccaaagtatcaagcaatccaagtcaagtcaaaatcaaaaaccaaagtgctggtacaggcacaccatgggtgatcaggccatgcttccacttaaatggagtgggcaagttccaaagaccagtcttaccaagttttagatgtccggactccaagtgccagttccttcatggtgttcagccactgcattgatcctccacaggggcctgctgtgcactgctctgatgaggcattccactggggcaattgcctacctgggagtgctctcaggatctgcttcactcaagctggctggagtccccctcaggtatgctccacagggcaggcctaagccacctaaggagctgtctcgaccatccattaatcaccttgtttcctggtcagggaaccaagaaatgtagcaggacaagccacagacaaaacccctcagacaccgagttaaagaaggaagggctttattcggccaggagctttggcaagactcacatctctaaaaaccaagctccccaagtgagcaattcctgtcccttttaagggcctacaactctaagggggtccccatgagagggtcttgatcaattgagcaagcagggggtatgtgactgggggctgcatgcaccagtaatcagaacagaacagaacaggaaagggattttcacagtgcttttccatacaatgtctggaatctatagataacataaccggttaggtcaggggtcaatctttaacgaggcccaaggtgcagcacagggctgtctgcctgtagatttcatttctgccttttagtttttacttcttctttctttgggggcagaaactgtgcataagacaatatgaggggtggtctcctcccttagagacagagcaaacatggaacagaaagtaggatggtggttactaggggctaggaataggaaggaaaggggtggttgttcaatgggtatagagtttcagttctgcaagatgaaaaagttctagaggtctgttacacaacaatgtgaacaaaattaatactagtggtctgtacactaaaaagtggttaaaataatgaattatatgtgttttgtaccacaatttaaaattttaaaaataaaagttgagaaattgatttaaagaaaatattgttctgtttctagcacacctgcctttacacagaacacacaaaaacccttttgctcctaggtcagtagctctcaacatgaatgtgaggggattttgttctccctccatcaggagacatttgacaatatcagatactgtttctggttgttacacatagggtgggattgtgctggcataggccagggagtctgctaagcatcctacagtgcacaggatagccacctactgtaaagaattacccagtccaaagtggcattagtagcttttttgagaaacctgtcccagatcattaatcagaacgtgttattgatataccagtcttctcccttgtagttaggttggtagaattcagactctggaaaaaactgggaatgtaaaaggctgaatgagtgtaagctgaaagacaagagaaaggagaattgttttaagcttactaaagccaaaatggaaaaaaaaagaggggggaggattggggggtgaggaagacagtcaacagaccgcttttaggccatcattccgaagggttctgtgctaggaaccttacacgtgttgtctcacataatccttaaaactcagaaatgattttaaattaaatagcacagagaggaaaactgactggagagggagcctttgcttaggtaggcaactttaactggtttattagcacattcccctgaagggaaagggggtgtgattgctcctgaagagaccaaagagactgggctcctttttaatcaaagctcaggaggagagctgcattccactgtttcacagatgctgtgagggtgacaaagatgcagggcacccactggaaacacagacggcactctgcgaaagaggaaggggcgccaggagcttgggtgagcaaggttggaggtgattctgcccctctccccaggctttctgtgtgagtccattcctcctctcagatttattgttagaacttaagacaagccaatta

SEQ ID NO: 7238 - DNA, 2300 bp, Homo sapien
ttctctcaaccactgtgagtgggtggggtctaaaaccagctgtacccaagtgtctatatacgggaactggtctgggtgccctggcttacaagttaccttgtgccacacctttgaaacaagggacctgtccaggcttccttctgatggccaacccacctccaatactggccagtctatttcacacaaagttctagtttttcctggtgtcatagtaacactgtaatctcccttaaatcctttcttgaaatttttcaacatagctcctagtggtcttactttgtgcctggcccatgcttcctgaagacaaaacaccatgctcacactgcaaaacaaaaatgggtaaaaagggcacacacacacttttgcagtttacaccaaaccagaatcaaaaccaaaatcagagtgtcaggaaatccaagccgggtcaaaaccaaaaccaaagtatcaagcaatccaagtcaagtcaaaatcaaaaaccaaagtgctggtacaggcacaccatgggtgatcaggccatgcttccacttaaatggagtgggcaagttccaaagaccagtcttaccaagttttagatgtccggactccaagtgccagttccttcatggtgttcagccactgcattgatcctccacaggggcctgctgtgcactgctctgatgaggcattccactggggcaattgcctacctgggagtgctctcaggatctgcttcactcaagctggctggagtccccctcaggtatgctccacagggcaggcctaagccacctaaggagctgtctcgaccatccattaatcaccttgtttcctggtcagggaaccaagaaatgtagcaggacaagccacagacaaaacccctcagacaccgagttaaagaaggaagggctttattcggccaggagctttggcaagactcacatctctaaaaaccaagctccccaagtgagcaattcctgtcccttttaagggcctacaactctaagggggtccccatgagagggtcttgatcaattgagcaagcagggggtatgtgactgggggctgcatgcaccagtaatcagaacagaacagaacaggaaagggattttcacagtgcttttccatacaatgtctggaatctatagataacataaccggttaggtcaggggtcaatctttaacgaggcccaaggtgcagcacagggctgtctgcctgtagatttcatttctgccttttagtttttacttcttctttctttgggggcagaaactgtgcataagacaatatgaggggtggtctcctcccttagagacagagcaaacatggaacagaaagtaggatggtggttactaggggctaggaataggaaggaaaggggtggttgttcaatgggtatagagtttcagttctgcaagatgaaaaagttctagaggtctgttacacaacaatgtgaacaaaattaatactagtggtctgtacactaaaaagtggttaaaataatgaattatatgtgttttgtaccacaatttaaaattttaaaaataaaagttgagaaattgatttaaagaaaatattgttctgtttctagcacacctgcctttacacagaacacacaaaaacccttttgctcctaggtcagtagctctcaacatgaatgtgaggggattttgttctccctccatcaggagacatttgacaatatcagatactgtttctggttgttacacatagggtgggattgtgctggcataggccagggagtctgctaagcatcctacagtgcacaggatagccacctactgtaaagaattacccagtccaaagtggcattagtagcttttttgagaaacctgtcccagatcattaatcagaacgtgttattgatataccagtcttctcccttgtagttaggttggtagaattcagactctggaaaaaactgggaatgtaaaaggctgaatgagtgtaagctgaaagacaagagaaaggagaattgttttaagcttactaaagccaaaatggaaaaaaaaagaggggggaggattggggggtgaggaagacagtcaacagaccgcttttaggccatcattccgaagggttctgtgctaggaaccttacacgtgttgtctcacataatccttaaaactcagaaatgattttaaattaaatagcacagagaggaaaactgactggagagggagcctttgcttaggtaggcaactttaactggtttattagcacattcccctgaagggaaagggggtgtgattgctcctgaagagaccaaagagactgggctcctttttaatcaaagctcagg

SEQ ID NO: 7239 - DNA, 2300 bp, Homo sapien
attatatataataggatatatattctatatatatagaatatatatatttctctgtcaaatttcatgttattgttctcttgaaattgttatctgctaataataacctgatactgtctcatttcataccatatggagtgggaggagagactgatgcctgtccttagtccagaatttcaacctctcttaggaagtcatgaaactctgtacccttgtcttctgcaatgccacattttccgagtttgcctgctatcttccttaccctctttttcataatcctctgggaaatcttatttctgattatactgtctctatcctctagaaaaagggtttgacgttttctgcctccacccacaagcctgggtgacctcatccctctgggcgaagagctgttgggtttacctctatagccatgttctcattccctagctcctgccagttatccacttcttgtcaactttatttgaaggtccctacacaactctgatcaaatacgttcaaaattttactatttgttcctgcagttctgtcctggtccatgtctattgccttactgaatggctctatcactcattcagtttcctaacccagaatctgagtgtcatcctttcctgttttttctcctgatttacacatccattataccaacaagtactgtcatttcttgttcctaagcatctttcaaatccattcattctctccaacttcactagcatcacaggtagttcagtaaccatcatcccttccctagagaactgcctctaccttgagcctaattctctgattttattattatttattcctgttgtctgaaaccaggacaatatttctgaaatataatctattttaattttgagaatcgtaatttcagattatagaccacatagtttttggaattaagtaaaactggatttcaatctcatctataccagctatacgaatatctctgagtttcagtttcttcttctgaaaaatagaaataataatattaccttccttcattccctttccatttgtgtgtcttttgctcattcatcaggtctccaattagatgtccccttatctaggaagtctcctctgcctacccaatgttgggttcattgatcctcctatgagctctcttaggatatcctactttaccttgcagatcactgattacaatgggttgtaatgatgtatttactcatctgtattgccactttaccttgcagataactgatagtaatggattgtagtgatttatttactggtctgtttttccaagtagtctataaactctttgagtgaaaattattttttaccattttttcagaagcacacggcacactgcttggcttatagtagtttttctaaagaaaatgctgaatgaatgaaaactgcacaccactttgctttcctcctccatgtaaagtaggcattattttattttacaaatgaatcttaggttcaggagattaacagggccatgcaagaaatgtttgccattggtttgatcttagtcaaagaccagctcgttctatgataccagctgcttccttcacttagaaaggtgttgttttattgccatacaaccaacttgttgccattttatggccactcctgatgaatctctaaaggtggaatttcatgtaaataaaacatttaagttgtgtatattaaggttggtgcaaaagttaattgtgattttggccataaaataatggcaaaaactgcaattacttttgcaccaacctaataaaatagtaatagtagtgctccaggaagacaagagtactgtggaaatgtgtgaccctgtgaaagggggtatttacaaaataccatttacttgtttatataacgacttttgaagagagtctggcatacagtaaatcctctaccactgatatccacagtaattagcagtattattttcataggaaagactgtatcaggcagcccctgctttttcagcaaatttcaaaatagacatccacacccatattgggaacacaaaatcagttaatgcttccgatataaaagaggaactagctgtgcgtctcagaaattctcagcacagcctttaaggttccaaacatctgctagaagaggaatgcagatttaaactgagtgaggtgtggagtgggggaagttgattgggtctagaccaaagaactttgaggaacttgcccagagccctgcatgcatcagacctacagcagacattgcaggcctgaagaaaggtaggtccagggacttgccttcctaggctttcgggctgatggcttgtttcacttcctgggttaagaatttctgggaggggaatg

SEQ ID NO: 7240 - DNA, 2300 bp, Homo sapien
aaagaggaactagctgtgcgtctcagaaattctcagcacagcctttaaggttccaaacatctgctagaagaggaatgcagatttaaactgagtgaggtgtggagtgggggaagttgattgggtctagaccaaagaactttgaggaacttgcccagagccctgcatgcatcagacctacagcagacattgcaggcctgaagaaaggtaggtccagggacttgccttcctaggctttcgggctgatggcttgtttcacttcctgggttaagaatttctgggaggggaatgagaagaataatgaggccacttcccatgacccaagctggtattcagggttggggtgggttgagtgcacctttaaatgtgcattcggtggggggatgaggaacagtttttgctacagtcgataggagttagaaaagcctcctaaaggctgacattggaggctggataaggttgtttagttacttttgtcccctgagtcttcaggatatcaaaacactgaaagcaacattttaaacctttgactagttacctcatctactgttaatgcccttcttctgtggtctttattctctgtgtctgactggttatttttataactcaggatttaagaacagatgtatcacatgcagaatttggtgtacatggagtagggcacaggcagggtccccagccttgtacatttagatgggctgtggcctgacctagttctccagtggtctttggcactattcatggggcacccaggcagtaaactgaggctgctcatgataaaatctgctaatgaaaaacaccttgtagacttttagcattcttaggataagaaagaagcttgtaagtggtcgtggccattgtaatctttccccagatgaagtaaaagaagccaataaaagggaaataatgtacccagaatcacacaagttaacaaaagggctgggagaaaaacaaaaacaaaaacaaaaacagaattcttggttcctagcccgggcctttcccccttttcccttcccatgccaccacttctgcatccccatcatccttctaaaaccatccagattcaggcctcattttgggtttctagtctatttgacaactttgccaagaaaaacggatggctgtttgtaccactctcctcatgctctctccttgcaattgtgacccatgaggaggatggtgacataaaaatgaggaaataagagactggtggtgctgctgatccacaaggtgactggggccaatagaagagggaagggtggtctgggtttccccacctctttatcaggggtgtgggggaaagacattgtatttcttaagagcctgatgcatataggtgatgtggcaaaaccaaggtttaaattcttctccaacctggaagaaatgtccctcatatgcatccaatattctcagcagttaaaaaaaaaattgaatatagagaagtcaagccctggatggtaaacacgtttttgttcttggggacttcatgtgccgtagataattaacacaaggatttctgtggtggaaaaagaggaggcagttatatgaatttatggccagagtttcttagaatgacaaagcaccagccttgaatgaccagaacctgacctatgttaccaaagaattatgggaaagcataggagtcagttacaagctttattttgatataattgctctgccctcgaggaagcttacagtcttaccagagaggcactaaacacagagagagaaccaccagtgcgtttgataagacagacccaacatgtcctaaattctcagtctgaaggtgtgcctgagagattgaggcagaggttcttttacattaaagaagaataaagtacacatttagatggactaagaagaatcatctttagtcactttccaaataactttgacttttgcaatgtagaaggaacataacacatttcttaaacccttatttaccgtcataggctgactaatccacatgtgggcaatggtggggaagtgggggaatagtgtctgagagaagatagagactataaaatgctgttcatgtgtgagaagattagatgatgtggtgggtttgtttttgttcttacaaggtggtcacaagaggggtggaacattcctgcaaatggtttcaatatatgcagatgtctcaatataggaatgaaattacgtctttggaacaacttaaataagtcaaatatacttggagctttaaaaattaaaaggagagagattcgaggtaagactacaatagatttgtgctgaagtagccgagcttttgttatcaacattaaaaattttaactttatgct

SEQ ID NO: 7241 - DNA, 2300 bp, Homo sapien
taatttggacagagatatttcaagacattttcagatataaaccataaaacaaatataccaaataatatatgtaagacacaaagagaaagcaattgatccgaggctactatgtatataacaaataagattttatcttgttaaaacacccgcatgcccgcataaatcagtcagaaccagatgactctttctagctgttgattcctcctcctcacaaagagcccacacgcttcattttgcttaattgtcactttgaggaaaatgtttcttcctttctttccttcacacttccctcttttccttcattataggaagaaacttctcacttacatatgagaaatcacagtcacttttgtgaaatagcttatgctgaacattagcccttccttctctggatcccttgaatgctggaatagttaccaggctgtgttttcaactgaggacttcctgttgcccaatactaatgtatccaatgcagattacaagaaagattaaaagtcttgcaaacacatgaatttttttctttctatcccaagcatttaagactttcttagtacttttcttaagataatatatgcaaagggagagataagtggaggagttagaggaatatagtaatggaggaaggaaaaggagattttgcttactagtttctagcttttgttttccagcaatccaaagaacaatatctcactaaaaagtttatgatacatgctttagaaagatatatcaaaagagaagagttcctagagtacagggtatgagaggtatcatggaatggagggggaaacacgataaataagagaaggacacatgtccttagggaatagaagattcccctggtcctgaaggagagggttggagagtgggagatgaaagctgagatgcagatgggacctgggaaacagggctagctgagaaacaaaaactcggatagttgttttgggtccaaagagttaaggccttcttattctctaaggagggatccctagaactagaaatgccagggagacagttttgcccatggacctgcaggaacaagagatattttatggagaatgtgcacagagagttgtatatattgttagagaaacaccaaaatttatctccaactcctttgttgtcaaacataaatatctgtttctgagctctgccacgggaacttgggagcacttcaggtgagtgcagagccaggaaaagacgcatcaaaatgagtagaaaaagtcgtggcattttactcgtcctggcctctttcaccctgatacagtgagactcgatctggagaaaaccctgaagtcccagcttctcccttagggaagcaacaggagtgggccatgagtccagcattctgggtttccagcggggttgcccaaggcactggtttctgtcttacatgactcagagtgcagagtttggatgccatgttgggggcctctgagaacaaaggcaagcaccctgtttcagcactagggagattgtagtactgaaggcggacaccagggggagaaagaggttacaggctccagacaagaaacaagcaaacctctttaactgggaaattacacacacaagcccataaaaagcttgaagggcccctagaatctctagctatgctaaccaataaaggtcttccaatgtatgaagccactctgtaatgactggaggaggttgggtgtatttttcaaatattaaaagcactgcaggataaaaactaagagcatgtctagtaaaatatgataaacatatctaagatgcatgctaatagacaaaaaataaatgattagagtgcatttgtctaaaaaattcatcaaatatatggcaatacagttgttgtcagtaggactgggcaaagggacattgctgcatattgcaaattttgtgtgaccctttgcctctggatattgggacctctcaagattcatgctgctgccaccctgtgatgtgtttattatctataatggactgtgtcaaacattatggaaaaatcctcatgataccaaggttgtgtggctttcactgctccataatatcagtttctttctctaacacacaggccaagtctggactaattggcagaaactgacttaccagttttgcagccagaacttgggagctctgtacttttaagagctaaatctattttttcttccgtagttggcaacaccattatgacatcacaacctatttccaatgagaccatcataatgctcccatcaaatgtcatcaacttctcccaagcagagaaacccgaacccaccaaccaggggcaggatagcctgaagaaacgtctacaggcaaaagtc

SEQ ID NO: 7242 - DNA, 2300 bp, Homo sapien
tggcctttagtttccccacctgtaaaatgctgaagttggggggaaaaatcgtttcactttcattccggtggcgtgatacgagattctaagaaacagggagaaaattccgtgagtggagccaataaccaagtcaaacatcaggggggtctatgaacactgctccaaggaatctctctctggataaccagaccttgtgccctagccccagcccgtcatctccactgctagagaaaaaaaatacagttagtctgtccaaggctgttagagtcctccaacatataagacgcatttccattttactagcttcatggtctgcttggggtggggatggcggggagatcgtatccttgaagtaggcactaggactgtgagtcacttgcctgtctagagcaccaggactgtttgcaaagggctgaggagatttccatcaatggaaaagagcatgaatttagagtaaacatagattacacttagagatcagagatcaatctagagataaaatacacttttctctaaagggggtgggagaagatgttggacaagaaataccagattttcttaatggttcatttatgtcaggctctatggtggggacttttatgttatttgacttaatcctcacaacaattctgaaaaatcttttttcaaattttatgagaaagtgaactggatatttaactgattttctcacgaattccttctgaggctcagaagtgtgaaagaagcccaaatgaccaaggttctttaacaatttggtcaaaacaggtcatagacccagaggaaggtctggatcctggaagttttcttaagcaaagacagtgcttgttgtggatatgaagatgttgactaagctgggcacagtggctcacacctgtaatcccagctttgggaggccaaggcaggtggatcacctgagatcaggagttcgagaccagcctgaccaacatggtgaaatcctgtctctagtaaaaatacaaaaattagacaggcatggtggtgggcacccatagtcccagctactggggaggctgaggcaggagaatcacttgaacctgggaggtggaggttacagtgagctgagactgcaccattgcactccagcctgagcaacaagagcaaaaaactccatctcaaaaaaaaaaaaagatgttgaccaaatggcagactcttgccatgaagcaagcccagacctcagtgccaagagatgtgaattagattcctgcctcttccacagactagacatgtgactgggggcagattccttcagcaatatcacctcatttggagaagaactggactaaaataccctccaagtagtttatgagttatttaaatctcccaggcttaggtttgctcctctcttaggggatagccttgccacccttcaggaaatggagactgtatatggagcatgttgtgccgccagctgctgcatgtcccagagccatcttaaaccctacccttctgaacaatggctagtctacaagaagccttaaaagggatgtgaaagtggcaacagtgtcccctcaacaacaaatacttccccaaatatgagcttgtgtggagcctgatgactctgcctctgaggccaatccactggcatctttcccaagatgtgcctggacttccctgagcatgaggccaaagatggagaatggaaacacccaaaagaagtaacaaggagacacggaattttccacaggttgctttcagcttaccaagagcctggaaagtgagagaatagattctccaaaattcaaaactaacattactattatcaatatttattgtctactttttgtaaactctttgcatcttttttctttaattctcccaacacccacagagtggaattattattatccatccaccatttatttaatagacaagaaaactcaggctaagcaaaactagatgacttaaataattctatgtaggagtagggaaaatgaattttaactgggaccgtacaaatcactagtctgcacaaaggtctttttctcatgtgtcacttctatcttgtgtcattttgccagacctcagaatttagaaagaggaagcagaggcactttttatatatcaactgtctgtaactacagcaaaattcacatcctgtgtaatcataaatactgctctaagaaagggacaggaagtctcagaggctggagagcagagcaccaagatcgttctggcaggaacagccagtgggaggttccagctgagcgctccccagaggtgagctgatccccagccacagcacacaggaccaggctgcgagaacaggtagacaccttggttta

SEQ ID NO: 7243 - DNA, 2300 bp, Homo sapien
aaagagatcttctcaagtgcttaggattacctctcaacacacagcaagcatgtccctgcctcccatgaatcttaccatgtaaatccaaatctctgcaatcctgtggcaccaaccagtggtgctcattctattgtttaaaaatggccttcttggctgggcgcggtggctcactcctgtaatcccagcactttggtaggccgaggtggacggatcacccgaggtcaggagtttgagaccagcctggccaacaaggtgaaaccctgtctctactaaaaatacaaaaaattagccaggcatggtggtgcgcacctgtagttccagctacttgggaggctgaggcagaagaatcacttgaacccgggaaggggaggttgcagtgagcggagactgcaccactgcattccagcccggcctacaagaacaaaactccatctcaaaataaataaaaaaataaataaaaataaaaatagactatatatagtctttgaattcatttattttaaataaatgaataaaataaaataaaaaagaatattcagtcgttggcacataaactatgttctcttctgtcatttcagggtaggagtcaatgaagacatcttagtcttaacaagttacagataatctctgactggcatgttttctgcttctagcttggagctaaatgctgctcatgctgaaaagaataatgtctatttctttgtttgggtattagctctattttgatctatagcacagttttgtaattcagatcatcacccctgcactttgtaccacatgggcgtattctttcttcccagtcattgctgcaattatcttgtctgttctttgtgtaatatgttctgtgtgagcctctgcattaaactcgatttcttgggcaattatggaaattccagtgtggctgcagtttaactttgcactctctatgcatatgaggtttcctaaataaatgaggagtagcatagtttaaaatatatatatcttataactttctacaacaaagaattattgagtccaaatgtcatcagtgctcattttgagataccctgctatcgatggtcgctacaaaccaggaaatactcaagttattatgtgtatacattggttttagttttatgaaacaatttaccttcatgatctcatagttaaaattgtaataaatttaggaatataaaggatcaatatgggaagcaaaatttctaaaggcagtttctgttgttttaattagtatttgtgtagttcaaaccaggaaggatttgactatcattagattttgcttaactttatgaaagctaaaatattctctgttataaaggggcaactccatctggtcctatagcatctttactactgatttttttttgtttaatttgaaaatgcaaagaattgttaaatgttcttaaatgttctcactacaaaaaaagaaaaaagataactacgtgaggtgatggatatgttaattagctggattgtggtaatcattttggaatgtatatgtatatcaaaacatgtagtacaccctaaatatatataatttttatttgtcaaatatacctcaataaagatggaaaaaaatcgaaattcaaagttatctactgatttttataatacagagaaatatggttaaacagtaagttagaaaattcatcaagtaaaagaaactcctttcaaaggagggcagaagcgtggctgagtttaaaaaacatagattttggagacaggtcaagttgagtttgccccttccctgtcctgtatgtctttgggtgacataaccttgctgttcctcagtttcagtattgtagaactgttaaaagaataaatgttagtgcatgtcaacaccttctacacagttcccagaacataaggaatattccataagttttagttcctttataactcatgaacatatgtgtaaggacttgtttcgtatataccatctattctttgtttaccatatgtttgtaagcaaattgacaagagagtaagtcttctggatacagtacttttcaccaggaagatggggggctgagcatgctctagaattctaaaactctgtgactcaactatgattctgagattctactactgagtagagtcatcactaagggctcatctctgagggctccatgtgactctggtggagaggtagatcatgatttgggcggcaatgtttgctcactctttcccttactagagttctgccatagaatcatggagtcaacatcccaggacagaagggcaactcacgtcatcactataaaaccaaacgaaactgtattgactgcatttccctacagacc

SEQ ID NO: 7244 - DNA, 2300 bp, Homo sapien
gagccgagatcgcaccactgcactccagcctgggcaacagagcaagactccatctcaaaaaataaaataaaataatgtctgcactgattcagtgtgacatttccagtattatagctaagctcatagaaacacatttaacctataaagaatcaacaaaaaatgaactttggaaagagtgcaaacataaagcaagacaaagtatctgctcaccatgctaaaaatggcaataataagagaaataatacttattactcttatttttattactactacaatttacttagcatctactacactccaggtactttaaaatttactcacaataactgtataacaatttttattctcataaaggaaatgtaatattttaataaatatgtaaattaatagataacttagcctagaccccataaatagtaaataaaagggcttggggttcattctaggtttctcttctccaaagagtaagtcttccactgcatcaccagattgcatgaattaaagaataataaaaaacaaagaacaataaaaaattaaagttatatttctgccatttgtcagatagctattataacactgtgctagtcatcatgcttagagggagaaaaaacaaaaactggggaaggtatagagcaaagttaaaacctgagtaattagggtgaaatggtgttttataaaagtatgttgcaacatagtgtgcttaacttagggaatgctaacacaacatcagatgatgttcatgaaggataatcaccattatgattcaacgtccatagaaaactgaacaagagatggatacgttcagagaaaagaaattgtgagggaggggtggccttttaaaatattctaactggcaactggtaagtggctagaggctgtcacatcatgaggttcaattaaggaagacctgatctcaataggaaacaccagaaaatgacaaggtacagttaaaaacagacacaaattgttcccttccctttctttcttgtcctttcaagatgaaagtacagatcctcccatgaagacattagggggcctattttcttacccctcgaatctgggttgtctatgaaatttgattggccaatatgacattaacacacatgactcagcagaggtttgaaaagtatttgtgaattggaagagaaccaagagtctgccaactgccagagacatgactgaggccatcctaattcatgtaattggacactccaccaggtgaccacagttgcatgagacagcctggtagagaagtgctgagcagccttagatgagacagaccacacacaggacccacagatgtgtaaacaaaagccgatggtggttgctggaactaactacattttgagggatttgttacacagctaaagctacttaaatcaggtggcaaaaccacaaagtgacaggaaaaatggatgttatctatacttcaagaagtggttaatttgttccgtggcctgagagattttgcgttctacctgtgtctgaagatatggaactggaataaatgtgtatctagttgccatttggtaactaaaatgtccttttttttgagacagagtcttgctctgttgcccaggctggagtgcagtggtgcaatttcagctcaaggaaacctccggctcctgggttcaagtgattctcatgcctcagcctcccgagtagctgggactacaggcacgtgccaccacacccggctaattttttatatttttagtagagatggggtttcaccatgttggccaggctggtctctaactcctgacctcaggtgatccgcccgcctcagcctcccaaagtgctgggattacaggcgcgagccaccatgcgcggtccctaaaatgtctttatatgtagatcatctagtccaatttggtcaatgtatatatgaggaatcagaaaccaggagagggggatgtgacttgccaaaagtcacagtaaactcctaactaaaccaggactacttgtcaggttctctgatccccagtcccaggcattttacttatagccatcttgggatcttgagcagtcctgagattctatgactctgtgactctatggttctataattccaagacaaagcaaacaattccagtgctccaggcagcctcagcacaagaaaagaacatggtctagactgaagtaccaactaaatcatctcctttcaaattatcaccgacaccatcatggattcaagcaccgcacacagtccggtgtttctggtatttcctccagaaatcactgcttcagaatatgagtccacagaactttcagccacgaccttttcaactcaaagcccc

SEQ ID NO: 7245 - DNA, 2300 bp, Homo sapien
ttccttctcagcactgccagggacacagcaatcacaaaaactgaccctgccttcaagggacaaggagacaatggctgattaaggcaaggacacaaataattatgatgtagcacacagttttcatatagaaggcaatgattaaaaaaattggagtgctgggacgtgcagagaataaaaaggaaattcacatcaggaaaatactaactaaataaaagttggcatacttttatgtagactttaagattgtcttttggaagcaaggtcactagataatgaaaataggcttaattcaaagagaaatattttaaatatgttatcaacctaataaaatattctcaaaccttgggggaagagtgatggtgatacatcaaataagatgctattgacaagtccaaattgtagtgagaatttcaacacactcaagcactaaaatgttgatcattcaaatgagcaaagacaaggtaaatgtttatgcattcatacaaattcaaattcaagtttatttgggaagaatcatacatagagccacctaagttatctcattggccacaaagtagcaaacaacctgagactgactggggaaatacagggctcaaacagagaaaaggatgcaaaagaccaggttgtgctgccacaactcaagcccctttgctgccatacatttgccaagtcctgaccctgttcccatgccaactaaaatgaaggcacatgcctctaaccaccccaccatccaggactcaaacctcaggtttcacaatcatccacaactcagaccctaggtaattgtcctcccatcaccaatcactcaagcatttcagcagatatgcatagaccctcaattagaatgttaaatggatgatggatcttctgttcccactctccttcactctacagcatctctgagaggtgactgcatgactttacttgagtattcttgaagaagtaaattctctattgaaatggtagccagttcccctaatgaacggctccaacaatttttttttttagagtggcatctttttaaatatcacaccacaatcagcctccccagaactacttctacccagtggatctaaccctatggttccaaactatcttaaatttaaaaagagaggcagaaagagaaagagagaagagatgaaagagagagacaggaatgaacctcgaattaggcaacagagctgcctgccatatttcatccctttagattaaataaacaaataattacctaactatagctctgtgtctctaataaaatgaagcaatgaacagggaaataaaaatgtaattaaaaatcccacatatgaacataaaagttgaatattgtagggggagagagaggacattatctttgggcaaaactttgattcacatcccaaatatttagactctcctgacactaccaacttcttccatttccctacttgatctagtactgtgcttgatgaccctgcagctccagactagactaaaaagagaggggacacaagggaacttgacagacagaagaaaaaggtgggttcagaggtaaaagtgctatttcaatttatatttccaaatatggaggctaattcttgctttgagtggctgggtacatgtactatggcactaaagtataattttaggccatttctgctaaatctgacacaagatatatacatggttcataagaaacttaagtgtgagccaatgaggacaatatttggggacccctaagtatagtgctgccaagtgtacagcctcagtgattcttgaatctctgcatggatgcctcctgcccacctactcagccctaaaagtgaagccagaaggtaaaagtcagtgctaacggcccatctttgaccaacttctagaatctttcttgtcctcagggacctaccatccacacctgcttatagggtgggggctgcagaagttcttctaattaaggtagcatgagcatgccaggcagtcccctggggtctttttcaagaagtgaaacctggtaaggcagaaactttttttgcacctccttcagctatggtaagtgttaaaccaaagtaattggagcgaagcccaaggtagcagaagctactgatttcctgtcacctgatgtctatcagcgatttcatcttcaggcctggactacaccactcaccctcccagtgtgcttgagaaacaaactgcacccactgaactccgcagctagcatccaaatcagcccttgagatttgaggccttggagactcaggtaaggaatcaatttgctttctttaaatgacttaaaggaggtgatggataaggtatagaatggttttgaa

SEQ ID NO: 7246 - DNA, 2300 bp, Homo sapien
tactatgtaaaatacatacatgcgcacacaaaagtttacaaatcaaaatgcaaatactatcattaattatgtctgcgtggtgagattgagtgctttttctctcctttttttattatctgcattttccaattttgtccacctaatttaaaaggcattaaaatgcagtatggctctccctctccctctccctgtccctctccctgtccctctccctctccctctccctctccctctccctccctctccccctccccatggtctccctctccctctctttccacggtttccctctgatgccgagccgaagctggactgtactgccaccatctcggctcactgcaacctccctgcctgattctcctgactcagcctgccgagtcgccacgcctgactggttttcgtatttttttggtggagatggggtttcgctgtgttggccggtttggtctccggctcctaaccgcgagtgatccaccagcctcagcctcccgaggtgccgggattgtatacggagtctcgttcactcagtgctcaatgttgcccaggctggagtgcagtggcgtgatctcagctagctacaacctccacctcccagccgcctgccttggcctcccaaagtgccgagattacagcctctgcccggccgccaccccgtctgggaagtgaggagcgtctctgcctggccgcccattgtctgggatttgaggagcccctctgcctggctgcccagtctgggaagtgaggagcgcctcttcccggccaccatcccgtccaagaagtgaggagcgtctctgcccagccgcccatcgtctgagatgtggggagcgcctctgccctgccaccccgtcaaggatgtgaggagcgcctctgcccagtggcgaccccgtctgggaggtgaggagtgtctctgcccggccgcccagtctgagaagtgaggagcccctccgcccagcagccgccctgtctgagaagtgaggagcccctccgcccagcagccgccccgtctgagaagtgaggagcgtctccgcctggcagccaccccgtccaggaggaaggtggggggccagtccccgcccagcgagccgccccgtccgggagggaggtgggggggtcagcccccgcccggccagccgccccctccgggagggaggtggggggcgcctccgcccagccgccccttctgggaagtgaggagcccctctgcctggccatcaccccgtctgggaggtgtacccaacagctcattgagaacgggccatgatgacgatggcggttttgtggaatagaaaagggggaaaggtggggaaaagatagagaaatcagattgttgctgtgtctgtgtagaaagaagtagacatgggagatttcattttgttctgtactaagaaaaattcttctgccttgggatgctgttgatctatgaccttacccccaaccctgtgctctctgaaacatgtgctgtgtccactcagggttcaatggattaagggcggtgcaagatgtgctttgttaaacagatgcttgaaggcagcatgctcgttaagagtcatcaccactccctaatctcaagtacccagggacaaaaacactgcggaaggccgcagggtcctctgcctaggaaagccagagacctttgttcacttgtttatctgctgaccttcccttcactattgtcctatgaccctgccaaatccccctctgtgagaaacacccaagaatgatcaataaaaaaaaaaaagagactataaacataatttgagtgtttagaaatttaaaaataaaatcccagtaaaaaaaataaataaataaaaataaaaataaaaaaatgcagtatgatattgcaatgattgagcattagaaagctggagaaaataaatactaaagtgtttgggagggtcacaataggcttcccagtaaaaattagaggaggatgtgaaagcacagcgtattccaaactttacagttgcatttacatctcttgaggtgaaagagaaataaccataaaaggactctggaactacataaagatacaagacaaattggtttggagaacggaaataaaatctacctataaaatccaggtaaatatctgatactggcacacaggttggagcagagaaagaggaaacatagaggtgccaaaggaacaaagtaagtccattgatacgttcttgcctatctctcctccaaatcaatgggcacaaactgtggctggtctacctgtgtgggttctgttctctagattggagggatgaagacaagttcttgactctatgttgaggccagttgaaaaatgaggg

SEQ ID NO: 7247 - DNA, 2300 bp, Homo sapien
taagtttaagctattaattagcattttactaaagaatagtatataagtgatatagtaaacatatgaaaactgaaatctactatatatatgtgtgtgtaccagcatatatatatatacctacatacatatagattataccttacataaatatacatatgtatggacattgcatttctacaatgaattcaattgtttagtttccccagtttgcatagatttccattttactttactagaacaccctagtgtttacacagaggaaacatctgttttctctagtgtataaataaataaaattcctcaaagaaatctggacaagttattttatcagggctcacagccaacagggtccttgtaataatccccaacaatggttttaacaacattatataggcattgtggttccagcacattttcactaatgtcttttgtatactgggaactaattcaagagaaattaacaatatgatccacatggagaaataaaagtcatattggatgtcaaaccatgactgattgattgcctcttcattgctgaagaatacagtttttaacaaccaaaggataaaaaattaaagtgaattctgaatttccaaatccagtttataggtactgagaaaatcaatgttgcttttactgatctgtgatattagcagaagaaataagatgtaccaaggaaccatgcctgtctcatagtttggctcactcttctatttttgcctatgtttatactgaaaacacattttggccccagtccaaaaaaatgaccaaatccatgataatttccagagactgttggccaaagcttaaatgaagaaatatgtcacttctctcacaaataatcaatcagtcttggcagcaagttacaatagcggtccatctcatcagaactggctcttactactatggattctaaaaaatccataaccctgaggttgaagacacagttcctctttctacagcaaagagaatgcttaatattatcggagccctgtctgctcatagacaaggaactcacaaaataataataatgctagaaactgaagtggtatattacttaagaataaaactattaccttcaatgacatactgaccaatacagaatgtaaagactttagaagaggctgggctttttttttttgtttttttttcctttgatttgaggggactttggagtctcaatgtaaggaagctagctgtgagactaaaaattaagattctcaatttacagttgatttttcaggctataaaagatcttgatggcttttagacacactcatgatttagctttttgcaaataaaggtgttgaaagcatagaaaatttccttatgaaagaaaaatctgtcttgttttctgcgtgttttactcactggctatcattgactaaaaatttacactacaagctggaattttaactattccacaatgtcaatttaaattttccatgaataaatgagaaatgccattgagtggctgttctccaggtactttaaacgcctcagtaagtcatgatagctgcctaagaggatggtctgtactgctcatctaaagcacctcttcataaacactgttttaactactgtctacacctcaaacagaaaactaacaccacgtgtcacctaaaaggtaaacccgcctcagcaagtggatcaaaaagtcattctggtgtcttgttaagtattactttcatcactaatttccttcttcagttacttatgtttaaagaaaaaaaaagtgagccattgatttagccacttcactcgaaagtgcaccttccaaaggtgctcttgtggtcaaaatttttctttgaagacagaaaaggtgaagggcggacttctcctcagtgatcctggtcactgtgcagcaggtgggtgtataagaaatgcaccaatatgggcaatctcagaatagaggtttgcagaaaccgttcctagaggcaccaaaacgtagttaaccgggtgtctgaccacatggctgccaggagcctagtgagtctgcgcacacgcactacctccgccccggcagttcctgagtgggtgcgcaggcgcaagaggagcacaccgttgccattgcagaccgtcactccctgaggagcctgagagccggccgggtgctgggctcctggctatccctgtgatggtagctcagcgagatctggggacctggcgctgagcgcgttgccagccgggatcttcctcttcatctaggcctgggcgctggcgtgagaactcggactgggtcctggacgagcgccccccgaaactccttggaaccttgaacaagtaaaatgcagggtagt

SEQ ID NO: 7248 - DNA, 2300 bp, Homo sapien
atgattattttctcacaagcttaaaagactacatatctaacattcattcattctttctcaaatatttacggagagcatgctatttgctaggcattgtcataggcactaaggatgcaatgattaacaaaacaatggcctctccattagggagtttgcattccactgggggagaaaggcaataaacaaacacataaaattataaaatgtcaagaactgaaaaatgttatgaagtaaaataaagcaaactaaggagataaggcaagattattttatgtaggatggtcaaggaagactactatgatcaacaactgattgaaatacagaaacaactataagactacatggtaaaaggatttctgaagagagggaatgagttgcatttccagaatggctgattgaggacatggtaactctccctaaaaatgaaattataaaactgaacaaaattgtcaatgaacaaccttctaaagattcaggaagttgaccaagcatacaagaacttgagaagtgtttatttaagaaaatctactggacctcagtaagaacagtgcatgtctgtggcatgttagcttgggactgttcccactcttcccacctgatatggttaggctttgtgtccccacccaaatctcatcttgaattgtaatccccaggttttgagggaggaacctgatgggaggaaactggatcatgggggcagttttccccatgctattctcatgatagtgagtgagttctcatgagatctgatagttttataagtgtttagcaagttcctcattcactcagtcttctttctcctgctgccatgtgaaaaaggtccttgcttcccctttgccttacgccatcattgtaagtttcctgaggtctcccaagccatgtggaactgtaagtcaattaaacctctttcctttataaattacccagtcttgacaagtttgttatagcagtgtgaaaacagactaatatactaccccaccctcagattccgttacgcagaagtttaccttggtgggtcagactgtgaggcccagcagcctcattgcttgagatgactagttttatttggaacagagctcagaaagttccaagaccaaaagcgttattaaaacaacagtaatcccagtgacaaacaagcagataaggccaaggtcactcctagcctgactaagatcacaatacttgttggggcaaaaaatttactagcaaccaaccagaaactcaacagagaaatttgaagaacaggacagccacagtggaccttgataacttcctacttttcccctgtagtctggaagaatataaatatgtgcaaagctatacacatactaaggagacaggagaaggtcctagtgagcccttggttgaacaagaggccttgcaaaaataaagtaaaagctggggcaacctcaactttgaatatattgctcaagctacactgattcattgggaaagggtagaagtcttactggctcaaggtgtctaatactttcctagagcttctataacaaagcaccacagactgtagcttaaacaacaaacttattttcttacaattccagaggctagaagttcaagatcaaggtgttggcagggttagtttcttctgaggcatctctctttggctttcacttggctgtcttctccctgtgttttcacatggtcttctctttatttgtctgtgtcctagtctcttctaagctcaccagtcatattagattagggctcattctaattaccttattataacttcattgccagttaaaagaccctatttccaaatacagtcacattccaaggtactgggagttaggacttccagtattccaagatactaaccactggtattgctaaccaccactcctgggaaatgaggcaatcagaatctaaaattgctaccatatattatctaaaatgtccagttttcaacaacaaaaagtatgcaaataataatagttacccatagggttcaaaacaacacttaatagacatagcgtctttgagcaagggaagaataaatgttggacttaacaaagaaaggcttcaaaaattagtaaagtaggttggaggagccaagatggccgaataggaacagctccggtctacagctcccagcatgagcgacgcagaagacgggtgatttctgcatttccatctgaggtaccaggttcatctcactagggagtgccagacagtgggcgcaggccagtgtgtgcacgcaccgtgcgcgagccgaagcagggcgaggcattgcctcacctgggaagctcaaggggtcagggagttccctttccgagtca

SEQ ID NO: 7249 - DNA, 2300 bp, Homo sapien
gcaggatatcacaattgagataccggagagaatgagccgcaaatgtaaatatagggtagctcctccatttattcatacattcatcataaactactttttgacaatctactttgcaccaggcataattcttgcttctggcaacagatttaaacagaagagacaagatcctgccttcagggagcttatattctagggagaggaagtcagtgacactatatggaccatgcactggtcaacaaagcaaatacataaaaatttaaaaggccaatctctccttcccccataaaaaaaaaaagaaaaagaatcatagtcacccttggagggtgttcattatttcaaaatttcataagtaaagagataaagcacacatcttgcctttcatttttgtaacagtttcattgagatataattcacatattataaaatttacctatttatttgtgggtttttttgtttctttgtttgtttttgagatggggtctcgctctgttgcccaggctggagtgcagtggcgcaatctcagctcagtgaaagctatgcctcctgggttcacaccattctcctgcctcagcctcccaagtagctgggactacaggcacccgccaccatgcctgactaattttttgtatttttagtagagccaggatggtcttgatctcctgacctcgtgatctgcccgcctccgcctcccaaagtgctgggattacaggcgtgagcgactgtgcccagcctgaaatttacctatttaaagtatatagtttagtggcttttagtatattcacagagttgtgtaagtaacaccacctaattttggacccaaacccattaggagtaattcttattctccacccacttacctcagtattagcaaatcactggtctactttctgtctctgtggatttgcctaccagggctattttatatgaacgtcttttgtgacttgcttctttcacttaccgtaatgattccaaggcttattcatgctgtagcataaactataactttgttgtgtttcattatcaaataatacattatatggatataccaaatattgtttgttcattcatgagttgatagggatttgggttgttttcatttttggctattaggaatatataagaatgctcctatgaacatttgtgtgcaagttttttttgtaatgaggactttcctgactcccctcatttacatttccattgacgccacctccctttcatactttattattctccttagctctcattattcttaacatgctataaattttccttatgaatcttattattgttttccttattattagaatttcatctgttttgttcactacagtatccccagcattgagaacaatgcctagcacatactggcactcagtggaaatttgctaaattcattaatcataaaaacggcaaacataaaagagttcaacaaacatgactgtcatctattactcattagccagctgatgctaacactttaataaattagacaaaaccttgcaatcattcatttattcctactatgtgttgaggatagttgttaaacactgaatatacaactcaaactgtcaggttcagcatgacggacatatatgcacccggttattgcagtggaatatgtttgtaatcgcagtggaatgtgtttgtaaaacatctttggttttcaaagttctgcagtataagcgtatgaggtacctgagcgggtatcatctccactctacaaaataataaactaaggaccaaaggagttaagtgcagtgctgtacccaccacatcttgcagaggattctaagtggcaacgagcttctgacaacgatgctgcttctaagcgggggtgtgtctggggttagcagtggggccaccacgtgatcagtccgccgacagatcaagcacagcctcttcctcctgggtgtgccaggcccagggacagaggatgatgcccacacagccagcaaagggcagcattgttgtcagccgccaccccaccctcgtcttgggagcctgcaggctccgcggagccatgggagccccaccgcgcctcaggtgtccgcgcgggtctctcggacagccccgctcttggacgttagaaccccgcgaggcagggtgaggggcgccaccgaggaagcgcccaccgggctcccggggctgccaggccccaaattgaggaagttgactgccagatcacactctgttggcccacgcgtgagtgtagggatccctggttggatttgcactggcgctgggaataaaactagcacctgctgagggtcaggtgttccccacgaccccatagtcacagt

SEQ ID NO: 7250 - DNA, 2300 bp, Homo sapien
tgaagatgcagcatcaatacagcatttgctgcagagtttgctcagagtttgaggctgcagtgagctatgatcacgttactgtactctagcttgagcaagaccctgtctcaagacctccagagtggatcaaggggatatagatgctgcatcaacagcatttgctgaagtaggtttggacaataataatctcccttgtatgtctccggtcccttctagaaagttggcaccacttctataaactcaattaaaaggtgacaaatttcatcttctacaatatctggttaaacctggtcctgaatgtcccacgtgcactagggcttagccacctatatgtcctcattcagatgcctcttattatttctgtcaatacagtttggttcatgttattcgtctttacaaaaagctattgagttactttatagagttagacaaatgctaaagttcatttggaaaaacaaacatgcaagaatagccataaaatataatgaaaaaggaaaaattacacaggagactaaccctacaggacattgaagtacactggaaagcctctataattaaaacattgttgaaataacacatgaatagacaaatagaccaatagaaagtaaaagaaagaccagaattagaaccaaatgcatatagaaatttaggctgtgacaaaggtggcatttcaaatgccgctgaagagaagatgagctatttaataaattgccctggggcagccaggtagacttttggaaaaatttaaaattagacccacatctcatagcattcacaaaaaaatacattttacatgtattaagaatcaaaatgtaaaaagtaaaacaatacaagtattagaagaaaacacagctaaattcctgtttaatcttagtgttaggaaaggctttcaaacaatgactcaaatgcataggtaataaaagataagactgataaattttactacaaaaatttttaaaatttttcttgacagaaaaccaccctaaacaaaatcaaaagacactgtcaaaattggagaatataccaaagacaaagacctaaaatccctagtatgtaaagaactctttaaaaattaagggacaaaggtccaggaatctgatagaaaaaatgggtaaagaagtaaaatttgggttaggcatggtggctcactcctgtaatccctgcactttgggaggccgaggcaggagaatcatttgaggccaggaattgaagaccagcctgggcagcatagtgaaatcctgtctctacaaaaaattttaagatttagctggccacagtagtgcgtgcctgcagtcccagctattcaggaggctgaggcaggtggattgcttgagcctgggagtttgaggctgcagtgaactatcactgcactccagcctgagcaagaccctgtctctaaaaaatacaaacaacaacaaaaaagtgaagtctgactccagctaccttttcatcttttttacattcaatgtccttcactgtgagccattcccaacatatctctaccttctcttccccaagacttttccctttccataccctcaacggtgttctttttgttttgaccatcttacaatgttctagccatcccatcaacttcatttgttcttcattgttcaccttcttcaacggtaaatctgtcatggactattacatgcagctgtttttgtactgtgcaattcacacgatgtatgtcatagatatgtggaatgccctcccatggatggcttctgattttctattggctctgacttggatgaaaatagatctaagttgattacaagtctcatttcactcgctgtgattctatccctttctggactgcagtttattgatttcatatgccaccttctgtttgaagtcttccctaatctcttcaagtccaacaaatcattttctcctctgttctcctgtggggacatttatctctcttctgtggtgtttatttcatcctgtctcatgttacagctaaatacagcacaccctgggtgcccagttcatttctgtgtctcccagagcaaccagcccaaccctttcttctccatggagattataccatagactcttgtcaaatcaaaccatatttaactggctcattaaccaaaacaggaaataaatacgaatgaaactgagctctaagcagcatgtaacctggcctgcatccaggaaatagaggacttcggatccttctaaccctaccacccaactggccccagtacattcattctctcaggaaaaaaaacaaggtccccacagcaaagaaaaggaataggatcaagagatacgtggctgctggcagagca

SEQ ID NO: 7251 - DNA, 2300 bp, Homo sapien
ccacctcagcctcacgagcagctgcgacatgtgtgtgccaccacacctggctatttttttgtatttttttttggtaggggtgaggtttcaccatgttgcccaggctggtctcaaactcctgagctcaaccaatctgcccacctcagcctgccaaagtgctgggattacagacatgagccactgcacccaggcataaataaagttttattggaacacagccacacccatttgggtatatattgcctatgtctgctttgcactacaatggaagagtcacgtgtttgcaatcgaagttatatgggtccccaaagcccaaaatatttactatctgattctctctttttttttttttcttttgagatggagtcgcgctctgtcacccaggctggagcgcagtggcgcgatctcggcttactgcaagctccgcctcccaggttcacaccattctcctgcctcagcctcccgagactacaggcacccgccaacacgcccggctaattttttgtatttttagtagagacagggtttcaccatattagccaggatggtctcaatctcctgaccttgtgatccacccgtcttggcctcccaaagtgctgggattacagccgtgagccgccgtgcccggcctactatctgattcttgaaaaaagtttgccaaccctgctctgagtagttgtcatgtctactaataatcaggttagtgtcagatcctggaaatgagagactcagtggagacggtgctatttgggaagtcacagcacaatccctctggtgatccactctgagcatcacgtgttggtcacacctcctaggctgaagggagccatgttagtaagcccttaaaaatgtcaaatggcttcccccaccccttaatgccagcagattcttatcctgtgttttctcagccatctccttggaggtgcctccagtcactgaaaaccttgctcaagagcctatgtgtccttttcgctctatttctctgcatagggtccaacgctgtcccttgccccctttgttcaccaatataggtcagacctatcacaaaataaatggcacagaggcttcctgaagacacacatattttgagcacagaacagtgaggctgagcccttatcagccaagagcgcttgcagaaccacagagaatctgctgcacaatctgcaagctggtgctctcccgagcatgcatagtaggtctcagagcactgggaagcaatgcacatccacggtccattgtaagtcactggcttagatatgttatatttaacaaaacatctcagccgcatcgtgttataacaagtcacgttgtaagggatggattttatcaagttggtgtgtgtttcccaccaaactctatgagattggtattatccctatttcacaggtaaggaaactgaggcagagggtgaccctctcgctcccgtgcctcacagtaacaagaggagccagaattcaaaccctggcttctatctcagacccttacactgaactggtaaactcctcacacacccatgccaacaagaaggatgactgttttcgatctcattgtataatctggcagattcagcactctgttgtttcctggtaagctcatctcctgacacctgggtaatgggtgttttttcccaaagtgtttgcccaggccagccacacctaaagtgttggggtacatggcaacatatccaagcttatgtacgtggcatttgaggtcagggcatggaaaaatacggaggcactgtgtgtatgttatttgtgcataagaatgtaactccttggccctaaaaacaggacaaggagtgaagtgtgtcataaggaacgctgaaaacagcctcctaagaatgtggtttgagagcttttgcaaggccgcaggtgtctcatgaccccacctcaaaaagccatctagtggatgtttgtggtttaacaatccctttcaataaatacttggcggacagatgctagggcaggctctcacaagggcgggctctcagaagagctgcccccaccccctctcccagcccccttcagctgaaattgtctaagaactcattcttggcgttcactgcaagctataagctctgcaagtggtgaccccgacgtgatcgccttgaagttacgcttgaaggaggaaaactcatcaattttcggggaatcccggtaagggacagtcctgactcccgtcaggaggatgggacccacgcgtaaaatatcaggggttggattatcatgggtcaagaaatgaccaaagaacagaaagtgttttttaaaaacagtgcgacagctacttaaggctaaccagtg

SEQ ID NO: 7252 - DNA, 2300 bp, Homo sapien
aaggcgggatctaggggtcgctggatctgggggtcgctggatctgggggtcacaggatctgggggttgctggatctgggagttgtgggatctgagggttgttggatctgggggttgtgggatctgggggttgctggatctgggagttgtgggatctgggggttgctggatctgggagttgtgggatctggaggttgctggatctggggtttgttggatctgggggtcgtgggatctgggggttgctggatctgggggtcactggatcgggggggtcactggatctggggtcataggatctgggagtcacaggatctgggggtcacgggatctgggggttgtgggatctgggggtcatgggatctgggggtcacaggatctgagggttgtgggatctgggggtccctggatctgggggttgtggtacctgggggtcgctggatctggggtcactggatctgggggtcatgggatctgggggtcactggagcccactccacacctcctccaccagaacagcctcacggaagaccttcacacttcccagagcagcaccgtgctcatggaaagatcagggcacaagatgtggcaactgattctgtcagatgcaatttgtgggccatgcctggatcctggatcctgatttgaacaaatcaaaagtaacaagacatttgtgagataatcagaaactgaagctccgactagttatttgatacccggtaagtaccaaaaactagataagaacaggtttttctgactcctagggttaagcttgtcccccacaacaggggtccccaacccccaggccatggagctataccagtctgtggcctgttaggaaccaggcctcacagcagaaggtgaggggcaacaggcaagcatgacctaccacctgagtgccgcctcctgtcagatcagccgcagcaatagattctcaaagcagaacgggccctattatgaattgcacatgcaagggatctaagtggtaccctcatgagaatcgaatgcctgatgatctgaggtggactaatttcatcccagaaccatcccccatccccaccccggcccatggaaaaattgtcttccacgaaactggtccccagtgccagaacggttggggaccactgctctatgaaagtagtttcttttttcctttcctcttttttttttttttttttttttgagacagggtcacactgtgttgcccggactgaggtgcagtggtgtgatcacagctcactggactcaagtgatgctcccacctcagcctctcgagcagctggaaccatagacagggaccaagacacctggctcatttttgaatttttgaatttttgtagagatgaggtctcgctatgttgcccaggctggtctcaagctcttggctcaagtgatcctcccactttggtctcccaaagagctgggattgcaggcatgagccaccgcccggccctttaaaagactagtttccaaatgttcaacagagctctgtggggctgcagggttaaactctgagcgtaaatagacctcagtgagcaccaggactcggttttaatttttttgttctgatcatgtggtcacactttttttttaaagagtccatatcttttagagataaatactaaaatgcttacaaataaaatgggaagatatctgagttttgcttacttctgggggagaataagattggccaagagctgctgatggtggctgtagctcgcgaatgggcacaggggtgtcatggaaccattctctctacttttgtgagtgcttgaaattttccagaattaaaagaactctttcaaaaggttcaacttcttactccactcccaggatctaagacgattacaaccactttcactccatcagtcatgccctgaaaacagattaaattatcaacatttcccttgccaaaggaaatttacaactgtcaaggagagacataaagaagggcactaagattttcacctgccggggtttggcgggagggggaaggactttgacagcttccatgcaaccggggcatgaagcagggcgtgggtccaggagggagaagatccaaagtcgaatgttgtaaagatgtgctgatttcccagcgctgtctctggggagctccggcagcgcaagagggcaaagcacagctggaagctcagagctgcagtcccaggtcctggggtgagtggtccccccatggcaggaacagaggggagtgattttgtgtttccatgtggagttggggggttgctcaggtgtacagacctggtccccccttgaagccaggggaccggcctcttatacccc

SEQ ID NO: 7253 - DNA, 2300 bp, Homo sapien
gcctgtaatcccaacacttcaggaggccgaggcaggaggatcacttgagcccaggagttcaagaccagcctgagcaacacagggagaccccgtttctacaaaaaaaaaaaaatagccaggcatggtggcatgagcctgtggtgccagctactcaggtgggaggatccctggggcctgggaggtcaaggctgcagtgagctgtgattgtgccactgcactccagcctggacaacagagcaagaccctgtctcaaaaataataataatttttaaaagaaagcaaaggagtgtaaggagacagggtcccaacagcgatcgccacaccaggcgcttctgaaaatttcaggagtctcctctgggcctctgcacaccatgtataatgacaatgacaaactgagctcatgtgggagtagggggttctgggccagagcccatctgatgctgaggttgacaaagtgcctccaaatgtctgggggccacccaaaggcctcctctaaaacacatctccctctctctggtgaaaacctgagatcaccctctgaagtatttcaggctagactaggatatgatccaatcggcactggagagtgatccctccagctggggacaagagcttaggaggcagggcaagccaagggggactggagcagggcagaggggcatacagtctcctccagcactctggcaacacctgccgggcttggttctgagtgtcagatcattggggtctccaggcaggggcagggcatttaaggaactgaatggaactcactcctctgacagttggggggtggaagagctgggcaaggaggtgtcccggctgcttctgctgtggacagctgcatggccggagaggagcagtgaggcaggcaaagcccccctgcaggggtctccttgactcaggaacatgaggaagatgaggacactctgatccctgatattcttggacaatttcccaggccctctcacaagcccgcagctggagaaacaatggtttctaaaagaaaccactggaatgtcagacggggccctgggacctttaatggccaaccccaggcagttccaagaattacacaactgggccacttccaagatgttcttcctaagaagcatgctgtaagtaaatcaaagccccactcctaggtctcacacgaaagtctccacagccccacattccccaaccccacatcccgagagtcttctctaggccttgggaggtccagaagtcaacacctgctcactggtgaggtcccaaagtgcttagtaagcaaagtacatttacaggtgaatagcaagggaagggaggggaggcgaagcaggttcacacacgagcaaaaaccactgtctgggctgaaaggaagatcggagatgatccaacccgtttctagaactggggtagaagaagagggacgtgggaggatatgcagctggtcgagggcccaggtgagccacaggacaaaggtggtgcatcttattggtacctcaacttccctcacaaacgttgaaaacgctgaaaagggagggagagctatggattatatacggaagcacaggacggaagaatcaagagtgtgaacaattaacacagaaaagaccgatcttccacctccaggacccccaggtagcagtccctcaggtaggtgggaggaggactctgacaggatcatttgggatgcacgaagctagtgcaaaatgacccctattacaaatgagaaaacaggcccaaggagggcaggactctgcccaactgcaccggagttggctgcaaaacatccactgggccttgcctatgggctcctcggaccttttttcgactctgttctctccctgaaatgggtcctcccactttcccttttctacttgctcgctcttctttccccaggaaactttgcaagaaaggcaaaagcgaatcccaggaaaaagactggctcatcaatcacatgttgactgcgctcgcgcgaattgcgcatgcgcatgctgagccccactctccccaaccccggtcccgcctctccacccctcaccaacatggccgcctcagcaacagcccccctcctgtgcgtcacggacgcggcgactcctgacgtcataggaaggcgccggtttcggcgggggctgcacgtgcgcaggggtgtggaaacttaccggctgagccatggatacaccgttaaggcgcagccgacggctgggaggcctaaggcccgaatcccccgagagcctcacctcagtttcgcggacgagacgggcccttgtggagttcgagtcgaacccagaagaaacgagggagcccgggtctcctcc

SEQ ID NO: 7254 - DNA, 2300 bp, Homo sapien
acacacactgggttttctttagagaggaacacactcgcactggggctggacatgagtcactacagtgattacaggactggaaacaaggactgagaaggggcagatgagtaagggttttttagccagaaaagaagcacctcagcagggtggccaggagaggttgtgcaggatgttcactgtacaaggataccagtggaagggtcaagggtgggctgagatccagaggaagggctgtgccttatctcaagcctgatgccctggtgctgagatgtgtctgtggggtggggtggtggggaaggggtgattctttttcttagtccaaagataaatctgggctccaacccctgtcctttgagggtgggactgtgcagaaggaacaccatttaaagttcatattttactgctgtgaagttacttgcccaagatcacatagctgaggagtggcagtgccagatccagacactggtggtctggccccagagtccctgggcttaaccacagcctgacactctctgtgcgcagacaaggcacacgtggccttgtctgtggttcagtgggttgggtgtccggggtgggtggaaaagagggcactttccccatgcagaatggaatcatccacctatgttctctggagggctgcaggcatttgtctttggaaatcaagccttccctgacctggaggagaggggacattttcctattgttaatgatttggatcaccaaggctcttactgatctgccatattgggctacagtgagatgtattatccccatcacaagggcatagcattttactcattttccactcatgatggtagcctctcagcaagagcgtattatgcattagtctctgcgttaagactaggcctaaatggaagatgcttgtgctgtccatctcatgggaggtgcctttgcctcgatacagggatattgagttcttaaaatgttttaatgagtatccattaggtgctgagatgctgaggttgaagggatggtcctgaccccaggaagcttggtcagcaaatgagagtaaggagttagggaacaatgaaatgcaaacttctcttatcctagggctttgagcctgtgtgtttttttgtttgtttgtttttgttttttagtttaaatttccatttttttttttttgagatggagtttttactctgtcacccaggttggagtgcagtggtgtgatctcggctcaatgcaacctccacctcctgggtttaagcgattctcatgcctcagcctcccaagtagctggggttacaggcatgtgccaccacgcctggctgagttttgtatttttagtacagacaggggttttgccacattggccagtctggtcttgaactcctgacctcaagtgatccatccgcctcggcctcccaaaattgagcctgttttaaataaaagctatatgacctttgccttagagcctatattcatttttccctcagaggagaaggaagctgatttttataagcacttactgtgtgccacgagctttgtgcaatccatctcattcaacccttaccacagcctgtaaggccgatgttactgctcccgttcacagatgacaaccccagggctcagcaaacagaagtgactgacctcttggactgcgttcttgccactgcccccactaccccactgtactttcctggccttagagccctcgggtccctcatggacaggcccccacactgcctgggaaactcagaacagctggaggggtttcttctctgaggattctggtgtcgggagatggaagcccaggaacagtggacagatggatgagacattctccttctcacgcacttatcctacacactggtcactctcaaaagcacacccctagtcacactcgggctcacactctcttgcacacatcgattttttcacgtgcacttgcactgccctctggacttctgcagtctccttcatgaagcggggatgggtggagcaggggctgccggcattgatggaaattgatgatatttgaacatctgtgtggcaactcactctccagctgtccccgcctcccccaaccccacccctaaacacacatgcactggggctgacagctatttcctctctcagcctccctctcccacctctgtctgcccgctgcctcttgtctagctgctgtcaggagctgactgcctccagggctggaatcctgtgctccctctgtgcccaggtaaggaggagtggcccaggggttgggcagcctagtgccctctctagacccacagaagaaggcaaagttttaccaggtgagagggctgttaccagct

SEQ ID NO: 7255 - DNA, 2300 bp, Homo sapien
ccaactttttttgtttaaacttttattttaggttcagggttacttatgcaggtttgttatataggtaaatgcatgtccagagggattgttgtacagattatttcatcacccagatactaagcctagcacccaatagttattatttccacccttctccttcctcttaccctctacccttcaataggccccagtgtgtgccattcccctctatgtgtccatatgttgtcatcatttagccttcagttataagtgagaacatgtggtattggtttctgttcctgcatttgtttgctaaggataatatcctccagctccatccatgttcttgcaagagatgtgatctcattcttttttatggctgcatagtattccatggtgtatgtgtaccacattttccttttttttttttctttttctttttttttttttttttttgagacagagtctcactctgtcggccaggctggagtgcaacagcacaatctcggctcactgcaacctccgtctcctgggttcaagcgattctcctgcctcagcctcctgagtagctgggactacaggtgcgtgccaccacacccagctaatttttgtatttttagtagagacagggtttcaccatgttagccaggatggtctcgatctcctgacctcgtgatccgcccgcctcggcctcccaaagtgctgggattacaggcgtgagccaccgtgctcagcatgtaccagattttctttattgagtctaccattgatgggcatttgattccatgtcttggctattgtgaatcatgctgcactgaacatatgcacgcaggttcagtgtctttatgatagaacaatttatattcctttggatatatacccagtaatgcgatttctgcatcaaatgatagttctgttttcagctctttgaggaatcaccacactcccacagtggtcaaaccaatttacacccccaccaagagcgtataagcattcctttttctctgcaacctcaccagaaccgggctcttagctatcaagcctcttgctctccccttccagcagctgctaattataatagctgcattttctaatgtttgctgagctcaaacgctgctgggccctaggctaatcacttgcaggaattagtgccaggacgtggggctggtgacagtcccttcctcagaggatggtcaggcggtataaggatctaacacaagcaagacctggcactgtaatcatggcagaccacaggccattcttgttgtttccagccacttttatgtcttagaactgttctagatttacagaactgagaagatagtacagacagttcccatacaccgcaggcccagtttaccccataactgatcttacttgagtatgatacatttattacaattaatgaacaaacaaatgtggacacattattattaactaaaatccactttcttcacttttactgcctttttctgttccacgatcccatccagatgccacattacatttagttgtccttgttattttttattagtcatagtcatcatcatactgaccggctgaatcctcaggagagcccttggaggtgctactggtctgtttactcacctgcagtccccattccgctgccagctctgagggctgtgtcttcctggtcttgctctaatgcccctaaagccctgcctgaggagctgtgactgtactaaccaggccggcagctcccagtggtcctgaggcctcaaggcaggaaggaggacctggagagcctgttggggcaggaagggaatgcagaaaggctggggtgagagggagacagtggagggcctgaggtctgcagtgccacctcctagccctggatcccttcccacagcccatctgcaacctcagttttctggaaagctccctcctcccttccaaagccacagctgtgagacagaaagccagggtgaggggccacgtgcagctttctgcctcccgctgcctttggaacaggagtttcaccacagcccctggtggccaggtgggtgctcctccaggtgggccccctttgcccttacaggcacccacttgccacctcctccataaaaggcctgggcccagctctggtggcgagggagtagggggtgtgtctgtggcgtctcatggcaggaggctcagccacgacctggggttaccctgtggccctgctactgctggttgccaccctggggctgggtaggtggctccagcccgaccctggcctcccaggcctccggcacagctacgactgtgggatcaagggaatgcagctgctggtgttccccaggccaggccagactctc

SEQ ID NO: 7256 - DNA, 2300 bp, Homo sapien
cagcaggacctagtaggcgtggcctggtgtgggtttagaactggggtttggatctgcagcttctaaacgggatgattttggacaactgacctgactcataagcctctgtttcctcatctgcaaggtggggaagatgaacctggccgtgctcatggaacaagggcatggggacatgcccacacccagggaatgcccaggctgttctggggcaacaagcagggtggacacctagggggtgtctccaagcaactgcagcagccacagttaacctgggaaatgggttcagatctttctacaaagcccaggattcaaatcctcattctgcccctcattgtgtgcacctaagaaagctcacgcaccctcccttcctcagctgcctcagccacaggatgtggataactaagcttaaaagaagtgatgtgaaatactcaggccagtgcctgagaccctgtgtatcccttctccacctcatcttcgtgcctgcctgctgccgtgtgctgtgagcagggaaccctagctagaaagatcctaagaccctcccatccccttacagctgtggaaactgagagcagagaggggagggggcttgcccaagaccacacaacaaactaatagcaaagctaaggcaagaacccaggtctcctggctgctgagtgggaactccttccgagaccccagcaacctctccctgcacccttcaacatccctggcccctccccttcccccactgcagatgaatttgggaaccgatttgatgtcaacaactgctccatctgctaccactgggtcacctccaggccgcaggagcctgcagtcttctcggccgattacagaggctgccacgtgctggagaaggtaggggttgttcatgctctggcacaggggcaagcttgtcctagtgtcatgtcaggctgaagaggcccctcatgaaccagaaaggagccaaagccgaagatctgttgagctggtgggtgagggaaactaagctctggaaggtactttctggaatccaccatgaatccagctccctgcctaatggccagctcagctctcgtgggcccgtcccctgcctgggtatgctaggtggcctcaccttgctgctctatgatggcctctcacctgcaggatgggcgtttccacctgagggtgttcatggaggctgtgctgcccaatggtcgtgtggatgtggcacaagacgctactctgatctgtcccaaacctgacccctcccggactctggactcccagctggcaccacccgccatgttctctgtctcaaccccacaaaccctttccttcctccccacctctggccatacctcccaaggctctggccatgcctttcccagcccactggacccagggcacagctctgtccacccaacccctgctttaccatcccctggacctggacctaccctcgccaccctggctcaaccccactggggcaccttggaacactgggatgtgaacaaacgagattacataggtacgcaggacatctgagtgtacttaccctctgtctggggacttctggagtacagggtggcctaacagccttttactgggctctaagccatttctttttttgtttttttctttttttagaaaaagatgattcttttattcctttgtagtatttggaaaacagctttaaacatgtataggtgtactaaagctagaagaggtcttgtaaatttgtttcctaactttaggcagaaactcattgaaaccattgccagcaacacctgattctcagaaaatattctctagaaatttcagtaatattcagttttgagggaggacatttactgtgctggctaagagcacaagctctggagcaggttcccaagattcaattccagggccatgatttgcaaactgtgtgccttcagcctcatcactctgtcccaaccctaggtacccacctgagccaggagcagtgccaggtggcctcagggcacctcccctgcatcgtgagaagaacttcaaaagaagcctgtcagcaggctggctgctgctatgacaacaccagagaggttccctgttactatggcaacacaggtacaacctcccaccccagcaagatcctggtcccttggattctgaagcggaaggagagctgtctcctccagctggtggaaactgcttcctatcctcctcctggagagcccaactcccagagcagatggcagaggagacctttagatggggcggtcacatgtcccagctggccttataacaactgtcccagggaactattaatagatctaccttacacacatctggactttcagatc

SEQ ID NO: 7257 - DNA, 2300 bp, Homo sapien
gtcagttaatttcagcaaatctttagagggcagaggggaaacttttttgctccataccctcattcagttctcagcaaaaaaatcagctcctcagtgatgcactctctaagtgccctgcctcaagtagccgttcctccaatccccagcacctctgtctaccttgctctgatttgttgtattcatagcacttactactctggaattttcttcttaagtgttgattgtctctgtgctcccaccacccacagtagagtgtaagctccaagacagcagaaactgtgtctttcttgttgaccttttctatctccagtttttacaatagggcttggcacataggaagcacccaatcaatatttgttggatgaatgaaatgcctggggaataacatgaatagatatttcgttcaaagtggatcactgtctgctctgtggaaagtagattaggaggaggaggccaggctggaagcaaggaacaagtgggaagttactttgttggtgcaagacagagatgagatgcccttttgcatattaactcttcataagagttcagtgagttagttctacccttgtcatcactccctctgttttacagatgaggaaactaaggcatagagaagttcatactgccaatcacctgagtggtgctaggatttgagcacacagtctgacttcagagtccatgctcttggccactatgccatattgccttttgtacctgtaacttttatttttctctccaagcttttgcttacgttgtttcttcttccggaatgcctttcgttctccttctcctctgaatactgcccacctgtcaaagtccctctcactcacatcctgttcatcctgcccttttgtcttgataccttacagtccacaccacgtcttttgcatgattcctgagagtatcttatcttacagatatccacaaagaatcatacactatctgagctggaagagaaatagaaaatacaaaatccaaaatacaaaataaagaaatttataggaggccattggtttggactgagctcttctgctaggcctaacagaccaagctaaaaagagttagtcctgctgaagctccacgccaataagctgaaacgaagatctttacgaccttctgagtgtgtatgtgtgtgtgtgtgtgtgtgtgtgtgtgtgtgtgtgtaggggggagctaaattcccaaacaggcaagttttaggtggcatgataagtcccctccactttaacctttacaagaaaagtaattttgaaattaccaaatgaccaatccgctttttgttctctgttcctgttttcctcagtccttttctgtctataaaaccaagttctcctgttcagctcattggaacaaccattatattttatagtatgaggcactgcccaattctatagaatcgcaccttaagtcccagctactccggaggctgaggcagaaggatcacttgaggccaggagttccaggatgcacctgtgatagccatgattgctatgaccgcacctgtgaatagccactgccttccagcctgggcaacattgccagagtccgtctcttaagaaaaaaaaaatctttgaactaagtttgttgtgattttgtcttttgacaaagaagaaagggcaatgtgaattgccccaaatcacagagcgaaatggtagtagtcaggaccaaaacactttcttagccgttttcttagttcttgtacccatctgtttctgtattttcttcaccaggccatccagcagtgtctcttaaagggtagcccgagaaacaactgacttagaaaagcgtggggcacagtctgtctacgcagacccgaggaatctgcattttaacaaactcactgggaaattctcgcgcacgccaaggtttcaaagaccagggtcccgtggcacagtgccgcacagttgtcaaaacaagtgctgtccaattgttttggttttaaattctcactgcgtcatgggaaatgtagtttcgagcctcctctctcccgacgccccagccaatcctccggcgctttacggaacgagccgagtcaatccggaaataaccgagtgttcgtggcgggccctttcctgcccggctgcattctgggaaagggcaatttccgttaggtgctgaaggctgtggcgcgcggctgtccccattcccacgtgaagcgctacgctagcatcgctcggctggcggctcccagctcgccgcggagcagtcccggcagcagcgggggaccggaagtggctcgcggaggctcagaagctagtcccggagcccggcgtgtggcgcctcggagcacggtgacggcg

SEQ ID NO: 7258 - DNA, 2300 bp, Homo sapien
ttgaaactgttagaaaagctggaaggtgaggtttaggatgctaccagagcctgtcctggaagaaggactcttagctgaggggcaggaagtgacaagagctcagatgaagatggatgtgtctgaggaacatctgatggaaagaaacaactgggtgaggtgacagattgggagcctacagagtgtgtactctaggaggaaggcagaactggaaggctgaatggttgggggtgggagggaagagttacgttttagagggttgagtttgagaaacaagttttaacatcaaaaggaagctctcctatgacagctcttgatggtgataaaaacattcagtcagcaacctggatttttttttttttttttaatgttcatgcttgttgcttccttgaaacttcacacctactgtgaagtggtatttttaggtcctttatagttcttgaacgtcaagcaatgaaggctcagagaaatgaagctgtgtgctcaggatcacacgacaggcaagagatcacctcattctgaagccctgttcattctccttcacggtgctgctgaagcaggatattgccctgacctttcacaggactcacaacaggggtgccccgtttactcagcccgctgctctcaactcctcatgggagggagtacgcaagtgaacaaggcgggaactggagtgcacaagcgctggaacaagccagccgtttttcagcaccagtgggatcacactccactcactcaagattcaccgcgttccacccctcataggagggagcgtgcaggtgagtgggtgcaggagccagagcgtgcgcttttggacaccggcaggagcgaactccgtgcaggccccggggcagtgtccaggcagagtgcctgaggctcctgaagccccagagggcatgttacagtgttcttttggctctgtcgtccgtggacagcttaagtgttaacagctccgtgggcccgcggttgccctccaccagcaagggcagagggccagcgtgacagcttttgtatccgcactcgtggctcccgagctcttgtccagcgtccaagaaaaataaagctgcacgaacaaattaaaggacaaatgcctgggattttattgctgatcaaagtggatttcagagggaaggtgagctgaaaagaggggggtgggacaggccggtatgtagtcttcccttgaagtccagctatctccagccagattcgtctcagaagttacgccttaagctgtccctctgaagacaagctgcttctctctgacatccagccatggtcgtcccctcatccagctgcttctcctctctgccagatgagtctggggtctttctaggcacaggatgaggcagggcagagccatgggtggcttaggaaaaggcaacattcaactggaaaaacatggatagaagttctcactttgggccatggtttcaggctttttggcttgagggtggggtttcaccagggacccgctcttttctacctagcatttatctgcctcctgtccctatgcactgcctttgtggcagaaaaaggagagtgagagttggttcctctctttctctgaaattctgagctaacatttgggagccgtctacagtattcaggtatgaattttctctctgggggagcgcattcgttttcctagagcagtgtgcttttaattgctcctttaatatctttctcttttgtgcctttttagcgcgaaaagtgtatgggaagactaggtgctcgttagcggctcggttagaactacattgcccacaatgccccagggaacatttgtagctctagaactacatgacccaaaatgccgagtggtggcaagaggaggattagcttccactccgatttcaaagatccagtttacccactctacagcccagatatagtcacttatttcccctttccagccagagacttccgttccctgctggaacttccgatcccattcttctctcggtgggaatgcttgtggggggaaaaagaaacgcaatagataaagcggggcgcatgcgctcccggcacaggcttcgattgtgaggaaggccggctagtctccgagctcatcccgccttgcgcatgcggagaaggtaaaccagcgccccgagttgaggcgcgggtttggtggcgcgtttcagcgaagtcgcacgtgaaggatagcagtggcctgagaaaggtgagagcgggccgaggtcggaatgtggggcagcgcacgggaaggggagacagcagccgctgcaggcggcaccaggcggagccgcgaggcctggagagtccgagtggggaggggtccgcgcgcc

SEQ ID NO: 7259 - DNA, 2300 bp, Homo sapien
gcccgcagtgtggaggaggagtgagccggatgccccacacaccgccagtgtcataccaaagagctgagctgcttcggggccatgcagccctcctgccagccccctgcccttttcttgccctgtctctgaaccttcagaacattgatccttgccgcagccccactagccaagagaaacagagaaagaccattccccctgcctgtccttgcggccctgtcttctgaggttctctgtctggggttggctctcttaaccctttctctgctcccagcctgcctcaccagggaaggttggaggggcctccctctggcttctgcatctgcgccagcaaacatcactgccgttggtctctcatgacttaactggcttccctctgctgctgccttggcttcctcctaatgctcgtgctctcctgtccttctgaagttgctccttggccaaatctccagctcccttcttgttttcctcatcctcctaccctgtactcccaccaaaccatggtcctttaaggcacgctcctgtcctcctcattgcccagcagtagggaggggcaggggtaaggggacctgaggataaagggtggggaaacagggtcccctgaggcctgtgggggctgcaggggaggaggatgtaccttgtgtctctttcaagtgccttaatccgagccagcagggccttctgcttgcctgctgccatactgtatgtaggaaagtgttctgtggctgctttgtgtcaagaaaagagcagtcactctcagaatcttgattccccatcagccaaagcaaaagatggctgctgctttgtaggcatgtgcctgcaagtgggaccttgctgggcattatatgccctgtgggggtttcagagaccctgaaagaggagggaggacccgcctccttgtctgcacaactgcatgcacttctctccccatcgctccacaacctgaaaccgagaaggagttgctgaccagtgcccaccccggcagcccgggaggaacacaggcagctcctttcccttcacgtggtctgcagagagcagggtgagctgccagctgcccctctccaccagggtaccctgtcttggtggttaggggccacttttcctttgaggctctagtggaggtggatgtccttctctgccaggcttggcacatgatgtgaagaataaatgcccaattcttactgttcaggtttgatgtggaatcacagctgcagtgatatatattttttatcagtgcttggttggttttaaataaagtgcacgctattttattatcttgttctgaataaaatgtatttactccaagtctggattgcttccatgtctcctctactgctaaacccatttctgtagtgcagctccgcctcccaatttctccctgtgggggcagtgtgaagctggcagaggggagagctgaaaaggcaggctggtaccaggtacccttccctccaggagcacaaggaattaggaaagcatgcccccattacaaaacgtaggaacgactggcactgctggaaatgcgtgtgcttgctgggcagaggggtcaccccttccctgcagtgtgctgaggtgggtgggcagcctggagaagacttgcctgccctccccttcaccacccacctgaggactttcctgtgccaaggtttccagtcggcccacaggctggaccaattttgcggagggcctcagacataattttttctttgtaagctgcccagggcatgagagtgtgcagctggggcccctgctctgggcctctccccaaactgcctggtaggcaacactgggtcaggacccttgaggctggccttccctcgggagtgttgggcaaccctcaaccctcctaagcgctgcaggacgctgcccaggtggagctggtcaagagactagagctgcctgcacctagagcccttcctccacggcggtggcctagctctgtcagggcaggctcaggtggttggcatctggccccgtttgaccccctccctcctttcctgtccctgcagctcccgtcccatgtgtccctgaattctggttctgactcaggtgtcagatgccttcacaagtgagctgcttgtgggggtgggtgaggcagagaaagtggctttttcttccctgatcagaagcttccgtgagggagccacacagaactcaccgagtccctcctggcagaggcggccgtcctctgttgcttccagggacgtggccctcttcccgacctcggtcgcctgagcgcgcagggattggggatccgtagggcactaggacccggcggggcggagggggcagcccatgtgctgcga

SEQ ID NO: 7260 - DNA, 2300 bp, Homo sapien
aatgatatctttcctgaggatcgaagagcggtctgtggacatgctttgaaacctagacctagtttcaagccctgcctgggtttgtgcatgtcccgtctctgtgtctccccatctcctacgccctcctatgctcactcttattaagcagatctttcctagacacttacagcctgccaagccctgtgtcttcactctgcagatccaaacacgagcaagggccagtccctatctggcagaaaggggccccagtggtagggaagggagctggatgggcatgaattggattagaaggcatgtgggtgtgtaagcactgagggaggttcaaagtgcggtgggagctcaggtgagtgggtgcagtaagggggaaattcatcccaccactggaaaagctttctaaaggaaatggtctgtgagttgttggaggcttaaagcatcagcaggtaaagtaagaaagggcagagcaggctgaaggcacagactgggcaaaggcttggagtcacgaatgggtgccgtgtgtgtgggaaacttgtgtgtagctgaagcagagagtgcatggagagatgtcacaaccgaagttaaggctggaccagaccctggagggcccccaaatgcccggctaagctttgaccttatgggcagtggggaggcgtaagtggtctttgggtgggggagagctgtaaggtgtgagctgcactgaggcggggtccttctgggttggaggatggtgaagaggagattcagactggagccagggaggtcagatggctttggctccttgtctttccccttcaatccagcccacagttcagcatgcaccttgccaaactgagcctatactctcttccccaggatcaaggtgaagaaggggctgcatgtgacagccgcccgcccagcccagcccacactctggactgccaagctggaccgcttcaagggctccaggcaccacaccaccctcatcacctgccaccgtgctgggctcacagagccagattccaggtgggcagtttccctccacccagggggcaaaggagggagggctggttatagagtgcagttgagcagatttggaggctgccatgctgcctctagatccccaggtgagcagacccaaggacagattttttcaaggaagcagcacaaagcaggcataatccattccttcattcattcattcggccactatcttcccagccccagccatgtgccaggcatagcaagtgtctgtgagtcttattctaagagatgccaaccaatcctgtgccccaggtagagccctcatagccactactccatccccctgcttccaccaaatgatcctttctctgggccgttcacattcccccaaaaagcccagctgcagttctgcggttgtgaactcttcttattcatgccctgagcctgggtcaaggccatggactcagtagccccagttcgaattctggttctgatgcttttgggatgggcaaaaccttgggcaagccagttaacattcccctacccaagcctcagtttcttcacttgtgaaataggaataataatgcatcccttagcatttttgaaaataaaatacagtgctacatatcaggcacccaggacggttcccagcacataggtttttgtttgatcaaaggaagcttatcattcagagggtcaagtgtctggtcctgggacctggaagtgaatctcccgcatgccacctcagtggctgtggaaagcggaagtctgggggaagcgggcccgggcaggcaggggagtgagccaccttgccaggtgggaggtggttaaatggcttcatggatcttagagaggccaagagtgggtcagagtttggggtctagagcgaggatgcttgggtttagatcccagccccgctactttttgctgtgtggtcttaagtgagctatgtaacctctgtgcctcagtttcctcctgtgtaaaatggggataatcatgaatgcaggaagtgctgaggccatgcctggcagctagcaagcatttggcttctctgtctcctttggccagcagtccccttgaactgtctgagttcctatgggtggactttgtggtggagaatagcactggtgggggcgtagcggtcactcgccccgtcacgtggcagctggagtacccaggccaggcccctgaagcagagaaggacaaaatggtgtgggaaatcctggtgtctgagcgggacatcagagcccttatcccactggccaaggtaaggagacctccatctctgcctgggaaggctggaggccaagtcccaggagccccatgagctgaggggcctgggg

SEQ ID NO: 7261 - DNA, 2300 bp, Homo sapien
tctgaatgaccttgcataggtcccatggcttccttttgcccctcgccttcctaaattaactgtctacttatgccaagcaaatctgtctccagaccttgcagccagttacagctcctgtcaataggatctaaatgaaaaaggtgaagaacatgctttccccagtctggcatattgctagaggtttgtaagttgtcaggagccgagaagtgtggtggttttcattacctatcgctgcctaacaaaccacaccagagcttagtgatttaaatgacctttttatctcctctcccagttctgagtgactgggctcagtcgggccgttctgcttctcgtgatggcactggggttgcagtcatttgggacctggaaagggctagaacttctgagtctgctcacttacatggctggcagtcaatgtgggctgttggctgtgagctcagatgggactgtgtggaccagagcaccttggttcccattcgtgtggtcttaccatgtggcttgaacttctcacagcgtcgtgtgagggttccaagaggagggagctttccaagaatgaatgttccggggaggaagaaagcagaagttatgggtcttcttaaggtccttaagaggcgttgaagtcccagaccaccacttctgcttcattctaacaggtcaaagctgtcacaaggccagcagggaaacaatggcagtgaaagtaaactccacctgttggtggcaaaatggcagcacacgctgggaagggtggagttgacagtggctgtctttggagatgactacactaatattgtcccttttggaatctcaaaggacagtgcaaggctcttggacaaaaagaggtcagaaagctctcaggacaaagggcaaagggcaaagggtaaaggctgcagcagtgattgatcaatcttgtcgcctactgatattccctctacccccacctctccactctctatgccttgtcatggagggagagggttgccatgttgactgttgaggaggatggacttgagacagcaaggggggggaattttggtgtatcaaatctgtgacagcgtctctctctgagtcaggcttggactgggactcccctggttcccgtggcaaattgatgctacgagccaaaaaatcccttcagactgttttccacagtctctggtcttacttccctcaggactcagaggggccacagctctagagcggaatgagtcttggctaggcacttttgcagcaaaagagaggatagaataatattggcagtagtggtgccaacattgaaaaagagtgatggtgatgtgaatggaaaccccgtggagaggacgattttgctgacagcagtcaccttactaaaggtgatgatagtaaggatgctggccttggcgatggtggtgatgatggcgaaggtggtgctaacagcggggtggaggagatgagggtactgatttcagagacgtgctgatactgggaggaggattaaattagggggtgatggtagaagtgaaaacgttggctgaggtggtggggaagattatggctgctgcgtttgtttgtttgcttgttttttgagagggagtctggctctgttgcccaggctgaagtgcagtggcacagtcttggctcactgcaacatccgtctcccaggttcaagcaattctcctgtctcagcctcccaaataactgggactacaggtgcacgccaaaacagcctggctaatttttgtatttttagtagggacggagtttcatcatcttggccaggctggtcttgaactcctgacctcaggtgatccacccgcctcagcctcccaaagtgctgggattacaggcataagccaccaagcccagccttgactgttgttttatctgctgcctctggggtctcacagagaccgtcaatgtgcccgcgtgctggccgacgagaggtctccccagccaggggcttccccgcaagaggacatcgccaacttccaggtgctggtgaagatcttgcccgtcatggtgaccctggtgccctactggatggtctacttccaggtgagcatacctgccctttttctctgggggcctggctccccactcaccatctgaatggcctcatttctcatcacagaggcccagggcatgtggaaagggggaaagtctgggaataaagtgaggtgctgccccgtaccagctagcatggggcctggcacaaagccgtctcagcaatccaactccctcggtggtacggcaagaggaactctggagacagcttcctcctgctatacctcctgcgggagttgaattactgggatggctttgtg

SEQ ID NO: 7262 - DNA, 2300 bp, Homo sapien
cacccatctagtaccccctgtggcaaaactgatcttctggaggccaggccactgagcagagcctcccgtggcatcaacagggccagaagctcctgtacgttctccccttggctgggcacgaactttgggtggagcaaaggcaggccacaaggcctcatgaagtcgggacctgatccctaggacagtgcagaaacaccaaaatgatttgaggcaggaatggacatcactggatttgagctcttcaaaaatggctccggctgcagtgtagatagcatatgggttaacaagagtgggtacttcacaacaggcaggaagcggctgcagaattcaggggggcagtcagatggggatgtgggggtgggtgggactggcaccatctggcaacagctataccccaggagctgcgtgtttcacatacttgctgatttcagaaagggccatccatcactctcgacaaagcatctgctcattctaaaagaactcatttatatcctgaatgggctgcctggtcttcccccttagagttacaatagtcacattcatttacttccaattaataaatggaagtggctgcttctaatgggacctattcaattttctgcttgaaagtctagagcgagaattatcagtgagctggtatgcccctccctccccacttccaggaggaccccgcagaatctccaatggaatgcgggtttaagtgcatctgtgtggactataattttacatttgaaaaaggaaaaataaatacttgtcttttccccaatgcaactacagaaagtaaagtttgacaaaatcgccctagctagtggaaatataaatctctacttgaaaggcagtaatggatcctgagatttgcaggggcatggaaagggtgactggtttagcaatgtagagaagtatttattctctccattgaaatggcccctagtcctcactgctttttttttaaatgcagatgcccaggtcctgccccagacctgctgagtcagaatctgggacctgggcctgggagatttggaagcagctagtgcagctgactggagccaacagaccagaaggggcctggggcctggctgttgctgattgatccaaattctgggtaaagattttcagcccatctgcccttgctgggaggcctgaaaaaaaacgtttttttcaccaggccagaactcactcttggggctgtgcctgggaccacctctgctgtatatcagagggacaaaagtggggtgaaaggatgggtcacagtaggcttctctgcttgcctctccgaactgcagaggaaattctcgctcagacttctgttctttcggtaacatgcatacaacatttttaataatgtgcaataaaactgagatcttattggcttttttctgattataaaagtaatgaataggccgggcgcgatggctcacgcctgtaatcccagaactttgggaggccgaggcgagcggatcacgaggtcaggagatcgagaccatcctggctaacaaggtgaaaccccgtctctactaaaaatacaaaaaattagccaggtgtggtggcaggtgcctgtagtcccagctactcaggaggctgaggcaggagaatggcatgaacccggaaggtggagcttgcagtgagccgagattgtgccactgcactccagcctgggcaacagagcaagactgtctcaaaaaaaaaaaaataatgaatagtgtaggttgctcagtgaaaaacaaagggataaatcaaccagaaatgaacaagtccatctgagacatctgttgtatgtgttcctctgcgacaataaaaaagcagtgtgtgtcatgggtatgcaaaagcagctgggccaaatgtcctgatctttagcaagtgactcccaagagaaggattcattcattcactcagcaaatatttactgagcatctgtttgtgatcagagactgggaaagtgtcggaacgcccaccacccactgacccaagaagtgtctctgtaggagggaggggtatgggtacagagagtgccccggacccctttggccctcactgtcaccccttcctgaatggcaggtgatggatctcggccgcgacgccacccgccgcttcttcaactggttttactggagcatcaacctgggtgctgtgctgtcgctgctggtggtggcgtttattcagcagaacatcagcttcctgctgggctacagcatccctgtgggctgtgtgggcctggcatttttcatcttcctctttgccacccccgtcttcatcaccaagcccccgatgggcagccaagtgtcctctatgcttaagctcgc

SEQ ID NO: 7263 - DNA, 2300 bp, Homo sapien
ggatggtgcagctccattgaagtctcctcttctctcctccaggctctgcccacctcacgagagcacatggtcctgactgcagtgactgcaggaagacctgggatggagggctttgctttctcaccatcctcttggcctggcttctctaacatgttaaaaacttacagtggcccacaactgtaatcccaggactttgggaggccgaagcaggtggatcatgaggtcaggagtttgagactagcctgaccaacatggtgaaatcccatctctactgaaaatacaaaaattagccaggcgtgatggcacgcgcttgtaatcccagctactcagaaggctgaggcaggagaattgcttgaactcaggaagtggaggttgcagtgagccgagattgtgccactgcatggcagcctgggcgacagagtgagacttcgtctcaaaacaaacatacaaacaaacaacaacaacaaaaaatccctcgcttttttgctggtatctatagtgctttttttgctggtatctatagcttttgtgagactcagtttatttagctttagctttcctgatattattattcttacaaattttgccttgggacactctttccattcattgattcaggcaatacttattgagcacctactatttgccaagcactgggaagccattgagaataaaacagtgaagagttagaaaaggtctctgatctgatggagggcctattctactggtgctaactgaacaagtaatatgtgctctgaagacattaaaacaagacaatgtgatgggggatgctgagaatccagtaggaaactacttagatgggaaaatcagggaaggtccctacaaaggagacatatatgctgaaacctcaataaagagaagcagccagccatgcaaggatatggagggagagcagttatggcagaggggtcagcaaagacaaaggccctgaggcagggaggagcttagcatggaaggggaacctgggaggccggctggctggacttgagtgaacatggggctgagatgagatcagaggagagcagaggccagatcccccgggctcctaggtcagggtggggctggtgcttaggagttctgaggctgactctgatttagtctgaggtcggtgtccctctcaatcccgactcacttgtggtcctctatggcccgcaggcttgttgaaagtgccccacttccttcctcacagcagcctctgtgcaatccgaattgcgctgtgaatttccctgccactcaggagcccggggcagggcttcacccctagttcagttaccaggaaccaatctttctccaccttcctgccctagccccactgggtctgtctctgcatctgtgaaatggctgagtgtgaccaaatgatgcaggtagcctttccacttctttctacccgtggcgcctcgggtggaggcgtggagtttgattggaagagggtaaagcaaaagtggaatcctggcgagaaatgaaactgaaagaaaaaattcctcctggaattttttggctctaaggaggccagcagcgggggtttggggtaggaggcagaggtagagaaggagggaggtttttagaaagctgaccgggcaggagccctgtgacccaggctttcacttctcctaaacacccagtagcgccatgtgatgcaggcaggggactgcggatagggcctgtgaaaggggaagcgaggggagcccagagtttctcaagaagccgagagagggacagaggctgagcctggggggagggctgcaggggactgagaggggagtgtaggcagtgggggtgagggggacagggaggaggtggagaagacggcaaggggcagcagggtgactggggcagagggagcccccaccccacgcccagggcaggccaggagtcataaggagaggggacaacaggaaggggcgacaaacggggaggggaaagggaggcggaggggcagcgaagtgaagcagggagggtcgcagtgtgaacaagagtgcgaggaagggtcaaggtggagggaggagaggggagagttagggagaaacagctgcaggagaggcgcggggaggaagccttaggggtgggggaagggagaggggagttgagaattagggaggaggtggtagagtccgggtagtgagcggagggacaggaagggtagggcaagaaagggagaggggacaggagggaagggtgggccaaagcggtgagaaaggagggccagccagttgggtgggggagagggccgaggcccgggggcaggagtgcagggctctgaggcggggagaggagaggag

SEQ ID NO: 7264 - DNA, 2300 bp, Homo sapien
ttgtggtgaggggcattcagggttgacatttatttttctcccactcagagtccatactgagttgggcaagctctgtgtcagctcgctttaaggaatttttctctccgagttctccactgtggatgttgtatttcagtgctctttgtttaaggcagaaattttggattttgtttttcacttcgattttgtttctcagctttaacttttgtccatgttcataagactgaagctcttggtcaactggatcaacagatacttctctgctggctgtgatctctttggatttttgttgtctttatatattaacatatacaaggtctcactctgttgcccaggctggagtacagcagtgcaatcttggcttattaaagccttgacctcctgggctcaagcgatcctcccacctcagcctcctgagtagctgagaccgcaggtgtgtgccaccaaacctggctaattttttgcaccttttgcagagagagggtttcaccatgttgcccaggcttattgtcgtttttgatctctgatgattttcttcatttctcaccacctcagctacacattttaaaagatggtttacaatatttttgtggtgttttgtattaggagaattcttcagcatctgctgtctaccatattgtcagaaatggagtctagccatccttcccggcccatttcaaacgggttcctcttaggaccaggagacctcacattatgtgtgtcctaccttggcctgtggtttggtcacttgtgtgtgtgtgaacttcatcctccttgagggcaggaatatggtttcctctctttcacttccacagagtcctgtccagagttctgcacaccaagactgtgtaaatgaatggaattgcatctgggagctcgaggcacccatgcaaacctgtgctgccagtgacttccaccagagggcagcggcagcaggtgccggcgctggggcaggactgggaggagtctcactctgggggcgcctggttccccgtggctctaatacttgccgcatcaaatgcatacacccacatttaggaccgaacccaatggaggaggaccgctcctcattccacatgttggggaaatgaagacaagcaaggatgcaggaagtggagggccaggagaggtggacctgggatgggaccaattgaggcagggccaggatttggaaccaaaccccttctggatttgaccacttccagggccctgcttggacaaccaaattatctattccttttctcattcaataaacatttattcacctcctaccatatgctccacagggagtaccatgggaattaaacacgcttggcccctgccttcttcctatagcgtcagtctgctgcagtgcaatggggcaactcggggtttctcaggcagccctgggcttccttccttcagccctttgctcctgctattccttctggcccagaggcctcccatgattgctgtttgtcaaaatcctgctcagccttgtagacccagctcccatgcctgactcccacggaggcatgcccagtctggtacctggagatgggatagctggccccactgtgccatctgacggggcggctcccacaaggccttggcacccttccctgtagaaggacttgtgggatggccatctctcaggcccttcccaatttatatttctctgaggggagacttaggctcttatctccaaaagtgcatcaagaccacaccctccttcccaaccaccattgcacctaaggttaagataaaactcaggatttaatccaagagagccaaattacacggaccgggacaggcaatgggtcattcactccctcttccaatatgtactgattgagcagctactacattatcaattttttcttctgggccaccagaaatgaggcatggctcttccacttcccttcttcttagaagaccctcggggaagtgtgtctgcatggatgcgtgtgcatgcgtgtgtctggctccgtgactcttggggtgcagcctggatgggtgggctcccagcacaggcagctggggctctccccaccagcccctgtaacagcagcccagcttcctgcagaccaaaaccacaagcagaacaagcaggcgtgagacactcacaggttgggtttgatcgcatgcgtgtcggagaggagagagcagagagagacacaggaacaagaacagcaaagggtagagcagacctgcgccaggggcgcacaacggccgtgtccacctcccggccccaagatggtgcttcccacaggcagccacgcgtagcagccagagacagctccagacatgtggctcttctt

SEQ ID NO: 7265 - DNA, 2300 bp, Homo sapien
caccacttaggtccaagacgtacacacagctggagatgagatctgggccagcccactcccggccctgggaccttgagcaggctcaagtcgtccctggacattgaagggcagatgaccttccagttcagtcatgctaggactctatagagttttgagttctggacaaatacaggcaaagcacgttttagatcttggttctcagaggaaagctctgttctgctttgctctgctagttggctagtaggcttgtgatatcatcatccctatcaatgtcctgcccaattggccttgcgaagccccatcaagattctcctagaatgtggttttatttcatagttcatattttctaaacaaaaaaacaaattggggctgggtacagtggctcacgcctgtaatcccagcactttgggaacctgaggtgggcagatcacttgaggtcaggagttggagaccagcctggccaacatggtgaaaccctgtctctacaaaaaatgcaaaaattagacaggtgtggtggcgtgcacctgtaatcccagctacttgggaagctgaggcaggagaatcgcttgaacctgggaggcggaggttgcagtgagccgagatcacgccactgcactccagcctgggcgacagagcaagactctgtctcaaaaaaaaaaaaaaagaaaaggttcagtcattcatcctttatgatatatggatttatacctcttgcagaggaatttgagcttaatcaccttgcattatgaatgtattcaatcacctttatcggaaagagttcaatgacataaaaaccaatacaaaactcagccaaatattataaatatcctttgcacagagagtccatatatatgaaaagagaatgtgaatacagcatctagcataaggcttagcataaggcagctgctcactgaatagcacagtctagaggtttagagccagactgccggctctgggccaggtaagaacctgtctgtgcctcagttccctccaaggcaaaatggggataataatgtacccacttcacagagttatcatgagggttaaatgaggtaatacttgtaagtgttagaatagtgcctcacatatagtaagtgctgtgttaagcgtttgctaaataaatgtttagttctccatattggaaatgaacgaaggcagcctagaaacttcagactgggtggcttgtacaagatgggctacccaggttgggcacactggtggatgcctgtagtccccgcattttgggaggccgagggggatggatcgcttgagcccaggagtttgagaacagcctgggcaacatggtgaaaacctgtctctacaaaaaattcaaaaattagctgggcgtgatggtgcatgcctgtggtcccagctactcgggaggctgaggtgggaggatcgcctgagcccaggaggtcaatgctgcagtgagctgtgatggcaccactgtactccagcctggacaacagagtgagaccctgtcccagaaaagaaagaaaaaaaaagggggctacttggtgctcccctgctactctgcctctcacctctgccgttcatactctaccatccctccctacacctttccgcccaccactttgccatgccctcgactctgttctctccccagttttcatgctgcccatccaggtccaggccccgccccctgaggactcagactctggctcggactcagactatgagcactatgacttcagcgcccagcctcctgtggccctgaccaccttctacagtgagtgcctggccgggctcccgagggcccacctacctgaatctgggagggggccccgaggggaccgtcaggtcagtagtcccacctagtaacccctgcatgatgcagacagaatccccctggttacccactggattgactgtaaatggtcctacactgacgtttgcaccgtgctttgtgaccctggggtcatctcgatgtctcaggacatctccactctgacctctgtctctcccatgtttgtctctggccacgtaaggtcttaagaccaggcctttgacattcacctgaagatggctctctgtgtgagagcgggggagtgcggatgagagacacagttggcaggggttctcgcatgccatatccctccgtgtcccatcctgccctgtctgaccccatcagccccactcacttcctcacctccacgctcttgccagcttgtgcctcatagccagctcttttcattgccttctggggataggaagaggaaagataacgctgaaggcagttccctggcaatgctgggaggttggaatagaccagagcgtcc

SEQ ID NO: 7266 - DNA, 2300 bp, Homo sapien
tcacacacatcaacatggagatcacacacacacatcaacatggagatcacattcacacacatcaacatggagatcacacacacacaacatggagattacacacacacatcaacatggagattacacacacaacatggagatcacattcacacatatcaacatggagatcacattcacacacataaacatggagatcacacacacacatcaacatggagatcacacacacatcaacatggagatcacacacacaacatggagatcacacacacacatcaacatggagattacacacacatcaacatggagatcacattcacacacatcaacatggagatcacaaacacacatcaacatggagatcacacacacacatcaacatggagatcacattcacacacatcaacatggagatcacaaacacacatcaacatggagatcacacacacacatcaacatggagattacacacacatcaacatggagatcacattcacacacatcaacatggagatcacacacacatcaacatggagatcacacacacatcaacatggagatcacacacacacatcaacatggagattacacacacatcaacatggagatcacattcacacacatcaacatggagatcacacacacacatcaacatggagatcacacacacacatcaacatggagattacacacacatcaacatggagatcacattcgcacacatcaacatggagatcacacacacacaacatggagatcacacacacacatcaacatggagattacacacacatcaacatggagatcacacactcatccacatggagatcacacacacacatcaacatggagatcacacacacatcaacatggagatcacattcacacacatcaacatggagatcacaaacacacatcaacatggagatcacacacacacatcaacatggagattacacacacatcaacatggagatcacattcacacacatcaacatggagatcacacacacacatcaacatggagatcacacacacacgtcaacatggagatcacattcacacacatcaacatggagatcacattcacacacacaaacatggagatcacacacacatatatcaaatggggattacacacacatcaaccccaacatggagatcacacacacaacacagagatcacacaagtcaacatggagatcatacacacacatcaacatggaaatcacaaacacacaacatggaaatcacacacacatatcaacatggagatcacacacacacatcaacatggagatcacacacacatcaacatggcgatcacaatcacacacatcaacatggagatcacacacaacacagaaatcacacacgtcaacatggagattacacacacatcaacatggagttcacacacacatcaacatggagatcacacacactcaacatggagctcacacatacacctcaacatggagatcacacaacacagagatgacacacacaacacagagatcacacaagtcaacatggagatctctctctctctacacacacacacacacacacacacacacacacacacacacactggcacaagcccagcattcatggcgcagccatctcttgtacttgctagcaaaacaccacctgtggaaagtcagctcaaacttccaacctcatccctcacaaagggggaatggagggtttggttttggctttcactggagtctgcaacaagaactggcatcatgctgcccatttcccgcctctccccacccagacccctgcctcagggacgcctgtcctcagcccagccctcagctgcagccaggccttcagcctccgtaacccccgctcagggtccccaccccctgcagccctgtccctccaggatgcatggccttgtcctgtgtgggggtggccgagagcactgccccagccctgggtaccttgggcaggaagctggcagaggccagggctgccattcaaacaggggcaggtggttttgccaggaggaagttgacagttcaacttcaaacatgggtgacgcaggccccacactgcctgctccccgtcccacccctccctgagcacgccaccccgccctctccctctctgagagcgagatacccggccagacaccctcacctgcggtgcccagctgcccaggctgaggcaagagaaggccagaaaccatgcccatggggtctctgcaaccgctggccaccttgtacctgctggggatgctgggtgagtacccctcccaggtgtcctgcgaacacccgggctcgctc

SEQ ID NO: 7267 - DNA, 2300 bp, Homo sapien
ttattatgctggactctcctgtttccaggggggaagggaggagatggggaatactggtaattctgtagaatgaatgggtgggggaaagagattaactagtaaatggaaatgagtgtgtggtggccttggggctcctcagtctgagctcagcccatctggggctcctcctaggttctgggcttccatctgcttccccctccttttgggtccctctgagaagcctcccaagatcgagctgtgtacagagcgagtcctcgctggccactcggaaggcggcggacgtccgcgccggcgcactagcccagagcggcctggtctccgcccagtgggcggggcctcttaccgggggcggggccgaggcgtgcggcgagcgctggaggggtctcgtgggcgctcccgtggttgtggcccgggcggccgcgagcgtgtgtgtgtggcacgatgtcgtggtaactcagaggcgcgcgaggcggggcggccaacggggtcgcggggcgagcacgcgcgccactggggcgccggacgttgcaagggggtcacatccggtagggggcgggcctggcggaccccggaagtgtgggcgcggctgcggtttaacccgcggtggcggcggcgacggcggccctggcaggtgagcggagactggggagggtcccggctctgccgcaggcgggcggggcagaggacgacggtgggggcggcgccggccgtggctcccggagcgcccccgcctgcccgcctcatcctggcagaggccggtgattgggcacgaggggcgcgtgactctcgccgggggccggcgcccctgcccctcgcggtgggagggagggagggagagcgcgaggcgccgccccggctccccggcgggtcgcacctccagttccgccccaccactcaccgccaccctcctttctgcgtctctgcaggccctcgtcccatatgtgagcatcttgcggtcacaattctgatgacattagagccaattagcccattgtatagatggggaagctgaggcctaagagtagggtccgacttgccagagggcacgcgggagacgagtggcagaggggaggttggagggactttgctctgtgacttactggcttgtgccctttctccagggcattgagagatgggagtttcagctttggctttgttcaggactcagacttggacctcccagcatcactgaacatttcttaccccgggaccctctgggcgcaaagggcactgatgtatacatacccattatatgcctggttcctcttcatttcctcctcagccgatgaggcgatttcccactttacggatgggagaaggagttaactggaggtgttttgtgagttactggcagagtggactctacaacctggggttttagtcgctgagctgaggcagtgctttcccagctacaccttgtctgggctcacttaccctgggaatgtcagtcttcagctccagaaacttcccactcatttcccttcgctccagcggtacctcagttctcttgctgcctaaggccttttccaccctctttattggctccaggagtcccatttcctactaatgcaccaagatgctgccaccagactctcagttctgtgacttttggccttagagctggaggtggtggtgaccgaggaactggggaaagaaagactcttactttgttgtccaaagctgcaaccctgcagacacctgaactctgtagttccgggtgggatcggggactgttgcaatgaaaatactggacgctaaactgagtctttgttctttgcggtcatagtgcccagaaaagccttttacctagattatcttggaaatgtggttccgtgcctttgtaatttccattaagtagaacattttcattgtagactttctgagcagtttctggccgctgttttgcaggtagcaatagctgtgatttgttgcttggcttcatatgctgggcactgttctagggctttctgaacataccgaattttgcgaacatgtccaaataggtgatgatcccgttttacagatgaagtgagttgcggagatgttagataacctggctagtgtcacacagccagtaagtggccaagtttggatttttttttttttttttttttttttttgagacggagtcttgatctgtcgcccaggctggagtgaagtggtgtgatctcagctcactgcaacctccgccccctggttcaagcgattctcctgcctcagcctcccaagtagctgggattataggtgcccaccaccacgcccggctaatttttgtattttttatttatttatttatttat

SEQ ID NO: 7268 - DNA, 2300 bp, Homo sapien
tgagcagagatcacaccattgcactccagcctgggcaacaagagagaaactccgtctcaaaaaaaaaaaaaaatcacatagcacaaaaaggcttatgacaaaaaattaaggtcatctgccctggccctccctaaccctcagaaacaatttcaacctagctttcaaacaggtgctgtcaatgggagtcactctgacattctgtaccaagtgaaatgtttgcaaaaccaacatgcccccgctcaaaggagtcaccagtgtctcagaagggtcagcagctgaccttcttcatggaccccttctgttataagaaggagttttgacaaattcagtttgacagagtttaattgagcaaataatgatttgtgaatcagtcagcccccagaaccagaataggttcagagtgactctgaggctgccaggtggttggataacatttagggatagaaaacggaaagcaggttgggcgtggtggctcatgcctgtaattccaacactttgggaagccgaggctggaggattgcttgagtccaggagttccagaccagcctgggcaacatagcgaatctccatttctattaaaaaataatcattaaaatttaaaaataagaaaagaaaaaggaaatagatgtccagaaaacagaagcgaggtacagaaacagttggaccagttatgtaagcgcagaaccagccccatctggttcaactttgtgtaataaagtggtgagttgttttttcagttgccatgatcccaggttgcaagttatgtaacctgagcgtgcccagaagaaccaagcatgcaaccacaggcgcaacctaaatgctcagaccaaagaaccggaacagaattaagaagtagatacatggtataagccatgatctaatcagattgagccatggcatcatcccatggcaagatccagtcagatcattgcttattgcaagattcaatcagatcactgctcattaccctctgcctataacacctgtcacagcccctggcttggggagacagatttgagcatgtctccttcccagttgacttgcaacaaatctttccctctacaaaaacctgatacttcggtgtttggctttctgagggcaaagggatccagtttggttccctaccaatgacagattgacatttgccttattggaacaaggtttgaacaggtggctgcctgtgattggctgaaactctgtgattggtatgagtaggatccagttcactatgtacggagaaacctttaggacaaacttaagatacgccaggagacaactttaggctaaactggacacttctccccttttggtcaacctcttgattttgagaggttggaaactttagacattgacatcagttaccattgtaaatagacttatttggtctcaaattcccctgggaaatagcagagcagtgggtttcataggtgggaaagggaacagaatagaaaaaaaaaaaaaaacacctgattagttaacatcaggtcacttcagattcctttttttaagggttagagcagagggggcttccttattatgctggactctcctgtttccaggggggaagggaggagatggggaatactggtaattctgtagaatgaatgggtgggggaaagagattaactagtaaatggaaatgagtgtgtggtggccttggggctcctcagtctgagctcagcccatctggggctcctcctaggttctgggcttccatctgcttccccctccttttgggtccctctgagaagcctcccaagatcgagctgtgtacagagcgagtcctcgctggccactcggaaggcggcggacgtccgcgccggcgcactagcccagagcggcctggtctccgcccagtgggcggggcctcttaccgggggcggggccgaggcgtgcggcgagcgctggaggggtctcgtgggcgctcccgtggttgtggcccgggcggccgcgagcgtgtgtgtgtggcacgatgtcgtggtaactcagaggcgcgcgaggcggggcggccaacggggtcgcggggcgagcacgcgcgccactggggcgccggacgttgcaagggggtcacatccggtagggggcgggcctggcggaccccggaagtgtgggcgcggctgcggtttaacccgcggtggcggcggcgacggcggccctggcaggtgagcggagactggggagggtcccggctctgccgcaggcgggcggggcagaggacgacggtgggggcggcgccggccgtggctcccggagcgcccccgcctgcccgcctcatcctggcagaggccggtgattgggca

SEQ ID NO: 7269 - DNA, 2300 bp, Homo sapien
ctcacggtgagtgttacagttcttcaagatggtgtgtctggagtttgttccttcagatgttcagatgtgtccagagtttctcccagttggtttgtggtctcgctggcttcaggagtgaagctgcagaccttcgcggtgagtgtaacagctcttaaaggtggcgcgtccagagttgtttattcctcccggtgggttcgtgatctcgctggcttccggaatgaaactgcagaccttcgcggtgagtgttacagctcataacagtagtgcagacccaaggagtgagtagcagcaagatttattgtgaagagcgaaagaacaaagcttccacagcctggaagatgtcccgagcaggttgccactgttggctccagtggcttgcttttagtcccttatttggcgccacacacatcctgctgattggtccattttacagagaactgattggtgcatttacaatcctttagctacacacaaaagttctccaattccccacctgattctctagacacagaatgctgattggtgcatttacaagccttcagctagacacagtgctgcttggtgcatttacaatcctttagccagacacaaaagttctccaagtccccaccccattagctagacacagagtgctgactggtgtgtttacaaacctttggctagacacagagtgctgattggtgaatttacaatcctttagctaaacacaaaagttctccaagtccccacccgactcagaagcccagagggcttcacctctcacaacctctgcctcccaggttcaagcgattctcctgcctcagcctccccagtagctgggattacaggcgcccaccaccatgcccagctaacttttctacttttagtagagacggggtttcactatgttggccaggctggtcttgaactcctaacctcaggtgattcacctgcctcaccctcccaaagtactgggattacaagcgtgagccacggcgcccggccaagcatcctctttctaagtcactcacccatgagtatgaattgtttgcccagattgcttcactccattgtagctgatttcaacccagttgtaagcctggagcacctggagaaatcagacccaggtgggatctcaaaggtggagagggtgggaaaggagcaaaagaaagagaaggggtgcagaaagggagggacacagattccaaagacatacctggcctgtctgaagtttgcctcctccaggaagggaaggcagcattctcccggtgctgtctccctcctcccccgtgtactgtgcacatctccttcccagactcagcccagttgcaccaaaagcaagccacaaggcccataggctagtcagacgcccaacaaccccacacaatgacacttatgtggggaattgtgtcctgagacccaaacgactgaccccccaatgtgctgtgaataagcagtgaccacaaccagtaccacctatgactgagtcgggggctgctctctaagaaccccagctgcatgccctctgggacaaatcaggccacctggggctccttcacatctctccaatgctgtgttaaacgcacttttaaccaactttgtcaaaatgctcagctggtaaagttttaacgtaggcccttgtcaatgcttcagaaataagcctctggcggcgcgacagagcaaaactccgtcaggaaagtaaggaaagaaaggaaaggaaggaaggagggaaggaaggaaggaaagagagaaagagaaagaaggaaagaaaggaaagaaaagaaaggaaacaaaggaaaagaaaacaaataagcttccaggtcattgcttagaaagaaaaagaaagaaaaaaaaagaaaagaaaaaagaaagaaaaaagcctcccggtcattgctcctctctctctctgcgggtccatccccatggcaccctcccccctccccatggtgcaaagttatagtggaaagtgcctcagctggaaagatctcagaatgtggcttagggcagccacaatcttatcaggagcttctctgtttgggatcaggggaaccggtgactttcagaggccgataaggcgggacccaacttgtatataaggggcagctcatgctgctgctctgcaccttcctcccgtcttgccttctccctcgagttgggacccgggaagaaccatgaagtggctgctgctgctgggtctggtggcactctctgagtgcatcatgtacaagtgagtccgggtggtgtgggtgtgaagacgctgcctcccacatcacctttctttcctcccgtgtcttccttcttcccttttttctccctctcta

SEQ ID NO: 7270 - DNA, 2300 bp, Homo sapien
cagaacaagaccctgagacagggcttcctatctacctggtgacctccccgctcccctgtcctcctccccagcaatttctgcatcagagttttcactctactttcttcactgaataaaagctcacaaagtggaggatccattgggttggtaaggatcctctttcttttttcttttgtctttttttttttgttattgttgttgttttgtttgagacggagtctagctctgtcacgcaggctggagtacagaggcaagatctcgtctcattgcaactatgtcctgaattggttccttccggtgggttcttggtctcactgacttcaagaatgaagccgtggaccctcgcgatcagtgttacagttcttcaagatggtgtgtccggagtttgttccttcagatgttcagatgtgtccagagtttcttccttctggtgggttcgtgctctcactggcttcaggagtgaagctgcagaccttcgcggggagtgtaatagctggtgcttactggtgcatttacaaacccttcagctagacacagagtgctgactggtgcatttacaagcctttagctagacacacaatgttgattggtgcatttacaatcctttagctagacacgaaagttctccaagtccctaatcgactcagaagcccagacggcttcacctctcataacctctgcctcctgggttcaagtgattctcctgcctcagcctacccagtagctgggattacaggcgcccaccaccatgcccagctaacttttctacttttagtagagacggggtttcactatgttggccaggctggtcttgaactcctaacctcaggtgattcacctgtcttagcctcccaaagtactgggattacaagcgtgagccacggcgcccggccaagcatcctctttctaagtcactcacccatgagtatgaattgtttgcccagattgcttcgctccattgtagctgatttcaacccagttgtaagcctggagcacctggagaaatcagacccaggtgggatctcaaaggtggagagggtgggaaaggagcaaaagaaagagaagcggtgcagaaagggagggacacagattccaaagacatacctggcctgtctgaagtttgcctcctccaggaagggaaggcagcattctcccggtgctgtctccctcctcccccgtgtactgtgcacatctccttcccagactcagcccagttgcaccaaaagcaagccacaaggcccataggctagtcagacgcccaacaaccccacacaatgacacttatgtggggaattgtgtcctgagtcccaaacgactgacccccccaatgtgctgtgaataagcagtgaccacaaccagtaccacctatgactgagtcgggaggctgctctctaagaaccccagctgcatgccctctgggacaaatcaggccacctggggctccttcacatctctccaatgctgtgttaaacgcacttttaaccaactttgtcaaaatgctcagctggtaaagttttaacgtaggcccttgtcaatgcttcagaaataagcctctggcggcgcgacagagcaaaactccctcaggaaagaaaggaaagaaatggagaaagggagaaagggagaaagagaggaaaagaaagaaagaaagaaagaaagagagagagagagagaaagagagaaagagaaagaaagaaaagaaagaaagaaaaagaaagaaagggaaagaaagaaggaaaggaaggaaagaaaagaaaggaaagaaaggaaaagaaaacaaataagcctccaggtcattgcttagaaagaaaaagaaaaaagaaagaaagaaaagaaagaaaaagaaaagaaaagaaaatagcctcccggtcattgctcctctctctctctgcgggtccacccccatggcaccctcccccctccccatggtgcaaggttacaatggaaagtgcctcagctggaaaggtctcagaatgtggctcagggcagccacaatcttatcaggagcttctctgtttgggatcaggggaaccggtgactttcagaggccgataaggcgggacccaacttgtatataaggggcagctcatgctgctgctctgcaccttcctcccatcttgccttctccctcgagttgggacccgggaagaaccatgaagtggctgctgctgctgggtctggtggcgctctctgagtgcatcatgtacaagtgagtccgggtggtgtgggtgtgaagacgctgcctcccacatcacctttctttcctcccgtgtcttccttcttcccttttttttctctctctc

SEQ ID NO: 7271 - DNA, 2300 bp, Homo sapien
gggcttcctatctacctggtgacctccccgctcccctgtcctcctccccagcaatttctgcatcagagttttcactctactttcttcactgaataaaagctcacaaagtggaggatccattgggttggtaaggatcctctttcttttttcttttgtctttttttttttgttattgttgttgttttgtttgagacggagtctagctctgtcacgcaggctggagtacagaggcaagatctcgtctcattgcaactatgtcctgaattggttccttccggtgggttcttggtctcactgacttcaagaatgaagccgtggaccctcgcgatcagtgttacagttcttcaagatggtgtgtccggagtttgttccttcagatgttcagatgtgtccagagtttcttccttctggtgggttcgtgctctcactggcttcaggagtgaagctgcagaccttcgcggggagtgtaatagctggtgcttactggtgcatttacaaacccttcagctagacacagagtgctgactggtgcatttacaagcctttagctagacacacaatgttgattggtgcatttacaatcctttagctagacacgaaagttctccaagtccctaatcgactcagaagcccagacggcttcacctcttacaacctctgcctcctgggttcaagtgattctcctgcctcagcctacccagtagctgggattacaggcgcccaccaccatgcccagctaacttttctacttttagtagagacggggtttcactatgttggccaggctggtcttgaactcctaacctcaggtgattcacctgtcttagcctcccaaagtactgggattacaagcgtgagccacggcgcccggccaagcatcctctttctaagtcactcacccatgagtatgaattgtttgcccagattgcttcgctccattgtagctgatttcaacccagttgtaagcctggagcacctggagaaatcagacccaggtgggatctcaaaggtggagagggtgggaaaggagcaaaagaaagagaagcggtgcagaaagggagggacacagattccaaagacatacctggcctgtctgaagtttgcctcctccaggaagggaaggcagcattctcccggtgctctctccctcctcccccgtgtactgtgcacatctccttcccagactcagcccagttgcaccaaaagcaagccacaaggcccataggctagtcagatgcccaacaaccccacacaatgacacttatgtggggaattgtgtcctgagtcccaaacgactgacccccccaatgtgctgtgaataagcagtgaccacaaccagtaccacctatgactgagtcgggaggctgctctctaagaaccccagctgcgtgaccacggggacaaatcaggccacctggggctccttcacatctgtccattgctgtgttaaaagtacttttaaacaactttgtcgaaatgctcagcttgtaaagttttaatgtaggcccttgtcaatgcttcagaaataagcctctggcggcgcgacagagcaaaactccctcaggaaagaaaggaaagaaatggagaaagggagaaagggagaaagagaggaaaagaaagaaagaaagaaagaaagagagagagagagagaaagagagaaagagaaagaaagaaaagaaagaaagaaaaagaaagaaagggaaagaaagaaggaaaggaaggaaagaaaagaaaggaaagaaaggaaaagaaaacaaataagcctccaggtcattgcttagaaagaaaaagaaaaaagaaagaaagaaaagaaagaaaaagaaaagaaaagaaaatagcctcccggtcattgctcctctctctctctgcgggtccacccccatggcaccctcccccctccccatggtgcaaggttacaatggaaagtgcctcagctggaaaggtctcagaatgtggctcagggcagccacaatcttatcaggagcttctctgtttgggatcaggggaaccggtgactttcagaggccgataaggcgggacccaacttgtatataaggggcagctcatgctgctgctctgcaccttcctcccatcttgccttctccctcgagttgggacccgggaagaaccatgaagtggctgctgctgctgggtctggtggcgctctctgagtgcatcatgtacaagtgagtccgggtggtgtgggtgtgaagacgctgcctcccacatcacctttctttcctcccgtgtcttccttcttcccttttttttctctctctcttcagctgtctccatccccc

SEQ ID NO: 7272 - DNA, 2300 bp, Homo sapien
aggattccgagggtccttgggactcagaatggatatgacggaaattgcattcatcttatgttacagaatattttggctcctacttgttgagaatatgttgacaagaaaatgggccaaaacaaacaaggtgagatacggcctcaaggtgaatgtctgcaaaaatgtagccacaagccgggtgcggtggctcacgcctgtaatcccagcactttgggaggctgacgtgggtggatcatttgaggtcaggagttcaagaccagcctggtcaacatggtgaaaccccgtccctactaaaaatacaaaaattacctgggcatggtgatgtgcgcctgtagtcccagctactcgggaggctgaggaaggggaattgcttgaacccgggagatggaggttgcagtgagccgaaatcgtgccactgcattccagcctgggcgacagagaaagactccatctaaaaaaaaaaaaaaaaaaatggggccacacagcttcaggtagggagaccacttggcagcttgtgtttaaataacataaaagcacaacaaaaaatgcctgctttttttcgttcttttttttttttgagatggagccttgctctgtcgcccaggctggagtgcaatggtgcaatcttggctcactgcaacctctgcctcctgggttcaagtgattctcctgcctcaacctgagtagctgggaatacaggcgcccgccaccatgcccagctaatttttgtatttttagtagagatggggcgtcaccatattggctaggctggttctggaactcctgacctcaggtgatccgcccacctcagcctcccaaagtgctgggattacaggtgtgagccaccgcgcccggccacctgtggtttttctttactgcaaactcaatgtgtcataattaacatcatggggttgccaaaaacgtaatattagggtgcattagtaaaagtatggtgtctgcaggaaggaggcacgagtccaggccaccgctggtacgccatgtccatttgtggccaccaatgttaagcacctcagtaaaggcagaggtagcaggaaggccaaaggaacagggattgttcaactgggaagtgaagacactttaaaacaaatgtggttcaaaactggattgggccgcttcttaacagatagtgagtttcttacccctggaagtatttaagcaaaatcttgactaattgtgggtggctaagggaaagattactgcatggagcagaaggtaaaatcagttatcctttcagctttctcccagcgggatgattttgatttccgcaccccttctttgcctaaatccctaggcagccccccagtctctgaccacggcctggggcagctgcagaaggggcaaagaggagccttccagatctgctgctgcctctccactgccaacggcgccagctgcttcctggtcttgccaccagcagtcgggaggccggccatctgccccctgggtgcccagaggagcccggggcttcaaaagtggctagggccccaggccagggagcggttggacccacagatcaacgcactccggcgttagggtgcagaccttctggcaggctgggggcaggcctagaactgctcagcggcacagcgacctggcgtcgtgggttcgaatttccacggttcccacctcgtcacaacaaggcgtctcgggtcccaccgacaggggccatgcccggggcgcgcagcctctggtgctagccttgttcccgaagtctgtttcctcccggggcctcggtctgacgccttcagtcagcgcttcgcaggaagccgactcccaaaccggggcagggggtgtgggccgagggcgaaaccccgcccccaggggtccctgatctttgcccccgccccgggctccgcgcctctcggagaggcatcagcaggcgggcggcgttgcctttgtgtgtttcgcttcgaggtgccagagaccctccccacaatcgtccgccgcgtcccctcgcggccctcggcccctcctctcggcgtcccaagcccccctgctcagctctgcgtgccatttcggggatcgctggttcgctccccacggcgccaggaggaggggcgagggccggcagccccctctcccgcgcgcggcgcaggagccgagcccagcccgggggacccgccgccgccggtcatgtgggccggactgctccttcgggccgcctgtgtcgcgctcctgctgccgggggcaccagcccgaggctacaccgggaggaagccgcccgggcacttcgcggccgagaggtaagcgcccggagctcctccccgctcccccgcccg

SEQ ID NO: 7273 - DNA, 2300 bp, Homo sapien
tattttagcactaattatatcttccgagacactcaaattttttccctttgttaaactagtgatacatccttatttataaaattagaaaatgccaaaatgcacaaaaaaagaaaaaatcatgatgctaccatccaatatgactcttggcagccctttccacatactaattataaccgaagcttaccctattctgatccttactttcaatctatctgcaatacgggggcagatagccttctggcatattgttatccacgagagcctcatttctgacacccttccacccctcagcaattttttgaagtttggagtgaccctgacatccttcagcttttagcactctctccttaccttctgagctgttcttcactctgtggccagagtctgtcttgcctttggtgggtagggcactggagtgcctaaggattaatgaactgtctctgtctttttatccacctggttttccttttagccacctggcagtggtagattggtaaaaccggagggaaagttctgtcagtttgcagaccaagtgtgggacgtgcccagatactgagtcattgctttgtcagtgttatctaactattggcctgaagactggcaccagctcacctatttattattaaagagctttcatccttatatataaactcaattgtgctaggtaagatgaatgaatagataacagtgtcaccaacctacttcctgttttatttcagtgataaatttatacaatatatttctatacaattttgtaatctttactaaggaactttaaataatttaaatggctcatacacagtaaagaacttagatattttagaggtctgatttgggggttgagaaaaactgctaagactggtggtcacagtcaacatggtggctcacgcctgtaatcccagcactttgggaggccaaggcaggtggatcatgaggtcaggagttcaagatcagcctggccaacatggtgaaaccccatctctactcaaaaaacaaaagttaaccaggcatggtggcatgcgcctgtaatcgcagctacttgggaggctgaggcaggagaatggcttgaacctgggaggcgtaggttgtggtgagctgagattgcaccactgcactccagcctgggcaacagagagagactctgtcccaaaaaaaaaaaaaaaaaaaaaaaagccaaaaaactggtggtcacagggtcttactctattcatatcttcccacaggatgcagtttgtattacccaagtaagtctcaattagaatgaaataggccttttccccaccagctgtaggtttgtaagctgtaagctacttttaagctggcctccttcaggcattcatgcaaaaatgacatctattgtaatcattagcaggactttggggaataagaaatagaagcctcatgtagcttattcgtagggctctattagggctgcatttaccacctttccactcctgtgtggaccctggcagatgcttggagacatttgttcatctgctgtttatctagatcacttcagcatcggtgaggttggtctctcaagaacccaaagctctggtcagtgaatggaaggagcctcaggccaagaacatcagtgtggcctcctgcaatagcagccaggtggtggtggctgtaggcagggccctctactatctgcagatccatcctcaggagctccggcagatcaggtgtgtgtgtttttctgtctgctcgctttcctcctcttttctctaggacttctttgagccttggattccttcctctgccatattcttctttgttcagccacacagagatggaacatgaagtggcttgcttggacatcaccccattaggagacagcaatggactgtcccctctttgtgccattggcctctggacggacatctcggctcgtatcttgaagttgccctcttttgaactactgcacaaggagatgctgggtggaggtatgtgtcatttagggacctgggttgggacagagtcaaaatgtggaacaagaacataatgtccccctttctcacagagatcattcctcgctccatcctgatgaccacctttgagagtagccattacctcctttgtgccttgggagatggagcgcttttctactttgggctcaacattgagacaggtgagagtagtattttgagtgagggactctttcaaaaatagagtattagaattacacagaattcttagtcccagggttctgcttttgaactttcacaggccagctttttgtcctgttttctttcttcctttctcctgatgtcattctctctgtaggtctgttgagc

SEQ ID NO: 7274 - DNA, 2300 bp, Homo sapien
gcctatcctctgaaacaaactgctttaatttctcccttctaaagaagtcaacttcataaatgtttccctaatgaatctctccttttacttctagaaagcttggtcaagagtacatactgaaatttgctatccaaagagagaaaaaagagaagagtttttctcctaaagcatattccacccatcccaagaattcgcaaaacaacctaacacagcccaagcacggtggcatgcctacaataccccagctactctactccagaggctaaagtggagggattgcttgagctcaggagttcaagacatcctgggcaacactgtgagacccccgtctcaaagaaaataaataaacaaacaaaaataacataaaacaacctacgaccaacagttccccctccactgcttgtcccaactgcaacacttaccttgggcctgaaaagctccatgaccgcaatcttcccatacatgcccacctctttgacgggccgaagcccctcggcggtgaccacatagatctctaatctcgtgtttttggcaatcaacaggtttaagtcttcggccgaagtaaagtgtcctgaaagaacagaccctctaacttttgaactcaggggaagggcctcccatcccttcaaaataatcctatcacttatgtctaaatacctccagaattctcatttacttcacatacttctccaactccctccagctactccccttcttgccaaatccggcacctcaaagagtctcagttcatgcattcaacaaagctacttccctaatcagactaagaaaactggactggacctaagagccgtgtgtcctccaaatgacaatgactgcgtaatcccttctcatgcctcttgcccctccaattttactctattacagttacagtggcaggctctaattgagaatgccggagaaagtgttcacttcttccagtcttcatctaaagtctcacaaaacttttatctgacagaccaagtcaaatgaagaagtcccagagctttatatgaaaacactgttttgtccacaccccctgccctcctggcagtctaccaatacctccatccacactcagctacctccaactctgaacaacagttttgttttggaatcatgattagggtgtatataaacatgcaagcttggggtctgcatattcagctgagaatgtgggttaagatgactcttcccgggttctgaacatcggtgtccttaacaatccaagcgcatcgtcaacaaggcaaacccagcactgggccaggcaaaccaaaccctcttctccagcagggccctcatgtaaacaacagccccaggcaaaggggttagcctgaagagggctcctctccctctgtgggataatgcgggcattcctcacatccctccacctcctgggccccccagacttccccacaggaaaatcttgaccccaaagtcgtcattaccacctccccttttcctggccacagaaagccaatctccgggcccaaacgacaccgcacaaccaactcacactcctctgtctcactgggcccgccctgttctcgaggccgaatgacctccccaggacgaaaggggaccctcgagagcggcttccaacccccaaaaagcgcgtacagggacgactctttcgaggtcgcggtgctgggggaggttcctcggccgccagcgccttccattcgccgggcccactcctgcccggccgcccccggggcggcgggcctccctaggccgcggctccccccaactccctcactcgccggggtctccggccccggcagcctcaccggtcacgcagccgttcacggcggtgggcttctgggccgttaccacgtagttgtacgacatgtcgaggcttggagcggcccgtcgggactcgagcgcgacactagaaagagggacacaagcgaaaagacaggtggcccccaacagcgcgcagcgaactccactgccgctgcctccgccccagagacacgttgcaggccagagcggccggggcgcggggcatcacgggacggcctcacctggcctcttggaggactcccgaagcccgaggccgccaaccgaaggaggccccgcccccggaggcaccgcctcgcctctttccgccagcgcccgcaggacccggatgagagcgcacgcttcggggtctccgggaagtcgcggcgccttcggatgtggcggatgcggccgtgagccggcgggggaggtgcgccagtgtcctccgagctcgcccgcagactccccaccccgttccgcgccctttgcccttccccgcatccagtcctccttccgttgct

SEQ ID NO: 7275 - DNA, 2300 bp, Homo sapien
tcctggccacagaaagccaatctccgggcccaaacgacaccgcacaaccaactcacactcctctgtctcactgggcccgccctgttctcgaggccgaatgacctccccaggacgaaaggggaccctcgagagcggcttccaacccccaaaaagcgcgtacagggacgactctttcgaggtcgcggtgctgggggaggttcctcggccgccagcgccttccattcgccgggcccactcctgcccggccgcccccggggcggcgggcctccctaggccgcggctccccccaactccctcactcgccggggtctccggccccggcagcctcaccggtcacgcagccgttcacggcggtgggcttctgggccgttaccacgtagttgtacgacatgtcgaggcttggagcggcccgtcgggactcgagcgcgacactagaaagagggacacaagcgaaaagacaggtggcccccaacagcgcgcagcgaactccactgccgctgcctccgccccagagacacgttgcaggccagagcggccggggcgcggggcatcacgggacggcctcacctggcctcttggaggactcccgaagcccgaggccgccaaccgaaggaggccccgcccccggaggcaccgcctcgcctctttccgccagcgcccgcaggacccggatgagagcgcacgcttcggggtctccgggaagtcgcggcgccttcggatgtggcggatgcggccgtgagccggcgggggaggtgcgccagtgtcctccgagctcgcccgcagactccccaccccgttccgcgccctttgcccttccccgcatccagtcctccttccgttgctccaggagccctcgggctgttcctcctttgggaacgggaaggactgcggaggcatagagagggaagggagaccgcgattcgtgcatatcccagactagaaccttgcctgctttcctttcactgtctcagttcctccagatccagctggtgccctcgcctgacgtttgaacgaccacctgctcacctcctcccttttgcgcgttgattcttcagacttcaaagggcccaccggtctgcttgcccaacgttattagtgcccctattgctctacaaattcgaacctcaaacacaaaaccagtatttctccgtagggaaccttaatgagccaggagagccgtcagccctgcagcctccagggtaccccacatcaaacaggctccccgggaacaagaggaataccacgtggcttggcacactcgcagaatgccagagaggagccaacccccattttacagatgaggaagctgaggcttagggaggaattggtttacctaagaccctccccacaaccccaagtaggctgaggcagagctatgttgattcttcctattgtgcacccacacagaggccaacacgctgctgaaccaggctgaactgaggaaaagctagaaagtcatcgtggtttacatcttgcctttcccatagcagagactctgcctgactttggaggcactgaattatcagtagtaaaaacacactctgtagaaaaactagacattggtttagattctggctgttacctgtattaccttggacaagtccctagagctctctgagtctgtttcccagaagtaaaatgggtcacaaacctggctagctccccccattcccttcccttttggtgccaaggccagtgagggcaagcgtgtgacgagctttgttaactttttcgctgcatgtgatgcccgtgtaaaagatagttattctgaggatcactgtcctttagtgatgaagtgggtgctgttcctggacataaaggcagacctgtgcttgacatggattgatctgtcttctggcagtgaagtgcaggcatgaaccttggtcagccccacactcttctccatccgtagcccatgtactagagtttggacttggaccgaagtctggggcagctccctaattactagggtgctgaaggcgtgattgtgccagtcgactgcgagttccttccgcagcttgtatcgttacccactcctgcaggtgctgctgctgcctccactgtactcagacccaggtagcacaggattgtccatcctccagcagctcagtgcaacggtgtgaactcagcctgtttcagagcctccacaccatggtgagtcatacagggccgggacgggaatggcagcatggtctcaaagcaggatcccagccttgggcaagctaaagctccttacactttgactgagagatgctattgcctcctgaggctcacgggtgaagagagagggtcatcctctc

SEQ ID NO: 7276 - DNA, 2300 bp, Homo sapien
cttataatgcagatgaagaaaaagaggcgcagagaggtctgtaaaaggtcatgcagctggtcagtggcaggctgaaatttgaatccagatatgttcaaggcttgttttggttcaaatcagtgggcctggagcaaagcccagggacatggccagcctcccacactgtagatcccagctccagaccggcccacataagccccaaggttaggaacggtcacatggtcattcttcacgattccttctgtgaccggtacaatgtctattacagagcaggtaactgttactgttttactctgaatgcaagacccagataaggggcagagtggctctgaagggactcaagaggctgcagccccaggcctggctgggaccagcagcctccaggaaacaaagaaaagcagggatcagaccctgggagagaggatgaccctctctcttcacccgtgagcctcaggaggcaatagcatctctcagtcaaagtgtaaggagctttagcttgcccaaggctgggatcctgctttgagaccatgctgccattcccgtcccggccctgtatgactcaccatggtgtggaggctctgaaacaggctgagttcacaccgttgcactgagctgctggaggatggacaatcctgtgctacctgggtctgagtacagtggaggcagcagcagcacctgcaggagtgggtaacgatacaagctgcggaaggaactcgcagtcgactggcacaatcacgccttcagcaccctagtaattagggagctgccccagacttcggtccaagtccaaactctagtacatgggctacggatggagaagagtgtggggctgaccaaggttcatgcctgcacttcactgccagaagacagatcaatccatgtcaagcacaggtctgcctttatgtccaggaacagcacccacttcatcactaaaggacagtgatcctcagaataactatcttttacacgggcatcacatgcagcgaaaaagttaacaaagctcgtcacacgcttgccctcactggccttggcaccaaaagggaagggaatggggggagctagccaggtttgtgacccattttacttctgggaaacagactcagagagctctagggacttgtccaaggtaatacaggtaacagccagaatctaaaccaatgtctagtttttctacagagtgtgtttttactactgataattcagtgcctccaaagtcaggcagagtctctgctatgggaaaggcaagatgtaaaccacgatgactttctagcttttcctcagttcagcctggttcagcagcgtgttggcctctgtgtgggtgcacaataggaagaatcaacatagctctgcctcagcctacttggggttgtggggagggtcttaggtaaaccaattcctccctaagcctcagcttcctcatctgtaaaatgggggttggctcctctctggcattctgcgagtgtgccaagccacgtggtattcctcttgttcccggggagcctgtttgatgtggggtaccctggaggctgcagggctgacggctctcctggctcattaaggttccctacggagaaatactggttttgtgtttgaggttcgaatttgtagagcaataggggcactaataacgttgggcaagcagaccggtgggccctttgaagtctgaagaatcaacgcgcaaaagggaggaggtgagcaggtggtcgttcaaacgtcaggcgagggcaccagctggatctggaggaactgagacagtgaaaggaaagcaggcaaggttctagtctgggatatgcacgaatcgcggtctcccttccctctctatgcctccgcagtccttcccgttcccaaaggaggaacagcccgagggctcctggagcaacggaaggaggactggatgcggggaagggcaaagggcgcggaacggggtggggagtctgcgggcgagctcggaggacactggcgcacctcccccgccggctcacggccgcatccgccacatccgaaggcgccgcgacttcccggagaccccgaagcgtgcgctctcatccgggtcctgcgggcgctggcggaaagaggcgaggcggtgcctccgggggcggggcctccttcggttggcggcctcgggcttcgggagtcctccaagaggccaggtgaggccgtcccgtgatgccccgcgccccggccgctctggcctgcaacgtgtctctggggcggaggcagcggcagtggagttcgctgcgcgctgttgggggccacctgtcttttcgcttgtgtccctctttctagtgtcgcgctcgagt

SEQ ID NO: 7277 - DNA, 2300 bp, Homo sapien
ttccgcaccttaaccccagtgagcgtgaaaaagaaagttaataaactataatacatggaagcaagaaagacactgcctcctctgagggaccttttcccaagcatgtaaacaagggggcccacagccctggctgcaggcatcatgacccatcttctaccaggcagatctttattacctgagcccctaaggcagtgtctcctcagctgggctgcttccactgagacccccgacccatcccctttccagtacacacacctgatgcatgtaagaatggtagaggggcttttcttagcattgaattaataattcagtggctcctcgggagtcgaatgggcatttgggacaccagaaggaaaagaaatcatcatagtctaaggttcagttgtagatcaaaaaatgcagccaggccgggcacggtggctcacacctgcaatcccagcactttgggaggccaaggcaggcggatcccttacactcaggagttcaagaccagtctgggcaacatggtaaaaccctgtctctaccaaaaaatacaaaattagccaggcatagtagtgtgtgcctatagtcctaacttgggaggctgagttgggaggatggcttgggcccaggaggtcgaggctgcggtgagccataagcatgccactatactccagcctgggcaacaaagcgagaccctgtctcaaaaaaaaaaaaaaaaaaaaaagaaactgcagccaagccagcccctaggtctctttctagagcgatcactgatggcaccagggtgagcaggggcactgtatgcatgtggagacaaacagcacatgcctggcacacatgtagggtagggagtggttaaaggcactggctgtcgactcatacacatgatctgaaatctgattctgctttaacccggctacaggagctaaggcctattttttagccctttgggatctgtaaaatcagaatggtacccacctcatggggacatgaaaggattcaaatgaattgatgaagatgggccataaagcccagcacagtccaagtgctcactcactgagagttacggttatcacaggggttgggcccccagcccctcccaggtcatctgctctaccactagctggtaggaaagagcctcctgccctcccaacccccgtcacctacttggcccaaatttggctgcaggctccccgagtgcctgggcttctctacccagggtcctgtctgtcggctgcaccatacgtccctgaccacaaggcatccacgtgcacaggagtatgcgcccagcagctgggaaggaggctgacctcagacggtggcctgtggatcccagctctgtcatttcctggctgggtgacctcaacctagtcaccctttttgagtcttgttttctcagattatgaaataggaaaaatttccttcctcgtgagataagcacgtgccattagctattaaggacacgcacataaatgagctgcatgtgaatccacacatgccattccatgaagacagaggatcatgtggatctttggtgccttccggttggcccctccctaggtctgtgagggtcagacctgtcctgaggcttttacaaattggcccagaactcatttaaccacagcatcatttcattagagggctgttattagagactgaatgtttgtgtcccccccaaattcctgtgttgaaaggctcacccccactatggtagtgttaggacgtggggcctttgggaggtgatggggttatgagggtggagccccagagagctctcacgccctttccaccatgtgaggttatggtgagaagatggtctctgaggaagctggcccttgccacacaccacatttgccagcgccttcatcttggatgtctatagcctccagaactgtgagaaataaacacttgttgtttaagccacccaggctattatatttttgttatagcagcctgaacaaagacagctttgattcttaacatatttaatgaaactcgagcttcataaaccagtgaaatgcctacccctatggagatggggagctggtcatgggacccaggtgcctggaggacatcccagtggctttgaaggctccagccagtcaagacggtcaatattagcccttctgccaacatctggcaatgtgaggctggggtggacgttggcctgatgttgccaggagtaggatgctgatgctgccagagagtaggtgggctccaaaccccaggcttctcacttgcttactaagcacagcagtctgaagcttgggacctggcagtgcgtctttggagaaggcaaaaaagccacagcagcaaca

SEQ ID NO: 7278 - DNA, 2300 bp, Homo sapien
aatcccagcactttgggagactgaggtgggcggatcatgaggtcaggggatcgagaccatcctcgctaacacagtgaaaccccgtctctactaaaaatacaaaaaattagccgggtatggtggcaggcacctgtagtcccagctacttgggaggctgaggcaggagaatggcgtgaacccgggaggcggagcttgcagtgagctgagattgcgccgctgcactccagcctggatgatagaacgagactctgtctcaaaaaaaaaaaaaaaaaaaaagaaaggagaggccaaacagctaagaggcagagcctggatttggacctatgttgcctgaccttagtacctgtgttgacagccagcctcacttgtgacaattcagtttgatgaaacaatgactgtcatgatgctttttagcctagaaactgcaaacaagctgaatttattattgtgaaaatagaatgagaggtccaagaaacctgcttcccccctccactttttttttaggagacaggtttccctctttttcaggctagagtgcagtgggatgatcatagcttgctgcagccttgaactcttaggctcaagtgatcctcccacctcagtcccccaagtagctgagagaacaggcatgtgccaccatgcccggataatattttttatttttattttttgtggacacaggatcttgctatgttgcccaggctgatcttgaacttctggcctcccaaagtgctgacatgagtcaccgtgcccagccctcctccctttttaattggaatctgtttatttatttatttctctctgtggcccaggctagattgcagtggcatgatcatagctcactgtaacctcaaactcctggcctcaagcagtcctcccaccttggcctcccaaaaagtgctggaattacaggcatgagccaccttgcctgaccactcctccctttttaactggcccttctctcctcccttcatggctgttatcccacaaatcatgggagggtagaagatgccgaggagttgataccagtgccctagcatttcctgttcccttgctgggaagctgtgtaggatcctatcagggttattccctgatgtctgggtgagctcgaggggagaggctgagccctggcactactctctcctgcagcgtcactggtgtaccgcctgccccagtcgtgggtggggcccaaactgccctggaaactcctccatgcagcgctgcacctgatggccttcgtcctcactgttgtggggctggttgctgtctttacgtttcacaaccatggaaggactgccaacctctactcccttcacagctggctgggcatcaccactgtcttcctcttcgcctgccaggtgggttctctctgttctcctcctcgaggttcccagagccatgagctctggttgggggttcacttgcatgagcaccaaatattcctctgctcactgcttggagagggacttgcagattgttatcttgtagaactgacagtttattcaagggctgtgggaggtcagtggcctgaacttaccctgttccttttatccctcccattgcccgtctctcgtcccagagccctctctgctaactttgtcatggcacgcactatgctgactctaatcagccatctggcttccactttccccactcccacctctgtgaaccaaaagaattcttgaagtggtttccatattctgatctcaggcctgtgcgagtgaagagttttatgagcaaggactggaaggaaccagagacaaacaaggtggttgggtttgctgggagtgggatggtagctaagcatgtcatttactgttcttgttgcttgggtaataggccacaatgaggaagctagcacggtagtgggcaatgccaggtgggaaggtttgagttgtgaaagaagagccagggagcagagatggggaggaggcactgatggggtgggatgtgctttggtcacacatagcacagtcgggtgtgtcctcccttttgtccacagtggttcctgggctttgctgtcttcctcctgccctgggcgtccatgtggctgcgcagcctcctaaaacctatccacgtcttttttggagccgccatcctctctctgtccatcgcatccgtcatttcgggcattaatgagaagcttttcttcagtttgtgagtgcagtggggtccccaactctaaggtgaagaggagggaatagggtcttcaaaagatacaccctgtgatcacaggactcacccaagggaggagagattttggggttgggtccactcctgatctggaaggtaacagaatt

SEQ ID NO: 7279 - DNA, 2300 bp, Homo sapien
ttagccaggatggtcttgatctcctgaccttgtgatctgcccacctcagcctcctgaagtgctgggattacaggcttgagccatcatgcccgacctgagctgtagtttttaaccagctctagagaacaggagattgaagcctctcatggtttagtcaggccaccgaatgagggacttgcttgctcttccgggatccatcttttttttttttttctttttttgagatggagttttgctcttgttgcccaggctggagtgcaatggcgtgatcttggctcactgcaacctccgcctcctgggttcaggccattctcctgcctcagcctcccaagtacctgagattataggtgcccgccatcatgcccagctaatttttatattttttagtagagatggggtttcaccatgttggtcaggctggcctcgaactcctgacctcaggtgatccacccgcctctgcctcccaaagtgctgggattacaggtgtgagccactgcgcccaacctgggatccatctttgtaatctttgtcccatgctttcaaatctgtgccttggggccctggtgagcctcattttccccatttgtaaaatggcaatacgatgccattgatgatagcagcttaccatgtgcagttcacatatatcatcccattttgttcttacaagtttgtgaggtgggctctgttatatcccttttacagatgaggaaattgagagttagacaggagaggccaggccaggcgtggtggctcacgcctgtaatcccagcactttgggagactgaggtgggcggatcatgaggtcaggggatcgagaccatcctcgctaacacagtgaaaccccgtctctactaaaaatacaaaaaattagccgggtatggtggcaggcacctgtagtcccagctacttgggaggctgaggcaggagaatggcgtgaacccgggaggcggagcttgcagtgagctgagattgcgccgctgcactccagcctggatgatagaacgagactctgtctcaaaaaaaaaaaaaaaaaaaaagaaaggagaggccaaacagctaagaggcagagcctggatttggacctatgttgcctgaccttagtacctgtgttgacagccagcctcacttgtgacaattcagtttgatgaaacaatgactgtcatgatgctttttagcctagaaactgcaaacaagctgaatttattattgtgaaaatagaatgagaggtccaagaaacctgcttcccccctccactttttttttaggagacaggtttccctctttttcaggctagagtgcagtgggatgatcatagcttgctgcagccttgaactcttaggctcaagtgatcctcccacctcagtcccccaagtagctgagagaacaggcatgtgccaccatgcccggataatattttttatttttattttttgtggacacaggatcttgctatgttgcccaggctgatcttgaacttctggcctcccaaagtgctgacatgagtcaccgtgcccagccctcctccctttttaattggaatctgtttatttatttatttctctctgtggcccaggctagattgcagtggcatgatcatagctcactgtaacctcaaactcctggcctcaagcagtcctcccaccttggcctcccaaaaagtgctggaattacaggcatgagccaccttgcctgaccactcctccctttttaactggcccttctctcctcccttcatggctgttatcccacaaatcatgggagggtagaagatgccgaggagttgataccagtgccctagcatttcctgttcccttgctgggaagctgtgtaggatcctatcagggttattccctgatgtctgggtgagctcgaggggagaggctgagccctggcactactctctcctgcagcgtcactggtgtaccgcctgccccagtcgtgggtggggcccaaactgccctggaaactcctccatgcagcgctgcacctgatggccttcgtcctcactgttgtggggctggttgctgtctttacgtttcacaaccatggaaggactgccaacctctactcccttcacagctggctgggcatcaccactgtcttcctcttcgcctgccaggtgggttctctctgttctcctcctcgaggttcccagagccatgagctctggttgggggttcacttgcatgagcaccaaatattcctctgctcactgcttggagagggacttgcagattgttatcttgtagaactgacagtttattcaagggctgtgggaggtcagtggcctgaacttaccc

SEQ ID NO: 7280 - DNA, 2300 bp, Homo sapien
tgcttgaacccaggaggcagaggttgcagtgagccaagatcacgccactgcactgcagcctgtgcaacagagatagactctgtctataaataaatacccaggagttccagaccagcctgagcaacagtgagccctcatctcttaaaaaaaaaaaaaaattagctgggcgtgatggcatccacctgtagtctcagctactcaggaggctgaggtgggaggatggcttgagcccaggagaaggctgaagtgagccgagatcgcaccactgcactctagcctgggcgacagagctagactctgtctcaaaaacaaaacaaaacaaaaaaaccgtgaaaactgcaatgcaaatgcttgaaaatatcctctcatttgttctaagggcaggctgggctgtgatcccagggtgtgctcactttgcagagccccattctaagggagcagtcagcaagctcttctgtaaaggtccaggtagtaaatattctaggctttgtagagcacatggtctgtcacaactatgtcatcaactctgcccatgcaagagcagccacataaacatcttaacaaatgagcaccacggctgtgttccagtaatatttatttatggacactgaagtctgagtttcacataattttcacgtcacaagatattattaacttcttgcgaaaaaggattctcccggctgagctaaaacaggtcacatccaggggtaagaaatgctagttcccatccagcccttagtcttagaaaaaggctctacgcaggctgggcgcggtagctcacgcctgtaatcccagcactttgggaagccgaggcgggcggatcacatgaggtcaggagttcgagaccagcctgaccaacatggagaaaccccgtctctactaaaaatacaaaaattagccgggcgcggtagcgggcgcctgtaatcccagctacttgggaggctgaggcaggggaatcgcttgaacccgggaggcggaggttgcagtgagccgagatcgtgccactgcattccagcctgggcgacagagtgagactctgtctcagaaaaaaaaaaaagaaagaaaaagaaaaaggctctactccaaactcttgcagtgttacttttataatttagaactacaaataaatgaaggggtagaaaatcagtttgttgctctccctccccgatggactgggggacttcaagaatcttgaggaccagatttaggatacaagccctaaaccctcatcttacaaatcaaaaacactgtgacactggggcccaaaacaagaaaatgacttagccaaggtaagtggccgagctggtacaggaattcgggtccactccctctcagctctgaggattccttattctcaaaggtagcttctgttaaagtcggaacatgaggagtgaagggctcaatattcctgccaaggaggtaggtgaacaagttaccccttagcaccggaataattatagaccccgacttcaggctgtgcctaggtccggctcaggtgtccaaagaaccgttccaggcacccgaggggtgatccctgactcctctgctgggtgctcgtgccagctaacaatgggtgaaaattggggtgaggagctccaggtgctttctgcgtcctctgaagagctttcgtgcctttataaccaccgcgttggaaggaagagcgcggagaaaggtgcccactttctaaaagagaaaattgaggccgagcaaggggatcgcgacagtgcgaagcgagatagcagcggaaccagcattcgaacccaggtccctgaactcccagccccgggatccttctcacccctaaccacagtgggacgaagtgaggccgggatctccggaacccgcctctcgctaccaggcgccggagctgccgctcccgaggttcctaggagatgcagaagacactgccctgaatgcctacagccggctggcaatgccgccccagagcagagcggcgggtgccgcctcgccttcttataggctcgcagcacttccagtcgcgcgcgaggcctcctgggaagtgaagtccggagaccaggggtggccggctcccagcgcgccaagctgctaaccccctaactcccgttcctcctcggcgtttcttctccaagtccgaagtcagggtccaggactgctgcgatgcatcagccccgcctctcatcccccatccagaggaggcggaaatgttcaggtgaacgcgaagcctcccactacgagccggccctcagcaaggccgtgcgcagtgtgggcgggagccctaagtcagctagcggcgacgctgggagggcccggagcaggcc

SEQ ID NO: 7281 - DNA, 2300 bp, Homo sapien
ttttctcgggcccccaagggcacatcccacagttcccagaaaaccgctcctggctgtctccctaccactgagggagaggcttctagttcctttgaatgagagctgtttcccttgctctaaggcaagcacctgttggagcaaaaagataagcaaggttagaaatgtattaataccataaacatttactgaggacctactgtgtgccaggtaccactccagttgcatgggatactttagtgaacaaaaccaacaacaaaaacccccaagaagtcatttattctaggaccttcaccagcttttctccatgcctggaatcttctcaatgcagagctgtctctaaccaaaggaatctagtagtattactgagaagaatgactgcctggtcatgtagtagcggtggtaacaaaaatggcagcaaatccttatacattgcttacaatgtgccagggagtgttctacaagcactaacattatttaaacctcacaaggtagatgacataatacattattaccttccccattttacagatgagaaatttgaggccaagagaggtaaaataatttgtccaaggtcacgtcgttagtaagtggcagagctagtattcagatgcaggctgcacgggtccacagtctgtgctcttaactactggactaagctgtctcttacataattgatagactagtatttaactaggcaggaaaaatgccagcaaagaagtgtgaagtgccctaggcagaaaaagcagagaggaaacaggggtctcctggaaagctttatctttagggttatggttgcaacacagtggcagttgtttcttttcatctattccaagacccacaagttgctctgggggtgtcctatgacccgctgctgtgccaaatctataaagaaatttcaaaatgctctggagtgttagcgattaaattagcatcggtaaaatgttttgcaatttataagctcttttcatatttctaaccttacgtaatcctacaaccatcttgagaagtagccattacaatgtatattatccccattttacacagaggctccggaaggttaaggcacctcctccacctcagctggtgaagtcccaccttattggacatatgttcgcggtttcctcattcattaaattttagagagagagagagtgtctcgctctgtcgccaggctggagtgcagtggcatgatcttggctcactgcaacctccgcctctcgggttcaagcgattctcctgcctcagcctcccaagtagctgggactacaggtgcgtgccaccacgcctggctaattttttgtatttttagtagagacggggtttcaccatgttagccaggatggtctcgatctcctgacctcgtgatcctcccgcctcggcctcccaaagtgctgggattacaggcgtgagccactgcgcccggccgcattaaataacactgatagctactacctaggtactcacaccacgataaacttgtcaaccaagatcgtttcctttaatcctccctacaagtctgcaaggtgggaattattcctattctacaggaaaggacacagaagtcagagctcaaggcattcctccaggtctcaagtcagcagaacccggcttcataactgtgacgccaaacccgtgctcttaaccactactcataggccaccatccagggctgttttgaggatccgttatgcagaaacgcccatgcctgtctctacgtacgacgatcccctccagtttagggcagtggagactcacaagctcatgaagctctttaattcgtccaccgctacctgccgccttccctttgtacctagggcagtattcctcacgcttcccaatccacttaaaaacgaggcttccttggcaaacaacaacaaagcataaaacccaagcccaaaacaacagcaccaaaaattctgacttctggtcacttaacccactcctcgtcaatcactctcacctccaaactccaacgtcggttgtcatgcggacatcgtcccggcttccggaagccggctttaaattccggaagtaaatggaggaggcgggccccgtctgcgccgtgcggcctgctagtccccggctttctcttcccgctctatggccagtctggccgccatgttggagctttcgctgttcggggcccggcctgctccgggccctcccagcgtcgccgctagctgacttagggctcccgcccacactgcgcacggccttgctgagggccggctcgtagtgggaggcttcgcgttcacctgaacatttccgcctcctctggatgggggatgagaggcggggct

SEQ ID NO: 7282 - DNA, 2300 bp, Homo sapien
ttcactcttgttgcccaggctggagtgcaatggcttggtctcagctcactgcaacctccgcctcccaggttcaagcgattcttatgcctcagccccccaagtagctgggattagaggcatgtgccatcatgcccggctaattttgtatttttagtagagatggggtttcaccatgttggtcaggctggtcttgaattcctgacctcaagtgatccacccgcctcagcctcccaaagtgctgggattacaggtgtgagccaccgcgccaggtgcagctggcccactttctttccatatcaggctcagagcaggaacttttctaatgtctcttgtcttgcaggcagcgaagatggggaagcaggatctggattcctttccaccttaacctctgtgctctgcgctttcctacttaccctaaagggcttccttgccctccagcttgcagttaagttgtgtcagcgggagacataagcagagatcagagatgggagaagggaaatggaggtccctgctatatttatccactagcctcctagagtgtgagggttcctagtgggaggccttctatgcacatattactctccagcttcagggaattgtttcaggcccttcccttttaagcctagaagtaacaattaccgccccaccacatcccaattagccaggggtacagcactttgcttaaagcttagtcactcttggccgggggcattaatcacacctgtaatcccagcactttgggaggcggggggggggggggggggggggggggggggcgggtcacctgaggtcaggagttccagaccagcctggccaacatggtgaaaccccgtctctactaaaaatgcaaaaatatttagccgggtgtggtggggggcacctgtaatccccgctacttgggaggctgagactggagaatcgcttgaacccaggaggcggaggttgcagtgaccagagatagcgccattgcactccagcctgggttacaagagcaaaactccgtctcaaaaataaaatgaaataaataaaataaagcttagtcaccttcctcaggctacctggttggagcgtgccatctgtttcctgctttaccctgattgacaacgggctaacagccaagtcaagtcaacctgagtcctctcaaaacccttctttttgcactcccctgcctgcagcaacacagttttctgtttttttttttttttgagacagagtctcactgtcgcccaggctggagtgcggtggcgcgatctcagctcactgcaacctccgcctcccgggttcgagcgattctcctacctcagcctcccaagtagctgtaactactggcgcgcgccagtacgcccggctaatttttgtatttttagtagagacggggtttcgccatgttggccaggctgatttcgaactcctgacctcaggtgatccatcacctcggcctcccaaagtgctgggattacaggcgtgagccactaagcccggccagcaacacgcttttaccgctgcaaatccggatcaggcaggctttgaagcccagctcacaggccgtctcttggaaactaacttagatttccacctgggagcactttgtcctctcagctcccactgcaccactttatggatcgcgtggtgactcgtttcattttatttatgtgtgttcctggaaaggacgctctatttccttcgtgtctctacctggtaggtaaatcggccgcagaaaagaccaatgctaactccaccctgcatttgcagagatccgtcgctcacaccttttcttgtcttccgttgaaaaaagagaatcgtgggagtaggacctatttgccaatctcctggtaacactatcacaactggccacttccgcccaacgcccggtagtctgagagcctccaaggtcctcccccgcacccctgaggtcctgcagacgacggcgtcgtgggtggtcaccgttatcccttaggtctggagaggggacatccgagcgagggccacttgcggccaggcccgagctcgtccagctccgggtgaccacagagtgccgcgggcgggcagaggggccggaaacccaggccgcttcgtccctgtttccggcagcgccgcgctgctccgggagccgctgtggcagcgtatgctgccacggggactgaagatggcgccgcgaggtgagattccggaggtgtgtgagtcgctggtccctttcccttcggtcgctccctcccacctctgtcccagagcttgacctaaaccctccattctctagcgttagggacgtcgcgcctccctggtccaaagccggcttccgc

SEQ ID NO: 7283 - DNA, 2300 bp, Homo sapien
gaccagccgacacaagtattctggtctgcttggcaattacatttctcattgtaaattaataaattggtgttatggtttatgaatcagtctcttgtgagtttggttagcatgaatcagtctcctagggcctagtcaccccagttgaagcaagtttctgaacctgagaaacctgaggactagaccttggattttcctgacctcataaagtgcagccaccctgcaagaccttccctgagacagccaaccacccttattttcttttgctacagtgggaggaacagcaaagtttcatcactgatgttctgtcactgcttaggtccagctctcaaaatagtgccttgtattgattgggtgtatcctccaggtagaaataggaccactttgctcttgcataggaacagctgttcttttaactagattgacagcctagatagatttggtgtgaactcttgttgttccatgttagaaaggacacactcttcttccttgacaagttgtattttcaagtcccctctgttttggagtctttctgtaattcacccctgactttccttaggtatgtaattttacaactgtattgggggtaacgttctacttctactcagctacttttcatgttacttttttttgctgaaaagattgtgtaactgagtgctgtttttctgctctgtcatgctgatggacctgggctctgttaattcactaagtaaagctggtggacttcctctgcatagaaatgttgcgtcttttgggacttgtagccatagatacaaaacaacctttgcagatgtgacaacagtagtagctgggaaagtggttaactgtcagatgacacttgccttatacctttttgttcttcagtttgagagaactctaggaaagagccagttgccatgtgtttgagacctgaagaacaagacagcactggcactgttctgtaagagaaatctaggtggttgtcaacataattgattccaccttaggctttactcaggagctgggattaactatcatattctagtttaaggagcactctttcctccacacttgctgccagtggcatctttctatctccaagacccccccaaagccatgtgatcttgttcttctattggattccacaataaacaggcttagactgttaaactggagagaaggaacaagtttaaccaagtgacttgacaatgtcagaatccatgcttccagctgtttaaaacatgttctgagctcctgttgtgcacagcaccatactagcatgtggtgatggtgttcctgttaggctgccctgaagggtagaggattttggccattgaaatgtagcgggagttccccagattggagacatgttttgtagcaagcttttgctaagcatccttactgtcagctgtgtgctatctgcttgtgctgtgggcggatcttttattggcgtatctcccaatttttcttatctttcacttaacctccagttgtctagtcttcatgtgtgtctctttctcaccctgattactagttttagtatgtaaatagaagtgccatccagttcctgccactccctctcttcccttaaattccctagccaacaccctgtggcaaagagaacattttaagtgtgcaacaggaagaggttaactagtattagtttaaggagagaggtcctgaactcttcaggagatgtggggtttcaagtcaactgcaattcacctgaacatcagtgaacactgtcattttctcgtgggctatcaggatccttctacatttaaaaatagaagatacatataaggataaattaaatctgttctgaagcacttctggagttatggatggaaaacattctttgacaggatttaggacgatattgttttttggatttaatgtcttcactgagttgcttctgacctctgaagccaaaaaaaaggcagtagatgattttaccttctcagcctctttagtcaccttcctttgtagggtgtctgataacttctgaaggatgaactggtcctgtgggtttgtgtaaagcctgggcagtaacatcagttctgttttgcttcataggaatacctccacgggcccattcccgagattctagtgattctgctgatggacgggccacaccctctgagaaccttgtaccctcatctgctcgtgtggataagccccccagtgtgctgccctacttcaatcgtcctccttcggcccttcccctgatgggtctgcccccaccaccaattccacccccaccacctctctcctcaagctttggggtccctcctcctcctcctggtatccactaccagcatctc

SEQ ID NO: 7284 - DNA, 2300 bp, Homo sapien
aacccattcaatacatgctcttaccaggtccttatgtgtacccactggaagatgcaaatgggaagagccagcttacttacatagaatggtgctgaaaataacccaggcaagatattagtacgttttcaatagaaattttggaacattcttgagaattgacctcaagactgaaaaacttaactgcatggaagattatttctttgagagaatttttcttgtgtttttaagagtcagggtcttgttctgttgcccaggatagagtgcagcggcccaatcatggctcactgcagccttgaattcctgggctcagggagtacctcttgcctcactctccagagtagatgggactacaggcacaagccaccatatctcgttgttgtttttttttacatttttgtagactgggtcttggtatgttgccctggctggtattgaacttctggtcttaagtaatcttcccatctcaggctccagagcagctgagattacagtcaagagccaccttgcccagctctagataaatttctgtataatgttccctggtacaataaaaacaaatccaactgagggtatgtgcatgggtctattatcagttttctaactggtttgtctaacgtctttactcttttattccctctagaaagactaaaggtaaccaatacaatttattataccaaaatgcctgtggacttctcatgactggagtcaacctacttataaaaggaagtaaaacttaattggaatggagttgaaactaaatgttaaagtcatcttttctactttgcttttgcactgtcacgatggaggggactacacttctccagctgcaggttgagaatgtaaaggaaccggtatcaacactgtcctcatgaataccgtagcaaatgtacttttgatttttaagtgtggttagtctgacacccacctttggcttcctggggagtaaattccacaggttgattcaccattctattacacctgctttttatttgctcttaaatcaaagcctttaaaattaagcctggagcttcaaattaacataaagaggaatggagtgtagtctttaaagtttctgcaggagaaaaattttagaccggatagacgcgtgttcaagcctaggactggtacagcttgaaaccactgccagtttgctgaaaatgattcctcagatgatcaaggaaaatcccaaagctcctgatgacacctcacctggttgaactcctcgtcagcatatatatcaatcaagtccactccttctgacatggctccggaaggaagatcgcgagtccggaggatggacaaagtaaggaagatgccactgcgggattcggaaaaatgcaagaattagaaggcacgagggtcctgggctgggaagagggtaatgattgctaacctcccatctccagagacgcagcatcctggcggccccagctcggccccacccgctccgccccgcccccggcctcgcgccgcccaccgctctcccaggccgccgggggtcgctgcccatcaccctcgggcccgacccgggtagcgccgcgtctgcgccgcagctgcctatggcgcgacggaaaagtcccaccctcgggtcctagtggccctaggacggcgttgcgaagaatgaccgcggcgaagcccgcagcccctatccgctgcacctgcctagcccccaaggcggctccggccagagcccccaggtgtcaagcagctccagccgcctctgcccccaacccaggcctactcttcgcccccagctaggcccgccccgctccctcccgacaaacccggcccggcgcgctctgcctcctccctcaaaaggcccgcgactccctccgcccgcagactccggccgtcccatctcaaccgacccccttcccgcctcagtgccggcccggacccctcttccggcccaacctgcccccgaccgcgcgcccccgttaccgggaatatggcggcggcggcggcgagtccggactaggcccgaagcgcgcgaaccgctctccgccccaggtcccgccccccccgccgccggcgtcacacgcaccgccacttccggcatgcgcagggacgcaccttccggctcagctcctccgtggctgccgtggtcggctggccgggcggctaggagttcccggaagtgcccgcgcagccggtttccggtgcaggtggggaaaatggcggtgtctacagtgttctcgacttcgtcgctggtgaggagagagaacgttctagcgtccggggcgggcggcagcggggattaccctttgtcttcctctgtggtctctatcttggggagagtt

SEQ ID NO: 7285 - DNA, 2300 bp, Homo sapien
gagaccagcctgggcaacatagtgagaacctgtctctacgaaaaaaagaaaaaagaagggaaacaacaggccgggcgcggtggctcacgcctgtaatctcagcactttgggaggccgagaaggacggatcaccttaagtctggagttcgagacctgcctggccaacaaggtgaaaccccatctctacaaaaatacaaaaattagccaggcatgatggcgatgcctgtaatcccagctacctgggaggctgaggcggaagaatcgcttgaacccggtaggtggaggttgcagtgagccaagttcgtgccattgcactccagcctgggcgacaagagcaaaactccgtctcaaaaaaaaaaaaggaaaacaacaaaaaacaaacaaaaaggaaatatcctgagacaaactaaaacccaacatatacaaaattatgagatgcgacaaaagctgtactaagaaggaagtttatagtgtaaacgcctacatcaaaaaagaataaagatcgagtccctgggtctgcaggaaaaaaaaaaaagaataaagatagggatgggggtaggaggggaagatagaggcaaagttagttactttataacagcaggctaggaaaaaagaataataagttccagtgttctattacatattagagtgactacagctaataacactgtactgtatatgtcaagatgctagaaaaagatcttgaaaagttattaccgtaaataaatgataaagatttgaggtgatggacatgctaactacgctgatttgattattcgatgtacacatgtattaaaacattatactgtacccccataaacacgtacaattatatgtcaattataaacaaacaaaaagctgaagatactatgtgaaaccacgaaaagcattaaagactaaagaacggggagaaggggagcccagggaagttgggctaatcccgcctgggacgtaggtgagaggcgaattgggtcttggacgatgactgatcgtttaagcagatatttccagaccggcacacagtaggctcaccaaagaatggaagcgacctttatttcctgagttgcaggatcggcctctccctgggcctgcccttgccctgcgctatcgggcagacgaactctccccaagatagagaccacagaggaagacaaagggtaatccccgctgccgcccgccccggacgctagaacgttctctctcctcaccagcgacgaagtcgagaacactgtagacaccgccattttccccacctgcaccggaaaccggctgcgcgggcacttccgggaactcctagccgcccggccagccgaccacggcagccacggaggagctgagccggaaggtgcgtccctgcgcatgccggaagtggcggtgcgtgtgacgccggcggcggggggggcgggacctggggcggagagcggttcgcgcgcttcgggcctagtccggactcgccgccgccgccgccatattcccggtaacgggggcgcgcggtcgggggcaggttgggccggaagaggggtccgggccggcactgaggcgggaagggggtcggttgagatgggacggccggagtctgcgggcggagggagtcgcgggccttttgagggaggaggcagagcgcgccgggccgggtttgtcgggagggagcggggcgggcctagctgggggcgaagagtaggcctgggttgggggcagaggcggctggagctgcttgacacctgggggctctggccggagccgccttgggggctaggcaggtgcagcggataggggctgcgggcttcgccgcggtcattcttcgcaacgccgtcctagggccactaggacccgagggtgggacttttccgtcgcgccataggcagctgcggcgcagacgcggcgctacccgggtcgggcccgagggtgatgggcagcgacccccggcggcctgggagagcggtgggcggcgcgaggccgggggcggggcggagcgggtggggccgagctggggccgccaggatgctgcgtctctggagatgggaggttagcaatcattaccctcttcccagcccaggaccctcgtgccttctaattcttgcatttttccgaatcccgcagtggcatcttccttactttgtccatcctccggactcgcgatcttccttccggagccatgtcagaaggagtggacttgattgatatatatgctgacgaggagttcaaccaggtgaggtgtcatcaggagctttgggattttccttgatcatctgaggaatcattttcagcaaactggcagtggtttcaagctgtaccagtcc

SEQ ID NO: 7286 - DNA, 2300 bp, Homo sapien
tggctaacacggtgaaatctcgtctctactaaaaatacaaaaaattagccaggcgtggtggggggcgcctgtagtcccagctactcctaaaccaggagattggcgtgaacccaggaggtggagcttgcagtgagtcgagatcatgccactgcactccaacctgggcgacagagcgagactctgtctcaagaaaataacataacataacataacctccccaaccaaaagacatgaagtggctgaatataatgaattaaaaaaaagattcaactatatgccgcacaagagacattttattaaaatctggaaatcaatggcaaaagaaaaggtggaaaattcacaaatatgtggaaattaaacaacacactcttgaacaatcaatgagtcaaagaagacatcaaaaggaaaattagaaaatatcttgagacacgccgggaatggtggatcacaccagtaatcccagcactttttggaaagctgaggcaggaggatcacttgaggccaggagtttgagaccagcctgggcaacatagtgagaacctgtctctacgaaaaaaagaaaaaagaagggaaacaacaggccgggcgcggtggctcacgcctgtaatctcagcactttgggaggccgagaaggacggatcaccttaagtctggagttcgagacctgcctggccaacaaggtgaaaccccatctctacaaaaatacaaaaattagccaggcatgatggcgatgcctgtaatcccagctacctgggaggctgaggcggaagaatcgcttgaacccggtaggtggaggttgcagtgagccaagttcgtgccattgcactccagcctgggcgacaagagcaaaactccgtctcaaaaaaaaaaaaggaaaacaacaaaaaacaaacaaaaaggaaatatcctgagacaaactaaaacccaacatatacaaaattatgagatgcgacaaaagctgtactaagaaggaagtttatagtgtaaacgcctacatcaaaaaagaataaagatcgagtccctgggtctgcaggaaaaaaaaaaaagaataaagatagggatgggggtaggaggggaagatagaggcaaagttagttactttataacagcaggctaggaaaaaagaataataagttccagtgttctattacatattagagtgactacagctaataacactgtactgtatatgtcaagatgctagaaaaagatcttgaaaagttattaccgtaaataaatgataaagatttgaggtgatggacatgctaactacgctgatttgattattcgatgtacacatgtattaaaacattatactgtacccccataaacacgtacaattatatgtcaattataaacaaacaaaaagctgaagatactatgtgaaaccacgaaaagcattaaagactaaagaacggggagaaggggagcccagggaagttgggctaatcccgcctgggacgtaggtgagaggcgaattgggtcttggacgatgactgatcgtttaagcagatatttccagaccggcacacagtaggctcaccaaagaatggaagcgacctttatttcctgagttgcaggatcggcctctccctgggcctgcccttgccctgcgctatcgggcagacgaactctccccaagatagagaccacagaggaagacaaagggtaatccccgctgccgcccgccccggacgctagaacgttctctctcctcaccagcgacgaagtcgagaacactgtagacaccgccattttccccacctgcaccggaaaccggctgcgcgggcacttccgggaactcctagccgcccggccagccgaccacggcagccacggaggagctgagccggaaggtgcgtccctgcgcatgccggaagtggcggtgcgtgtgacgccggcggcggggggggcgggacctggggcggagagcggttcgcgcgcttcgggcctagtccggactcgccgccgccgccgccatattcccggtaacgggggcgcgcggtcgggggcaggttgggccggaagaggggtccgggccggcactgaggcgggaagggggtcggttgagatgggacggccggagtctgcgggcggagggagtcgcgggccttttgagggaggaggcagagcgcgccgggccgggtttgtcgggagggagcggggcgggcctagctgggggcgaagagtaggcctgggttgggggcagaggcggctggagctgcttgacacctgggggctctggccggagccgccttgggggctaggcaggtgcagcggataggggctgcgggcttcgc

SEQ ID NO: 7287 - DNA, 2300 bp, Homo sapien
catgttgcccaggctggtctcgaactccaggactcacacgatccacccacctcggccactatttactttaggtataaatggattaaactccaggcctggcgcggtggctcacgcctgtaatcccagcactttgggaggctgaggcgggcagatcacgaggtcaggagatcgagaccatcctggctaacacggtgaaatctcgtctctactaaaaatacaaaaaattagccaggcgtggtggggggcgcctgtagtcccagctactcctaaaccaggagattggcgtgaacccaggaggtggagcttgcagtgagtcgagatcatgccactgcactccaacctgggcgacagagcgagactctgtctcaagaaaataacataacataacataacctccccaaccaaaagacatgaagtggctgaatataatgaattaaaaaaaagattcaactatatgccgcacaagagacattttattaaaatctggaaatcaatggcaaaagaaaaggtggaaaattcacaaatatgtggaaattaaacaacacactcttgaacaatcaatgagtcaaagaagacatcaaaaggaaaattagaaaatatcttgagacacgccgggaatggtggatcacaccagtaatcccagcactttttggaaagctgaggcaggaggatcacttgaggccaggagtttgagaccagcctgggcaacatagtgagaacctgtctctacgaaaaaaagaaaaaagaagggaaacaacaggccgggcgcggtggctcacgcctgtaatctcagcactttgggaggccgagaaggacggatcaccttaagtctggagttcgagacctgcctggccaacaaggtgaaaccccatctctacaaaaatacaaaaattagccaggcatgatggcgatgcctgtaatcccagctacctgggaggctgaggcggaagaatcgcttgaacccggtaggtggaggttgcagtgagccaagttcgtgccattgcactccagcctgggcgacaagagcaaaactccgtctcaaaaaaaaaaaaggaaaacaacaaaaaacaaacaaaaaggaaatatcctgagacaaactaaaacccaacatatacaaaattatgagatgcgacaaaagctgtactaagaaggaagtttatagtgtaaacgcctacatcaaaaaagaataaagatcgagtccctgggtctgcaggaaaaaaaaaaaagaataaagatagggatgggggtaggaggggaagatagaggcaaagttagttactttataacagcaggctaggaaaaaagaataataagttccagtgttctattacatattagagtgactacagctaataacactgtactgtatatgtcaagatgctagaaaaagatcttgaaaagttattaccgtaaataaatgataaagatttgaggtgatggacatgctaactacgctgatttgattattcgatgtacacatgtattaaaacattatactgtacccccataaacacgtacaattatatgtcaattataaacaaacaaaaagctgaagatactatgtgaaaccacgaaaagcattaaagactaaagaacggggagaaggggagcccagggaagttgggctaatcccgcctgggacgtaggtgagaggcgaattgggtcttggacgatgactgatcgtttaagcagatatttccagaccggcacacagtaggctcaccaaagaatggaagcgacctttatttcctgagttgcaggatcggcctctccctgggcctgcccttgccctgcgctatcgggcagacgaactctccccaagatagagaccacagaggaagacaaagggtaatccccgctgccgcccgccccggacgctagaacgttctctctcctcaccagcgacgaagtcgagaacactgtagacaccgccattttccccacctgcaccggaaaccggctgcgcgggcacttccgggaactcctagccgcccggccagccgaccacggcagccacggaggagctgagccggaaggtgcgtccctgcgcatgccggaagtggcggtgcgtgtgacgccggcggcggggggggcgggacctggggcggagagcggttcgcgcgcttcgggcctagtccggactcgccgccgccgccgccatattcccggtaacgggggcgcgcggtcgggggcaggttgggccggaagaggggtccgggccggcactgaggcgggaagggggtcggttgagatgggacggccggagtctgcgggcggagggagtcgcgggccttttgagg

SEQ ID NO: 7288 - DNA, 2300 bp, Homo sapien
accctggcaggccaggtcactacaggatgaatgcggcaagggcatctcctgggtgaggaaaggagatgcctcctttccctttattcagccttcattcatacctcactctcccctgagagcaggggtgctctgaagccagctctaccggctcaggagagctgaaggcgaaacttccaggaaattggcaagctggtttttaactctgccattgttaaaaattaaattactggccgagcgcggtggctgacgcctgtaatcccagcactttgggaggctgaggcaggcagatcacttgagctcaggaggtcgagaccaacctggccaacatagtgaaaccccatctctactaaaaatacaaaaattagctgggcgtggtggcgtgcacctgtaatcccagctactcaggaggctgaggcaggagaattgcttgaaccaggagatggaggttgcagtgagctgagatcgtgccactgcactccagcctgggggacagagcaagactccatctcaaataaataaataaataaataaataaataaataaataaataaataacttaaacctgcaatttaatgaattatattaaaaacaaaaaaaaatacctaaaactcatcaccccttaattatgtgagtacatttttctattatttgtgctgtcgaggttacttacgcccattatgtctgcatgatgggactactcccgtacagtggtgagcgaccttcccatgtcccggttcaaagacactgtagtggtggtttgaaagcagccctgatgggaccactgacatcacagaaattggcaaatgctgcaaagtagggctatcccaccccacccagagatctaactgttacaacatttacaagcctgaaagccaatttgaggcaaaaaggctgtcatggaagaagattctcactgtggagtttgcgcactcagatttgagtccaggctccgtctccacccactgtggggcctgggctatttccccttgagcctcgcctttcctatctgcaaaataagactaaaagtacagcagcttttgcaaattgagcatttgccgagtgtggtggcttgcccctgcaatcccagcaactcaggaggctgaggcaggaggatcacttgaggccaggagttcaagaccagcctgagcaacatagcaagacgctgtctctacaacaaataaatacataaataagcaagtcaggcaggggggagcacacctgtagttctggctacttgagagtctgaggcaagaggattgcttgaacttaggagttggaggctggactgagctatgatggtacctctgtactccaacccaggtgagagcataagatcctgtctctcttaaaaaaaaaaaagagcatttactacctgtcaggtgctgaatccatgctcttgctaaatctgccagcagccctgtgaggtgggtgcagtcacgtcccttgcgaagatggggatttgggggcgtgaagaggataagtacctcatcaaaggtgacagatcagatttgaaccacactcttaactgctgcggtttattggccctacaataatagtgcccagttcacagggtggtttgggggattacacgacgtaatgtgtgttaaagggcttagcacagattcagctccagaggaacatagtaaatgttgatttaccgagaggcagaagagcgggatccacatccacccacgtttgaatctcaacttggctattttctgattgcgagatctctggagtcaagtcattttgcttatctaagcctcatgttcccccagtgaaaatggggataatcatagctactgaagagctgctcagaggatggagatagaggatgtaaagtatctgccgagaagtgggtactttatgggagtgagtgttcgggattatcttttattttatgtcacgcagacagcaactcttcccagccctgtggaggaggccggaggttggggccggagccctggaagcagggccttgctcgggcagcttctgaccctcccctcctggccaggtcagcccctcagtgggccctggccctagaaggtctcagaagcctggggacgctgttgctaggcaccagttgctaggctacacattgtttctcctgcttggcctcctccaggagggctggcttctctgcagagctctgcttcctgcagcctctccccgacctcagagcctctgcagaggaaaggtgagggtggggccgctgtggttgggcctcggggagagtgcagccaattcccaggggaggcaggcaaggccagaggcgggcaaggccatggagatgagggaga

SEQ ID NO: 7289 - DNA, 2300 bp, Homo sapien
gttacttacgcccattatgtctgcatgatgggactactcccgtacagtggtgagcgaccttcccatgtcccggttcaaagacactgtagtggtggtttgaaagcagccctgatgggaccactgacatcacagaaattggcaaatgctgcaaagtagggctatcccaccccacccagagatctaactgttacaacatttacaagcctgaaagccaatttgaggcaaaaaggctgtcatggaagaagattctcactgtggagtttgcgcactcagatttgagtccaggctccgtctccacccactgtggggcctgggctatttccccttgagcctcgcctttcctatctgcaaaataagactaaaagtacagcagcttttgcaaattgagcatttgccgagtgtggtggcttgcccctgcaatcccagcaactcaggaggctgaggcaggaggatcacttgaggccaggagttcaagaccagcctgagcaacatagcaagacgctgtctctacaacaaataaatacataaataagcaagtcaggcaggggggagcacacctgtagttctggctacttgagagtctgaggcaagaggattgcttgaacttaggagttggaggctggactgagctatgatggtacctctgtactccaacccaggtgagagcataagatcctgtctctcttaaaaaaaaaaaagagcatttactacctgtcaggtgctgaatccatgctcttgctaaatctgccagcagccctgtgaggtgggtgcagtcacgtcccttgcgaagatggggatttgggggcgtgaagaggataagtacctcatcaaaggtgacagatcagatttgaaccacactcttaactgctgcggtttattggccctacaataatagtgcccagttcacagggtggtttgggggattacacgacgtaatgtgtgttaaagggcttagcacagattcagctccagaggaacatagtaaatgttgatttaccgagaggcagaagagcgggatccacatccacccacgtttgaatctcaacttggctattttctgattgcgagatctctggagtcaagtcattttgcttatctaagcctcatgttcccccagtgaaaatggggataatcatagctactgaagagctgctcagaggatggagatagaggatgtaaagtatctgccgagaagtgggtactttatgggagtgagtgttcgggattatcttttattttatgtcacgcagacagcaactcttcccagccctgtggaggaggccggaggttggggccggagccctggaagcagggccttgctcgggcagcttctgaccctcccctcctggccaggtcagcccctcagtgggccctggccctagaaggtctcagaagcctggggacgctgttgctaggcaccagttgctaggctacacattgtttctcctgcttggcctcctccaggagggctggcttctctgcagagctctgcttcctgcagcctctccccgacctcagagcctctgcagaggaaaggtgagggtggggccgctgtggttgggcctcggggagagtgcagccaattcccaggggaggcaggcaaggccagaggcgggcaaggccatggagatgagggagagagaggagccgggggctgggagtgagcgcctcggcctgacttcttgggtgggggccaagaattccccaggtagtgggttgtcggctcattcattccgagaggtgggtatgtaaggttcaggtcaggggccgagtagtcaaacacctaggtctgaatcccagcactaccacctattatggagcaaatcctttatcacttggaacctcactgtcccagtggtaaatggggacaggaagagttaataagaaggtgtgggaaagtgagaggagacatgaggactcttgggataagtgtggatgatcggtttcgtccttagtttagggacttgggagctggggcagagagacagaggcctgggagaaggggccagctgcgttgtgggtggtggggggcagatcttcgcccctgtgggcttccgagccaggcttgggacccatgaggctccccgtgcttcctttctaggccccctggggccctgccccacagcatcatgatggggaaactccccctgggggtcgtctccccttatgtgaagatgagttcggggggctacacggaccccctgaaattctacgccaccagctactgcaccgcctacggtgagggtgcctttgcgcaggagcctctgctaggacatgggcaggaagggaggggctctctc

SEQ ID NO: 7290 - DNA, 2300 bp, Homo sapien
cattgggatgttgtaagaggtcagtgaggacaaggcacagggcacagggcagggtctggtgaggtgggcggccagccagtctaagatagttactgctgtgagtgtgaggccgggtgtgtggctcatgcctgtaatctccgcactttgggaagctgaggcgggcatatcacttgtggccaggaattagagactcgcctgaccaacgtggcaaaaccctgcctctactaaaagtacaaaaatcagccaggcgtagtggcacgcccctgtggtcccagctactcaggaggctgaggcatgaaaatcgcttgaccttgggaggtggaggtggcagtgagccaggattgcaccactgcactccagccttggcaacagagcgagaccctggctcaaaaaaacaaaaaactatcatgagggtgattccgacgcttttcacctggcacggtgtctgtgggtctttgccggcttgaggggaaacctcagtgttgccctggggtgtgggcctgctttagtggaaagagcaggattttgagtcagagagggttcctactgccgtcagccttggccatgtgacttcacctctctgaaccagtctcttcagctagagggtggtgacacctgcctcgcctggctattgtcaggattcagtaaggagacggcgatgcgagagtcgctggtcatggtaagagcccacttgatgcattattattatctgtattatttagtctttcagagcctagggctgcctctccaggatgaaggaaagggcacaaagcaggtttctacaggggaagttggggagagaagagatgcctgcagtttttcttaactgtggtacccagggtcctacttctgtccctcatccagtcatcacgggagattttcgagccagggtacctgagccatacagccccctaactgggtctgttgtggtcagtggtctggggctcaggcggctggggggtgggtagggttctaaaacctcctaggtactactggtgtgctcacaggttcagacacgtggctgggagaccctcctcccagctgcttcctgtggttcaatgtcagaacgggatgagatgctcaccctgcctctgtgtgactgtctgttgctgggtcaggccatgcgccctccctcccagcagtcctcagcccccatggacggtacagtcatctgaggcgccttttacacagcactgatgcccaggcccacaccagccccatcgtcaaactgcttggggacggggcctggggagtctgcaattttcttgtccctagtgattctgccttacacaaacagacgttgctcctgaaaacttgcctctctcattttgtaaatcacaccattctccgcaccctagagagtcactttccaaagaattgttgcggtaaactcttttgtgatgtgaacagcctccctcatctgctgtgtagcccaggtttgtgtcggtgcctcccacagttggccctaccgtgtcacaagaaggcagggaggtctggggggctcaggaaccccagcacgcgccagggaagctgcagccaggaaggcgaggcagctgagctggagcttggggcaggcagcagacccagggctgcgaggagagcctgggaagtgagtgtcgtgcataccactctgaggttcaggagacagggctgtctcggctctgccctcccccttcccctcccctcctgggagaccctggtcaaggcacctgccctctgagcctgagcagcgtccgtgggatgtgagtgtgggctgggccaccgcctctggcctctcacccgtgctagccagcggtggggacatgggggaagcagaatcctccccaaaccctgccggcctctcccccacccccagctctccccaggctccgaggaggatgaggcccacgagggttgcagccgagagaacctgggccggatccagttcagtgtcggctacaacttccaggagtccacgctcaccgtgaagatcatgaaggcccaggagctgccggccaaggacttcagcggcaccagcgaccccttcgtcaagatctacctgctgcccgacaagaagcacaagctggagaccaaggtgaagcggaagaacctgaacccccactggaacgagaccttcctctttgaaggtgagtctagtgccaccttcccccgccatggtcacctcttgctgtctaccatccccctacccaaccacacttgtggccacatgcacagacacatatgtgtacacacacctgcaggcccacaaatgcacaaacacacatgcaagcagatacacttatgtgcacacctgcatgtgt

SEQ ID NO: 7291 - DNA, 2300 bp, Homo sapien
gtagcctggatttcaggcctgagttaggcaaggctgccacccctccaagaccccagctaaagctacgttttgctttcttctctttctttccctctctctttactatactctttctctccctctttcactctctctttttctttctctctctcagcccacaggggtagcctaactgttgtcttttggttcccagggtaggctcagagggtgagcaaagctgaggtctggttgcggtggtgaaggtggctcccaagggctctggggcctcctcccttgggcagcccaggggatacttggctgccccatggccctagaccagaggtcagcaaagttactcagtaaaaggccacttgggaaatatttaggctttataagccatatactctcttgcacaatgactcaaccctgccattgtggaatgaaagcagccagagtcactatgtaaactaatgccaatggcttggttccaataaaactttatttacagagacaagcagcaggctagatgtggcccacaggcaatggcttcccaacccctccccaagaccactggattgagaggtggagggaagggacagaggaggagaagattggaacccctgaagttccaagatgagaaatgattcacccaaagctgctcattcagcccagtctctggctccgctctggtgcctgggggcagcctggctctggccctgcctgtgggatatggtgaaatctccagccagcgcatgaagcagacaggttctccaggggaggccagggacttctgactccaaccactggcatggggagcttttaccaatacagcattttcaacacagcccaacctcattagatcctcatggcaattctgtgacagaggaagctcggggattattttattactcccatttcatagatgaagaaactgaggcccagagaggtggagtcacttttccagagtcccatatttagtaagtggcagaggtggggtttgaacccaggtctctctgaggctatactgcatctgaccagccatgtcctagttcctctctgtccttgccccacttcccagtgcatttcagagattactgatgggcctttgggagagcatccccttgcagatgcatcaaagacagtcaccctgttctctgttagaactgcggtgaagtgtcggatgaggggatactgggttccaccctgtgtgcactctttcttggtccagtcctctgactgggagatatttccaaggtcccaggagaggatgctggaccttggaaacaaagaaccctgaaaagagggcaaagatccacgccagaccctgaattctaaggctgtgctggccacagggtggaggtctgccgcttccttgcctctgtggacaaagtataagaactgatggcttccccggcctccccaggattactaggccagctctgcactggcctggatttcttcctgtctccaaaggatgccagtacttagaacacagaggcagactttcctggtgtcccccagcgaaatagcgggaggggccacagcagctccctctacccctcccactccaacatgacaggcagctgcagggcccaggggacctgccttcaccacgcagcctcagcagcactcgcagcccactcagaccggcagggaggtcggcctagccaggaggtattctggcactagctgagccagggccagaaggtgggtgggcagagccggcctggggcctcagggtgggcgcgagggctttgcagcctcctgggcgaggcagtggcggcgacggcggtggcgacagctccgatggaggcctggcgaggtccggcagcgcgcaccctgcactggggcctcctagtcctggccctcggcttctttctcttccactgtgatcccttcatctgcttctcctttctctcctctcctccacctgccccaagtttcgaggactccaccctgtccacggccactacccttgagtctatccccagctccacgggagagccgaaatgccagcgaccccgcaccctgatgcggcagcagagcctgcaacagccgctgagccagcaccagcggggccggcagcccagccagcccaccaccagccagagcctgggccagctgcaggcccacatggcctcggcaccaggccccaacccccgggcctatggccggggccaggctcggcagggcacctcggccggctccaagtaccgggcggcagggggccgcagccgctccaacccaggcagctgggaccacgtggtggggcagattcgaaaccgaggcttggacatgaaatccttcctgtaagtcctccc

SEQ ID NO: 7292 - DNA, 2300 bp, Homo sapien
ggtaatgagagaggcagctggggtgggtgggggaatgagccaaggttgcagaccttgcagtcccagcctgttggcttagctttctggggtttgccaggtcccaaagcagagtgtagataactcctgggttcttggctgtacttgggtgagtggggggaagacagctgtgaggtgtatggaataggatggcccttccccagagggtgagggctgagatttctggccactgaggaattgtggccttaacctacgatgccttttttccttccatttttatgtagaacattcattcccaggaaatctgctctccactggaacagtcttcatggaggtttgctgggggaacttccttatctttttctcaaccggaaaagctgtaggtggaggtgaatgtgtatgtgtgtatgtgtgtgtgtggtggttgttggggatagcctccatgtgatttcaaggggatggggtctgtttgtgtgtgtgtcggggagacttgagatagagggttgttcctggctgccttccacactgtgggcaggtggaggtgtggctgggcatgagtagtgcagtataaagccagcaaaagtggatttctcagggtggaaataataatccttgactctaggaagcctggctcacctgcaaactgcattctcagcacaggggagggcaggatgctgccacagacccagggattttgccctcttacctgacccatcagtgaagggtaggggcagcacctgtattgtggggagcgtcagtgtatgtgtctctttgtgtgggcagcatgtctgtgtgggtgtgtgtgtggggggcatcatgtctgtgtgtgtgtgtgtgtgtgtgtatgtaggtgattacgtgtgtaggtgtgtgcagggaggtctctgtgcctaccataccactaatggttcatttctgggtttttcttatccttaggagacaggtctcttctcctccctgccccagaatcaaatcatccaaattctgtagagaaatgagtgttcacctgatttagactgtgctgagccggcagagaggcagaggggaccaagagaggtccagggttggaaggagaaggagggatttccttcctaccctccgaagtgctagggtcaaggaatagaggggaggatcagaggaggagctgctgctatagagggatagccagaggctgaaaagtctattttcttctttcgtggggctgggttaggtgaggagggtcactaggccaaacctcctaccgagggcagggatcttagccctttcggctccacctgtgtgcgagcttgcagaaagaccggactggcggacccaggctcagcgctgccaaaaattccactcctggtttttgcacacaccagtccgtctgccccggaccgccgcggtgttgagtccggagctgacgccctcgagccgccagcaagcggaaaacccggagtggatctccacgccttttggatcggagccaaagggcacctcggaggaggtggccggctctgcggccctgcccggtgccaggccgcggccatcgggggagcacgggctgggggtgggtcgcgcagcggagccggatcccctggccggacgagcccggccgtggggctcggcggccctccccgcggggactgcgaggcgggcggggcgcggggcggcggccgtgccctcggggcggcttcgggcggcggcgggcgcgggtgcagtgcggcgcgcggccggcagcgggcgcaggcggtggctgtggccgcggcgttcggcggctggcgggcggcgccggcggtgccccgggcgcgctcacacacgcgctcacacacacacatacacacggcctcgtacacacacacacgctccggcgcgcacacgcggcgcgcaggccggagggaggcggctcggcgctgttcggcggcggcggcagcgtgctccgcgggcgggcgggagggctggcgggcggcccccgctccccggctccgcggctaggtgcagcccgctcggcccccgccctcggacccgcccccgggggtcgcccggccccatgcccagcggcggcggcggagcagcgcgcggccgcgggcggctctgaggagcccggagggaaccggcgacgaggggaccatgtaccgggacccggaggcggccagcccaggtaagcgcggccccggcgggctggggcgccccgcaccggcgggcaggacagcggcagcgccggacgccgtctcggagccccagcctggggctgttgtccgcccggagccgcacgggctcccccaggggtcatcccagccccgggggcgcgggatcgagcggca

SEQ ID NO: 7293 - DNA, 2300 bp, Homo sapien
ggggctactgagatccccttcctgggatgcactgtggaagcacctcagtttgctgattactaggtgagtgacccggggtcagcccctcagtccttctgagcctcattttaccagtctgtaccataggatgttgttttttaatcttgactgggtcttggacccctgtgaaaatctaatgaagtcagtggacctctcctccctagaaaagtgcatatacaaacacagacacaacattttgcccataattgggtgtgtgtttggggtgggggtccttcgggttccagatgaaaagcccctggcccagaagcctgcaagactgcttccagctgtcagtctgaacccagttctctgccctccccatcctctccgcagtgacttttgggtgtgggggaagaggggacagttagggaggtgggttgctggtctatccacaccttttctccctcctgcctcagtgggcccctcccccagcatttcctgtggctggtgccagcttgtctgcagctcagaccagcatttcaatccctcttggaacccactgaactggcttcacctgcctttcaaggtatttaaaggttctttgaccaaatgctttttgatcctccgctgatgggaaccaagcagaagctctttcgccaactgtcccccctccccccacatgattagtctctaagagctcttttgatattgcagaaaccttctgtggtttgttcaaagccctgggcctttcagccacctcccccggggactcaggccagtcagctccagcctccaccacccatacccaggggtggcctagttaatgggggcctcccagcgctgaacgactctggcctgagttggaaccccagacccgagcccagctggtagagcggtcaagccccgctcctctcagggagcccaggccgagtctggtagtgtggggtgggggacctgttccccagccttcagcgggccgttactcttcttcccgcccagctgaggctgcacagacaggcatgcaggcccacgatgatagcaattgacctgtttccaggtctgaggctgaggctgagaaggggaaactgaggctctgagaagtccagggttcaggccttggtgtgtgagagggcaggagccagaatccaccaacccaagacctgctccagcagccccaccccagccagcaccactcgccgcccgcgctcctggtcctccagggccgcgcagaaggcgcgcctgggctgagtcccagctgcagaattcctggggggcgggggacgaggcgtctccgctcttaatagctgagcgcccgcaaacgcccggcctgggctcgaggcctgcccctccagcgacgggcgcccccaacattgaagtctttctctgcaacttggacggacccaccccgagcgccccgagtatccggcccggggcagagatgcgcgtgcgcggagggggtgccgcggagcccgcgtgagcagacaaattaccgcggacctgagaggacccgtccacgccggcccagagggaggagggggacggtacacagatgggggggcgggggacatgactctctgagggatccccaaccccaggattgaggccccaccctctgccctaactggagttgaagaccttagtgggggtggggcctatccctcgcaggtggaagggtgatctgcaccgggagagctgtgactgtcccggttccgcgatccctggctctgggctcaggaggatgacgggaggggccccagcactccgagagctgggcgagttcaggtggccaggccctctccctcaccaaggcctctgggggagctgctgggctccttggttctgccagcctgagcgccagaatccaatcctgctctataataatcatcagagcagccggcagcacttactgagctccgagggactgccaggcccgggtgccaagtgcataacacgcattatcccgcttaatagtcacagaagtcccgttgtgatccccttaggaaggtgagagggttgaggcgaggggcgtggcttgtcaggggcgtggcttgcctggggcgtggcctgccagaggacgggcagccggcagggtggagggacaggtgggagtcacgccagctccaaccaggtctagaacccaaaccttcaacccctgagctttcctgccttcgagtcctcggagctctcctggaggctgagcaggcaacagagcctgctcctcagctggatgtggcccgtgggaggtgagggggcgcagaggccgggcgccctggaaaggaggaagaatgagggacccccagctccgtggctgcttcatttcc

SEQ ID NO: 7294 - DNA, 2300 bp, Homo sapien
ttcaagcgattctcctccctcagccttcagagtagctgggattacaggcgtgcatcaccacacctggctaatttttgtactttagtagagaccaggtttccccatgttggccaggctggtggtcttgaactcctgacctcaagtgatccaccttcctcggcctcccaaagtgctcggattacaggcgtgagccaccgcacccagcacaccccacagacagattctaatctgtgtctatgaggaagacatttggtcccaagacaaaggaaacccaaaaactgtggcttaaacacttcagggctttctcttctcacattacaaggactctggaggtgagctgcccagaaccagtgtgctgacttcaggatgccagcttcctgctcccacagctttagatgttgactttcaaccgtatggtgccacaatggctaccgtacctccagatttcacgttcagattcctggcaagaaaaatggaagttaggaccaaaagaaacgctacgagcccagtctgccccttatttttaaaagtgaaaactctcctgaaaccccacacagtcaacttctgtttatacagatgtgaggtgggggaatgtggcaaccctgtacaaaattggaatctggtcagcaagcagggagggagggaaaaggaattcggtgggcagccaacagggtctgcactgttacacaatggagggggcttggagctggtcatcccctagccaggcccatttatatatcagggcaccagagtatagagaggggaaatgacttgcccagggtcacacagcaacacaggggcaggactttaacccaggcctcctaaggctgtagccagagctctttctacagccctgcaacgtgatatggctgcttggttgacaagccccctttagaggactagggggctgggcatcttcaaagctccagcacccagaagccttcaggaggcggggaggcattggccataacgggaggtgaaggaagccttcccctgttgttttaacctctcggggcagagcccgctcctctgggtggctagctggtgggtgggtaattagccttgtcaccccctcttccgggagagtcagctatataatctgcccgtcagctggggagagggggcggcccctctctacccactgctgaggctgacgcttggcagatgggggtggcaggacagccagtgaggaaggggttgttggggccagctggtaggcaggtggataagcgagagaagacagtagggtcaggggcccaaagaggcaattctcatgagcattcatccattgggatgtgtgacgcatggaagggctgtactttccttcagtcccactggcagaccaggggaagaggcacccttgccctcagctcagcactggcccccctgcaaggacagccctgaacacccactcctgtgcctggcaccatccaggtcccgggggactgcttctcctcttctcttgctctaggtcctggatacgaaaggtgatctaagtctggaatgtatgaaggtttaggggttgtgcagctgctgacctgagagacagattctgcttctgaggacagggcagacttgagaggcagcagtgcttatgtgtgagaaaagcctaagatgaacttgttaaattttcactctcagagagcacgaatgcagtagattattgcaaaccgaagccttttctcggcagggtcaactgtccattttcttgcttttcttcatgtaccaattcttggttccagaggttcttgtggattaatgcaatatccacaatgacgcctatagcagctgaggaacttttgcaatgtttaaactgttcatttcctctgatatttatatatataaatttagatataacatgcatgaagtgtgatactgattatttacagtaggaactagatgggtgtttgatgtggtttggctgtgttcctacccaaatctcatcttgaattgtattcccataattcccacgtgttgtgggaagaacccggtgggagagaattgaatcatgtggatggtttctcccatactgctctcgtggtaatgagtaagtctcacgagatctgatggtttcataaggggaaacccatttcacttgctctcattctctctctcttgtcttgtctaccgccatgtaagacgtgtctttcaccttctgccatgattgtgaggcctccccagccacatggaactgtaagtccaataaacctctttgttttgtaaattgcccaatcttgggtatgtctttattagcagtgtgaaaacaaatcagtatagtgttaaacactggaattgctaat

SEQ ID NO: 7295 - DNA, 2300 bp, Homo sapien
gtttgtgtacatgggacagctaagggatggatccgtagtagacagcctttttttttttttttttttgagatggagtctggctctcttgcccaggctagagtgcaatggcacgatctcggctcactgcaacctctgcctcccacgttcaagtgattcttccgcctcagcctcccgagtagctgggattacaggcacctgccatcatgccaggctaatttttgtactttggtagagatagggtttcaccatgttggccagactggtctcgaactcctgacctcaggtgatccacctgcctctgcctcccaaagtgctgggattacaggcatgagccaccgcccctggccgacagtctttggactggctgttcaggtcatgattctcctcctctgggagtgtctctcaacggggaaaagtggactgacatgtttgtatcacaaagcactttctgccctggccatagctgattgaccgtggcctgatctggactaataagattctttttttctgggaatcgggaactttgaaccaagagacatccaatctggcagttttgattctgattaatggcaatgatctagaaagaagatccctaaactgatactgctacagttgtcccttaaagcctcccctgatctctgcccttcctgagccttgaggaattcaactcctccttgaatcccctgaggtgccccactgggtatatgcgcccactcctcattttccttgttacctacgtgagtttgctttctaaataatcacaggtaacacagaactccttccagaagtggctccatctgcttcaataaaaggcagtcctggcctcacagtctcatttccaacccaaatgtccacgtaattttcagaccgaggcttctgctcaagccgggcaccccactacccacacctccttgttcacctatggctcccacttctactgaactgcgcgatcactgtgattttgggggtggcaacagggcctaggaaacattttagaggcacttctcttgcctgaaagaaaacgttcttcccctttttgtctctgatgaatctttactggatctttgggacccagctgagtcatcccgacctgcagactggactcccatccccaggcttaaattcctttccaagggctctgtctgtcctctcggcttagcttctgtgttaaaaccccctccatctgcgtctcctccccagcagaatgagctccttgaagtcagggcccgccttctgctcctctctgtgctccactcccccagttcagcacagtgctcccagggaggtgtaagcgacttacggtgaatgaaagggcgtgaaggggaacaggaggggcggttttcttcatttaccagaaattcaaaattgaccaagtaaacccctttggagaccaggcacgatgctgggcactgggaacgggggtaggggtggggggtgggggggtggtagggaggagggggtacccagggtacccacgggctctgtcgcccgtggggaaggatgggcatttacccttcccattcatcaggatgggagggccacggactccccccacggcagtgccgggtagacccctgcaccacaccgtgccaaggccctttctcacagtcacgccaggaactctagccatgctctgacttctcaagcagagttcagtcaccccgaggaggtgggacccgtctctctcctccccacaaatgaaccagttctccagtgatcctacttccttttttccctctcccacgctaaaactggtcacgagggacctaaaggaggggcaggcacccaggcggctcccttccccgcacgcatcgcggccagtccagcccctcccggccgcccacgggaccccagccgagcctgagccaggcgcccaccgcccccacgcgcagggccggcgcccgcggaagactcggctctccctggcctcgacgccgctcccctccctggcgccagggggcgctgcctccccacgaccgtcgccatggtcaccgctggcggcggagaggggtttacgtaaaggacgcagcgtcccccggggggcggaggcggccttcgcgccggcgccggcgccctgcggaagcggcgttagtgaatcggggccttggggagcccaggatggaggtggcggtcgcggcggcgggccgagccctgcggcgggcgggaggtaaggggggcctccggcgcggcgggccggtcctgggcgcgggcgcggtgcgagcggcgcggcgggctgggcagtgtccagggcgcgcggtggccggcccgacgggtcggcgggcggagttgcagctgccacg

SEQ ID NO: 7296 - DNA, 2300 bp, Homo sapien
ctgcagcctcaacctcctgggctcaagcgattctccttcctcagcctccccagtagctgggatcacaggcatgtgccaccgtgcctagttaattttttaattttttgtagagacagggtcttgccatgttgcccaggctggtctcgaactcctggcctcaagcaatcctcctgcctcaacctcccaaagtgctgggattacaggtgtgagccactggagcctgactggattcggtagtttgaagatgccaccatacattcattcaacacatttattgagcacctactgtgtgccaggtcatgttcttggtgttgaagctatagcagtgaccgatacagaaaaatatcttgccctcgtagggcttccattctagagcaagaaggataataacagaaactaaataggaatcttttacatggtgagcaagaaaggcctaggtagggagaactgctttaggtaggctggttggggacatgacatttgagctgagaccaactgctacaaagaagtagccatgtggagacaagcattgtaaacagatggaatagcatgtgccaaggccctgtggcaggtgtaggccttgcatgtttgagcaatggcaaggaggtcttggtggctgttattcagtgagcaatggagagaggggaagagctgaggccagtggtagaggcggggcctgagaaaccagagcaagacattcagatattgttttgagtgcaaagggaaacttagttttgcaaaggaatgacatgatcggatgtatgtttcagaaagggtgatttgggagaactgaaggggatatcagtgagacgagaggctgtgcaagttgggcaggacagagatgtggaggcagtcagtcataagggtgaaggcaggggcacaaggacaaccgctttatcctggacttatatcgagttagaacctccaggtttcattataccagacagggccacggcaaaggagagttcggattcccggggcagccaggatttggctctgaactttaatgaccttgaaactcttaggcagggcggggagcggtggctcatgcctgtaatcccagcagtttgggaggccaacgtgggctgatcacctaaggtcaggagttcgagaccagcctggccaacatgaggaaaccccgtctctactaaaaatacaagttagcccagcgtggtggcgcctgtaatcccagttactggggaggctgaggcaggagaatcgcttgaaccgaggaggcagatgttgcagtgagctgagatcgcgccattgcactccagcctgggcgacagagccgaactccatctcaaaaaaaaaaggagcttttagacctgcattgtccaataccacagccacacgtaactgtttaattacaattaaacaaaatgaaaaaatcagttcctcagtctcaataggcacatttccagtgctcacttgtggccagtgactaccatactgaacaacacagggaacatttccatcatcacagccacaggacagggcttcctggcagtccttaatgcattgagcctcagtttccccatctgtaaaatgcaggtaacaacagcatctccttgataaggtgcctgtgaggagtacatgagataatgcctgtgtggcctggcacataacacacgttccctaaatgcaggttgttattgttgctgagcggggtgtgtgggtggctaacgagagggatgggggctgtctctgaggtttggattcggaatcgtgacatcttgtcccgtgcaagacgaaggcgaggacggcgagggcacacccttccagtcccgaccccacagaggccaagcggcccttcgcccccaccccgacccgggaaggccccgcgcccctcaagcctgggacggtctcgcgtcccccgacccgggacggccccgcgccccgcaagcctaggactgcccagcgctgagcgccgcctgcaggagtcgggagcgtggtgcccgcggccgggctgggcgcggcgcgggccggcagggggcgctgggcgcggcgggcggggcgcgtggggcgggcaggggccgggccagggacgcgcggggggcaagcgcggcggcggaccgggcgggaccgtagccggagcccagccgggactgtcgcgcgggccgcgccggcgatgccgcgcccccgggccgggctgtagcggggccgcggctggagtgtgcgccgggcaggcgggacatggaggtggtggacgagacggaggcgctgcagcgcttcttcgaaggtgagagaccgcgggctggcggcggcgaccctctggcgctgggaacccccggctgatc

SEQ ID NO: 7297 - DNA, 2300 bp, Homo sapien
gtgcccttctggttggcgccatcccccatgacttctaggagctgggacctccccactgtgcttccatgagggtaggaccactttcgagcctggatccccttggagactgccacctgctttccacaatgctgcctagtgactgctctcctgtttggggctgggacccccctccctagcatgctctcctggggctggaaccttcttgaagctgacatccctgccaccggtcacctctgctctctgagacccttctagtgctgtgaactgcatcccaccagccctctgaggctcctcagcactatgtccccccaaccctggagctgtgcctctctgacctcgccccctcaaagagtgacctcacccccacttgaccgaaaggagccctctggggtggaattgacatacaccccataatatcttcttctgcccccacccctacattggttttggaggtctgctcctccatctaaccaactccctgtcttttcctggacgacccctgcccctcctgcagggccaccactcctcctggtgctgggttctggagggatgggaccgcagtgggagggggaggggaagttctggctgactgcctcccagcccactccgcttctcagaacctccctggaacatctagccagaccctctggcccccttttgtgcccctgtctaccaatgcagcgagcccagcccctgccccgagctccctctagtccctaaggccacatcctgctccttggtgcattgagaaccttcccttcatgtgtgaacctatcagggctacagggcagggaaccaaggcccaagtttcaagccccagattcctgtggagtcctgtggaggagagaagcaggtcttccggtgcctcagtttctctccctctgtgacttgggaggcaggaacccttgttcacacctgctggctgagcagcccaggcaggggcacccctaagcctcagtcatcccactccaggattctggacaccccacagacccagaacccaagagttcaggcttggactagattgaatggttgactctgcatcaggtgggccatctgagggtcttaggcagccctgcatctgtcccggggctctggctctccccagacactgttgatccataggagctctcgaggggcctgacgcggtttgagaccttcagggaagaggggaccagacattcgtgcttgcttgggttactgtctggagtgccttgagcctgctaggtacccagaggacccgcaggccaggctcccttgacctccacactgcctgccccaggacgctgggccctgacagagagcagaggggtgggcctggctggcctggactccctggctccctcctgaccatgggttggggggtgggggctgacgccacggcttagccatgcagcggcctggcggggggaggctgcgctactccctccagagagataagaggagactcaagaatgtctgtggggagcaggggaggggtgtgaggctgcccgtctaggagggctgggctggaaacagctcccagcccctgcgatgggggaaggtgtgggtggcccctgaggcctagggtctccaggccacttgggaggggaaggcccatgtgggggacccactgtaggtgtgagagaaggcctgggagtggcagggcctggtgtgcttgtgagtgtgtgaagtgcgagggagcgggaagttgtgcttttgagccgtggctgcgtcactcttgagtgctgtcacactcggggctggggctggggacacctgagctctcatcctggtccccacttggccttggtcatccctctggacagtgggtagcagtccctgtgctctcggctctgggctgggagactgggaaagggttttaccgaaggggctgcagcacagcgcgccccctcacctgacgtggtccccctccctgggcacacaccaagcataggtgctgggtcctgccctgtgccggtggtgggctgggggctaaggcgctttggacctcaggtgggaggccgggacagagcggccccctcgaggctggtacagccgggcccccgtgaccgcccggctaatcccctagagagaggcaaggcagcccagatcggcgggcacagggcctgcagagaggggacccaccgggcaggatgcactggcttccagcaggtaaccgggccatggtataagggggctttggactccagagccagggcaggcacgggacagggcagtgtctgagaatcctgccaggacctcagagttctggtgcaggctggaccactgagagtggggtgaccgtctgtgcctggcag

SEQ ID NO: 7298 - DNA, 2300 bp, Homo sapien
tcccagcttcttaccaaaaatgcagaagagcccccacaggctgcctacagagacccctctcttttttttttacctttctttttgagacaaagtttcactctgttgcccaggctggagtgcagtggcacaatcttggctcactgcaacttccgcctcctgagttcaagtgattctcccacctcagcctcccaaggagctgggactacaggcgcctgccaccacgcctggctaattgttgtattttttgtagagacgggatttcactatgttggccaggctggtctcgaactcctgacctcaggtgatccacctgcctcggcctcccaaagtgctgggattacaggcatgagccactggcccagccggagaaccctctcttctaggagacccagaatctttagccacccttgggctatggctacatccactccaagtccccatgaagctgccgccctgtcctcaggtcaacataaggctgaactcacagccccaagatgctccaaagccaggtccaacagcaccgaggccagcagctgcgacctgttcctactctctcccacagggaccagggcaggcaggccaccaggtgccaggtagagaccctgcagcttggggtggacacaggtctccaccagggtcacctgtgcccatctgtgcctacacaccggcgtggccccacgcaggcacactgccaacacacacacatatatgtaagggcacaccctgcagtcaggtatccactgacatgcgcatgatcacgtaccacctgccccctactcacacatacacagtactgacacacagtggcatgccccacacatatacccacacacatgcgcacaccagcgttcatccgtgtgccttcattcattcagcagttatttactgagcacctgttatgtgccaggcaagcatagtgcccagctttggggctacagcagtgagcaaaagggacaaaagccttgcccacatggagctgacattctagggagcagagtcagatgacgagagcagcaaaatgcctagcattctagaaggttccagatggcggggacagccggtgcaaaagccctgaggtacgagcatgcctgtgcatgttcacacctcagcacacttcacaggtgtatatgccaggacacgcatgtacacaaacactcactgacccgacgacaggcccaggcccacaggcacagcgtcacatgcatgggttaggttagtggccacccaggaagagctcccacctcctcttcttccctccaagccccctccccgcctgctgtcagaccctccctaagcagctccggctggagccaggccccactgagtgaactcagtgtcacaggcacaacttccctcctccaagctagcagggcaggggatggggatccccttgccccagccatagagggagaagagaggggagtgagggaggccggagggagataggatcctcaaactccacaaaggagagacagaggctgtggttgtgcactccggtggctgcacggaccccggtcagctggagggagaacttccctcactgatgcgacctggggcacagggaggacagaatgtccgggagccccctccatactctaggccggcagggggctccggacccaactgtactccccacccaggggctttgcccctccccccctcactccaggccttggcactcgtgggatctaactgctaacatcacccaaccttgaccatgtgagtgagggctctgaggtctagagaggtcaaggaggctgcacggacatcacctggcgtggccacccgtgctggagccacccctcagcatgtcaggaggagaggccccttccctgcccatcccaggctggcacagagctgggacccaggctccagtcccagctctgttgtggccaccttgagggagcctgacacatcatcgccttcctgtcctgcctcacagtccccctcagaaatgggaggccgtcacccacgcttccactgcaccccaggactccaggaagacaacgtgcaaagagcctgggtgcagcagatgaagtcacaatacagccaagcccctcctccttgctggcagcaagaacagaacccaaatctcagagggggaggtggggcgggccccactggatgtgccagggaccaggaccaggccacgctgggccagagctgtcatggttcaggccttgcacacagaaccacagaacatgctcaacaagccccctaagcttaggggcactgacctaccctggggaccagtaatcttcaaggtagggcgcagaacacctgccatggaccaatggagt

SEQ ID NO: 7299 - DNA, 2300 bp, Homo sapien
tggggtcagcgttcctcaggaggccctccgagcccccaaccctcaaacttcttccccacccactggcctccccgcaacgctgccccatcagttccctcctcccgcctccttcctccatcctccgtccgcccggaccctggcacgggagggtccctcctcccccaaagcacatctggttctcgttagggtctcccaggatgcctctgcctgaggccccctatcccgagggaggtgggcaggaggattaggggcgattaggagtgctcctggccaggagaggagggggctgggtctgttataaatagcaacaccatgactgcatcagcccatcattcaccgtagattccaagttcaggctcaaaaacttgcagcttcagcggccagggtgggggcgacgctccaggtggggtggggaaggcacagcaaccgccagtcacactctccctcgtggagtcagacccctgcacctggttggaatcctccttgccatgttgccttgggtaagagacttgacctctctgaacaggggatggtgattatgttacctatctgaacatccccactgtttagagagggaaaatgcataaagcacttagaatcgtccctggcctggtaggcagtcagtgtgagctgcagtcactgtcaccaccactgtctttgtcatcatcgccatgatgagttgagaagcactgggagatactcactatgagccactgtcaagtcactgtctctgtcatggtcagcattctgggctgggaggattgagtaacacaccgcaggtgaagagcctgcaggatgccttgcgcataagaaacttctgtgattaggctgggcgtggtggctcacgcctgtaatcccagcactttgggaggctgaggcgggcagatcacctgaggtcaggagttcaagaccagcctggccaacatggtgaaactctgtctctactaaaaatacaaaaaattagccgtgtgtggtggcgggcgcctgtaatctcagctactcgggaggctgaggtgggagaatcgctggaacctgggaggtggaggttgcagtgaaccaagattgcaccactgcactccagcctgggagaccgagcaagactcagtctcaaaaaaaaaagaaataaagtaaagaaactcctgtgattattaatgtatttgattcacaaaatgcctggcacacagtaggcactcagtaaatgggacccgtggttacagcagggtggggcttgagcagaggcagggtcctggaacccaggcacacagactggccacgcccagctcgagaagctgctcttgccccggccacaccgccctggacggccattggtggtgcgtggtgggtgtcccttgttcctagctgggcgagctgggggtgggggtcagcaggagggccctggcctgtcgcaggcagcgcgtgactcctaggagggcttagccgctcattaatcacctaagcggggctcagcattcttgaaatgccggctgaggccagggaggggcctgggcggggggctcccggggaccccagggctctggggctgggaagtgaggacggctgttccgaccgatgagcacccactaaagtggctggcacttcacacacctcatctcgtttcatactcaaaacagccccttgaagccatagctgtacatgtccccattgcacgaatgaggagactgaggcgcagagagtgcatgtgacctgcccaaggtcactcagcagggagtggctgagccaggatttgttcctggacctgtctgagctcaacaggagagggcagaccccagactcaggctccagaggcctgtgggaggggccctcctgcctcagtggggctggccagcccgggtcagccgtgtgggtggggctgtcctccattatcggggttgacgcatctcccacgtcagcccccttatcaccccgccctctggctccccctgcaaggtgaccctgggaggggaaaggccggcacctcccccgtcctccctcatgatgcccaagagccctggctgcctttcctctaggggcccctccccttggtggggccggggccagcgcagagggcccaggagagggcggcaggcagaggagtggagctctggcggccatcattccctgctgggaggccggggcaagcccttccttctctaggcttctgcctcctctggaaaaagggggctaagttcccccgcctgtgcccaacagggtgatgggcatatccaatgagggtgcagggagctctcctgattctgatccccactcccgcctgcggccagggcctgggtgcaggagactcc

SEQ ID NO: 7300 - DNA, 2300 bp, Homo sapien
tatatctgctcatggcctcgagctcctagaggagggaaagagatcagagctatcaaagaatcccacgatttcagcctggagagaacatgcggttatcaaggagcctggtgctgccgtgaaacagaggctgattttagcccggaaatgtagctgcagatcaatggcccttattagcattttctgaggccaataatctgaccactatgaaaacgtgactaaaggtacgaactctctgcctgagaaaaaccacatacaagaaaaagtttgcctacaatttccggagctttgtggaccagtgtctatagacaccaagctgagaacccccgctataagtcactgactggtggtacccagatctcaatatcttttttttttgacggagtctcattttttggacggcgtctcactctgtcgcccgggctggagggcagtggcacgatctcggctcactgcaacctctgcctcccgggttctagagattctcatacctcagcctctcgagtagctgggactataggattacaggtgcgcaccaccacatctaatttttgtatttttagtagagatggggttttgccatgctggccaggatggtcttgaattcctgacctcaggtgatctgcctgcctcggcctcccaaagtactgagattacaggtgtgagttgccgcgcccaggctcaatttttttttttttccagacagtcttgctctatcgcccaggctggagtgcctggagtgcagtggtgccaactcggctcactgcaagctccgccttctgggttcaagtgattatcctgcctcagcctcccgagcagctgggattacaggcgtgaaccaccatgcccggctaattttttgtatttttaggagagacagggtttcaccttgctggccaggctggtcttgaacttctgacctcctgatccgctcgcctcagcctcccaaagtgctgggattacaggagtgaaccaccgcgcctggccctcaatttctaattcagtattttcctcactacctatgctattatggaatcttgtgagctatggtcaagacattcaagttctggttctgagtaatctgagtctgagtaaagcgactgtaatatctatttcacagaactgaaaaataagaaagatgatgaatcaaagcatctagtgcctagcagggagtattttgctcaacaggtatttgcttccttcctaaggctgtagggaagatgatgagataatgtcttttatgaaagagggctgtaaacgtaaagatctgtacaaatgttaacttcattgtcaccggtcagccaatgcttctaaaatccagaacataacaactctagagaagtaaactgcccccattgttctgagacactggaattcaattcagtaaacaatcacggcccccttcccccaaaatgataaagacaatcactgccatttattgagcttccaattacgggccctctgtttggcactgagaatacaaagatgaatagacatcatcccagagctagatgcgcgtcagacggtggtcactaggaggcgtggccgaaaacaaagaagtccatggaacgtggccagagatctgtacagaggctgtgggcgctcctaggaaagtctggccaagtgcctgagagttggaagtgcttcaccaataaacatttgcccagggcattgtaggatgggcacgggttcggcagaagaactttccaaataaagataacacaccaccgataacagagatatacaaactggaaggtattcaaaattcgccccacgcctctcgcccttagaaatcgcgagctgagaaacctaaggagttcatggcaaggggcttcccccttccccacccttcagcccaagccggaggttccaggagcgtctagccctctggatctccggcgtctgaggagataagcgcggtgtgggtcagaccccgaggggtcctcgcatctccgtctggaactcccctcaacgctctcaccattttgccccgcgaaggctaatccgccgctccgccaccggaagaacacgtcggcaggagcaggcgcctagcacaaccggaaaaggaagtgcctccggcgcaagtggcattgagggacttgtagtcctgcgatttcgggtgtagagggagcaggggcctgcggggacctggtgtgggtggagtggggacaagcggtggagaagggtacgccagggtcgctgagagactctgttctccctggagggactggttgccatgagagcagccgtctgaggggacgcagcctgcactacgcgccccaagaggctgtgcgtggcgagca

SEQ ID NO: 7301 - DNA, 2300 bp, Homo sapien
aaatgttaactccatggctcctccccaggtcctgatttaggggtctggcatgctgtagtcactgggctcaaaagagtattgcacttcagagttcagtgtttcccagatagcagtgtttcccaaatcaccctcacgatttttgctacttccaactaaaacccgtactttcattcacttagaattttttttaaaaaactaaactggaaaactcataagcaataatatttgtgttctattagttatattttaatatgtattaaatgtataactattaaaaaggatttttagggggtgcaatttaaaatcatcttgccatcctggccaacacggtgaaaccctgtctctactaaaaatacaaaaaaaaaaaaaattagctgggtgtggtggtgtgcacctgtaatcccagctactcgggaggctgaggcaggagaatcgcttgaacccaggaggcagagaatgcagtgagccgagattgtgccgctgcactccagcctagcaagagagtgagactccgtctcaaaaaaataaaaaactcatcttgtgcccactgttggtatgtgtccaatactccaagaaatattctactggggccaggcacagaggctctgggcagtaatcccagcactttgggaggccgtggtgggaggatcacatgagcccaggagttccaggctacagtgagctatgattgtgccaccacactccagcctgggcaacagagcaagaccctgtcaagaaaagaaaagaagacaaaagaaaagagaaagaagaaacgaaagactccatcaggccttttcattgttcccactctttcttcacagggttctttctagagcatcaatgactgttcaattcttccttctaattcagtccaaacacttcagcatggcatcacgatctttcatgttctggttcccaacctaaccctacattctgggatctcaacagaaagctggaataaggcccgccttttcccacttttccttagctgtgccctcctctcgccatcctctcacgcgtccttccaggtccatccctggattattaatcaattaataattaattgacaatgaattattcatttgattaatatgaataattcccctgtgaactgcagcggcaaaagctctggccttgaatctaggcgcggcatttaccatccgtgtgacattaccaagccactgaggtttattttctcgtctacagaagaagaacgattaccatgcctgtctctcagggctgctgccagggttaactgagacaacagacagaaacctctaatgtcccctctccaggcctgttcaacccttcggctcttgcctcaagccggccgcgctgctggagtgtggactgaggaccagaccatgtagcccttgatcccctcacggcgtcccacagacaggtaggcaggaaaggggcctaaacaactcaagtgtcagaaatgtttctcgtccaaggtcttaggaaaaatacaacacgaccccataaggtggaacttattaccgcttttctacaatggaggaaagagaggctcggagcttacgcgactggcccaaggctcacagggggaaaagtggcgggacctcttgactgcgaatcccgcgcactccagaccccggctccccacggcccccagcgccaagcggaccccgtcgctcccggaggcgcttcccatggggtctcacctggcctttgggacacgcggcctcggcggctaaagcttggttcggggttgccccgggcaggcggtcctaagctcgctctcccttctcagcttagcggcgggtggcctgacgttcagccgccttccaaagcccgcgctcccgtcacgtgacctgctcgccacgcacagcctcttggggcgcgtagtgcaggctgcgtcccctcagacggctgctctcatggcaaccagtccctccagggagaacagagtctctcagcgaccctggcgtacccttctccaccgcttgtccccactccacccacaccaggtccccgcaggcccctgctccctctacacccgaaatcgcaggactacaagtccctcaatgccacttgcgccggaggcacttccttttccggttgtgctaggcgcctgctcctgccgacgtgttcttccggtggcggagcggcggattagccttcgcggggcaaaatggtgagagcgttgaggggagttccagacggagatgcgaggacccctcggggtctgacccacaccgcgcttatctcctcagacgccggagatccagagggctagacgctcctggaacctccggcttgggctgaagggtggggaa

SEQ ID NO: 7302 - DNA, 2300 bp, Homo sapien
agaccacgagcccacctgaaggaaccaactcctgacacagaagcacaggccatctccctaggcccagctgccttttgagggtgctcccaggtgtccacagtttaagatcaccgagtatctgctctagttagaaggatgcatcaaggaatgggaagcattggctgaggggaaccactaagaaacacctgcctgggctggcctttcccctgggtgtgtccacagacagcttttgcccaagaatttcagtataggtgagaaacaggagagatgggtggggctgtgtcgggcgttggttccttccggcgggtatggtctcactgacttcaagaatggagccgtggaccttcccgctgttatagctcttaaaggaataacactctttgcagacccaaagaatgagcagcagcaaggtttagtgtgacgagcaaaagaacaatgcttccacagcctgtaagggaactggagcgggttgcagcagctggctggggtggccagcttttattgtcttagttgtccctgcccacgtcctgctgattggctcattttacaaacctctagctagctacagagcgccaattggtgcgtttttacagagcactgattggtgcattttacaaacctctagatacagaaaagttctctaggtccccattcgacccatcaactccagctggcttcacctctcagggctatgagacttccgtcccttcttgcgggtctttcaataagtccctttcctctcttagctagggttctccaaaaaccacgaagaggaagacttccctacgtccgaactggggcacttctgcgtttcttccctttccctccaccgttgttctgggtagggctccacatttccctaagcactctggccaccccctgccccaaggcagctactttgggttgtgcaaggtaaggtccatggcgataagattcacgttggcaggtccggcagccccgggccctgtaagtgatgcggcgtgtggggcgggggccggggcggagccggcggccggtggcaccacacatacggaccaatcgccgtccccgccgcggcattcccggccccaaatcacactgcgggaagctccagcgttggtgcctgtttcgtctgcgcatgcgccgggacacgcctgcgcccttggccgcagtcagggctcccgagtggtcactctggttgacccgcgcaagctctggcctcgcccactaggctggtcgcgtcagagggtggggcgggtcttcgccccgcagcgtctaagctctgctgcgacgttatgggaacctggtgacccgcggcacactctgggacgccagggtagtggatagggacagtggagggcatcacgctgcagggcacgggatcagagggggatgcaaggggaggggacgccattctggccgccaagggggaaacgcggtgaagggaacgccccgactttcgagtccctaggactgagtccccaggactccaacccagcagagaggcgccggggccttagctctgagggctgtggtctagaaagggaagcagcaggcctggggctggggcgcgcgccgaccccgcagtgagaccaagggaagaagggacaggaccccgcgaagggcctaccgccccagagcgtaaacagcggtccgctccgcggaatagctgaagacctcgctggcctgcggctcagtggcctccccggcgattcgagaacagctctgggggtcctcgctaagtgtatgccattcccaatcccttatgtacgccagcggccgcttgccctccccggccagcgctgtcccttccgcgtcctccagtcttcacacgacgcaggggtccccaaggcagcggtctccccaagcttcccgtttcagccccatcctcgagaatgggctcctttcctgctccctctccgctcctgctggcgagtggagaccggcacctaggtccagacgcggctgcgctgcctctcctagccatcgagacaggatgtgactccctcccctggccactgaccccctccctccccaggcggcctgcatccttgctctcctccctcctagcctacccagctcggggttctgtccccgcccagagacctgaggctcggggctgcagatggaatgcacggcagggaggcgggaccctttgtttgtgtgtgcgtgttgttggcctccatccccactccccagactccacttctccaggcctctctcccgccttttcatcccgcatccgcaggacacccaatcaccgggcaacaggtatgatcaggcgcctccgggctttcctccgaattagtcggtgtttggct

SEQ ID NO: 7303 - DNA, 2300 bp, Homo sapien
cccgcccacccttcctgcggccaccccgcagccctggcccctcagtccattcactcctgcagcgcggccccgcacccagggcctgcactagaaccgctgttcctaccgcggcgccccctgggagccaacgccgcgatgcccgcctgacgtcaggaagtcgaatccggcggcgacgcctttagggagcccgcgagggggcgcgtgttggcagcccagctgtgagttgcccaagacccaccgggggacgggatctcgctccccgcgccacgaggctcggccaatgggaacgcgcgctgcgaggcccgccggtctgccctgcggtgctgaaaacccggcgcgcaggcggctggctctgggcgcgcgccagcaaatccactcctggagcccgcggaccccgagcacgcgcctgacagcccctgctggcccggcgcgcggcgtcgccaggccagctatggcccccgacccggtggccgccgagaccgcggctcagggacctaccccgcgctacttcacctgggacgaggtggcccagcgctcagggtgcgaggagcggtggctagtgatcgaccgtaaggtgtacaacatcagcgagttcacccgccggcatccagggggctcccgggtcatcagccactacgccgggcaggatgccacggtgagcgcagccaggcgggggcacaggagagggcgggaccggaggctgagtgcaggggagacagagttacgcactccgagccaaacaccgactaattcggaggaaagcccggaggcgcctgatcatacctgttgcccggtgattgggtgtcctgcggatgcgggatgaaaaggcgggagagaggcctggagaagtggagtctggggagtggggatggaggccaacaacacgcacacacaaacaaagggtcccgcctccctgccgtgcattccatctgcagccccgagcctcaggtctctgggcggggacagaaccccgagctgggtaggctaggagggaggagagcaaggatgcaggccgcctggggagggagggggtcagtggccaggggagggagtcacatcctgtctcgatggctaggagaggcagcgcagccgcgtctggacctaggtgccggtctccactcgccagcaggagcggagagggagcaggaaaggagcccattctcgaggatggggctgaaacgggaagcttggggagaccgctgccttggggacccctgcgtcgtgtgaagactggaggacgcggaagggacagcgctggccggggagggcaagcggccgctggcgtacataagggattgggaatggcatacacttagcgaggacccccagagctgttctcgaatcgccggggaggccactgagccgcaggccagcgaggtcttcagctattccgcggagcggaccgctgtttacgctctggggcggtaggcccttcgcggggtcctgtcccttcttcccttggtctcactgcggggtcggcgcgcgccccagccccaggcctgctgcttccctttctagaccacagccctcagagctaaggccccggcgcctctctgctgggttggagtcctggggactcagtcctagggactcgaaagtcggggcgttcccttcaccgcgtttcccccttggcggccagaatggcgtcccctccccttgcatccccctctgatcccgtgccctgcagcgtgatgccctccactgtccctatccactaccctggcgtcccagagtgtgccgcgggtcaccaggttcccataacgtcgcagcagagcttagacgctgcggggcgaagacccgccccaccctctgacgcgaccagcctagtgggcgaggccagagcttgcgcgggtcaaccagagtgaccactcgggagccctgactgcggccaagggcgcaggcgtgtcccggcgcatgcgcagacgaaacaggcaccaacgctggagcttcccgcagtgtgatttggggccgggaatgccgcggcggggacggcgattggtccgtatgtgtggtgccaccggccgccggctccgccccggcccccgccccacacgccgcatcacttacagggcccggggctgccggacctgccaacgtgaatcttatcgccatggaccttaccttgcacaacccaaagtagctgccttggggcagggggtggccagagtgcttagggaaatgtggagccctacccagaacaacggtggagggaaagggaagaaacgcagaagtgccccagttcggacgtagggaagtcttcctcttcgtggtttttggagaaccctagctaagagaggaaa

SEQ ID NO: 7304 - DNA, 2300 bp, Homo sapien
ccatcctggctaacatggtgaaaccccaactctactaaaaatacaaaaacaaaattagctgggcgtggtggcgggcacctgtagtcccagctacttgggaggctaaggcaggagaatgccatgaacctgggaggtggagcttgcagcaagctgagatcaggccactgcactccagcctgggcgacagagcgagactccatctcaaaaaaaaaaaaaatcttaaatttctatataagttgtcaaactattttttccagtttaatcaacttacacttctaccagcagtatgagagcttttatcccactgcacagtcacataggaaaaatggtttatgtaaaggacctctcttctgttatttaatacccatgaatttcttatatagttgtaatcagcgaacccatactactttgggttctgcttatttcacggggaaggattctatatctatcaatatagttcacattctagccatttaaaatcattctttaattcttcattgtgttaacagatcccaataagcttggcgattttcttattgtcaggactcgggtttatttccagtttttgctattaaattggctatttctgcatctttgcacagtctcccctactttaccaagagtgaaactgcttgatcaaagaatagaaaatgttttgtagctcgcattagacactgccaagttgttgggcaaggtttttaaaaaaggaatattggctgtacagaggtgcagctgtgtggaccatcattcctgagcagggtccaatagcctggcatcttacctggaagtcaggacatctaaacttccctatgggaacttggtaagccccttccccatttcgaacctcaattttcttatctataaaatgaagaatttggatggaatgaattaatccttttctaccagaaatctagccatatttcacctagtctattctgtatcaccctctcctgactcctacgtgctcagaatctagctcagtgcttgggacagttatgtttcctttccctttgaagtgcccaaataccagtgtaatgagaaatatggcagagcctgagagttcagagcacaggccagggtcaaatctcagccctccacttacaagctgtgtgacaaaataacctcccccgggctcagtttcttcactgtaaattaggttaattgttccaacctcatagggttgttaggagaattaaatgagttaaggtttgcaaaacgctaagaacagtgcctggcacacagtaagtgctttataaagtgtttgttgaataaataaaattttggacctaaactctgggtctcttcaggactgcaacagctttgtaactggcaaccccacttttaggtgcgttcccactcctctaaaacccagagatctaaatgccaaatctctctgcttaaaaagtctcccagggctcctaggcgcctccaggctagaacagaaatgcctcagcttgaagacccaggcttttcaggtgaaacacctaagggtcaggagacgctaggatcatcactcaaggatcccagtgaatttttccaaaatacaataaaaataaaaacaaaaagaggcaaacagggttataaaaattgtggggcattttaaatgtttcattgaacaaattaaagcattaacagccctcccccaaccaccaccaagcccaagagaccgtaaatatgctgttcacaagataactgcaactttcaagggctctcaggctgctacttcgggcagcacaattggcggcacgacgtggcaagcaggcagtagtttccaaccctggagggtcagcgtctggagaccccggccaaggcatccacagcctaaagatgatgtccgcgaccgcccgggcagcctcgtgcacggaaaaacctcaaccccggccccgcccacccttcctgcggccaccccgcagccctggcccctcagtccattcactcctgcagcgcggccccgcacccagggcctgcactagaaccgctgttcctaccgcggcgccccctgggagccaacgccgcgatgcccgcctgacgtcaggaagtcgaatccggcggcgacgcctttagggagcccgcgagggggcgcgtgttggcagcccagctgtgagttgcccaagacccaccgggggacgggatctcgctccccgcgccacgaggctcggccaatgggaacgcgcgctgcgaggcccgccggtctgccctgcggtgctgaaaacccggcgcgcaggcggctggctctgggcgcgcgccagcaaatccactcctggagcccgcggaccccgagcacgcgcctgacagcccct

SEQ ID NO: 7305 - DNA, 2300 bp, Homo sapien
aagtcctcccttcctaccccttactgaggctgctggggcttttctcaatttgagccccatctaccgccggcctcattggagccattctttgaacttcattcattcatttgtgtcttcaacacatgtttttatgttttttcaggacctaccctggctggtactgtgctgggagccgctggggaccccaggccctggccggtccacgcttctcagccaccctacacaggccacccatacgtgctcccttttagggcctgaaccttcaaagcctctgtgagatactccctggttctgcctttcagctatcactccctgctccgagctccacaccctttacaaatgttcattaaagttatctatatggtatgttaatccatttctgagaaaataattttcttggttccatttccgtcaacgtttgacagtcctcaaggccaccatactctctggaggtcttgcttcatcctcttattttgtacagaaggcttttgtttgggatgtctgctcacactcaaagacagagaggccttactgtctttatgtctgcagtctgtggagtgaatgaaggatgctcagggctgacaccagcatgaaatgtgatgggagaggttggggactgtgtgaatgtgaggaaagggagcccatctgcccccccaagtacaaccccaccagttgggcagagtgatccccccaccacccctgcattgctgtgaaatttagattgggcagggcccgtttgaccatctctctcaatctcaggctctccattttcaagtgagatgtaataatatgcgtcctgtttacctctcagcctgtgatgagaatctaatgattagggtgtgctagcacacaggcacctgtaaatcccattgaaatctgagggccctataactcctctagtgattcccaagcctcgtgcaccccaccctctctgttcatccttacttcccacgtgtcccgttagccctccggatgcagtcaggcccatttcccccaggacgcccggcactaagccgccccatccagctggggtctgaggggcctgtctcttgccccacgcctaaaagacctaaccctcctcctatcccttcgatacggcagtctttatttgctggagtctgcacaacatcactgcccaatgatgtgtctgcttccacgattcccaaagagactgagcttactgagaccagggcaaggaccgcgccagttcctcatcgcccccttcctctgccttcccctcccttccccctcaccgcagccatggcgcccagaccaagaaagcagagcagaggttccgcaattcttttctaagattgtctgactagagggttcaaagccctctaatccaaggccggcttgtgtctctagggaggttgcagaaaggcgccagaatgtggatggcgcggacaatgtgggatactggagtctcgactgccgcgcgccaaggaagggcgtcacctagccaagccggccctggagttgagtgccccgcagcccgccggtccacccgcccggccgcttgctggcaccctggtggccgcgccggctttgtgtcggcatcaggtgcaaacccccagagcgccgggcgtgcgcgcacgcgccccggagcgcgcggagcccattcgttgcccccaccgggatctcctctaggatctcctccggcgcccggggccggagagtgggggagggaggaggtcggacacgtagcctgcctcgcagcagggctcgactccacgcgggagggcgggggagccggggacccgccgctccagcccgctggccttcgaaagatcctcctgggccaatggcaggcggggcgacgcgaccggattggtgcaggcgctctgctgatcgctgtggaaactcgggcggcggggaacgcgggaggatgtggaacccgaggcggggggagccggaggggcgggcagaggaggtgtcgaggccctgagctcccggggagtttttactggaggcaaaagtccatagcgggagggctgagggaggggcggaggaaggggaccgcttgggggcactgggaagccagggatcctccgccaggaaggcagggacactcccgagcgcaggcgagaaggctgggggagggggcgcggtgggaggagtaggagaagacaaaagccgaaagcgaagagggcccgggctgcacacaccggctgggaggcagccgtctgtgcagcgagcagccggcgcggggaggccgcagtgcacggggcgtcacagtcggcaggcagcatggggaagggagggaaccagggcgagggggccgccgagcgcgaggtgtc

SEQ ID NO: 7306 - DNA, 2300 bp, Homo sapien
ccctgaggtctcatgggctgttgttttgttcaacaatgaagtctccatgtaaatggcggagccgtttatagaagaaagttgggacaggaggcaggggcagggcaggacggggaggagagttgttacaaggagaggagtggtacccacaggctgtgaccagggtggtcatggaagtcccaccctggcctcagcaagctcttcctcctcttgttgccagcctgggccagacccctctgtttagcagagccagggcaggaccagggtctctcccggcctggactcttggccagtcccccaccacccccattgcctctggctttcctgatgagctgcgggccaccctgcaggtccttcaaaggccaatgcccctcctctcaccttgccctccatggcacatgagatcacctgccctgtacccatgccagcccatgcttgtcccctcctgcctccttcgcaagtgggtccatctcccactctcacctccagcacctcctggcctgcggcttccccagctctgctcgtcctgccctgtagctcccttgtccatggccttgctccttggctctctccactgctctccctttctgctgcagatcctgcaccatttagcatccaagctcccaccaggcaccaccagaaccacccttcatagcaccttggtcatgccctgtgggtaccgctcctctccttgtatccactctcctccccgtccggccctgcccctgcctcttgtcccaagttccttcttcctcgcaatgccattgtgttcccagggccctccttgactccgctttgcctccctggctccatgtgcccgggactcacagccccctcctgcctgcctcagctcgccctcctgcgctagtttgtgtcgcccccaactcaacccctcaagacccaacagtgtgcgcagagcaagtggtgctctgtttggtggtggaaaatgcaagttttatttttcttttcttttctttctttctttttttttttgagatggagttttgctcttgttacccaggctggagtgcagtgacaccatctcggctcactgcaacctccgcctccaggttcaagcagttctcctgcctcagcctcccatgtagctgggattacaggtgcccatcatcatgcctggctaatttttgtatttttagtagagatggagtttcactatgttggccaggctggtctcgaactcctgacctcaggtgatctgcctgcctcggccacccaaagtgctgggattaaagttttcttttttaaaaaagtgtggtcaaccattttggtcatttgacgtgtacagttcagtggcatcaaataagcacatttacattgttatgtaaccatcaccaccatccagttctcatcttccccaaattgaaattccacatccattaagcactcactcctcattctcccacctctcagcccctggcaggcaccattctactttctgtctctgaatttggcctctccaaggacctcctgtatatggaatcatacaatatttgtcctttggtgactggcctgtttcccttagcatgatgtcttcaaagttcactcacattgtagcatgtgtcagaatttcctcccttttcaaggctgagtaatattccattgcatggatagaccacgtgttgctgatccattcatccatcacgagatctttgtgttgtttctacctttttcctgatgtgaatagagctatgaacacagggtgtataaaatgcaagcttttgagtcaaagcctttctctgtcactcttacctagctgtgacaaatatacaggccccagggctgtgtggggcatgtggtaacagcagctattgtagggactcctggagggtcgaggcttgtggcttggccccctcttgccacagcttctctgggttgtgcattggctgttgaaatggcagctcgagacatatgttccctccagagtggctggtggctgactcctttccctgtgctcttggtcaacagtcaaagatcactgaggacttccgggccctgaggaagacggctgaggacatgaacctgttcaagaccaaccacgtgttcttcctcctcctcctggcccacatcatcgccctggagagcattgcatggttcactgtcttttactttggcaatggctggattcctaccctcatcacggcctttgtccttgctacctctcaggtgaggcgtgacaccctcacttcccctagctgacagaggcctggtgcctgtttgctgaggctgtgacagcacgtgtgaccctctctccccaggcccaagctggatggctgcaacatgat

SEQ ID NO: 7307 - DNA, 2300 bp, Homo sapien
tgtgtgtgtgacggggactcctctggaggaggagatgtgtggggtcctccactccccacacttggggctctgagcccccagttgggaagaagcctgactcttgttgagtgagtctgtggaccgggcactgtgatgggcagtgtgcgtgcacaacgtcacttaatccttgcttaacccgtgaggcgggagctgtcatcgacccatttcatggatggaacagctaaggccaagagacatgaagtgacttgttcaaggtaacagcaaggaaaaggcaacaccactgtccgaacccaaaccatctggctgcaaaccacagcttcggagtcctgggggcccttgtgaaatatgtttgttgggtagccccagctttctgatcaattaaacagccaggcactcacccccctagcttgctacattctaaaatacctctccctcccttccctggtcccatgacttaaacggcaaagctctggcaaagaactgagcgtgggaaagatgagagcagagagttagccacagggcagggcttcgtatcccaaacccacagttgtactttctggtttgggaggggagtattggccatcccccagcagagccgctgcagctgaggccatcgagatgggcacagatgtgtagtggtatgtcaccatacgcatgtacatacacgtgcgtgactgtgatgagcattttgctcaccgtcccacagaggcccactctgaggcctgctgctgcctggcaagcaggaccccctggctcccgagggtcattctggggcattgaagggacgcacactaaagccagcagtgcttaccagcagaggcagcccctgtaacctgtgttgtccacccacaggccaccatcacccatgagaacagggtgcctactgtgcacatgcagctccaaacagactccccaggtgcctcccaggcccccacaacagcgtggccagccctcagtccctccataggatgccctggcccctgctgacctgcctgggttgccctctgtgctcacttccgagtacagccggcccagcccgagagggatgggatgctctgtgggacagagatgcggtggggaggagctcttgagcagagctggagacactgcatgccaaggctggggctatgagcctgctccctggcctctgggagaagcttagagcaggactcaggggcctgttctgtgggccactgcaggccccgagactggccacctcgagagcaacgtctgcagtgctggctcctccagcaactccgtccactggagactcatgaaaggctcctgtgaggcctccctggctcggacctctccatggccggcctcagccctggccttaataatagtcttcctgcaagtggccgtcctttctgggaatgagtgagatccttgccaaggctcaggaggccacacagaacaaagggactgtttctgggggttcttcagctggttgtgccgtgaccatggccattggcgccaagatgcaagccttggggacagggtggacctggttcccacccacagcctcttccctcaggaatccatgctctccctgtgatttggacaatcattttactcacctggatgagaggggcactggcctaggcatcatccaaggtcccttccctctgtaactcactttgacctcctgactgcaataagtatgactggacactataggaggaggcatctctggccttcggatccaggggtatagggagggtgacgggcagtgtcctggggtcagcacttggcattatgcccatgttctcattggctcctcttaccaaccactgattcaaatgccagacaaggctcagcaaggctaagcgactcacatagtctcagcactggtgagaggcagagtcggctcaagcgcatctgctggctgcaagcccagcctccccacactgcaagggagaggagcaggtgtcactcagtgagcggcatcttttggtctcagtcctggaagtgcagggtgggctggtccctaggggctggaccatggaattaagggctccagggatcccctggggccgtggttcctatgcctggcattggacaatgacgatgcccaggacccagcccagccctcctccattagagcctctgggcatcaggctgcccaaggtgcaggctctgatggggaagaaaccggtgccgtcatggggacctcaggtagccagatgtggcctgaggagtctgtgctgtggcctcctctgtcctcaaggttaggctccagctggggaggagtgattcactcttgtaaattacagggaggctccagggaggcagatgct

SEQ ID NO: 7308 - DNA, 2300 bp, Homo sapien
gggcctgttctgtgggccactgcaggccccgagactggccacctcgagagcaacgtctgcagtgctggctcctccagcaactccgtccactggagactcatgaaaggctcctgtgaggcctccctggctcggacctctccatggccggcctcagccctggccttaataatagtcttcctgcaagtggccgtcctttctgggaatgagtgagatccttgccaaggctcaggaggccacacagaacaaagggactgtttctgggggttcttcagctggttgtgccgtgaccatggccattggcgccaagatgcaagccttggggacagggtggacctggttcccacccacagcctcttccctcaggaatccatgctctccctgtgatttggacaatcattttactcacctggatgagaggggcactggcctaggcatcatccaaggtcccttccctctgtaactcactttgacctcctgactgcaataagtatgactggacactataggaggaggcatctctggccttcggatccaggggtatagggagggtgacgggcagtgtcctggggtcagcacttggcattatgcccatgttctcattggctcctcttaccaaccactgattcaaatgccagacaaggctcagcaaggctaagcgactcacatagtctcagcactggtgagaggcagagtcggctcaagcgcatctgctggctgcaagcccagcctccccacactgcaagggagaggagcaggtgtcactcagtgagcggcatcttttggtctcagtcctggaagtgcagggtgggctggtccctaggggctggaccatggaattaagggctccagggatcccctggggccgtggttcctatgcctggcattggacaatgacgatgcccaggacccagcccagccctcctccattagagcctctgggcatcaggctgcccaaggtgcaggctctgatggggaagaaaccggtgccgtcatggggacctcaggtagccagatgtggcctgaggagtctgtgctgtggcctcctctgtcctcaaggttaggctccagctggggaggagtgattcactcttgtaaattacagggaggctccagggaggcagatgctcccagcctgatgactggcagcaattctggggcccttacctaggttctccctgccactgcgggctccgggagctctccatggtgacctaggaactcccctgggtgcttatgctccgccgagagttgctctgttgcacattcattcaacaaacatttgtttagtgcctgtcacatgggctcagagtcagctttttgggttctgatcccagtcagggccacttcctgtggccttgggccatggcttaacgctgagcctcagcctcagaagtgccggccttgtagaggatcgatgccatcgggccagtgctcggctagggctgaggaagcgttggccgctgctggctgtagcatggggagcccagagggctggaggggccccaggcttggtgggcccagggtgcagattgacaggaaagggacagtggtgtgccctgagcagatagaagggatggtggctgcaggatgggttggggaacatgggaggctgggagctgaggctactgggtgctcatgatctctcctctctcctcagtacggcaagaagaagctgaaatacctgccctacaatcaccagcacgaatacttcttcctgagtgagtgctcggcgccccgaaatcactctgggaccctcccctccccccagagtggcgtgtctctccctcctacctgacatctttttcagatccagaaagtgacactaaacttgttagaagcgggggccacagcagccttgctgtgcagacccctcagcctgtgttacaggcctgatggggacacagaggctcagagagtcccaggggtgacacacgtcctcaagggctcccagccttctctgcaggccccggggtccctggctgcttctgcccacgtctgcagggctggcccctgcactcagtgctgggcctgggttcccctgaccttccggcacaggcagggtggaatggatgcctctaagcgcctgtctctctcctgcagttgggccgccgctgctcatccccatgtatttccagtaccagatcatcatgaccatgatcgtccataagaactgggtggtgagttggggacacagctggcttggcatggggaggagggtgactgggacagggggacccgggggtcctacgctgcctcctcgtgtgccccagtggagcctgtggggccccaggcatctcctc

SEQ ID NO: 7309 - DNA, 2300 bp, Homo sapien
agccgagatcatgccactgcaacccagtctgggcgacagagcaagactctgtctcaaaaaataaaagataaataaaaaaattagaggccaggtgtggctcacacctgtactctcaacactttgggaggctgaggtgggaggatcgcttgaagtcaggcatttaagacatgcctaggcaacatagtgagaccttgactctacaaaaaaattcaaaagttaatgagacatggtggcatgtgcctgtagtcctagctgctggggaggctgaggtgggaggatcacttacgaccaggatttcaaggctgcagtgagctgtgattgcatcactgcactccagcctggtgacagagtgaggccctgtctcaaaaaaatttttcagtgtttttctgggctgggcgtggtggctcattcctgtaattccagcactttgggaggctgaggtgggtggattgcttgagcccaggagtttaagaccagctgggcaacatggcaaacctcatctctacaaaaaataaaaataaaaaattagctgggcatggtggtgcacacctgtactaacagctacgagagaggctaaggtgggaggatcacctgagcccgggaggttgaggctgcagtgagccatgattgcaccactgcactctagcctgggcgatacagcaagaccctatctcaaaaaaaaaaaaaaaaaaaaaaaaaaaaaacacccagtggggtcagtagaaccccaagagtcttcttccctcccagctcccctgtacaccagccccagctctgcaggtagctgggggcccagacagcttcctggggacccccagccttccctctgcccttttttctaccagttttgctgcccctccttcaagactcatgtccagagggggtgagatctgcacttatacagccccctcctctgtaatgagtgagccaagtcagcccaggttattccagaaggggcaccctaccagccccccagtccccaagctgccctgggcctataaaagcaggcaaggggacccctagtagatcatgtaggtgttacctcttagtgggtgctggaggggcctgaagtgctttcttcccccagggtggtaggagaatgtcctggcagtgacttcagggcccgctgtcacttccgttttaagactcaccagctggtaggctcattagcaagaggacaataggaggcccctgtcctcagtcagctttcttcaaaggtgtttcctttagcaactgggaggcctcccttctccagacccatggggacaacaccacccagctactggttctataagctgctgtatggctctggctagcccattcagagaaagcctctgaaagtacaaggaaaaaaatcagtccaagagctgtgaacaattagtgagccgattacaataccaagaccacaggcagacctggaaggctaagtgagcccaggtgtgaagttcaagcttactttacttctgggccacttcctggctggtctctttccctggcccttatctttctcctggtctgtcttctcttctcaccccctttctttactctttcttccttctcctgcatcgtactccacccccactccagctattacacagaatcgcgagaatgttggattattcattttatttatgatgttttcttttttgtaaaaatagagacaaggtctcactatgtggcccaggctggtcttgaactcctggcctcaagcaatcctcgtgccttggcctcttacagtgctgggattacagatgtgagccaccatgcctggcccattttatttactttaaaaaaaaaattaggctgggcgcggtggctcacacctataattccagcactttgggaggccaaggtgggcagatcaactgaggtcaggagttaaagaccagcttggccacctggggtcaggagtttgagaccagctactccggaggctgagaccggagaattgcttgaacccaggaggtagaggttgcaatgaactgagatcatgccattgcatgccagcctgggcaacagagcaagactgtctcaaaaaaaaaaaaaattatgttttgtgctcctgcttcctgctttgtaagtcaaatcagtttaactgttcaagtgtcttccttgcaaacccccaaggactcaatgtgtgtcgcccttgactgatccccccgccccgtgacccagtggtcctcagttccaggttttcccacctacccttcacccactgcttatgtttataaaaacggggtaaatcaaatgttcgtgacccagatcttattctacatgcagtggaaacttgtatgacttaa

SEQ ID NO: 7310 - DNA, 2300 bp, Homo sapien
ttcattgtggtttcatttgcagctctctgatgattagcaatgctgagcaccttttcgtgtgtgtgttgcccatttgtgtgcagcccctctttcctgaggagcattctgaggagctccgcctggcctccacagtgatcccttcgaggaggacttggccaatagggctgtgatccctgccctcactcacggctcttgcatgattctgtggcccccccttcatcttccccatctcttctgggggcagctggggaaagtggaggttctaacctatcacaacccccaaccacctcacacacaggggctgagaccaggccagggctggctccaaggaagaagcccctaggatggccacatctgaccactcagggctgctgaaggtggggccagggccaggtccatgccttcagtggattttggtgcaggggatgcattccttcaagaatctgccttctccattcctgtgctgtgtgaacatggtacggggtaggggtgcctgcagcccccttgggccagggccaccagccatgctcttgcacccccacacacatgtgccaggttggggttccaggatatggtcagtgggtgcctcagtggagagggcccaggcagccccggtgcctgatgacatcatgggccttgctggatgtcctgacaagcaaaggcaggagctcctggtaccagggagaactcgccccctctgcccttctggggatactggtcctctttagaccaagacaaaatattagcatatcagagaaatatacttagggttttctaagtgcatttccccaaccagccggtcagcatcacctgtgaactggccatgtaagtctctgcctccacaccagacccaccgaataaccctcctgggtggttctgatggaagcctttcaggtggttctgatggaagattgacgaccagcgctctggaagtaactttagcctgatttgaattccttgctgctgtgaacgcttaacttttaggaacaggtatatttatcacaaagaaatccgaagcaattaggggagctacctacactttcaaaaggacttgaatgtatttaaattaaaaaaagcggatggggcccgggtgcagtggctcatgcctgtaatcccagcattttgggaggcgggagggtcacttgagtccaggagttcaagaccagcctgggcaacatggcaagacccatttctacaaaaataaaataacaccaaaaattagccgggtatgatggggcgcgcctgtagtcccagctggggactcccgagactgaggtgggggtatctcctgagcttaggatgttgaggctgcagtgagccgacatcatgccactacactgcagcctgggcgacagagtgagactcctgtctcaaaacaaaaaagaggggcggggaagcagtaacaagcacaggtgtcctcagcccatggatggcagcgcccgcctccacgcgccagtgccctcctgctcccctacctcccccttggccacccctgggcatccccagccctgcagcgccgagggcggaggggaggccacccgcccccagcagagggctccgagagagctgcagcggcggtgggggccccgcagagattggggcccatggtttgaaggctgttcacaggcaccccgagacagcgtcccccctctgggcgcactggatttgacgttgcaggacgcgcggctggaagccccccaggccccgctgctcacagaccgggactccgcctccggttcccgagggcgtggcgaggcgctgcgggacgcccaacaggtgcgtgttgtgtccccaggccccgcgctccgggtggagtcaagaacctggaagccggcagcccgggaaaagggggcgggacggtgccccggggcagggctgggtggcggccgctgtcctcccgggaggggcgggccgcctcgacgccgccctccctggcggccaatggagaccgaggccccgcgcctggattggagcggacgcggggggtcagccagccttgggggccggggcctggccgggggcgggggggcaggcgaggcgaggcgggcgccgtccgcgcggttataaggcggggagttccctgcgccgcgagccgggaggcgcacgctcgctcgtacggcggccgcggcggcagggcggggccggagcagcgggcggcggcggaggcggcgcccgggagcgctcttcgcttccctcggggtcttgctcggacctcggccaccgcctgggatccccaggactcgtgcgtgcagcatgggcggcgtcggggagccgggaccgcgggagggacccgcgcagcc

SEQ ID NO: 7311 - DNA, 2300 bp, Homo sapien
gtacaatggcatgatcttggggcactacaacctctgcttcccaggctcaagcgatcctcctacctcagcctcctaagtagctgggactacaggcgcacgcaccaccatgccctgctagtttttttttttttttttttgtagaaatagggttttgtcatgttgcccaggctggtctcgaacccctaggctcaagagatcctcccaaagtgctgggattacaggcgtgaaccaccatgcctggcatgattttttcatttatgtatttatttattaaagacggggttcctgctatgttgccgaggctggtcttgaactccagggctcaagcaatcctcctgcctcggcctcccaaagtggtgggattccaggcctttttcttttttataggagccctcctaacaagtgtgagacagtatttcattgtggtttcatttgcagctctctgatgattagcaatgctgagcaccttttcgtgtgtgtgttgcccatttgtgtgcagcccctctttcctgaggagcattctgaggagctccgcctggcctccacagtgatcccttcgaggaggacttggccaatagggctgtgatccctgccctcactcacggctcttgcatgattctgtggcccccccttcatcttccccatctcttctgggggcagctggggaaagtggaggttctaacctatcacaacccccaaccacctcacacacaggggctgagaccaggccagggctggctccaaggaagaagcccctaggatggccacatctgaccactcagggctgctgaaggtggggccagggccaggtccatgccttcagtggattttggtgcaggggatgcattccttcaagaatctgccttctccattcctgtgctgtgtgaacatggtacggggtaggggtgcctgcagcccccttgggccagggccaccagccatgctcttgcacccccacacacatgtgccaggttggggttccaggatatggtcagtgggtgcctcagtggagagggcccaggcagccccggtgcctgatgacatcatgggccttgctggatgtcctgacaagcaaaggcaggagctcctggtaccagggagaactcgccccctctgcccttctggggatactggtcctctttagaccaagacaaaatattagcatatcagagaaatatacttagggttttctaagtgcatttccccaaccagccggtcagcatcacctgtgaactggccatgtaagtctctgcctccacaccagacccaccgaataaccctcctgggtggttctgatggaagcctttcaggtggttctgatggaagattgacgaccagcgctctggaagtaactttagcctgatttgaattccttgctgctgtgaacgcttaacttttaggaacaggtatatttatcacaaagaaatccgaagcaattaggggagctacctacactttcaaaaggacttgaatgtatttaaattaaaaaaagcggatggggcccgggtgcagtggctcatgcctgtaatcccagcattttgggaggcgggagggtcacttgagtccaggagttcaagaccagcctgggcaacatggcaagacccatttctacaaaaataaaataacaccaaaaattagccgggtatgatggggcgcgcctgtagtcccagctggggactcccgagactgaggtgggggtatctcctgagcttaggatgttgaggctgcagtgagccgacatcatgccactacactgcagcctgggcgacagagtgagactcctgtctcaaaacaaaaaagaggggcggggaagcagtaacaagcacaggtgtcctcagcccatggatggcagcgcccgcctccacgcgccagtgccctcctgctcccctacctcccccttggccacccctgggcatccccagccctgcagcgccgagggcggaggggaggccacccgcccccagcagagggctccgagagagctgcagcggcggtgggggccccgcagagattggggcccatggtttgaaggctgttcacaggcaccccgagacagcgtcccccctctgggcgcactggatttgacgttgcaggacgcgcggctggaagccccccaggccccgctgctcacagaccgggactccgcctccggttcccgagggcgtggcgaggcgctgcgggacgcccaacaggtgcgtgttgtgtccccaggccccgcgctccgggtggagtcaagaacctggaagccggcagcccgggaaaagggggcgggacggtgccccggggcagggctgggtggc

SEQ ID NO: 7312 - DNA, 2300 bp, Homo sapien
gtgctcaggaacctcttgctgcctggctgcacacagctgcagctgccagtgagcctctagtttctgggtggtctttttggaaaacgggtgtaagaggactcagccccactgcccctggctggtgtgatatcaggcaggttccttaacttctccgagcccatccttttcaactgaggagcaagttcagctgagcaggagggtcctccctactgggggaggcagtgagccctaggagtccatggtagcaggaagcatggatgacaggctatttttggttagaaattgagtgtggatgcttccagagtggtgaccacagacttgtccttcaagacctcgctcaagggcctccccggtccaccagacctcccaggctgaggactcttcctccagggacatagccctgagctgacgcctcctccaccctttatctcccactggtctgggttgccatgacttatctcctgccggggcttgtgaagacttggagggcaagggccctgtgctgggttccttttgtgtcattttctcctccttctctaaatagtgaacaaaataagggccaggaagacaacagttgctcaagaccaactgatgagggattcaagccagcaaacacatgtggacatctgctttgggtgggccagaccctgagctgggctgggggtggggtaggggaacatagctccaagaaagagagaatccctgccctctggaagccgtggccatggaaacaactgccctgctgagtgatggctatgggacgcctgggctgaatgattctagaaagttggaagggatgctatggagaactgcctaggttgttcactgcacaaagtgctggccaagggagcaagcaaggcatagaatccagcctcgcctccactctccagattccataccttgctgtgcgctgtgcccagcggggaaagagcattgtctatttgtgccctggacgtggaggtcttagagaatacgtcccccatcctccatcctccaccaacgtggagccccaggagggcagaacctatgtctgtacagtttcctgctgggtccccagccccttgcatgccccatagtctatgctcagatggagtggctgaatgtatgaatgagtagaatgaatgaataaaatgtatcctcaaacgaagatctgactaacttgagcctgcggcctgagtcagtgggcctggaggggtagcactgggacctctggtagcacctagaaggggaagtacctcccaccacgctcccagtcctcccctagacagggaaggtgggagccatggtacctggcgggagagaagacgggttctgctcttactggtccagtcccaggctgaagttgagacgaatgatcaggactcagaatgggtgggacagaggaactgagggacaggtagaccagtcgtctgggattcagggaaggtttcacggaggatgtgggaccagacaggtgtgtgtatgtgtgtgtgtcggtgggggtggggtggggaatactatccagagggcagatggtgagtaaaggcagggatgggcagagcgtgttaagtggcaggaggctgagtgaggagagttggaccagaagtggaaactccttcgggataaaactcagagagtaggactcagaaaacttgtttcgggtttgtcccctccccttcccagcaggcaggatgttgcacagggacaggcactaagcagacagcctagggaaggagggccgggtgaggaggggggagggtgtctgctggccttaagtgacaatctgtgtgagaatcgaagagctgagagctcgggagccattgtaggttcttgagcaggggtggcccaaagtgggtggtgcggagggcgactggagaggaggagtcagctggggagtctgagcgcggcgcggcccgcgggatgttgggggccgggttccctccgagcgccgtggtctccctgtcccggcgcggcgggccgggtggggccaggccttgggagcgcgcgccggatcccagcgccgggccggcggaggggcggggccgggcacgtgtcctcgggccgctcccccctccgccacgtgacccgcccagggcagggtcggggctgggctgggggccgcgagcccaggcgtctgagacctactgaccggccgcgggcagggctgacaggcggtggggcggctcggcccctggcggagtcggcggcgggcggggacgcggcgctgggaggacgcggcggcgctgggaacggacgcctgggcgccccgaggcgccgggatgtggagcgggtaggtccgcgcgcgctcgcggtcccgcgct

SEQ ID NO: 7313 - DNA, 2300 bp, Homo sapien
tgtatttttagtagagatggggtttctccatgttggtcaggctggtctcaaactcccaacctcagagatgatccactcgcctcggcctcctaaagtgctgggattacaggcgtgagccaacgcccccagctgtcttctttttttaaactttttttttttttgagacggagtctcgctttgccacccaggctggaatgcagtggcgtgatctcggctcactgcaagctctgcctcccagattcacgccattctcctgcctcagcctcccgagtagctgggactacaggcgcccgccaccacgcctggctaattttttgtatttttagtagagacgggtttttttttaaataatagagatgaggtctcggtttgttgcctagggtggtctcctgggctcaagcgatcctcccacctcggcctcccaaagtgctgggattacaggcatgagccaccgcacctggccacaaatgttatctgctttaatactcactatttcacaggggagaacttcccattttatatagatgaggaaactgagtcccagagaggttaagtgacttgcctaaggccacacagtcagcgagtggcagaactaggatgagaatttgggccaaatgaagacagggtggcacattcacaccatcccacaggtggatggagtctgtgtaccaggcaaggtgacactgagaagggtgacgaggatggcccagcctctgcccagagggccactcagttcttgtgggagtgtccaacagttccagggggtgtttgtcatgacgcagggctaaccatgtgtctaagggctctggtgcctgcagaggaaaaaagtaacccacaggggagggcttcctagaggagggggtatgaacaaaagagaaacttactagcagaggcaggatgcagtggagatagcagtcaggggggatagtatgtggaaagaagaggaatgggcacatctgggcaatggcaactggcctggtgtgctttggagggtgagaatccatttcatagttggagaaactgaggcacggagaggctaacgtgctcaaaggcacaccgtctgaaagtggggttgaatccagcccgtctgaccccgggcctgtgttcccagctgctaccgctgagttgttcctgggcggtggtggtgagaagttttaagggtagtgagaccccatctctccaaaaaataaaaaaaatttaaaaattagccaagcatggtgacacatgcctggagtcccagctgctcaggaggctgaggtgggaggatggcttgagctgggcagtttgaggctgccctccagcctgggtgacggagcgagaccctgccttgaaaaattaaaaacaaacaaaaaacaaaactgggaatctcaaatctaagaaaaagaatttaaaaataaagaaaaaaaataaaaaataacagttttttgtttgtttgttttgttttttgagacggagttttgctcttgttgcccaggctggagtgcaatggcccagtctcagctcaccgcaacctccgcctcccgggttcaagcaattctcctgcctcaggctcccgagtagctgagattacaggcatgcgccaccatgcccggctaattttgtatttttagtagagacagggtttcaccatgttggtcaggctggtcttgaactgctgacttcaggtcatccgcccgcctcagcctcccaaagtgctgggattacaggcgtgagcctccgcgccccaccaataacaaagttttaaggggatattcaggtttgtggtcacaggcaggagggcctgtctagggctacacagccagctatgacagctatgacaggatcaaggctggacgggctctttccaacaccccagcctgcgtggtgaggggacaagcggaccatctgggagcctggctgaaacacggggcctcccctagaggtgtctcacctcccctggcccagagcccaggaaggagggcccagtgtcttctgctgcctgaggagccacaggagttaataattacggggttgaaggagatagcggctgtcctgggaggtggtgcctccctcccaggctgctgctctggggagatagcaaaggttagtgtgaggctcagcctggtggggggaagaaggctcctgctacctcccttcccggcaccctccagagggaccctcagtctggccttgcaagcatggactcttctgaggagcacgctgggtgccccgcccgagggacatgtcccgtgttcctggccatgagtgcagggactgtccgctacgccccatcaggcctgtgccctgtacttgaggggaac

SEQ ID NO: 7314 - DNA, 2300 bp, Homo sapien
cttccccagccagagccagctagtcaagcacgctctctagtggccaccacagggaaggcaagaacttgtctccacaaaggcaggattttcatttattccttcagagagtacagaatgagcatcaatgttccaggcatggtgccaggcatgtgtgttaactttagttaaaacatacttattggccgagtgtggcggctcactcctgtaatcccaccactttgggaggcctaggtgggaggactgcttgaacttagagctcaataccagcctgggtaatgtagtgagaccctatctctataaaaaaaaaaaaaatagctgggtgtggtggtgtgcgtctgtagtcccagcgacttgggaggctgagatgggaggattgcttgagcctgggaagtggaggttgcaatgagccaaaatcacacccattgcactccagcctgggtgaccttgtctcaaaaatatagttatatatttacttatatatttatatgtataaatatatgtgtacatacaaatatatttgtaatattatagacatattaatacatatttacatatgttaatatataaatatatataatatatatttatcatcttctaaatggaaagctcttgagtttcaggatgtgttggttgggaagggaatacaggatagggaaataatccattaagcaatgactcagcacaggccataaaatcagaatcacctggagaacttgaacaatcccaacacctggggtccatccagaccaatcaaatcagaattcgtaggggtcaggcacaggcaccagtggtttggagagttgacggacacatgtcccatccatcattctcattcggctgccaaggtaggcatcgttgtcccattttgcatatgaggagactgaggctgaagtgaacctgcttctttccccatatcagttgaggacagcgatggggcagcggggaggcagtaaatactcctacaaggctgcctctaaagagagtcttataataacaacagctttattgtttgccatgattagaaaagtattcaaggtcattgcgaaatagtgtttttttttctaggcagataattatataaaggcaaaaatggtgtgtgggggtgggggacaaggggagggagagcattaggacaaatacctaatgcacgcaaggcttaaaacctagatgatgggttgacaggtgcagcaaaccaccatggcacacgtatacctatgtaacaaacctgcacatcatgtatacctatgtaacaaacctgtacattctgcacacgtatcccagaacttaaagtgaaaaaaaaagtggtgtgtagaaaaatcacctgcaatctcagcatagttaacgcttagtacatttcagagagagagggtgacaggaaagggaggatgagagtgggtttaagacacaaggtcatattataaaatcagggcttctggaagtttagtcccaaaaccacacatctcataatcccctgcagtgcttgattaaaatgcaacatccctaaggccacagactcagactctggagaaagatccagaaaactgcccgtttaataaacatttgggcgattcttacggcctctaaagaccaagaaccactgctgcctagagctctgctctcttcattgaacaatacaagaggagtgtgtaggtagacacccaccacttccaacagcttaggagagcccttgagtatggattgatgtattaaaatttattgaatcacatgctgagattttcaccagctgcccgtggggatctgggcatttattcccatattgcactggctggctggaagccagcagcataaactccagggctgttctgtcaacccccaccagactcacccccctccaccagccccggcaggcttctccttccatctctctgaagcaacttactgatgggccctgccagccaatcacagccagaataacgtatgatgtcaccagcagccaatcagagctcctcgtcagcatatgcagaattctgtcattttactagggtgatgaaattcccaagcaacaccatccttttcagataagggcactgaggctgagagaggagctgaaacctacccggggtcaccacacacaggtggcaaggctgggaccagaaaccaggactgttgactgcagcccggtattcattctttccatagcccacagggctgtcaaagaccccagggcctagtcagaggctcctccttcctggagagttcctggcacagaagttgaagctcagcacagccccctaacccccaactctctctgcaaggcctcaggggtcagaacactggtg

SEQ ID NO: 7315 - DNA, 2300 bp, Homo sapien
tgtgaaatggggagatgggtgcctgcctgcagcctcaaagattgaggtgagaatcctgtgagtgaatgactggctgcaggagggaggaggggaagggttgatcattcactgtgaggcctccctacagaacagtggggtcctctctttgggtccactttggggaaggtccatggtatggtttctctccctctccccatacctgcaaattcctgtcgacaatccagttggtctcaaaatcatcatcatcctctccaaaggggttgatgagctgctctgccaccttggggacaggtgaggctctgtaaaccctcaggcagaactcctcaaagccagcttccccctttaaacctcagctgctgctatttccacaccccatgacgcccttcctgcctgaccactgtcttcaaaggcagagtttagggctccagccccccacacttgtgggcacccacacacttctggacacagcccctctaactcttctgagccagtccttccctgaacacccacagctgtccctgagtgtatcactcggctgagtcactgcctttatctcacctcatgtatcttacctggagttgcataattttattcattcatgcaacagagatatatactgaagctgggctgaactaaagggcagtctaggtgggcagattcctggatagcaacctctaaaatgccctaacaaagccccgaagaggtgacacgcgtctgccttaggggtccaggggacatcttgcaggccactggggcaccccggagaatttcaagcataaaagtgtgatttgttttgatctgcagaaaccaaagataactgggggggcagggggaatttagaggaataggaatgcgtgtgtgtgtgtgtgtatgtgtgtgtgtgtgtgtgtgtgtgtgtgtgtgtcacagtgacaggaagggcagagacagagacttacacccccattaccaaaaaataaaggaaggtaggaagggagagagagtgggtgggcaacagaaggaaggaaagataaagaggtggagagaaaactgtgtgattcagaacatctgttcggagtattggctgtggtgggagggaatacctggacaagccacttgaggtgaggaacaagacagcccaacaggcatcttgaataaggagaggtggtgccgatctgccttctaaagggcaggggcttctgaaccttagggctttgttttgttgttgttgttgtttttgagatagagtttcattcttttgcccaggctggagtgcagtggcacgatctcaactcaccacaacctccgcctcccgggttcaagcgattctcctgcctcagcctcccgagtagctgggattacaggtgtgcgccaccacgcctggctgctttctacccgtgagaccttcctttcctgacactgcatcctcgtctcaggcagctgctggccatgacccctctggccatgcctccagcccagcagggccctggagaggcccaccttcagccagccaacatagaagaagaactgcaggaacgtgaagacgggcacaacgaggtccagctcatggccagggtaggccttggctgggttcagaaactgccgcccaactagacaagtcaggaagaagctgtacaccgccacagtcaccacctgggaggaggaggaggatgtggtagcaaagggctaggtgggaaccctgaaatcaggatgctccaggggctgggagtctgagacaggagaccaaggccttgttctgacttgcacacttatgtgacttaggggctctgttaacccctttgtttgtttgtttgtttgtttgtttgagacagagtcttgctgtgtcgcccaggctggagtgcagtggcatgatctcagctcactgcaacctccacctcccgggttcaagcgattctcctgcctcagcctcccaagtagctgggattacaggcgtgcaccaccacacagctaattctgtattttcagtagagatggggtttcaccatgttggccaggctggtctcgaactcctgacctcaggtgatccacctgcctcagcttcccaaagtgctgggattacaggcatgagccactgcacccggccaacctctctttaatatggggataatcacattgcctctactggactgggccaggcaggagcctggactcttagaacttggcacttcaaagtccagacccaacttcaaagtgtggacccaactcccaggggagccacttagcctctaggtgagcccttcccaccccagctgcttccttggtccttctagcctcagtttcccaaaagggcagcctcacca

SEQ ID NO: 7316 - DNA, 2300 bp, Homo sapien
gggccaggaagacaacaaggcctggaagcttaaggctgtggacgccttcaagtctgccccactgtatcagaggccaggctactacagtgccccacagacgcccctcagccccactcccatgttcttccccctagaaccatcagcgccgtcaaagcttcacagtgtcacaggcatagacaccaaagacaaaagcttaaagactgtgagttctggggccaagaaaagttttgaattgctctcagagagcgatggggccttgatggagcacccagaagtatctcaagtgaggaggaaaactgtggagtttaacctgacggatatgccagagatccccgaaaatcacctcaaagaacctttggaacaatcaccaaccaacatacacactacactcaaagatcacatggatccttattgggccttggaaaacaggtctgtcctccacctgaaccaggggcactgcattgccctgtgccccaccccagcttcccttgctctgagcctacccttcctccacaatttcctagggttccatcactgccagagcacactggacctacgcccagcactggcttggggtatatacttggccaccttcacagggatcctagggaagtgttcgggaccttttctcacttcaccctggtatcacccggaagacttcttgggaccaggtgaaggaagatgaggttgtgctgaccagaatgctgctggagaactgccccagggctgacaggccaggcttagctgagcagatgttatcactggccccaacttactttgagcaagggtggctgacccaaaaccatgaggtggcagtcagctggatgacagatgaacacttcccccataactatttagggtagtacccaagcactacaggaaagggtggcaggaactgcctcactcctaggaactggtagatggtgaggttgagggtgtccagcgcccttaggtcattttctcactgcctgggaacctcaccaaaatacttcttgcttccttggggtcagcccaaagctgtcacaaaatcagatatttccctttattccagatttcctggacactttcacccaattataaacaccccacttcagccccaatcacgtgggaggaagtgtaacttcccttttctggattctcaagcagttactttcacggtcagaacacgcagctattatgattgaaaacttaaaagggcaacaatttcagtcttgcttctagggctagacaggaacttggcaaacatctgtggcctgttcagcaaaggatgttaatatttaagaatcttgtcttgggctgggtgtggaggcaagtggatcacaggaggtcaggagtttgagaccaacctggccaacatgatgaaaccccatctctaccaaaaaaaatacaaatcagctgggcgtcgtggtgtgcctgtagtcccaacgcaggaggttgaggggagaattgcttgaacccaggaggtggtggttgcagtgagattgagcaactgcaatccagcctgggcgacggagtgagactgtctcaaaaaaaaaaaaaaaaggatcgtctcaacctttgccctcctactgcaacattttggtatttgaaatgaagggaccttccatacttatgctgttaatactttcattctcactagggatgaagcacattcctaacctgcttcctaatggggatgcttcgccagccaggtcctcacctgtgtgtacaccagcaggacactgatccagtcacagccatacagctgtccacactgaagaacatgtcctacaacagcctgaatcaaatggttagcttaatagataaaaatcccagactacttcagcctttaatgccttttattcataaaaactgtgaaagctagactgaaccattggaaacatttaactcagactctggattcagagtcgggaacccttagttctatctgaatccaagacagccacaccttagtatactgcccaaactaatgagtttaataaatacaaatactcgtttctttttgattagtgtgattagaactgaacaacggcacttaaggaatctggaagatagcctggatagatttctgattcatcccaagacctcaaagacaacacctgggtaccaaatttctttatttgaaggaatggtacaaatcaaagaacttaagtggatgttttggtacaacttatagaaaaggtaaaggaaaccccaacatgcatgcactgccttggtgaccagggaagtcaccccacggctatggggaaattagcccgaggcttagctttcattatcactgtctcccagggtgtgcttgt

SEQ ID NO: 7317 - DNA, 2300 bp, Homo sapien
gtaatgtttctattctaaaatagaaaactgaaacttgatccttgaaacttaacttcaaggaacctttaggatattatgggcattgcctggggcaatgtcttaaggatctgtattactgcacagaaaacttacagccagtgtcagaattcattgtctgatgagagggcgctggagtactgaccctgcacttagtccttttctcctccctgctcctgtattaaccatgttaaagcatggttaaaactgagctcaggagtctgccagctgtaccacatatttatttataaaattaaaaacccctgctgggtgcggtggctcagcctgtaatcccagcactttgggaggccgaggcaggcggatcacgaggtcagcagatcgagaccatcctggtcaacatggtgaaaccccgtctctactaaaaataaaaaaaaatagctgggcgtggtggcgtgcgcctgtaattccagctactcaggagcctgaggtaagagaatcacttgaacccaggaggcggaggctgcagtgagccgagatcgcgccactgcactccagcctgggcgacagagcgagactctgtctctcacacacacacacaaattaaaaacccccatgcaaggtggcaaatgtggacagtatgttgatgtaaacatacttttataatagttatatcacaaaaatttgattttcagttttagacatttgatgtagtcaagtgtttgtgaaaggcagtgacagtcacagaaatacaggcctgttttcaaatccatttggaacacatttattcttgggatagtttggacaatcacaaggcaattctaaggaagactcccacgacactgcctaagaccaagatttgggaaaactgattccactgatcactgaaaaatttcttgcccagtaactgtcggtggactttatccaagaactgggggttcaattagtaggccaaactccacacctcttacagtaagatacataaaagataaattaggtcccctaggcgcaaggtcaggtgacacttcggtgactgcagaaggggcgattcctagagatatgcttcaaagcaagtgggacttagagataagcagagccgagaggtggatacggctgctcgagagggatctacccacaagataagccacctcccgccagcccccaaggtttgctattcgacaccgttacccagcagctccgccacacacaggcggacgggagctggatacctaagcaaaaaacgctggcatttagggccaaatgccggaggcagaggaaaagatgggaaagcaaaactccaccttcctaaccgcaggattgatcacacaggctggcagtcttgcaaccccaggatttcaggacaccaaggtctccttaaaaaagaagggtgtgcagaggcggccctggcctaggagggagcattctcagggtacagccgagaagaaccagctgccccgactttctgcgccagagaagtcctcggaaacctcgagcagcctccattttccagaagggcgcagggaggcgggagagcccgcgggtggccacacccccggcccgccccagcgcgcgccccgggaaccgcgcccggcccccgccaccgcttaggcccgcccgcgctcaccatggacaggtaaacgtaggaggcgtagagctccaggttgatctggcggttgatggcggcctctgagtcctggtggtagttctggcgcacctgcgaggtggacgcggtcgtcatggcggcgactaaggagaggcggcggcggcggcggtggctgcgcggcgctggagcggcggcgggggccttggggcagtccgagggtgcggtgaagaggtgacggagggctggctatgggcggccggccggggtggggaacgagcgccgggttccgtccaagcactgttgaagcaggaaaccccgacgactctcggcgaagaacgtctggccctgcgggtcgcttgtggtctcttatagccgcgtcggcgtcaggcccgccccggccaatcagcgccgcccgccccgagcccgctccttccggtgggcgcgggaccccgcccctgctgtgggggaggggcggccgctggaggccctcgcgcgctctggcggagctcgggagcggggaccggtagccgactgcctctgggacagcggtggcgtctctgtgcccgtttagtggagttggagggaagctgcgaggaggcgcaggaagtccacctcagaaccccccccccggtctaggggcgcccgggcgttggaaccggcgggggaagggtgcgggggcgcatggggtgatcctgattcggct

SEQ ID NO: 7318 - DNA, 2300 bp, Homo sapien
tggtggttactgttataaaggaaagctttggatcctatatatggtgactttgctatactcttatcctaagagattcccagtgtaaggtttctaaaaacaaagctaatgaggtgtctctatgctgtctctaggatcaagtttaacctctttttatggaacacaaccctgcccgatcttgcccctattctccaccctaaccagcatcccccaacataaactgtactttccaggccaacattctttctttctttcttttttttttttttttttgagacggagttttgttttgtcttccaggctggagtgcaaaggcgcgatctcggctcactgcaacctccgcctcccaggttcaagcgattctcctgcctcagcctccagaatagctaggattacaggcgcatgccaccacgcccggctaatttttgtattttcagtagagaagggtttagccatgttagttagccaggctgatctccaactccgacctcaagtgatccgcccgcctcggcctcccaaaatgctgggattacaggcatgagccaccgcgcccagccccaggcaacatattttcttaaggcagctttaacaggccatgcatttccacatttccacacctttgcatatgctgttcactctgctccaaattcccttccctgtttctctcccgcacttcaccttccttttaactttttcttcaaactcagctcacgtgtcttgcttagggagggcttccccgacctcctcctatcccagactgggtaaggtactcctggtctagcagcatccttctgtttaccttattcttgtagctctagcaccactaaaacgtttttcctgtaaataacataggtgcatttttaaatgaaaccgtgaacaagaaatcaccctaattccgtcggcaatttattttagtatttcagtagagttgcttttttaaactaaggtttggaagtctagcttccagctgcaggtttgtgagcatcctgaaattcagttcttccaccgatgcgtcaaaagacgcgacagaacagtggacctcgaagccaggacctaggtaagggcagggcctagctctagctctgccacccataaattcacatccaccctgtgcctgggactcagcttagccacacacaccggccccacccctccggggtctctttcacctgtcacccgccattaaccccgtcagcttctctccaatgacaccccagggttgtcctacagggccaccgaagcctgaagctcctgtgagtggggccgataagaggccattttgaaaagtcctcagcatgggcttcgcctttagatccacgtcgtttctcctttctaacccgagatgtgtcccttgggtgcgaagcgacaccagcgattctctcggaggccccggtggctcacccccacgactccccggggaggcggtccccatccctagggaaacccggcccgcccagcctttgttgcagaaaccgcacacggagccatatttgctttcagccaaaggcagacgtggtcggaggagtcggaagggcaggggcggacccgaaacccgccgtgcgccccacttctccatcgcgctccttcctggactctgaggaagagaaaatgcgctcgaccacctaaggaccgcgtctccaccttccaccttcccaatcatctgcagcttcccaatctgcagcaaggtgtcacaagggcttctccgcagctatgatttctaacaccatgccccgggccaggagcctcagggtgcccgttcgggaaaatgggagccgaatcaggatcaccccatgcgcccccgcacccttcccccgccggttccaacgcccgggcgcccctagaccggggggggggttctgaggtggacttcctgcgcctcctcgcagcttccctccaactccactaaacgggcacagagacgccaccgctgtcccagaggcagtcggctaccggtccccgctcccgagctccgccagagcgcgcgagggcctccagcggccgcccctcccccacagcaggggcggggtcccgcgcccaccggaaggagcgggctcggggcgggcggcgctgattggccggggcgggcctgacgccgacgcggctataagagaccacaagcgacccgcagggccagacgttcttcgccgagagtcgtcggggtttcctgcttcaacagtgcttggacggaacccggcgctcgttccccaccccggccggccgcccatagccagccctccgtcacctcttcaccgcaccctcggactgccccaaggcccccgccgccgctccagcgccgcgcagcc

SEQ ID NO: 7319 - DNA, 2300 bp, Homo sapien
tgaaattcaggaccttttcagaaatatcctccttccctgggaacggcagagagtaaggacatgcaagaagcctggctcgggtgggatatctgtgccaaggactgatcacacagcaagacagagctgcagcatccagcatttttatttatttatttttttgagacggagtttcactctttttgcccagggtgcagtgcaatggtgcgatctcaactcaccgcaacctccgcctcgtgggttcaagcgattctcctgcctcagcctcccgtgtagctggggttacaggtgcatgccgccacgtctaattttgtatttttagtagaaacggggtttcaccatgttcgccagtctagtctcaaactcctgacctcaggtgatccgcccgcctcagcctctcaaagtgctgggattacaggcgcgagccaccgcgcccagcccagcatccagcatttttgttgttcccccttattccctccatgccttgctagggataacctggtaaacaaacagaaatctcaaattcaataagcacccccatttgataagcatttactaaatccccatatgggaggcaccatgggcaaacagtggaatgacaagtggataacaggatggagccgaatgatctgggcagtgggtggggacaaggagcggttcagagtgtgggctctggactggaacagcaggtgtgtgtccttgggcaaggtactttgtagttctgtgcttcagtttcctcatctgtcgaatgacatgtttggcctatgtagtaaggggtcaagaagtatctgcttttattaataagtattagtttttattcttacttgattcatttttaagaaaagagtctgagtctaacccacccagctgggtggagcttgggcctgaggacccctgcccttggaatacaggagttttgggctaaagagctgaccaagctggttgggcttaaggcaaactccagagaccagttccaactcccgaggctcccattccaggctcttaaggggaaactgcaggatgggccctccgttacctggagttaagtgcaaagaaccatctctcacggggcagtactggctcaagcgagacccagtcagacaaagctcaagaccttttcacaacgcttgtgagatggggcagggcagggggtcctaactttaccccccgtttcgccccccagcagggcaaggattcccctttctcacgatgattcaatcacatccaaccagagtcttagctgaggccctgccaggtgccagggcctggtcccattcctgggagcagagatgaagaccagcttcctacaagcctcctatgatgccttcctacgagcctcccctatgatgatgcaatggcacagggcctcctgtcactcagtaaaggccgaaggaataaacattagcaggaataagagacaagctctgaatccaggaagacttctcggcagaggcaggatctggactgcagcttggagaaagggtggatctttgatagataaaagtgaacagctaggggaggaaagacttcaacaaaggacagaggcgggggaccaggggtgcggtggggcaccccaggggctggtgtggatgaagcagaggactgttggggcccagaggagggacaccagaggacaagccctcaggcagccccacgagcctgttttgccccccgccagagagctgaggctggcacacaggggtgggagaagttcctttgtccttctcctctttctctgcaaccctgcccaggaaaccaatgatagctgcttggcacagagttccctgtgttttttcataatcacataaccgtacttgagcactgccagaagaatttaatctcaggaagcagagaagcatgaggaaagaaggctggtgtgggagtcagaaggcctaggttttggtccttggctcagccaccgactttccctgtaaccctgatctggtcaccccaaatccccagccccagatatcattttcttcatctaacccaaggactggcatagagctggcatttaaaaatgtttgaagccaagtgcagtggctcaggcctgtaatcccaagctttggggaggctgaggcaggaggatctttggaggtcaggagtttgggaccagcctgggcaatatagtgagaccccatcaaaaattgctctaattagccaggtgtagtggcatgcacctgtaatcccagctactcaggaggctgaggtgggaggactacttgagcccaggagttggtggctgcagtgagctacgatcgtgctactgcactccagcctcggtgacagagttgagaccctgt

SEQ ID NO: 7320 - DNA, 2300 bp, Homo sapien
aattatttacattcttcaaagaataactcagaaatgtttagttaatttgctcacaaattatttactcacatatgatggagtcagttggtaaactgagtaaaataacaaaggcaaaaacagaattgataaagagagggaagaaagggagaggaaaaatactacagacgacctgggaacagggtaaactatctgttggtagctgaccgtggatgtacaaatctcttcaagattgaactgccttattttacaggtaacagcaaccttgactcacagagtaaagtgactttgtctaaagcagtttctcaacagcagcaattctggtatctggggccgggtaattccttgctgtggggactgtcttatgcactagatggcgttcagcagcatccctggcctttacccaccaaataccactaaccccttctcccaaacccaaatgaattcacacactgccaaatgtggggggcggaggtgggataaaacctcctctgcatgagaaccacttctctcaagaaacgtccagtaccagggtaggtgaccaaggattctgtcgcccaagagatgacagaaggctctagataaacgcacactccgttgccattcacaaggcgttttgtttttacttctcaaaagcggcagagattttttttttgagacggagttttttgctttttgtggcccaggctggagtgcaatggcgcgatctcggcccactgcaacctctgcctcccgggttcaagcgattctcctgtctcagcctcccgagtcgctgggattacaggtgcaagccaccacgcccggctaatttttttttgtattttagtagagacagggttccactgtgttgcccaggctggtctcgaactcctgagctcaggcaatccacccgcctcggcctcccaaagtgctaggattgcaggcgtgagccaccgcgcccggccagagattcttttttttttttttttttttttttgagacggagtctcgctctgtcgcccaggctggagtgcagtggcgggatctcgccggccagagattctttataggacatattagtccttgtctttccccccccgcctccatattggaaagatgaactaattgaaatatgacttagtaaaaacattgtgccaacttgaaaccttgatttagtaaaacatctcaatgtttagatcctttgtccaatggtagtatttatcagatgtattcagcttgctcagaaaaccaaaagggcattacaaccacaaaagcaaagaaaaataagaaaacgtcccatgtttggatcttgttctacttgtaaagattaaattgaaatgattaggcttttcgattcatgagccaaataccgtaacaccctggcctttgatgggtttggatttttaacattactcctgagatttcaggaagtggggttacagttacactccttatagctgctaagtgtattaagttgaatgtaaggatgcataatattgtttgaattgagccccactaccaattctttaaaaaatggcatgaattcctatacgtaaatgatttggtggaactattccatcataatttctaaattgtttatataccaaggtagccttaatttgtatatgtttcagtacaatgaaattttactccctctgggatgctgtttggtttgtattttgaggaatgtttttctcatgggaagaggaacctatgacttctgtacctagataatttgttacattaaaaagctggtctttcagcaatgtaagtatatacatacatgtttttatgaggaaaaaaaagcagcagagatcagaagactgccaccgtgcttggagaagaaagaaagccgcgcgtggccttcgcagtgctcgccgggactcgtagttccaggtctgcgggctcctcccaggcggggatctacttcctctctcggccgcggccgcagcacccggaagctgagggggcttaaagtctttcgcttcctttccccgcctcttagtcccgcagattgctagtggatatggccaataggagggctgactggtacttcctgttatttgattggcttaaaattttgcaaccgcccggacaaacttgccgaggattggctgagccttcagttttgaaaatcatagttttcgcccgcgctgcgccgcctggttgctcctcccgtgcggtgagtcccgaaggcccggagccaagtgggtctgggcaagcggggccttacctagggataccaccggacttggatcggagcagccttcaggggacgtggcgcagtcgagtgagtgcgcgtgggcgtggggattggggggtgg

SEQ ID NO: 7321 - DNA, 2300 bp, Homo sapien
tccttgaatcaagcctgaggaagtcccatgagactgaaacctgacctggtgctacgccctgtgagggatcaaggggtcagcaatttatcccttccttacaagaccttccattgtaggtgggaggctgagttgtgcatggtttttttttttttgagatagagtctccctctgttgcctgggctggagtgcagtggtgtgatcttggctcattgcagcctctgcctcctaggttcaagcgattctcctgcgtcagcctcctgagtagctgggattataggcgtgcaccaccacacacagctaatttttttgtatctttagtagagactgggtttcaccacgttggccaggctggtcttgaactcctgacctcgtgatctgcccacttcggccttctaaagtgctgggattacaggcgtgagccaccgtgcccggccagttcttggttttaaagaggtaagtcaggatggtggatcactgccattgacttgaggcatgcagtttgttgttatggcttatgaccaccacccattcatttgttctttcactcattcacctgttgggatatttaatgagcccctgttgtgatgtagtagaatatggttgtctcttggaatcctcaggggattggttccaggacctcctttggataccaaaatccacagatgttcaagtccctgatataaaatgacatagtatttgcatataacctacacacatcctcctgtatactttatatctctatattatttataacacctaatatgatgtaaaagctatgcaagtagttgttatactgtattattagggaataatgacaagggaaaagagtctatacatgttcagtacagatgcagctctttttcaaatattttccactggtggttgattgcatccatggatgtggaactcacagatatggagggctgattgtacttcttccttgcttgaagtttttgtaatggctatcaagttttttgttttgtttttttttttttgagacagtctcgctgcgatgcccaggctggggtgcaatggtgtgatcttggctcactgcaacctccacttccttagttcaagtgattctccaggctcagcctcccaagtagctgggattacaggcgcacaccaccatgaccagctaattgtatttctagtagagttggggtttcaccacattggccaggctggttttgaactcctgacctcatgtgatctacctgcctcggcctcccaaagtgctgggattacgggtgtgaaccactgcacccggctggttatcaagttttaaggaggatacctgagctgctagttttataagaaagtgagaaaaaactgtttttgtgttttctcttgctcaatgcttgtaggcaagttttcttaaaagcaagatattgcttactgttcccttcttgttctatttatgctccatttggagggcatttcagctcaagggagagggttgtgggaggccccttgagggcatatctctggatcactactttctcactcattcctttggaacacagaatctcttctgctcactggcctcttaaagaggcagttgggtttgatgttctttggcctgatgtctggagtcagcttgtatgtagtgcagggtggctgtgtcttagccctcacttaaccatgagtagtaagatgagggcctactggagagcgagagcaggactgtgtttgggcagggagtgaggggccctggggtggccaggaagacagatggcagtgccctgtcatcttaagcccagaaaaggccatttataaggaggactgtcaatgtcagaattggttgggaactgtggacttatggggacagtcatgctggcgggggggtggggacagggaggtatttgaagagtgtgagtagaagggcttctctttgtagagatgaggctaggggatgagtgtttggaattctgcagctctggggagtggctgtgagcagagaggggccctggttcgggcactgggtgtttgtggtggttgtgggtcaggtgggtattgcagcttggagaaagccccagacccctaccctgggcccctaacttgtgcctcttgtccctgccttcaccagacagagccaccatggggacgacggccccagggcccattcacctgctggagctatgtgaccagaagctcatggagtttctctgcaacatggataataaggacttggtgtggcttgaggaaatccaagaggaggccgagcgcatgttcaccaggtgaagacgggcacagtgagaggctgggaacaccagggcctgtctgggctgctttggtct

SEQ ID NO: 7322 - DNA, 2300 bp, Homo sapien
tggcccatgaattgtagttctgaaaatcagtgatttttttttttgaggggttggctgtgctttaaactaggaactggtaatgatccatgaaatgtatgacaggtgggacaaggtaatagtagtcaacatttattgagcgtttactacatgtcagaccttgttaatttttttttcttttttgagatggagttttgctcttgttgcccaggctggagtgcagtggtgccatctcagctcaccacaactctgcctcccttgttcaagagattctcctgcctcagtctcctgagtagctgggactataggcacatgccaccacacccagctaattttttgtatttttagtagagacggggtttcaccatgttggccagactggtctcaacctcctgacctcaggtgatccacccgcctcggcctcccaaagtgctgggattataagtgtgagccactgcgcctggccagacctggtaaattttacacacacacacacacacacacactcatttgaacatctatcaacccaatgatgtaggcaccatttttaacctacttttacaaacgagaaaactgtgtttacataaactaattttcagagggttcaatagcccatagacatggatctgaaccctcctagccatgggctttgccactggaccttccactccttagggttggaggcagaggtggcatcaggggcttccccaccattttgggtgatggaagtgagaggcattgtcgccctcagctgggactcagccagacctgccaaggtgtctctgatgacacagaccataaggtccgcttccttcataaaggtctttctgggtggttctcagtactgctgcccatcagacccaccagagcagtttaaacagaagaggacctcgccctagaactactgaatcaaaatccccagaaagggaagcagcctgcggggagtcagtatagtttaagagccccaagtgatttgattgcagagcagagaatggaaagctctggcctgggctgtgactgttctcaaatgtgtgttcacttaagagccaaatttctggtgatttcctactcaccaaatgatggcactgcagtggaagggcagaagggtgtctattgcttttgctggggatggccttcgctttccatcaacaatgagatgacccaggcagcagagctgggttagaagtggaaaacttgagcccagaggttagagggaagtgaccacccaccctgttcatccatctcttcctttccattatcgtccctgcctagaagcgaagaccagtatttctgatgcctgtttgcctccagacaccccagcagctccttgggtaaaaaaagttgggcaatttaatcatcccatcagccctatgaggagatatgggtggctagaggtcactggaggcttgcttttagtagacagaaaatttgaacctgtgctatgttgacaactccacccataaataaagacacagatcttggagtgagacagagtagaggacagggggagtggttgttttccccaaggaaatcctccaaaggtggggtgtatgcagctatgttttaggtacctatgtggtgaagatggtggggatggaaggggctgagtgggaggataggtctggttcagacttgatctatgtgcagctgaaacacgtgtggctgattgtcagacatgcagtggaggtcaaagtggggtctcttctgtgcctgctctcctataaccaaaccacagcccctagcttcctgcacccccggtttctgtcctcctgaaatgagaactcacatttgcccttgcactgacataaagaacagagagataatcctcaaaagcccaaaagcaaactgaggttccagggaacattgccagaggcacctggacactcacctggagcacagagcagagtttctgcagggctgccctcccgtgctccgccccactcaggatgcagggaggtgtggggatgtgacactgatggatggcagcagccctggctaggaagggagggctggaagccaggcctcatcacctgccagatgcccatgtgggcaggaccagccaggctccctaggtacaaatagccctgggctccacggctccacaggctcccggggctgagtctaaatcactcatcattggttaaagccgagctcacagcagaataagccaccatgaggctgtcggtgtgtctcctgctgctcacgctggccctttgctgctaccggggtgagtacatcagtcatgagtccagcaccagcccttgggacacacccttctctgagcacgaggtcacctattaagg

SEQ ID NO: 7323 - DNA, 2300 bp, Homo sapien
ctataactgaatctagtgcaaggcccagctcacaggagaagcaaaacagtgatgcgtacaacaagggatccacgcatgaatgcaactgccatttattcagaattatctcatgcttggctgcgtgattaaaaatttacagagcgtcggccgggagcggtggctcaaacctataatcccagcactttgggaggccaaggtgggtggatcacgaggtcaggagtttgagaccagcctggccaacatggtgaaacccccatctctactaaaaatacaaaataaataaataaataaataaataaataaataaataaataaataaaaattagctgggcgtggtggtgcacacctgtaatcccagctactcaggagactgaggcaggataatcgcttgaacccgggaaggctgaggttgcagtgagttgagatcacgccactgcactccagcctgggcaataagagtgagactccatctcaaaaaaaaaaatttacagagtatctctcatctttacaaaaattcacggccaggcgggcacggtggctcacacctgtaatctcagcactttgggaggccgaggtgggtggatcacctgaggtcaggagttcgagaccagcctggccaacatggagaaactccgtctctactaaaaatacgaaaattagccgggcctcgtgccacatgcctgtaatcccagctactcagaaggttgaggcaggagaatcgcttgaactcgggaggcggaggttgcagtgagccaagatcgtgccactgaactccagcctgggcaacagggcaagactctgtctcgaaaaaaaaaaaaattcagcatcacttatacccgtttcacaaagacagaaaggaagcccagagggaccagcattgtaatttgcccaaagacacagcatgagtacgtgtggcctccaggatccacacccacacctgcccaaatcttatcacctaaatctcatcatcacccaaccccattgccacccactgcctagcactgcctgcccaagcagtcagttactccactcactcacagcatcctctcagtcagtggatagaaaaccgtaaaaggctaacaaagaactaagcacaaattaaattataaatatattgtaaaataaatttgtaaagttgaattaacttagtgttgtaattcttaacaagaataacaagaagctttcagtagaggttagatattaatgttttccccaaaacttaaagcacttttcggggctgggcatggtggctcacgcctgtaatcccagcactttgggaggctgagtgaggtggatctcctgaggtcagaagttcgagaccagcctggccaaaatggtgaaaccctgtctctactaaaaatacaaaaattagccaggtgtcctggcgcatgcctgtaatcccagctacccaggaggctgaggcaggagaatttctggaacccgggaggcggaggctgcagtgagccaagatcgcaccactgcactccagcctgggcaatagagtgagactctgtctcaaaacaacaacaacaacagcaacaaaaccccaaaaaacaaaaacaaaaaaacccgcttttctgaaaaagaaatgtctatggattaggaaggtctgcctcccataggaagatgcaggtattgcacatagcccaaatatttgatgattccaggaccggcagatacacaagttatgaaactgtttgtaccttgaagaataacgagaagaggaggagaccaagaggaatagaagaaaaagaatagaaggaggaggaggaagaagggaaggaggactagaagaaaactacaataataacaacattgttgagaccacaagatcacgccactgggttttgctttatattttggaaaacactgtcacatccattttactaaaagccatgtatcattattgtagtccccagattgtcagggatccaaatattactgccttcttggtttctacaaacagagcacaggctggctgtgttcccattggtgtacactattgtgtcctggtcccatgccaggttgacacattgcctcattcctgggagggactaaggtgcctccctggggaataaatagagcagggctgggtactcacctccacagcaacttccttgatccctgccacgcacgactgaacacagacagcagccgcctcgccatgaagctgctgatggtcctcatgctggcggccctcctcctgcactgctatgcaggtgagttctgggcagagagggctgcttctgggctaggaattgtcacctgggcccctgtagaagaactcccaacctctaatc

SEQ ID NO: 7324 - DNA, 2300 bp, Homo sapien
ctgacggtagtttgtatttctatgggatcggtggtgatatcccctttatcattttttattgtatctatttgattcttctctctttttttctttattagtcttgctagtggtctatcaattttgttgctcttttcaaaaaaccagctcctggattcgttgattttttgaagggttttttgtgtctctatctccttcagttctgctctgatcttagttattcaatgccttctgctagcttttgaatatgtttgctcttgcttctctagttcttttaattgtgatgttagggtgtcaattttagatttttcctgctttctcttgtgggcattaaacttatccaccatgatcaattgggcttcatccctgggatgcaaggttggttcaacatacgtaaatcaataaatgtaatccagcatataaacagaaccaatgaaaaaatcacatgattatgtaaactagttcaaccattgtggaagtcagtgtggcgattcctcagggaccttgaactagaaataccatttgacccagcgatcccattactgggtatatacccaaaggattataaatcatgctgctataaagacgcatgcacacgtatgtttattgcagcactattcacaatagcaaagtcttggaaccaacccaaatgtccaacaatgatagactggattaaaaaaatgtggcacatatacaccacggaatactatgcagccataaaaaatgatgagttcatgtcctttgtagggacatggatgaagctggaaaccatcattctcagcaaactatcgcaaggacaaaaaaacaaacaccgcgtgttctcactcataggtgggaattgaacaatgagaacacatggacacaggaaggggaacagcacacaccagggactgttgtggggtggggggaggggggagggatagcattaggagatatacctaatgttaaatgatgagttaattggtgcagcacaccaacatggcacatgtatacatatgtagctaacctgcacgttgtgcacacgtaccctaaaacttaaagtataataacaaaaaagagagagaaatttctagtgattgatttcctgctcacaccacacaaaggcatcacagcaggagggcaggagggtgtgtattgctttgtctgggtgcttccttccctttctattaaaaatgggattggctcaggctgcacagctagatttgaagtggaaaacttgagcctagaggttggggggaagtgaccactcaccctgatcatctgtctcttcttttccatcttcttcccctcctggagccccagagcaaagaactctcagtacctgtccgatgcatgattggctctggacactccaaaagctacttggaaaaagttaggctatgtaatcatcaggtcaacccatcaacatgtgggtggctacacatcacagaaagcttgctcctcgtagagagaaaatgtgagtcttggccatatttatagctgcactcataaacaagactcaggtttgggagtgagacaggctagagaacaggtgcagcagttgcttttccccaggaaatcctccaaaggtaagatgcattgaactaggttttaggtacctatgcagtgaacatggtggtgatgggaggggctgaggggaataggtcttgtttagacttgctcaatgtgcaactgaaacaagcctactggttgtcagacatgcagggggatcaaagcagggtttccttatgtccctgctcccccataaccagaacacagccttccagcttcctgtgccttccaaagtcagaatttacctgtgcccttgaactgatacaaagaaaaaaaataatcagcaaaactcagaaggaaacagaatcccaggaatatttccagaggtgcctgaacattcacctggaacacagagcagagttcctgcagggctaccctcctgtgctctgccccagtcagagtgcagggaggcgtggggaggtgacacagatggatggcaacagccctgggaaggagaggtgggctgggagccaggcctcatgaccagtaccagctagactccctaggtacaaatagccctgggctctgcagctccacaggctcctggggtggagtccaaatcactcattgtttgtgaaagctgagctcacagcaaaacaagccaccatgaagctgtcggtgtgtctcctgctggtcacgctggccctctgctgctaccagggtgagtacatcagtcatgagtctagctccagcccctgggaagcaccctcttccaagcacgaggtcacctattcaggctggggttaggatct

SEQ ID NO: 7325 - DNA, 2300 bp, Homo sapien
taagtacagaaaccttcttttctagcctcttcctaaatcaattttgttctcaactggaaaatatctgaggctccagctgaatgatggaaagaaagacgtcatgggtaatccggacagcaaataatgcatccacgggaagtgaagaaccgactcatctctttggctctctcatccgtatcttctttttttcttttgagatggggtctcactctgtcacccagactggagtgcagtggcgtgatcttggctcactgcaaccttcgcctgcgaggttcaagtggttctcttgcctcagcctcccgagtacctgggactacaggcatgcaccaccacgcccatctaattttttgtattttgaatcgagatggggtttcatcatgttagcaagcatggtctcaatctcctgacttcatgatctgcctaccttggcctcccaaagtgctgggattacaggcatgagccatcacgcccggcctcttttataaaaaacccaagccagctttgtatttcttgttcccatgaccttcaccatgcccctaattaaacgagggtgggttttctgtcacatgaggctgtcctgtcctcctgatcccatgtggccatgttccttgccttccttacctggccaagtgccatctgccctctggtctctgatcttgtcattccctctgcatggaactgcatcttccctggatctgtcactagacagtgtcgtccactcatccaaatgtcagctgaaatggcatggcctcctcctctcagtagtcagtccatgacatcattttgctgttgtggatattttgagttctttgcagtgattactactttctcatatctctcttatgtggcaggatgcttgttacctcccttattggaaagtcagctccatgagagcaagggcttggtctaaattgtgcctataactgaatttatggtgtgcagctcactgccagctcataggggatgctcagtagttatttaaagatggatggctgcatgcatggatgaaatcttgtctttatacatgactactttgtactgggctgtgtgaaacaattttttttttgagacagagtttcactcttgttgcccaggctggagtgcaatggtgtgatctcggcccactgcaacctccacctcctgggttcaagcaattctcctgcctcagcctcctgagtagcttggactacaggcacgtaccaccatgcccagctaattttgtatttttagtagagaaggggtttctccatgttggtcaagctggtctcaaactcctgacctcaggtgattcacccacctcagcctcccaaagtgctgggattacaggcatgagccattgcgaccggccatgaaacaatctttacatgaagcatccttatacaaattctgcatgctatcccattccgccttttattttcttcaagtgatgaaaaggaaggatgctcagagagaccagcaaggacatggcaggactgcaagttgcatccagggtccaaaccctcatccctgattccaaattccatcaccacccaccacccagcactgcctgtccagcccatcagttacgctactaattcacagcatcctttgaatcagtggaaagaaaaccctaaaaagttaccaaagaactaaacaaagttatcaattaatttataattaaccgagataatccttgtaaaaataactttcagcggagggtggatggccttaaatttccccacaaaaggtaaaactttcccagacatccctttctgaaaatgagatgtcagtggatgagaaaagcctgctcccaagagtaggtgtgaggtattgcacctaggcccactgctgggataagctggcacagatacacgggacatgatgctttcattctcaccttaaagaaagagacagagaagaaaaggaaggggagcaagtggagaaggaatacaagaaagaggaagagaagcaggaagattctacatacaggctggctgtgtttcccctggggcatgctcctgtttactggtcccatgccaggttgactcattgcctcgttcatgggtggaattaagatgcctacctggggaataaatagagcaaggctgggtgctcacctccacagcggcttccttgatccttgccacccgcgactgaacaccgacagcagcagcctcaccatgaagttgctgatggtcctcatgctggcggccctctcccagcactgctacgcaggtgagttctgtgcagggagggctgcctcggggttaggggttgtcacttgggcctctatggaagaactcctgctccccaattctcag

SEQ ID NO: 7326 - DNA, 2300 bp, Homo sapien
taaaatcttgagtcaattgtgtaaaaaggagggagccataaaaagcatcaatgatgaaaacaaaaaaaccctgcataggtgttaatcgtggtaggactaataaaagtatacgcaaacaatcctctgtcagagatacacatgctccccaatggactgtacagatgacaaggtgaatgtcaagcctgagtgaggataaactctcatccacaaaaagggtggatgcttcacagacctgtctactgcaaaagaggcctcagtcctgaagcccatattcatgggtttgcagcctccaagaccatgagctgggtttccttttccatttatgtcaaagagaaatggtgtatctaggtgtccgtgtagttctgcaagtaggtgatttagtggattttggctgtgctctaaactaggaactactggcaaaccatgacatatatgacaaatgggacaagataatggcagtttacattgagaactactatgtaccagaacttggtatattttaaacacacacacacccatgaacacactcatttgatcatctatcaacccaatgatgtaggcaccattagtagcctactttgacaaatgagaaaactggggttacataaactgaataattttcctaaggtccaggagcccataaatgaggatctgaaccctcatagctgtaaacctcaccaccaaccctccccctccttggtggcagcagggctgattcagggactccgtcgtcatcctgtgtgatgaaagtgagatccactgttgccctcagcttggactcaactaaatctgtcaatgtgtctttgatgacaaaacccgtaaggtccccttccttcttaaaggttttcctggctggatctcagccctgctgtctgtgagaaacaccagagcagtttaaacagtacagaaaggagggattcaccccaatgctactgaatcaaaatcgccagagagagaagcctgtggggtcagtatgttttaaaagctccaagtgatttgactacatagctgagaatggaaagctatggcctgggctgtgactcctctcaaatgtaagtttatttaagagaaaaatttctggtgattaaactcacaccacatgaaggcacggcaatgggagggaaggcgggtgtgtattgctttgtctgggggcttccttcactttcccttaaaaatgggattggcccaggcagcacagataggtttgaagtggaaaacttgagcctaggggttagggggaagtgaccacccaccctgttcctctgtctcttcccttctattatcttcccagcctagagccccactgatgtatgattggctctgaacactccaaaagctcttgagaaaaagagttaggttatttaatcttcagatcagccctaagataagacgtgggtggctacacatcacagaaagcttgctttttatagatagaaaatgtgaatcttggccatatatataactgcacgtataaacaagattcaggtttgggagtgaggcaggctagagaacaggtgcagcagatgtttttcctcagcatatcttctacaggtgggatgtattcaactatgttttcagtacctatgcagtgaacatggtggtgatggaaggggctgaggggaaggattagactttcccaatgtgcaactgaaacaagcctgcttgttgtcagacatgcagggggatcaaagcagggtctccttatgtccctgctctcccataaagagaacacagccttccagcttcctgtgccttgtgaagccataattcacctgtgcccctgcactgctacaaagataaaaagaactaatcagcaaaagctcataaggaaattgaggatcccaggaacatttccagatgtacctgaacactcacctggagcacagagcagagttctcacaaggctgctgtcttgtgctccgccccactcagatgcagagattcctaaggaggtgacattgatggacggcagcagccctggcttggaagggcgggctgggagccaggcctcatgacctaccaggtgccccggtaggtaggaccagccaggctccctaggtacaaatagccctggcctccatgactacacaggctcctggagtcgaatccaaatcactcattgtgaaagctgagctcacagccgaataagccaccatgaggctgtcagtgtgtctcctgatggtctcgctggccctttgctgctaccagggtgagtacatcagtcatgagtccagcaccagcccctgggatgcaccctcttctgagcacaagatcacctatttgtgctttgggttggggtc

SEQ ID NO: 7327 - DNA, 2300 bp, Homo sapien
tggccaataaaagtccacttggaggacttctaggaaagctagagagctttcctgaattaaaggaacaaaggggagctggcaaaagccttcttccctttgcccttccccattccttctgccccaatagtgatcaaggtgcctaggagcaccataaatgtgaaagccacatgctgaagggaagagaaggagatgggacatctgtgtcaccttggagctgctgcaccagcctgggcagcaaccactagatgtcttgttgttgttgttgttgttgttgttgttattgttgttttcaaatcaacagttatctggttaaaccactgtggtcacgtttcgtcagggacagttgaatacaatccttaatccataaaatgattgttgatggaacatcgtctacagaggagttagccagattccttctcctatcccacagagccggacaaaaagatgcttcctctttcctcctcaaagaccagaagtttattttctagagaatttatctaagagactttggattgggatggggaatacgaagcccatcagagaagtagataaacgcatgaggctgagatgggaggatcaaatggaaaccaacattctacctgcttgggccaccagccaccttccccagcctcagccagatcactgaattccagatcaatcaggaaaaacagtagagatggggtttgagttagggctaggcatagggtagggttcaggttcctataaatagctgaaaccaaatgatggtgagctgtattatgatgacacaactaggctcacgaccagttgagacgtgctaaaataaccctcttccaagaggtgagtgtgggagacagaataacggccctcaaaggtgtcacatccgaatctccacctgtgaacactcctcacatggcaaaagggactttgcagatgagaatagaaattgtaagaaagggagattatcctgggttatctgggtgggcccaatgtcatcccaagggacttcctttaagaaggaggcaggagagtcagagtcagaaaagaaaatcgtgatgatggtgacagagagagaagtgacgtagcagcagaaacaggccagagggagagagagttaaagatgctaggctgttggctttggcaatggaggatgaggccatgagccaaggatacaggcagcttgtagaagcaagaaaagacagattctcttctggagcttcccgaaggaactcaaccctgcagacccagtttgaatttctgaccaccagaactgtaagataatgtgtgttgtttgaagccaataaatttgtggtaatctctaacaataggtcactagaaagggaatgactgatccttagtggggtgccagggagaaggctttgcaggaggggttcatttaaactgggccttaaggcaggaaacgaaggtaaaacaggagtaaagggaattcccaagagtggtaaaatatgttatcagttgtgggtaaacaagaagggaaaggactctcctatccacaggagatcaatcacagtttgcctggatctgtccctgtttatgcccattgtcccagtataatttttttttcttttgattcggagtttcactcttgttgcccaggctggagtgcaatggcgcgatttccactcaccgcaacctccgcctcccaggttcaaacgattctcgtgccttagcctccagagtagctgggattacaggcatgcgccaccacgcccagctaattttgtgtttttagtagggacagggtttctccgtgttggtcaggctggtctcgaactcccgacctcaggtgatccgtccgcctcggcctctcaaagtgctgggattacaaggcatgagccactgcgcacagcctagcgttgcttttcaatctgcaattacaaaatcgtggcatgccacttcacgcttctcgccaccaacccaaccacccagcccctagcctggtcaggagcaggaggttccccgcgtgccaccaggaagctcgggccggccaagagcgtagactcttgagaggagtgagacaggtgcgcgccagccggccttcggggctttatgggaactgggccgtgcggcggtcccgccctcgtgcgcaggcgcagaaccgttgtgaccagagcggttgcgggctgagcggtttcgagccggcgtcggggagcggcggtaccgggcggctgcggggctggctcgacccagcttgaggtctcggcgtccgcgtcctgcggtgccctgggtaagtcggcggccctcccggagcagccgcccgagacgcgggagggcgaatgaaataaacgaaaatagacatt

SEQ ID NO: 7328 - DNA, 2300 bp, Homo sapien
gagaaatatagagaaagggtgctagtggtaaaaacaacagcatgtgcaaaggcacagagacacgtgggctcctagtatacagtagccctccgttatctatgggggatgtgtttcaaacccccagtgagtgcctgaaaccaccaatggtactcaaccttatatcggctggtttttttttcatacatacatatgataaagtttaatatattaattagccgcagtaagaaattaataacaataactgataataaaagagaacaattataacagtatgccagcatcactactcttgtgcttcgagaccattattaagtaaaataagggtttcttgaacacaagcactgagaggtgctactgcagctgatctgcttggtattcgagacggctgctaagtgactaacaggcaggtaacctatacagtgtggatatgctggagaaagggaggaatcacgtccctctgaaggacagagtgggatgatgctagaagtgtttatttctggaattttccatttaataatttggggccatggttgactgaggataactgaaacctcagaagcaaggctgtggataaggggactactatcttcagggaaaccttatttcagtaaaatatagccaaggaaagaaaatgaagctggaaaagcaggtcaaaggccaggttaggaagggctttgtacttttttattttgtaggtcatggagtgccaagtcagatttcttttatttttttttttgaaacggagtctcactctgtcacccttggctcatggcaacctccgcctcccgggttcaagtgattctcctgcctcagcctcccaagtagctgggattacaggcacgcaccaccacgcctggctagtttttatatttttagtagagacagggtttcaccatgttggccaagctggtctcaaacttctgacctcgagtgatccgcctcggcctcccaaagtgctgggattacaggcgtgagccaccacacacagcctccaagtcaagatttctctcttttttttttgagatgaagtctcgctctgtcgcccaggctggagtgcagtggtgcaatctcggctcacggcaacctccgcctcccaagttcaagcaattttcctgcctcagcctcccgagtagctgtgactacaggtgcgggccaccatgcctggctaattttttggatttttagtagagacggggtttcacatgttagccaggatgatctcgatctcctgacctcatgatctgcccgcctcggcctcccaaagtgctggaattacaggcataagccgctgtgcccggccaagatttctctcttgaaaaaaaatgttcctctggcaatggaatagaggatggattaaagggggcaaattagaggaaaatctggagccatttctaaattctttttttttttttttttcattgatcattcttgggtgtttctcgcagagggggatttggcagggtcataggacaatagtggagggaaggtcagcagataaacaagtgaacaaaggtctctggttttcctaggcagaggaccctgcggccttccgcagtgtttgtgtccctgggtacttgagattagggagtggtgatgactcttaacgagcatgctgccttcgagcatttgtttaacaaagcacatcttgcaccgcccttaatccattcaaccctgagtggacacagcacatgtttcagagagcacagggttgggggtaaggtcacagatcaacaggatcccaaggcagaagaatttttcttagtacagaacaagatgaaaagtctcccatgtctacttccttctacacagacacggcaaccatccgacttctcaatcttttccccacctttcccccctttctattccacaaaaccgccattgtcatcatggcccgttctcaatgagctgttgggtacacctcccagacagggtggtggcggggcagaggggctcctcacttcccagtaggggcagccgggcagaggcgcccctcacctcccggatggggcggctggccgggcggggggctgacccccccacctccctcccggacggggcgtaaattcttaattcttgcttttcaacttctttttggttttaggttgtgggtctgtcttgaacacaaatggtgaggttgaaatggatgctagtatcatggatggaaaagacctgtctgcaggagcagtgtccgcagtccagtgtatagcaaatcccattaaacttgctcggcttgtcatggaaaaggtatatgtgactaaagcagccttttcctaatgaattgttattgttatactgcagtg

SEQ ID NO: 7329 - DNA, 2300 bp, Homo sapien
gttaggaagggctttgtacttttttattttgtaggtcatggagtgccaagtcagatttcttttatttttttttttgaaacggagtctcactctgtcacccttggctcatggcaacctccgcctcccgggttcaagtgattctcctgcctcagcctcccaagtagctgggattacaggcacgcaccaccacgcctggctagtttttatatttttagtagagacagggtttcaccatgttggccaagctggtctcaaacttctgacctcgagtgatccgcctcggcctcccaaagtgctgggattacaggcgtgagccaccacacacagcctccaagtcaagatttctctcttttttttttgagatgaagtctcgctctgtcgcccaggctggagtgcagtggtgcaatctcggctcacggcaacctccgcctcccaagttcaagcaattttcctgcctcagcctcccgagtagctgtgactacaggtgcgggccaccatgcctggctaattttttggatttttagtagagacggggtttcacatgttagccaggatgatctcgatctcctgacctcatgatctgcccgcctcggcctcccaaagtgctggaattacaggcataagccgctgtgcccggccaagatttctctcttgaaaaaaaatgttcctctggcaatggaatagaggatggattaaagggggcaaattagaggaaaatctggagccatttctaaattctttttttttttttttttcattgatcattcttgggtgtttctcgcagagggggatttggcagggtcataggacaatagtggagggaaggtcagcagataaacaagtgaacaaaggtctctggttttcctaggcagaggaccctgcggccttccgcagtgtttgtgtccctgggtacttgagattagggagtggtgatgactcttaacgagcatgctgccttcgagcatttgtttaacaaagcacatcttgcaccgcccttaatccattcaaccctgagtggacacagcacatgtttcagagagcacagggttgggggtaaggtcacagatcaacaggatcccaaggcagaagaatttttcttagtacagaacaagatgaaaagtctcccatgtctacttccttctacacagacacggcaaccatccgacttctcaatcttttccccacctttcccccctttctattccacaaaaccgccattgtcatcatggcccgttctcaatgagctgttgggtacacctcccagacagggtggtggcggggcagaggggctcctcacttcccagtaggggcagccgggcagaggcgcccctcacctcccggatggggcggctggccgggcggggggctgacccccccacctccctcccggacggggcgtaaattcttaattcttgcttttcaacttctttttggttttaggttgtgggtctgtcttgaacacaaatggtgaggttgaaatggatgctagtatcatggatggaaaagacctgtctgcaggagcagtgtccgcagtccagtgtatagcaaatcccattaaacttgctcggcttgtcatggaaaaggtatatgtgactaaagcagccttttcctaatgaattgttattgttatactgcagtgataagggctccaactgtgcagaaatacttgagatcactgttctcctaaaaatatatacaaaacagatgcaatgtatttgagtttctcaaatcagccatgatttttgactaggaatcacttgaccagtgaatgattactttatcttcctgtattttcttcacaccacatacaaactgaccagaccagctatttaatagcatgtgttaaagatggattgagttctctaaatttaacgtatatgtaaatcgcatctctagtaatgtcccatcaattggggtcttttcttttttaatacaaaaactcagtcaggcttttttcagcatacagaaaagcaaaccactggaatttgtatttttgatcctttgcacccagagagaagtaattatttcaacacagttggaacagttaaaaagatttaaaattttcaaaaaaacaatcattttctcttttctttctggctcagacacctcattgctttctgactgaccaaggcgcagcgcagtttgcagcagctatgggggttccagagattcctggagaaaaactggtgacagagagaaacaaaaagcgcctggaaaaagagaagcatgaaaaaggtgctcagaaaacagattgtcaaaagtaagtcttacctgtggctcgcattatttgggagttatta

SEQ ID NO: 7330 - DNA, 2300 bp, Homo sapien
cccatggggagagtcaccacccatcagaaccacctgtcggggaaggcttcactccctattttcacccccaaccctatttttcccaagtcttctctgtgtcaggaaataacaccccattcccccagctgcccaagtcagggtcagttcatcaggaaagggatatcagaccatgtcactccctgattaaaaccttcaagagcttcccactctgagtgtaaaggccttagaacgaggccttgtgtgctctggcccctgaatgccccctttgcaggcacagcaaccctttcgaagccctcaggcacaatggggtccttcttttttttttttttttctgagacggagttttgctcttgttgcccaggctggagtgcaatggcgtgatctcagctcaccgcaatctatgactcccagattcaagcaattctcctgcctcagcctcccaagtagctgggattacaggtgcccaccaccacatccagctaatttttgtatttttagtagagacggggtttcatcatgtcagccaggctggtctcaaactcctgaccttaggtgatccacctgcctcagcctcccaaagtcctgggattacaggcatgagccaccctgtctggccttttatttgtttatttatttttatttatttatttatttttgaggagttcttgaagtgccacgcaatgcctctccatgtctatctaccccagttcccgactcctagcaccacatctggcacatcataggtggtcagcatttattggatgaatgaatggatcaatatttgattgagtcttgaagtacgaatagaatttggcgaagtggacaaggcaggaaatgtgtattcaggcatgaggcttagcttgtgcataggtagaaaggcatgaaaaaacatggaacattctcgaatccacaaatagtaagagagggctaagtcgttgtgtgggggagaggagaaatgaagttcaaatggtaggcaaaggtcagtgggcaagggccttgtaaattgcacttgaattttattctttaggcaaaaggaagagtttaagggtttcaagaagaaggacacgaccagtgggttttaggaagatcattctgatggcctttcagaggatggctgaggagagctagcagggaggcagggaggtcgagtcaggggattttgaccaggccaggttaggtgctatgaggcccgggctttggagaagaaccaggaaatggcaactggaggcaagaaaggggagaaggccaaagcctgggaaccatcaacacttaagaacagtaaagaataaacatctaaagagaacaagaaggaatggccagaagaaggaaaacaggaaagaactgaggcgtgggagcgcaagagagagaatggttcgagaaggaagcagtcacaggtgtcaaggccattgggaggtcaagtgagataaggactgaaggtcccaccaattgggccatcaggagcacaggacttgagagcacttctgggtgggaacagacccagcctggggcagggctcaggtttctgatgggaattctggaagggtcccttttattcaacatgcttcaatccaggggcccccgaagtctgaccacagcaatgctccaaaccatgtgtctttcctggcttaaggttcagtcgccctcctcagaggggagcctatgaaagagcccagtggagtgtcagggtcctgagtcctagtcctagtcctgtccctgccacttgtgagggaacttgggcctcagtttctccaggtgggctccacaattgcttctcttgatctggactgccccagtgcccaggttcagtgagtgacacaggcagctgggtttccacatcctctgacttgggttcccttcactgcctccaggcagggctcggccctccacccccaagtggcccattgtgtgagctcagtttcagtggggacagaaactgggttgagaaaagggaatatttacctatcccaccaagccaatgccaagtaaatagtgcagtatcttatgtagagcccttgccctgcccttccccatctgggtgctgctgcctagagcatataaaaggcaccttgctgggcatgtctcatactagcccaccagactcagagacggaaccagagacgggccagagcatccccctcctccaccatgaaactcgctgtcaccctcaccctggtcacactggctctctgctgcagctccggtgagtgctcagagacccttccctccctcctggacttaggaactctcaggaccccccagttctgctcagaagaaggagtgagctgcccattcctgctctg

SEQ ID NO: 7331 - DNA, 2300 bp, Homo sapien
aaggggatgtggatgtgtctgtgcccaaggtagaaggtgaaatgaaagtgccagatgttgaaatcaaaggacccaaaatggacattgatgccccagatgtggaggttcaaggcccagactggcacctgaagatgcccaagatgaaaatgcccaagtttagcatgcctggcttcaaaggagagggccgagaagtggatgtgaacctgcccaaggctgacattgatgtctcaggacccaaggtggatgttgaagtcccagatgtgagccttgagggcccggaaggaaagctgaagggccccaagtttaagatgcctgagatgcacttcaaggcccccaagatctccatgcctgatgtggacctgaatcttaaggggccaaaattgaagggagatgtggatgtgtccttgcctgaggtagaaggtgaaatgaaagtgccagatgttgacattaaagggcccaaagttgacattagtgctccagatgtggatgttcatggcccagattggcacctgaagatgcccaaggtgaaaatgcccaagttcagcatgcccggcttcaaaggagagggccctgaagtggatgtgaagctgcccaaagctgacgttgatgtctcaggacccaaaatggatgctgaagttccagatgtgaatattgaaggtccagacgcaaaactaaaaggtcccaaattcaagatgccagaaatgagtataaagcctcagaagatatccataccagatgttggtttgcatttgaaaggtcctaaaatgaaaggagattatgatgtaacagttccaaaagtagaaggagagataaaagctcctgatgttgacatcaaaggccccaaagttgatattaatgcaccagatgtggaggttcatggcccagactggcacctgaagatgcccaaggtaaaaatgcccaagttcagcatgcctggctttaaaggagagggcccagaggtggatatgaacctgcccaaggctgaccttggtgtttcaggacccaaggtggacattgatgttccagatgtgaatcttgaagctccagaggggaaactaaaaggccctaagttcaagatgccaagcatgaatatacagacgcacaaaatctctatgcctgatgttggacttaatttgaaagcccctaaactgaaaactgatgtagatgtttcccttcccaaagtggaaggagacttgaagggtcctgaaattgatgtgaaagcccctaagatggatgtgaatgttggtgatattgatattgaaggtccagaagggaagttgaagggccccaagtttaagatgcctgagatgcatttcaaggcccccaagatctccatgcccgatgtggacttacacttgaaaggccccaaagtcaaaggggatatggatgtgtctgtgcccaaggtagaaggtgaaatgaaagtgccagatgttgacattaaagggcccaaagtggacattgatgccccagatgtggaggttcacgacccagattggcacctgaaaatgcccaagatgaaaatgcccaagttcagtatgcctggcttcaaagcagagggccctgaagtggatgtgaatctgccaaaggctgacattgatgtgtctggacccagtgtggacactgatgctcctgatttggatattgagggaccagaaggaaagttgaaaggctccaaatttaagatgcccaagttgaatataaaagctcccaaggtctccatgccagatgtggacttgaatttgaagggacccaaactgaagggagagatagatgcttctgtgccagaactggaaggtgatctcagagggccgcaagttgatgtcaaaggtccttttgtggaagcggaggtgcccgatgttgatctggagtgtcctgatgcaaagttgaaagggcccaagtttaagatgcctgagatgcacttcaaggcccccaagatctccatgcctgatgtggacttacacctgaaaggccccaaagtcaaaggggatgcggatgtgtcggtgccaaaattggagggagatttaacaggccccagtgtgggtgtggaggtgcctgatgttgagctggagtgtcctgatgcaaagttgaaaggccctaaatttaagatgccagacatgcacttcaaggcccccaagatctccatgcctgatgtggacttacacttgaaaggccccaaagtcaaaggggatgtggatgtgtcggtgccaaaattggagggagatttaacaggtcccagtgtgggtgtggaggtgcctgatgttgagctggagtgtcctgatgcaaagttgaaagggcccaag

SEQ ID NO: 7332 - DNA, 2300 bp, Homo sapien
gcgaagacacagcgtccacgcctttccgtgctcttcttccttttctgctctagcagccccccacgcccccttagccctttttgcagataccctgtgtttccaacctaggtgtgaatcaactcctgttttaatatgcactgggaacattcgctctttcaaggaacgagatgatgattcattccataaagttaaaaatcctttggtaaactgttaacaatggttacttttgggaagagggactgtgataggggaggagggagaagtctgtgttttattgtacttttttttttttgagatggagtctcgctctgtcacccaggctggactgcagtggcacgatcttggctcactgcaacctctgcctcccaagtttaagggattctcctgccttagcttcccgagcagctgggattacaggctgcgccaccatgccctgctaatttttgtatttttagtcgaggcggggtttcactatgttggccaggctggtctcgaactcctgagctcaagtgatccacctgccttggcttcccaaagtgctggaattacaggtgtgaggcatcgcgcctggccttggtaatttttttttaagtgttctatagctcaaaagttttagatttgttttttctttaaataaggtaggtgctaggaaaggggtgcagaacaaaatgggggagcaggtgattcttgggaaagtgtgagtctgtgactgtgtgcttgggatgtgttgtggcgaggctgcctctgccatggggttgagtcattatctgggcacctgtgtgtgtgtattagagagagcaagagaaaatgctggtgcccaagtctccgctttgtgttttcacatgtctctgcctgtctggatgtctgcacatgcggctccacctttctgtgtccattatatgagtgcccatgtctgtggttcctctggctgtctcttccctcccccacggcctgtactctgtgccggtaactggacctggacacagcccccagggctggcagcagagttgactgctgggtatttttagcctgtaaacatgtttgccatttcagaggacagggccgagctggtctcagctccagcccactcatgatcttgcagcaaggagggcgctcctgccttggccaggtctccttagttccccagcctggggtctctctttccttagcatttgggaaggaggggaaactggcttggagcgggcagtgggtggccacctaggagggaggataaaaggactcatgagggagaagagaaagggagtgtggaggggagtgtgtagccagaaggcccccgcaccccatcattaaacgtttaataaaatctcgatgtagttagaagtggctgtgggaaatcgctgtaaattaggagactcagcgtcccgcaagtggggaggcgggggcggcgctcagagaaggaatgggaggcagaggaagcgctggggctctggctcctgggggcgggagtctggagaggaaggtgggcgtcgggtccgctgtccaacgcccggggtcctcacccccgtatgcccgcggcctgcgcagcaccgcggtgcgcgaggcactggtgaccccggctcctggggggtggaaatccaagccagttctgtgcggatatggacggaggggcccccagaaagagagaacgcgagaaatgggcgcggcagcacggagcttgggaaccaagcaaggaggctggggcctgggatctgaagtgtagttgcctaagctgagagaaaactcaaaggtccggagcaagctgacggtcgcggctgaatcacccagccaccttcagagcccccaggcccttcctgcaaaataagttgattcgcagttccagctgtgagggtgagcccagggagcctgcaggagtttcttgccaatgaagccacacagtgcacatgttggagagcaggtccaggtccgggacaggacagggggcagtggatgcggggagggggggaaagaatgtccccgcgtcccccagcggcccccctccccagcagcccactcccgggtccctccagggtctgccccgctcgccagtcccagccccgctccggccccgcccggccccgccctctccccacagctccgggcagacccgcccgcccgagccggagttacaagagccgcctccgcgcacgggggcccggccactcggagctgctctgccgcggggactgcaccgcccgccctgccagacccgcccggaacggggctcgtcgccgccagtagccgcagcaccgcagccttgggcctcgcgccggctatggccgtgccctggggctgagccctca

SEQ ID NO: 7333 - DNA, 2300 bp, Homo sapien
aaacagaatgaaaaaaccacacagaaaatcataagctggggaccaaaggcagtcaaccgtttctgcatatgcctcaaaatgtgactcaatctagaggtttccagtttcacctgagctgttaaatttacaggaagatcttaaatgatcttcggaaaagacagaagagcaagaaaatctgaaaaggatattaataaaaattaagctcaaaggggaaaaaatagtaacctttggcctgagcaggatattagctgacaattacaactactctaccttctaggaggcagcagggtgtggacacaggcttcaaagtgacacccactgggcgtggtggctcacgcctgtaatccaaacactttgggaggccaaggtgggcaaatcatgaggtcaggagttcgagaccagcctggccaacatgataaaaccccgtctctactgaaaatacaaaaattagctgggcatggtgcacgtgcctgtaatcccagctactcaggaggctgaggcaggagaactgcttgaaccagaactcaggaggtggaggttgtggtgagccgagatcacaccattgcactccagcctgggcaacaagagtgaaactgtctcaaaaaaaaaaaaaaaagtcacacccaagtgaggcgtgatggcatgcacctataatcccacctactaagggggctgaggtgggaggatcacttgaggccaggacttcaaaactgtagcacgattggtggctcacgcctgtaatcccagcgctttgggaggccgaggtgggcggatcacgaggtcaggagatcgagaccacggtgaaaccccgtctctactaaaaatacaaaaaattagcctagcgcggtggcgggtgcctgtagtcccagctactcaggaggctgaggcaggaaaatggcgttaacccgggaggcggagcttgcagtggagccaagatcgcaccactgtactccatcctgggcgacagagcgagactcccgtctcaaagaaaaaaaaaaactatagcacgattgagcctttgtacagccagccactgcactccagccttagcaacatagcaagaaccccagctctcaaataaataaaatttaaaacattttcctgacccagttctaccaaaaaaattttaaattaaaaaaaaaaagtgacacccactgggttcaaaactctgcctctaccacttaaaatgtgtgatcacagtcaagttagtgaaatctgtaaatccctatgcttcccgttagaaatcagggataccaccaccagactgataacacagccaggaatgggccaatgggccaggccagtgtctgttctgagtagtctgtgccttgtcctgcaggtttgaggcatttgaaccacagccctagggcaggcatggtgatgcatgcctgcaatcccaccactttgggagaccaaggcgggacgaccgctggaggtcaggagtttgagaacagcctcggcaatgtggcgaaaccctacctctacaaaaaaaaaaaaaaaaacccaccacgaaaattagccgggcgtggtggtgcacacctatagtcccagctactcaggaggctaaggtgggaggatggcttgagcctgggagacagaggttgagctgagactgcaccactacactccagcctgggcaacagagccagaccttgtctgaaaaaaaaaaagaaaaaaaaagaaaaagaaactacaacccttgcatattgtcagctacctacctcacaggacagttacaggaaataatgtaaagttcctttgcgctctgtgaattatacacgttagctcttgttattagcagctattctctcccttcactgggaaaggcctggaatctgatccctaagaattaggtagtcacaaagccccatgtcactacccgccccaactgcttccgctctttcccagctagaagacagtcatcaccgtaggaggcagggtaattaaaatcacaagtgaacacaggcctctatttctgttcttctgaagtcttctctcctgcatatcgaggtactgcgaacacagaaagtaccctgcttcaacatatctactccccttgaagacgccaccactcacaaaggaggcaggacaggaaagggttcaatgttcagtttcctttaatgacccccatctccctgaagggcaggtgcaggcagctaggtgatggcaagagatgttcacttgaagatcttgccctgattgaaggctttgcccacatgctggaaggccccctcccaggaaaagtactctcgaaccagcgtctgggtctcctcgctgccaggatccagtttccgccatgt

SEQ ID NO: 7334 - DNA, 2300 bp, Homo sapien
tggggccagtcggcgccagaggagttctgaggttgagtggggaactgattcgggggtctacagactgtactgctggagagtagggttcctagggcctggaggggaactgaggctggggctctcggaggccagaggtggaagggtctggggaagaggagaaaagagatgccgggtctgggccgtccgaagcctgagaaaggggttcggctctgttgccgctttgaggcgtggtatctgggcaggttgacgaacttctgtgtccgttttgtggagtaacacaggggacaggttgaagaggagggtctttgtaggcaggtccggctggcacggttaaaggtcgtctctcagggaggtttgggagcgagaggattctccggacagtgaagtcagaccaattggactccgctggccggcataatagagaagcccaacgccggggaactcgctgcgggacaggaccggagggatgatattcgcgacacggaaagaaaggctttttgagagagaggagttgatttaagaagacggcatgccatcccctatctctggctagtctgaggggaactagaaatctctcgatcgtcgtgcgtgccttagagacaggacgatgcttttgaagcggtgagcagctgagcagtagagtaggcaggcgctcggaaccatcaatgaatgaagcgagggctccgggaagggaggagagtatgtttgtaggcagatggagtctgatggagctagaagttctggatttcttggagatagatttgagaggaagagaatacttccagaggtgtccttagggaaggtcaaatctgtcaacaagctttatttagcagttggtgtgtagttctgttcttggtatttcggaggattctgattacatatgacaagtactaaaggacttggttcaccagaggaagtaaaagggtgagttgaatacattgggattattcaggaaagtcatcctggagagtggcattaaggactgggacccttctactcattaattttgtccctctctttctcccatagaccctgtacacgtatcctgaaaactggagggccttcaaggctctcatcgctgctcagtacagcggggctcaggtccgcgtgctctccgcaccaccccacttccattttggccaaaccaaccgcacccctgaatttctccgcaaatttcctgccggcaaggtgagttgggagatggggagcatccttcggttctgagaaaccaaggccctgcgattctgtcactctggtggtggcccccatctctaaaagggagcttcccatgttgttttattcaatttcggtgattttattttgagataaatacagatttacatgtagttgtgaaaaaaaatacagagctattctgtgactttataaaattcacgagtttactttgtgggaaagagaatgagttttgactaagcattttcagtgcaaatatatcagatatctgttatgagcagaattcttaccccaaggggtttatagagataggtgaagaaacatgctaagaatggaggagatgaagtgctgtgtgggtctgggtcacacactaatactttaactgatacagacattgatacaggagttgcttttggccttctgcttgtttgatccagagatttcatacaaatatcctgtaatattcaaatctattgggcttcctagttaacattgtgaattcagattgcaaaggaggccaagttcttgaagtatttatttatggttcttgagtatcaagagtttggatagtgagaatcatcagccttatataagtattttcaaagcagtttggctcctggtattggttaggaagaaattttgtgtgttttaccttatcttttcactgctttgtccccaggtcccagcatttgagggtgatgatggattctgtgtgtttgagagcaacgccattgcctactatggtaatttgcaggggtatatgggaatgggagaatttggaggtgagggtgtaggagaggataagtgtgagcgggggtggatatgaaggaattctccaggacctggactggtgttggcattcccccagagttctgaccttcgtgttctgcctctgcagtgagcaatgaggagctgcggggaagtactccagaggcagcagcccaggtggtgcagtgggtgagctttgctgattccgatatagtgcccccagccagtacctgggtgttccccaccttgggcatcatgcaccacaacaaacaggtgagccttggaactttgagagaagccaggggcaggggtggcatcagctcctgggtgttgggagtaag

SEQ ID NO: 7335 - DNA, 2300 bp, Homo sapien
aatctgaattcacaatgttaactaggaagcccaatagatttgaatattacaggatatttgtatgaaatctctggatcaaacaagcagaaggccaaaagcaactcctgtatcaatgtctgtatcagttaaagtattagtgtgtgacccagacccacacagcacttcatctcctccattcttagcatgtttcttcacctatctctataaaccccttggggtaagaattctgctcataacagatatctgatatatttgcactgaaaatgcttagtcaaaactcattctctttcccacaaagtaaactcgtgaattttataaagtcacagaatagctctgtattttttttcacaactacatgtaaatctgtatttatctcaaaataaaatcaccgaaattgaataaaacaacatgggaagctcccttttagagatgggggccaccaccagagtgacagaatcgcagggccttggtttctcagaaccgaaggatgctccccatctcccaactcaccttgccggcaggaaatttgcggagaaattcaggggtgcggttggtttggccaaaatggaagtggggtggtgcggagagcacgcggacctgagccccgctgtactgagcagcgatgagagccttgaaggccctccagttttcaggatacgtgtacagggtctatgggagaaagagagggacaaaattaatgagtagaagggtcccagtccttaatgccactctccaggatgactttcctgaataatcccaatgtattcaactcacccttttacttcctctggtgaaccaagtcctttagtacttgtcatatgtaatcagaatcctccgaaataccaagaacagaactacacaccaactgctaaataaagcttgttgacagatttgaccttccctaaggacacctctggaagtattctcttcctctcaaatctatctccaagaaatccagaacttctagctccatcagactccatctgcctacaaacatactctcctcccttcccggagccctcgcttcattcattgatggttccgagcgcctgcctactctactgctcagctgctcaccgcttcaaaagcatcgtcctgtctctaaggcacgcacgacgatcgagagatttctagttcccctcagactagccagagataggggatggcatgccgtcttcttaaatcaactcctctctctcaaaaagcctttctttccgtgtcgcgaatatcatccctccggtcctgtcccgcagcgagttccccggcgttgggcttctctattatgccggccagcggagtccaattggtctgacttcactgtccggagaatcctctcgctcccaaacctccctgagagacgacctttaaccgtgccagccggacctgcctacaaagaccctcctcttcaacctgtcccctgtgttactccacaaaacggacacagaagttcgtcaacctgcccagataccacgcctcaaagcggcaacagagccgaacccctttctcaggcttcggacggcccagacccggcatctcttttctcctcttccccagacccttccacctctggcctccgagagccccagcctcagttcccctccaggccctaggaaccctactctccagcagtacagtctgtagacccccgaatcagttccccactcaacctcagaactcctctggcgccgactggccccactcgggcaaaggatggcggtggataggatgacccgaaccaccagagccagcaaacttaccccagccgccatggtgattccgcaaagaaagggggtggggttctcggcgctgccgcaaagtaagccgcccgggagagaagggagggggaaagaggagagccgtggagaaacagcagccggaaagcgaggacgaaacagaagacatacgtacgacagttcggtatccagtggcgctgaattggaaaaagaactgggtgggtggggcctgctggccagcgcggaaaaagctcgggcctgcgcattggagctcttgactggcccgccccccaggtgcagcgggccaatcggagtctagacgtggaggtagacagcgtggagggcggggaagttgtgagaacccgctggaaaagccgcgagttcttggctacgtggcgcggttgttggcccggcgcggccagtgctactgggggcgtccctctctggccctcccagggacaagtgacttgatggtagattttgccaagcccctcacatgattctatgaaactcatgggagcgaggaacagctgctgcgcggaggtggcagtgtgtgtgctaaatccc

SEQ ID NO: 7336 - DNA, 2300 bp, Homo sapien
cctgaatggcagagcggtgggtggctccagcagtactgagaagagccaggtttgcctccacattcttcctgtcgcctcagatttatgcgcacaaggacggagatttgcgttcagcgttcttcattctctcctttaaacgaggagagttcatcccgttcttaaactgggtaagagatttcaaacctgaacatgggtcaaaagccatgaacatcagaagcgacgatgtcaggtcttccagcgtcagcccctccaggggccgagtccggaggaggtgggagggacagggcgcgttctccctcatgtccctgccctgcttcgggccggagggccggtgccctgctcgcagtaacagcaccctggagctgtcaggggttggatgtgagcaaacctcactttggcaggcgggttcagaccggggcccctgttagacgctcatccctttctggaggaaaagcagagcaggaactaaagggatttagcacacacactgccacctccgcgcagcagctgttcctcgctcccatgagtttcatagaatcatgtgaggggcttggcaaaatctaccatcaagtcacttgtccctgggagggccagagagggacgcccccagtagcactggccgcgccgggccaacaaccgcgccacgtagccaagaactcgcggcttttccagcgggttctcacaacttccccgccctccacgctgtctacctccacgtctagactccgattggcccgctgcacctggggggcgggccagtcaagagctccaatgcgcaggcccgagctttttccgcgctggccagcaggccccacccacccagttctttttccaattcagcgccactggataccgaactgtcgtacgtatgtcttctgtttcgtcctcgctttccggctgctgtttctccacggctctcctctttccccctcccttctctcccgggcggcttactttgcggcagcgccgagaaccccaccccctttctttgcggaatcaccatggcggctggggtaagtttgctggctctggtggttcgggtcatcctatccaccgccatcctttgcccgagtggggccagtcggcgccagaggagttctgaggttgagtggggaactgattcgggggtctacagactgtactgctggagagtagggttcctagggcctggaggggaactgaggctggggctctcggaggccagaggtggaagggtctggggaagaggagaaaagagatgccgggtctgggccgtccgaagcctgagaaaggggttcggctctgttgccgctttgaggcgtggtatctgggcaggttgacgaacttctgtgtccgttttgtggagtaacacaggggacaggttgaagaggagggtctttgtaggcaggtccggctggcacggttaaaggtcgtctctcagggaggtttgggagcgagaggattctccggacagtgaagtcagaccaattggactccgctggccggcataatagagaagcccaacgccggggaactcgctgcgggacaggaccggagggatgatattcgcgacacggaaagaaaggctttttgagagagaggagttgatttaagaagacggcatgccatcccctatctctggctagtctgaggggaactagaaatctctcgatcgtcgtgcgtgccttagagacaggacgatgcttttgaagcggtgagcagctgagcagtagagtaggcaggcgctcggaaccatcaatgaatgaagcgagggctccgggaagggaggagagtatgtttgtaggcagatggagtctgatggagctagaagttctggatttcttggagatagatttgagaggaagagaatacttccagaggtgtccttagggaaggtcaaatctgtcaacaagctttatttagcagttggtgtgtagttctgttcttggtatttcggaggattctgattacatatgacaagtactaaaggacttggttcaccagaggaagtaaaagggtgagttgaatacattgggattattcaggaaagtcatcctggagagtggcattaaggactgggacccttctactcattaattttgtccctctctttctcccatagaccctgtacacgtatcctgaaaactggagggccttcaaggctctcatcgctgctcagtacagcggggctcaggtccgcgtgctctccgcaccaccccacttccattttggccaaaccaaccgcacccctgaatttctccgcaaatttcctgccggcaaggtgagttgggagatggggagcatccttcggttctgagaaa

SEQ ID NO: 7337 - DNA, 2300 bp, Homo sapien
gcgccgttcctcccggggtcgggactgggggctgctccctcttctgcagcccagctcccccagctccctgctctctgctacgccgatccctttaccccttgcacccttcacccagctcactgctgccctggtgcaggtattcagggaagcactggggtgccatatagaacaggcaaccaagagaacgcggtcagaaggaggtggaactggggagtcctctcagggagggacaagcaaaagactcaaagtagatggacagaaaaactgctgtgaggaggggaaagaggagcagcagggatgtgcaggggacggtggggaagacagggtagaagagatggttatagaggttggagagatggtgcaggactgggccatgcagagccctgggcagccaggggacctgcccctgaccactggaaagcatggagcccctggagaagaggggcagcccagccacgcagccctggcagagcgggggcccaagggacatgaggcagcccaagaatggtctcagggtgaggcagggaagggggcatccctgccctcctcagcgagctggcgctgtgccttgtggcaccgagtgtggcaagggcggcggcgagcccgtagacgcttgcagcagcaaaccaaggagggagctggaggtggcgctggcacaagagcagggtggctggcgactgaggctcaggtcacccaggagctgaaaggactgagtggtggcgaagagaggccagaaactgagcccctgctgagctttgtggcgtctgtctccccggctgaccgaatgctcactgtgaccccgctccaggatccccaaggcctgttccctgatctccatcatttcttacaggttttcctccctcaagcaattcgacatctcaagtgaagacatggcccctgaagggcaataaagctgctagtttattaatacagtctcccgtttcctttcatttccatctggtcataatcccccttcccctcccccagaacttcctgcagctgctcccgtctgaccccgaacatgggtctctccctgttgctctccaccccaccagcttctccttcctacagttcgcacagctcgaggggagtgcgggggcagcaccgcgcgtggcacctggcacccgcgcagagttcctgaatggcagagcggtgggtggctccagcagtactgagaagagccaggtttgcctccacattcttcctgtcgcctcagatttatgcgcacaaggacggagatttgcgttcagcgttcttcattctctcctttaaacgaggagagttcatcccgttcttaaactgggtaagagatttcaaacctgaacatgggtcaaaagccatgaacatcagaagcgacgatgtcaggtcttccagcgtcagcccctccaggggccgagtccggaggaggtgggagggacagggcgcgttctccctcatgtccctgccctgcttcgggccggagggccggtgccctgctcgcagtaacagcaccctggagctgtcaggggttggatgtgagcaaacctcactttggcaggcgggttcagaccggggcccctgttagacgctcatccctttctggaggaaaagcagagcaggaactaaagggatttagcacacacactgccacctccgcgcagcagctgttcctcgctcccatgagtttcatagaatcatgtgaggggcttggcaaaatctaccatcaagtcacttgtccctgggagggccagagagggacgcccccagtagcactggccgcgccgggccaacaaccgcgccacgtagccaagaactcgcggcttttccagcgggttctcacaacttccccgccctccacgctgtctacctccacgtctagactccgattggcccgctgcacctggggggcgggccagtcaagagctccaatgcgcaggcccgagctttttccgcgctggccagcaggccccacccacccagttctttttccaattcagcgccactggataccgaactgtcgtacgtatgtcttctgtttcgtcctcgctttccggctgctgtttctccacggctctcctctttccccctcccttctctcccgggcggcttactttgcggcagcgccgagaaccccaccccctttctttgcggaatcaccatggcggctggggtaagtttgctggctctggtggttcgggtcatcctatccaccgccatcctttgcccgagtggggccagtcggcgccagaggagttctgaggttgagtggggaactgattcgggggtctacagactgtactgctggagagtagggttcctag

SEQ ID NO: 7338 - DNA, 2300 bp, Homo sapien
tagataggatgaaaatgaactgacagggccaggcgcagtggctcgcgcctgtaatcccagcactttgggaggctgaggtgggtggatcacctgaggtcaggagttcaagaccagcctggccaacatatagtgaaacccccatctctactaaaaaaaaaatacaaaaattagctgggtgtgtggtgtacacctgtagtcccagctacttgggaggccgaggcaggagaatcacttgaacccgggaggcagaggttgcagtgagccgagattgtgccactacactccagcctgggtgacagagggagactcctcaaaaaaaaaaaaaaaaaaaaaagaattgacatggatacctggcagtcataacaaaaaaaaaatttcaaaatggtgtgtgcaatatgatcttattttggaaaaaatatatttaaaattatacaataaggtccttttagttttgcttatgtgtattttttttttttgagagaccgtctaactctgtcacccaaaatggagtacagtgctgtgatctcggctcactgcaacctccacctcctgggttcaagtgattctcgtgcctcagcctcccaagtagctcggaatacaggcacacgccaccatgcctggctaattttttgtatttttagtagagatgggatttcttcatgtaggccagactggtcttggactcctggcctcaagtgatccacccaccttggcctcccaaagtgctgggattacaggaatgagctaccatgcccggccacttaacctgtattttctaacatctaatgtacagattctgtttaggaaaggattattattattacttagaaatagggtctcactatgtttcccaggctggtctcgaactcctgggctcaaggaatcctcctgcctcattctcccaaattgttgggattacaggtttaagcccccatgcccagcctattattattttcaaaaaatagacttggccgggcgcggtggttcacgcctgtgtaatgccagcactttgggaggcaaggcaggtggatcacctgaggtcaggagtttgagaccagcctggccaacatggtgaaatgctgtctctactaaaaatacaaaaatcagccgggtatggtggcacgtacctgtaatcccagctactcaggaggctgaggcaggagagacagcttgaacccaggaggcggaggttgcagtgagccgagatcgcgccactgcactccagcctggatgacagattgagactccatctcaaaaaaaaaaaaaaaaaaatggactttattttttagagcagtgttagattcacagcaaaagtgagcagaaagtagtttctatatgcctgctgcccccgcaacaggagttttaaaatgttttatcattatttttatctttctctacacacacacactctctatttatattttctgaatcatctgagagaaggttgcatgtatcacattcctttacccctcaatacttcaatgtgtgttatgcaagaacaaaggtattctagtgtaaaggtattctagtgtataaccacagtaccattatcaagttgaggaaatgttacattgacacagatgtaaacctttacagactttacagtccatactctaatttggtcagctgtcctgtcaatggactgttacagtttctctttcgtctgtaatagttcctctgtttttgtctttcacgacaatgacattttttgcagaggtagaccttttattttatagaattaaaaggttatctttaaaaaaaaaaagggttcctgtgaagattaaatgagttaatatgtataaagaccttagaatagagctgaataagctggaagtaatattatcttgagagatccctgcttagggaacagcagaaacatttcactcagttcatttctgtccacagccagtcccaaaggctccagaatctccatcgctggactcggccctggcttccccactggaccctcaagccctggcctgcaccccagcttcccctccagattcacaacctcctgcttctccccaggattctgaagccctggactttgaaaccccttcctcctccctggcgccccaaactccggactctgccttggcctccgagacccttgcttctccccagtctctgcctccagcttcaccactgctagaggacagggaagagggggacctggggaaggcctcggaactagcagagaccccaaaggaggagaaagcagagggggcagcaatgctggagctggtgggatccattctccggggctgtgtccctggggtgtatcgagtccaaactgtgcc

SEQ ID NO: 7339 - DNA, 2300 bp, Homo sapien
gaacctagcctgttttggggggtaggacccacagatgtcttggacagttttggggggagggttttttaattttttaaaaattttgcctccctttgtgaaaggggatggggaggggaagagtaaacagataacaggtggtggtacctggttgggggaggggggcgtgcactgccatgtctttttttttttttttttttttttttttcctaattgggggtttctctttctgtccggtgtccggactttcctaattggagtttgaggcccctaagctggcatcaaccccaggccacgctcgctctttccttccctcccctccccctctgccttttgtacgccagttctcagaaataaagatcttttgtccgtttttttaacctcggattctgtaattggttcttatagtaacaaataaaaagctgttttcttcagcttctcctggctcagctgttctttgccatgggtgtgtgttgtgtgtgtgttgggggtgtctttgagagggaaaataaaggacaaaggacaacaaaggaggtacagatggttcttgccctgggaacagctttatgagataggcagcctggacccaggcggcttgctccagctaggcttcttgtgggacccaaactgctccccagctcccagtggtgctggagctcaagaaccatcttggcccagattcattcaaaggagttgagatgagctttctggatgactggtggcctccataggaaaggggaatgggggtgtttcttcctctgtttcccacctcttactcccctctcccttttgtttaaggaattctggaagttgctagcagccagggtaacatgtatacccccttgggggtggtggtggggttataggaggatcccctcacctagctgtgtggtgtatttggcagacgagaattctaccactgaaccaccctagcacctctgggtgtatgtgtacagcctgctgcttcaggatcctcaaggccagtctcgatgatatcccgatccactgtagcactgtttcctgccttaaaggtttgggacactgagattagatgcctgagctgggcccattagaaggaacaccttaggatagagaacaagaagttcagcctgctgtgtgctccttgggcacttcctttagagatgggaaacggcctcaacagttgtgacttgttcaaggtcaaagaccttggtgtctgccttaggtccactgctctttgcgccattcaaagctgtgggctgataaccacagcacaagctgctgagcccatctgatagttctctccacctcgttatggtccctgtccctagggcatccccagctccccgtagtccctccctgtcctgagcctacacctcggcggcgttgggatgaactgacaattataccaggagggggttgacagcattcgccccctccagtgtctaaactcagttactggcactcggttttgtcttgtcgcactgctctgaggtgcgccagtagctctggcgcctccggcgtacaccacgcagcccactactgcggaaggaatgggcctggctccaggacctcgtggagtccggaaggtgcccggtggtggcagagctccccaaccagggctagaagccgtcgcagaacacccgttttgcgggaggacagggggcggagggagggagtaacagccctgaaaaggttggaagtccagggacagccctgggctccgtggggcaaagaattggaagccgccgatcctccgcctttattcgtcgggtaaataagggtcgagggtacagacgcacgggtgtctactgcggggtgaaggagctgccgcaagatgccacccggcgccggcctttgtggctgctgtcatgaatattcacgatgctttgggccaatcaacgtctgaacagcttaaagcacaccaatcggcttaccgcatgcagataagcatcgtaacgcgccgcttttcctgaaacgggcggggactggacagcggctagaaacggaacccagagtcgaaggagcttggtttccggaggagtgtgtccgcgcaattgaacgactttatgtcacttcctatcggatcggcggaagttgcttccgagcgcgttgagctttggcgaagtgggttccggtggtggcagaggtgcttgtgtttttgtcggtacaggagagtcgctatggcggcggtggattcggatgtcgaatcgctgccgcgtggggggttccgctgctgcctctgccacgttactacagccaaccgtaagcggtggctagtgagggacccgggggtggttgcgggctttcgtcttttgatcctg

SEQ ID NO: 7340 - DNA, 2300 bp, Homo sapien
taccgggcgcagggatacggggcccggggcgggagaggttggggtagggacctgaggggctcggcaccgggtggcgcgaggcgcagcgtatggggcagcgtggaccggagcgcggaccggaaccggaaccgggagacgaggagagagggtgcggggaaccgcgacgcggcagggctccgagactcccagagagaagctgcgggcagccccgacggcactttcggggctgcgtcaggggctccccggggcacggagtggccttcggaaccggttccgaaggagctgacagggtagggagggaacgcgaggggctggggcgacggctttgccaccgcgggggagccgcccggaggtttcctcttcccaggcgttattgtgcgcctcgattcgaaaaggtaggggccctgcgctagagcggacaattacttcgccgcgactggggtgcaactcatcgctgagttgtggggactgcaggggaacccctgcttcttgcctgttccttaaggctctcttttgagtaaaggatctaattttagaactaggtgcggtggggatgggggacatccttattttctcttagtctgtccactttcacatctcagcgccctttctacctgaatccttatctccttttgatccactcaggccaactttctctcctaccctggtgctctgcgtctcccatctcctctgatcttcgtggttctcccccctcccttcccttacagattacgtctattttgagaactcttccagcaatccttacctggttagacggattgaggagctcaacaaggtgagtggagcagaatccctctccctccctcccgcagtggtctcttctgaggtttctaacttctggtggaagagaggatcctatactaagtacccattcatattcgttcattcattcattggatgtattcaggaaaggctattgagaggttagcaggaactttactattctgtctcttgggggcaaaggaaagggatttggaagtctatccttgaatgtaagtctttactcatattttcttgggctttttaatttaggtccctctgaaacttactgttatttgtctctttgtgcatttctgttcccagatgatcaatttccactgctacgttgttttgtttttgtttttttcctccccttagactgcaaatggaaatgtggaggcaaaggttgtctgtcttttccggcgcagggacatttctagtagcctcaacagcctggctgatagtaatgccagtgagtatcttcctccctttctttttctcctacccatgatctgaggcctgggcatgtccctgcaggtatttcccctggtagcatgcccaaggcagaggtgtgagtttgggggtgggaaatgcctggcctgaggagggaggcctgtttttacatgttggggttggaagcagggtggagagattgtgataaggaaagcgataatatggtttgtatatgagagtaagagagagatgataacatttagagtatgaggacgagctttagagaaacaatggttttctaaaggggggcagtttggggtacattgagacagtaggtgatgactgaaggtcaacgtgaagaggaagacattgtactgagaagcctgcgtaacagagaagcaggcttattttgtaatcacaaggtgatgagagtacctggaagttagaagatggctggaagttttcttgcgctttttaatttctcacctcgcccatttccccgcccgcccccctccattttacatctttcccttttcattttgccctatcttcattctctttaaggtctcatcttctttttttaaaaaacatattttccttagcttctttttcctttcctgctttggttttctttttccttccttttgttccacctttctaaattattttcctttttcagactgctctgggtgagaaggggttaaagaggagcccagcttaccaagttccttggccctttagggtttccagccccatctggcaggggctgaccttggccttgtccaatcagaaggggtgttgggggtgtggtcccccttgcctcagcacagggtttccggagcacacaagcgaggggtggagcctactgcacaaccccccccttctccctgaggttgggaacaatacaccaatgagcctggggctgaggttcttctgctccctcccactttggttggcgcctagccaggttaaccccttccgctaggtttcagggcaagctgcagctccttggggaggaaggtgttggcactggcttgagaggtgttgtccttggaaaccccaggaac

SEQ ID NO: 7341 - DNA, 2300 bp, Homo sapien
aggaagttggggtgtgtggtggggcatgataacagctgcgaaactcaggggtctgatgcatcaagggggctctggggatgggaaatggatgggatactttaaaactcttgacctttgctcccagggtcactccagcttcatcactcatcttgactggtccaaggatgggaatttcatcatgtccaattctggggactatgagattctttactgtgagtggcagtggagcaggacatggggagagggtaattggagtgggttttgtgtagggggggctgttagaggtgttgttagataaggaagtggagatggggttaaagtggagttggaattatatgtaggagaaatttcgtgatttggaaacaactagtttcacaccatgtcttgttgacttgagggagttcaaaaatgcgctaagaaaagattgtttgggaaaagtttctcagggcaagtgtggagcacttgacttatctagggaggaggaactcgtggaagctgttagaacttcagccagagctcaggacaggacgcacacagggtgggtttcacagggggaggaggtgatgctactacggtgaccagatcacatgccatcgccgggtttcatgccagtctttccagtctggctttccctggcatcttccctactgagggcagggtgagagctgagctgggcgggctccctctccccaggggacgtggctggaggctgcaagcagctgaagaatcgctatgagagccgagaccgggaatgggctacctacacctgtgtgctgggctttcacgtctacggtgagcaggggcgtggaaacctgctggaagggtgggggacaaggtggagcccagtttgggcttggaacgctgggcgtgtgtcgttgggtgagagtccagaaacctgaagatccagcccaggaggcccctcgggaccgggaaggcttgcctggaacgcggcagtgggtggccgcggctgccggagcgcctgaaatggtgtagctctgggccgtgggtggcggtgggtaggaggtcgggctgaggccggccgctgtgctaggcgtctggccggacggctccgatgggaccgacatcaactccctgtgccgctcccacaacgagcgcgtggtggcggtggccgacgacttctgcaaagtgcatctcttccagtacccgtgcgctcgtgccaaggtgaggccgcggggatcgccggggtgggaccggtgggcccgagggctcagccgccaccgcaactcttccctccggcccaggcgccgagccgcatgtacgggggccacggcagccacgtgaccagcgtccgattcacgcacgacgactcgcacctcgtctcgctgggcggcaaggacgccagcatcttccagtggcgagtgctgggcgctgggggcgcggggccggcgcccgccacgccctctcgaaccccctccctgtcccccgcctcctccctcgacgtttgatcgctgcctggcgggaccgactggcccggcggcgtggccccgccccgccctgcccttccctggcccaatcccccacgactaggggccgactctttcctggactgacttcgagacattcccgatcgcgcattttcctggagggcgcgaacggcgcccctgcacacactgtttagacccgctggctgagccgggcagccccagcctaggccttgactcccgctgcctgctgaggggcaataaaccagaaccaaagtcgcctcccggtgcttttgtggggcgctgccgggcgcctccggggctctgtggggtggggacgaaggaaaagaggcgtgcggaaagggtaagggagcgtagaccatttatgcaaatgacaggcaaagccgcttgcaaataacctggcgaagcgctaaggcgcgcgagtctttggggcgcgaggaggagctgcagggctccagcgaggacagagttaagcccgactcctctcccgccctcggaaaagggggtggggccgagctgcgacggaaatagccgagcggttgcccgacaggagccgaacttcttccggaagtagccgatctgcggggtctcgctctccgacctgagccgagcagtgggccttgttctccggatcggccgaaggtgttccggaaggaggcgaaccctgaggcgggcccggcaagccttccctgcggccggcagagcccaacgactagtgggactccgcgggggcgggggtagctggagcctggctctggcctggcaggagccgagctcgttccggaagaagccgagcggacgggggccagcctcagcgtcccgggagtgaggcgatag

SEQ ID NO: 7342 - DNA, 2300 bp, Homo sapien
ctcccagcttccgccacagggccacaggacacctacgtgtcagcacgctgtgggggctgcaagggcctgaggatccccggggggccaggggagccagcaccactgctgctgctgccccctccttcagattgggtcccgctaggctcttcgctggccccctgaggggctgggggtccattgctcaggccagggggtccaggggatgacttgagctccacctctgtctccgtctgggtgcctcggctcaccaaggaaggggtgcacgtgggtggcagtcctgggggggctgcaagactgctggagagatgttgaattaacctgaagccccagaggccccaaggaggaggaaaaatggggtgtgatgacatgcatacctgtcccccggaggagctggtgtgccagagccctgcagggaggaagggggcacctgcagccgcagcaggcgaagggcttctgccagggctgcctttaccagttccatctcctgctcctgcacccgaagccgctggctcagagactggagggcctcccgagcagggccgtcacctgggaaaagggcaagaggtactcagaatgtacccatcacctgaagaaagcgtagaggggattctgtctccccacaactttacatgtgtccggtaggactgcccctttcaggcagccccaggcttgaatgctcgtccagaggggaggagacggtggtaaaggatcaagggcctccttctggcagggcaggcgagaaacctggcaaagctcccttcctgctgccgtctcagcctccgcaaagactgggagtaccatggagtaccgggggggaaatatggagtactgccgaggaacgtgggagccacagagagaggcgccgcactggtgagggcagggaccgcagccctccccacgcgcccccagcaagctcaggtctccagcgaaagctgagtaactgagccgggggaacaccaggagagagaacggggtgcgggaatggagtcatactgaggacccagagtacaagaaaagagatccagagtgacaggagagagtgtgagtggtgagcagagtcacagtgaaggtctcagggggcagtggggatcagaaggaaaaagacctgaaataccacgagaagaggcccggagtaacgcagggggcagggaaacatcgaggggcccggagttacgtggggcgtagaatgacgctggggaagcccgaagtgacagcaagacccaagcaactagggagggcgaccggaggaactgtggaggatgctcggagcccctggggcggaggagcacgcggggacgcctccagacagccgtccagctctggcataacccgacgagccgggcgctccgggaaggggcacgccgcccgccccgccccgtactcaccgggccccgcggccccgtccatccggcccccgggttgctccgagcggcggcggcggaggaggcgtctaagccgcgggggccacggccggggagaggggaaggggaagcaccccggggcgcgcgcgaagggcgccgtaccaccaccccgagggggcgctgtcgggcgcggggaaggggcctggagggggcgctgtgggcccggggccgcagtctccagacccccccgggccctcggactctcccggggccgctctcggctcccgggggtggggtggcagggccgtccggtgccacagcgccgcagcacaaacaggcgccggacgcggagccgccaggaagcgcgggagggggggcgggcccgagggggggccgggccgcttggtaacccctccctgtccgggcctcgccgctcagtacgggggcggggctagccggctgaccccctggcctactcccggcctccggctccaggcccttcccggatccccgcccccggattcccaggggacggggaagggagcgcccgccccgatatctccgccccccagcccctaacccctcagggttgagcggaccaaccccaccacttccgcgaggggcaggggcggggtcacaaaacgggccctcggcctaggggcggagtttctcgtaaggggcaaggccaaggcatcttgtattggggctgacaggggggcgggttattagggctgaggatgggaggatgctcagggtattggggtcagggtggcattagcccagctcaagccgggccgggctgactcagcatcctgccccagccagcttccatccctgacacctctgcattcccttgggcagagatgggagatggcgccggtgttgcccctggtgctgcccctgcagccccgcatccgcctggcacaagggctctggctc

SEQ ID NO: 7343 - DNA, 2300 bp, Homo sapien
gtcaccaggccctcctccagcgcctcatccagactcccaggcaaagccagggctagcccgaggccgacgaccaggagcccccccccaccagccgtgccagccaccagcagcgggcccaggacccctcgccagggagggtatagagctgcattcagacttgcccggctggctcctacacccactagtcctgtgcccagagccaccgcgcccgctgccagggcagcctggggcaggacagggaactgacaggagggagccaggaaggtgccaaggtgccttagctggaccaggaggtgcccactacagaggaggatgacgccaccagccagcgccagcagccaggagaggagccagagcccttgtgccaggcggatgcggggctgcaggggcagcaccaggggcaacaccggcgccatctcccatctctgcccaagggaatgcagaggtgtcagggatggaagctggctggggcaggatgctgagtcagcccggcccggcttgagctgggctaatgccaccctgaccccaataccctgagcatcctcccatcctcagccctaataacccgcccccctgtcagccccaatacaagatgccttggccttgccccttacgagaaactccgcccctaggccgagggcccgttttgtgaccccgcccctgcccctcgcggaagtggtggggttggtccgctcaaccctgaggggttaggggctggggggcggagatatcggggcgggcgctcccttccccgtcccctgggaatccgggggcggggatccgggaagggcctggagccggaggccgggagtaggccagggggtcagccggctagccccgcccccgtactgagcggcgaggcccggacagggaggggttaccaagcggcccggccccccctcgggcccgccccccctcccgcgcttcctggcggctccgcgtccggcgcctgtttgtgctgcggcgctgtggcaccggacggccctgccaccccacccccgggagccgagagcggccccgggagagtccgagggcccgggggggtctggagactgcggccccgggcccacagcgccccctccaggccccttccccgcgcccgacagcgccccctcggggtggtggtacggcgcccttcgcgcgcgccccggggtgcttccccttcccctctccccggccgtggcccccgcggcttagacgcctcctccgccgccgccgctcggagcaacccgggggccggatggacggggccgcggggcccggtgagtacggggcggggcgggcggcgtgccccttcccggagcgcccggctcgtcgggttatgccagagctggacggctgtctggaggcgtccccgcgtgctcctccgccccaggggctccgagcatcctccacagttcctccggtcgccctccctagttgcttgggtcttgctgtcacttcgggcttccccagcgtcattctacgccccacgtaactccgggcccctcgatgtttccctgccccctgcgttactccgggcctcttctcgtggtatttcaggtctttttccttctgatccccactgccccctgagaccttcactgtgactctgctcaccactcacactctctcctgtcactctggatctcttttcttgtactctgggtcctcagtatgactccattcccgcaccccgttctctctcctggtgttcccccggctcagttactcagctttcgctggagacctgagcttgctgggggcgcgtggggagggctgcggtccctgccctcaccagtgcggcgcctctctctgtggctcccacgttcctcggcagtactccatatttcccccccggtactccatggtactcccagtctttgcggaggctgagacggcagcaggaagggagctttgccaggtttctcgcctgccctgccagaaggaggcccttgatcctttaccaccgtctcctcccctctggacgagcattcaagcctggggctgcctgaaaggggcagtcctaccggacacatgtaaagttgtggggagacagaatcccctctacgctttcttcaggtgatgggtacattctgagtacctcttgcccttttcccaggtgacggccctgctcgggaggccctccagtctctgagccagcggcttcgggtgcaggagcaggagatggaactggtaaaggcagccctggcagaagcccttcgcctgctgcggctgcaggtgcccccttcctccctgcagggctctggcacaccagctcctccgggggacaggtatgcatgtcatcacaccccattttt

SEQ ID NO: 7344 - DNA, 2300 bp, Homo sapien
gcatgctacccagtgtgcctgccaagtcctgcaagtgctccagcagcacctcatggcacccttgggcccagaggttttggttgggttgtcggggatcgaacagggggtgggcgtaggagtctgaaagacggttttgcaggcaaggccggggtgagtgggggttgcaacaggagaaagggaccccatcagtcaggtataggccttctacattgctctggatccggctgcaaagggagggacagaggggttaggatgtctggagatagaggcctgggggagggactgaagggcacaggtgttcagaagggaaaaagaatagtaaaacatttactgactgctgtactatgtgccagccaagcataattcacatcttcacaacaactctatcagataagtactattatttccattttacaggtgaaggaatgggcccagggtggtttggtaacatgccctgggtttcacagctaataaatggcagagctgtaaccagtctctcagccactatgttctacttattgcccctctgagcgaggtggggattcaaggcagcaggagggagcctgtccagggaggaggaggaggaggaagggagacgcaaatcactcactcagccacatcccggtcaccgggatccaggtaacggctgctgacccactggaccccaaaccaatccttgtacccgtggcgcccgcagcagtggtacctcagttgcagctcatccaccagccttttggcctgacagtgcccaggcacctctgtgtccttgtagtgagccaaggcagtcaccaggccctcctccagcgcctcatccagactcccaggcaaagccagggctagcccgaggccgacgaccaggagcccccccccaccagccgtgccagccaccagcagcgggcccaggacccctcgccagggagggtatagagctgcattcagacttgcccggctggctcctacacccactagtcctgtgcccagagccaccgcgcccgctgccagggcagcctggggcaggacagggaactgacaggagggagccaggaaggtgccaaggtgccttagctggaccaggaggtgcccactacagaggaggatgacgccaccagccagcgccagcagccaggagaggagccagagcccttgtgccaggcggatgcggggctgcaggggcagcaccaggggcaacaccggcgccatctcccatctctgcccaagggaatgcagaggtgtcagggatggaagctggctggggcaggatgctgagtcagcccggcccggcttgagctgggctaatgccaccctgaccccaataccctgagcatcctcccatcctcagccctaataacccgcccccctgtcagccccaatacaagatgccttggccttgccccttacgagaaactccgcccctaggccgagggcccgttttgtgaccccgcccctgcccctcgcggaagtggtggggttggtccgctcaaccctgaggggttaggggctggggggcggagatatcggggcgggcgctcccttccccgtcccctgggaatccgggggcggggatccgggaagggcctggagccggaggccgggagtaggccagggggtcagccggctagccccgcccccgtactgagcggcgaggcccggacagggaggggttaccaagcggcccggccccccctcgggcccgccccccctcccgcgcttcctggcggctccgcgtccggcgcctgtttgtgctgcggcgctgtggcaccggacggccctgccaccccacccccgggagccgagagcggccccgggagagtccgagggcccgggggggtctggagactgcggccccgggcccacagcgccccctccaggccccttccccgcgcccgacagcgccccctcggggtggtggtacggcgcccttcgcgcgcgccccggggtgcttccccttcccctctccccggccgtggcccccgcggcttagacgcctcctccgccgccgccgctcggagcaacccgggggccggatggacggggccgcggggcccggtgagtacggggcggggcgggcggcgtgccccttcccggagcgcccggctcgtcgggttatgccagagctggacggctgtctggaggcgtccccgcgtgctcctccgccccaggggctccgagcatcctccacagttcctccggtcgccctccctagttgcttgggtcttgctgtcacttcgggcttccccagcgtcattctacgccccacgtaactccgggcccctcgatgtttccctgccccctgcgttact

SEQ ID NO: 7345 - DNA, 2300 bp, Homo sapien
tagtagagatggggtttcgccatgttagccatgctgatcttgaactcctgacctcaggtgatctgcccgccttggcctcccaaagtgctgggattacaggcgtgaggcaccatgcctggccatgggccttacattttcatttggcttcagcataagcatcctttttgggttttttttttttttttttgagatggagtctcactgttgcccaggctggagtgcaatggtgtgatctcggctcactacaacctctgcctcccaggttcaagcgattctcttgcctcagcccccaagtagctaggactacaggcacctgctaccacgtctggctgatttttgtatctttagtagagatggggtttcaccatgttgtctcgaactcctggcctcaagtgatccacctgcctcggccttccaaagtgctgggattacagggatgagccactgttcccggccagcatgagcatccttgatttcagcaaaatgagcaagtgcaagccttccttgggttgctagatattttcgtagaagagcccagcaagatcatcacattttagtaggcctagttagtaagtggtgatcagagccaatggagtccctcttggatagaaatagccataaggtcagatagctgtttctcaaactaaacttttggaggatgtcgggggttgaggagacatagtttcgctctattgctcaggctggagtgcggggagtgctgtggtatgatcctggctcattgcagccttgacctcccaggcttctaaagttctgggattacaggcatcgatcactgtgcccaacctagaggcttctgcttgtagctaacagcacttttgtttttgtttttgtttttgagacggagtctccctcagtcgcccaggctggagtgcagtggtgcgatctcggctcttggcaagctctgcttcccgggttcacgccattctcctgcctcagcctcctgagtagctgggactgcaggcgcccgccactacaccctgctaatttttttgtgttttttagtagagacggggtttcaccgtgttagccaggatggtctcgatctcctgacctcgtgatccgcctgtctcggcctcccaaagtgctgggattacaggcgtgagccaccgcgcccagctgctaacagcactttttaaagtttcccattgttttagtgacaggaagtatactgttcccccttcccctcattttgtagactgaccacaagtcagagattattttaccagaaactttttttggggggttattttttttttgagacggtctcacccagtcacccaagctggagtgcagtggcatgatcacggctcaccacagcctcagcctcccatgtcagcctcccaagtagctgggactgtaggcccgcgccatcacacccagctaatttttgtgttttttttgtagagacggggttttgccttgttgcccaggctgatctgaaactcctgggcttctaaagtgccaggattacaggcatgagccactgggccgggcccttttttttttttttaaaggaaaaatgagaaggatggcttgtgcttgtgaggaggaaggggatgcattcatggaattccccagctcaggaactatttccaatcaatttcctggtagttaaaacacttccttggcacccctgttgtcatctgttgaagaaatgtgggccagaggacacactagagatgctggaatcgggtgtccagaaaggacacaaaactgccctgtggcaatgacataatttttgtcaactttggtttcttatctatctcaaagtattatagtgaggattccaggagagacacccagaggatcatgtggtgggccttagatttcattcgtgtaataagtattgagcaacagctattgggtggcgtgactgactggatggatgaataaggtgaagatctgggcgccaggactggctttctcaggcaattccgtgatgagggggcgggtctcgaggtaggtaccacgtgcacctactcgagattctgcacctacccggggttttgactgccggccacgcgagtttggcacgccggatgtgacgtcaccacccggtggttcccggaacctggcggtgggaccggaaatcaagtctacaaggcgggggggtgcacagatgaccggaagcgtgccctggcggcgctgccagccccagctgggagctggtaggggagtgcgaggaaggcgggacgcagggcggagccgctgcaggggcggggcctgcggacaggagccggggtttggggcgggaacccctcgtcccctgcagaccccgc

SEQ ID NO: 7346 - DNA, 2300 bp, Homo sapien
tttggatgtgttccagtatgagctgtacaacccaatggccttgtatgggtctgtgcctgtgctcctggcacacaaccctcatcgcgacttgggcatcttctggctcaatgctgcagagacctgggttgatatatcttccaacactgccgggaaggtgagagcacaggcacggggaaaaaggagggagtgaagcttccaggccttgaggcaaataggtatactaggggcattagctatttggggactgggtttaagaaggggctgtgggcctggtgggcagcatttgagttccctaatcactcccaggtgacacgctcactcacattcttagggaaggcattgcctattctgggctgacggaatgcacttattatcagtgtgttacgtgctaggtactcttctgggtgctggggatatagtgttaactgaggttgaaaaggttctgggctgggtgtggtggctcatgcctgtaatcccagcactttgggaggctgaggtgggcggatcacctgaggtcagaagttggagaccagcctggccaacatggcgaaacctcatctctactagaaaaacaaaaattagcagggtgtggcggcggactcctgtaatcccagctattcgggaggctaaggcaggttaattgcatgaatctggttggtggaggttgcagtgagcggagatttcaccactgcactccagcctgggtgacagagtgagactctgtttcagaaaaaaaaaaaagaaaggttctgactcacagggaggaagacacgttaaacacataacaaaggaggcaagatggggccgggcatgatagctcatgtctgtaatcccagcacttggggaggctgaggcaagaggatcgcttgaggccaggagttcgagaccagcctgggcaacatggcgagaccccatctctataaaaacgtttgaaaaataaaaataataagcaagatgatgccgggtgcagtggctcccacctctaatcccagcactttgggagggcgaggtggacagatcacaaggtcaagagatcgagaccatcctggccaacattgtgaaaccctgtttctactgaaaatacaaaagttagctgggtgtggtggtgtgcgcctgtagtcttagctactcgggaggctgaggcaggagaactggttgaactggggaggtggagattgcagtgagctaagatcacaccattgcactccagcctggcaaaagagtgagactctgtctaaaaaaaaaaaaaagaatgcaagatgagtttggggtgattaagtgctaacaaagacatgaaagagagtctttgttagcacttaaccaccccaaactggtggggtaggggtgggggctgtactgctttagatagtgtggtctaggaaagcctcactgaagaggccccgtttagtcttaccgaaagcagcttacatgagccagctctgtgtggactctgggagaaaattgctactttttgtcttggggttggaaaatgggagggcaggaggtgtctgacccctttgtggtcacctatacagaccctgtttgggaagatgatggactacctgcagggctctggggagaccccacagacagatgttcgctggatgtcagagactggcatcattgacgtcttcctgctgctggggccctccatctctgatgttttccggcaatatgctagtctcacaggtacatggttttccctgcctcattcttctgctcttttcttgtcgggtgattctatgtgttttcagagatcctgtgccccagcttgttttctaggtttatacccctcagcctgcctctagttcacaagcctccctcagtttctgggtgttgggcctgatcctcgttgtgacccccatccctcatgaacctgcaggaacccaggcgttgcccccactcttctccctcggctaccaccagagccgttggaactaccgggacgaggctgatgtgctggaagtggatcagggctttgatgatcacaacctgccctgtgatgtcatctggctagacattgaacatgctgatggcaagcggtatttcacctgggaccccagtcgcttccctcagccccgcaccatgcttgagcgcttggcttctaagaggcggaaggtaaggggttgcagtcacgcttggtcttctcagggtagggctgaagcatagtttagccttaaagagacctgaacacccctgttccttgcccccagctggtggccatcgtagacccccacatcaaggtggactccggctaccgagttcacgaggagctgcggaacctggggctgtatgttaaa

SEQ ID NO: 7347 - DNA, 2300 bp, Homo sapien
cttcttaacagccagaggagactcaggggaaggcagagaaagatgagccaggagcctgggaggagacattcaaaactcactctgacagcaagccgtatggtgaggggctcgggttccttgggctggggtgcagggctcctttccaagcagaagctctgaagcttgtttgtttttcttccaggccccatgtctgtgggtttggacttctctctgccaggcatggagcatgtctatgggatccctgagcatgcagacaacctgaggctgaaggtcactgagtgagtcctatggtgacatcaggaagatggaggtgggcaggaaggagtcaggcctttagggagatgggtgtgcatattggatactctaggcaagcatgggtcatttcttgtgtccagaatcacctttggtgatagaaaattttttgagaaaggacaagaggagcctttgcttatctctcacctgtgtctgtggagtggtgttagcatataacgcagcctggggccagttagcagcccaagtctgtctgtttgcctgcaggggtggggagccatatcgcctctacaatttggatgtgttccagtatgagctgtacaacccaatggccttgtatgggtctgtgcctgtgctcctggcacacaaccctcatcgcgacttgggcatcttctggctcaatgctgcagagacctgggttgatatatcttccaacactgccgggaaggtgagagcacaggcacggggaaaaaggagggagtgaagcttccaggccttgaggcaaataggtatactaggggcattagctatttggggactgggtttaagaaggggctgtgggcctggtgggcagcatttgagttccctaatcactcccaggtgacacgctcactcacattcttagggaaggcattgcctattctgggctgacggaatgcacttattatcagtgtgttacgtgctaggtactcttctgggtgctggggatatagtgttaactgaggttgaaaaggttctgggctgggtgtggtggctcatgcctgtaatcccagcactttgggaggctgaggtgggcggatcacctgaggtcagaagttggagaccagcctggccaacatggcgaaacctcatctctactagaaaaacaaaaattagcagggtgtggcggcggactcctgtaatcccagctattcgggaggctaaggcaggttaattgcatgaatctggttggtggaggttgcagtgagcggagatttcaccactgcactccagcctgggtgacagagtgagactctgtttcagaaaaaaaaaaaagaaaggttctgactcacagggaggaagacacgttaaacacataacaaaggaggcaagatggggccgggcatgatagctcatgtctgtaatcccagcacttggggaggctgaggcaagaggatcgcttgaggccaggagttcgagaccagcctgggcaacatggcgagaccccatctctataaaaacgtttgaaaaataaaaataataagcaagatgatgccgggtgcagtggctcccacctctaatcccagcactttgggagggcgaggtggacagatcacaaggtcaagagatcgagaccatcctggccaacattgtgaaaccctgtttctactgaaaatacaaaagttagctgggtgtggtggtgtgcgcctgtagtcttagctactcgggaggctgaggcaggagaactggttgaactggggaggtggagattgcagtgagctaagatcacaccattgcactccagcctggcaaaagagtgagactctgtctaaaaaaaaaaaaaagaatgcaagatgagtttggggtgattaagtgctaacaaagacatgaaagagagtctttgttagcacttaaccaccccaaactggtggggtaggggtgggggctgtactgctttagatagtgtggtctaggaaagcctcactgaagaggccccgtttagtcttaccgaaagcagcttacatgagccagctctgtgtggactctgggagaaaattgctactttttgtcttggggttggaaaatgggagggcaggaggtgtctgacccctttgtggtcacctatacagaccctgtttgggaagatgatggactacctgcagggctctggggagaccccacagacagatgttcgctggatgtcagagactggcatcattgacgtcttcctgctgctggggccctccatctctgatgttttccggcaatatgctagtctcacaggtacatggttttccctgcctcattcttctgctcttttcttgtcgggt

SEQ ID NO: 7348 - DNA, 2300 bp, Homo sapien
gttcatcaccggggagggtctcctggggaaggggtgctaggcccgcccccacctccccgcttggtgccctttttagatgcgctcaaaaaccatgttggagagctgtgtggagagacgttacgattggaacggaagcgcttcctctggcagcaccagctcttgggcctgctgtctgtctatacccggcctagctgtggacctgaggccttgggccatctgctgagccgagcccgaagccctgaagagttgagtttggccacccagttatatgcagggctagtggtcagcctctctggcctcctgcccctggctttccgaagctgtctggctcgggtgcatgcagggacattacagcctcccttcacggcccggttcctgcgcaacttggcactgctagtagggtgggaacagcagggtggcgagggccctgcagccctaggggcgcactttggggaatctgcctcagcccatctgtctgacctggctcctctcctgctacatcctgaggaggaagtagctgaagctgctgcctctctcctggccatttgtccctttccttctgaagccttatccccctcccagctcctgggactggtaagggctggggtgcaccgcttctttgcctctctgaggctgcatggacccccaggtgtggcctcagcctgtcagcttctcacccgcctgtctcagacatccccagctgggctcaaggctgtcctgcagctgctggttgaaggagccttacatcgaggcaacacagaactgtttggtgggcaagtagatggggacaatgagactctctcagttgtttcagcttctttggcttctgcctccctgttggacactaaccggaggcacactgcagctgtgccaggtcctggagggatttggtcagttttccatgctggagtcatcggccgtggcttaaagccacccaagtttgtccagtcacgaaatcagcaggaagtgatctataacacccagagcctcctcagcctcctggttcactgctgcagtgccccagggggcactgaatgtggggaatgctggggggcacccatcttgagtccagaggcagccaaagcagtggcagtgaccttggtggagagtgtgtgtcccgatgcagctggtgcagagctggcctggccccccgaggaacacgcccgggccaccgtggagcgggatctccgcattggccggcgcttccgcgaacagcccctgctctttgagctgttaaagctggtagcagctgcacccccagccctgtgctactgttccgtgctgcttcgggggctgctggccgccctcttgggccattgggaagcctctcgccaccctgacacgacccactccccctggcacctggaggcatcctgcaccttagtggctgtcatggctgagggaagcctcctgcctccggccctgggtaatatgcatgaagtatttagccaactggcacctttcgaggtgcgtctgctgctgctcagtgtctggggttttctccgggagcatgggcccttgcctcagaagttcatcttccaatcagagcggggtcgcttcattcgggacttctccagggagggtggaggtgagggtggaccccatctggctgtgctgcacagtgtcctccaccgcaacatcgaccgcctaggtcttttctctggccgtttccaggcaccttcaccgtccactctccttcgacaggggacgtagccttttcttgctctggaagcccagggaggttgagcagtgagagagggaagggactaacgtgctccggaagggtggaggtttctcttctaagtccttggtctaaagagcgctgtcacttttttctctcccacttttttttttctaaataaaatttgccaacttgagaaaaccagtccagtgcttctgtcatgctgagagcgtgcaaagtctgacagcgcctggctctggacgttcccgcccctggcctgaagccccgccccctgcgataatttggagtgcgcactctaccaatgagacagctgcccggcggcgctcaggtcgaaccaatcataaggccggaaggggcgggaactaggatacgtggctgagcgcgcgcgatggggcgggaggtttggggtcaaggagcaaactctgcacaagatggcggcggtagcggcagtggcggcgcgtaggaggcggtgaggagcccggaatctgggggcgcgcccgggacgcccccagatcccccaagtcccattccactccttcctgtgtgtctcttgacactctgccacccccggcctcgtgaggaacctttgttcctctgg

SEQ ID NO: 7349 - DNA, 2300 bp, Homo sapien
tgctgggaagctgtgggagagagagaagcttaaataatgaagacggatggaaggatgttattcatacttgctactgggaggacatcttcaggctagctagcccaatttgttttgggctccctctccctccttctctttcttagtttttctttttcttttatgagttttctcttctttccatctcttttctgctttctctcttcccttttctctctctctcgtaaaagtatttttgtaggaggggtgcagtggctaacacctgtaatcccagcactttgggaggctgaggcgggcggatcacctgaggtcaggagtttgagaccagcctggccaacatgtctccaattagctgggcgtggtggcacatgcttgtagtcccagctacttgggaggctgaggcaggagaattgcttgaacctgggaggtggaggttgcagagacgagactgcactccagcctgggcgacagaatgagattttaaaaaaagcctgggtgcggtggctcttgcctgtaatcccagcattttgggaggctgaggtggatggatcacttgaggtcaggagtttgagaccagattggcggacaggggaaaacgttgtctctataaaaataaaaaaattagccagatttggtagtggatgcctatagtcccagctactcgggaggctgaggcaggagaatctcctgaacctggaaagtggaggttgcagtgagctcagatctcaccactgcactccagcctgggtgagggagtgagactctgtctcaaaaggaaaacgaaacaaaacaaaacaaaaacaaagagagactggccgggtgtgcgtggcttactcctgtaatcccagtgctttgggaagctgaggtgggtgaatcacttgaggacaggagtttgagatcagactgggcaacatagcgagacactcgccccacccacatgcaaatccctaactctgaaaatatttaaaaagtagccaagtgtgatggcgcacgcctgtaatctcagctacctagaacgctgaggtgggaggatgtcttgagcccaggaggtcggggctgccgagaggggtgatcctatcactgcacggtcacaaaataaacaacaataacaacaacaacaccaacaaaaaaaccttcctatgcttcatttttttaaagtcctgagttgaggccgggcgcggtggctcacgcctgtaatcccagcactttgggaggccgaggcgggtggatcatgaggtcaggagatcgagaccatcctggctaacaaggtgaaaccccgtctctactaaaaatacaaaaaattagccgggcgcggtggcgggcgcctgtagtcccagctactcgggaggctgaggcaggagaatggcgtgaacccgggaagcggagcttgcagtgagccgagattgcgccactgcagtccgcagtccggcctgggcgacagagcgagactccgtctcaaaaaaaaaaaaaaaaaaaaaaagtcctgagttgaacattttgtatttttggcgttaggaaaaatgattaaaatacccctgtgagtgttttagtttctctctctctctctctctctctctctctctctctctctctctctctctctctctctctctctctctctctctctctgtgtgtgtgtgtctatcgggactcttgctctgtcgcccaggctggagtgcagtggcgcgatctcggctcactgcaatctctgcctcccgggatcaagcgattctcctgcctcagcctcccgagtaatcgggattacaggcataagccaccacgcctggctaatttttgtatttgcagtagagacggcaggctagtcttgaactcctgacctcaggtgatccgccctctcgggctctcaaagtgctgggtttacaggcgtgagccaccgcgcccggcctagtctgtatgtcaataggcttttgaataaagtggttgcatatagggcgaatcggcttcctgctatcatcgtcccgggattatgctctgggactccgacagggtgcggaactaatgtaagagggtcgaggacatcgccggattaattttcctgcgaggcctggtagctggttcctttcgcgtttcctgtcagcgcgcatgcgccgcctgcgctccgccgctcgcgcctcgggctcggctcgggctccgggatgtccgcgctgtgcgaccctcccggggccccagggccacctgggcctgccccggccacccacggtcccgcgcctctcaggtagttagagcccttggcaccttccccccatcgcgcggccccgcgccgatccctagccttctcggta

SEQ ID NO: 7350 - DNA, 2300 bp, Homo sapien
acccacctctgtcccagcctcaccttccatggctgtcttctctttctgggcaagccggatctgctggaggagttttctgcgcttcttccctgacagtgtaatgttggcacgtgcactggacctgatgggtaagtggaaataaagagagctaggttaacctgaaccaactgaggtcacacaaatagttctggctatagaaaaagtattaaataggctgggcgcagtggctcacgcctgtaatcccagcactttgggaggccgaggcggctggatcacgaggtcaggagatcgagaccacggtgaaaccctgtctctactaaaaatacaaaacattagctgggcgcagtggcgggcgcctgtagtcccagctactcgggaggctgcggcaggagaatggcgtgaacccagaaggcggagcttgcagtgagccgagatcgcgccactgcactccagcctgggcgacaaagcgagactccgtctcaaaaaaaaaaaaaaaaggaaaagtattaaataaatataatataaatagtaatagaaaccctaaatatttacattgaagaagctaatgaaaggacatagatcgggggcggtggcttatgcctgtaatcccaacactttgggaggctgaggtgggcggatcacctgaggtcaggagttcaagaccagcctggccaacatggtgaaaccccgtctctactaaaaatacaaaaattagccgggtgcagtggggagcacctgtaatcccagctactcgggaggctgaggcaagagaatagcttaaacccaggaggcaggggttgcagtgagccgagatcatgccacttcactccagcctgggcaacagagggagactctgtctcaaaaaagaggaaaaaaaaaaaaaaaaaaaaaaaggacacagaaagtaattaatgggatgggaactcttcctcaagacacaggaggccttgaaacttacaagtgaaatcctatgagtgcctttgggaaaattcttcgagttttatgcgcctatgtgtgcacttttctgtatgtaaaaataagtttacttataaaaatctgtgtgaatgtataacattacttggagaatggagagccaacagatttcctgatattcttttttttttttttttttttttgagacggagtctcactctgtggcccaggctggagtgcagtggcgtgatctcggctcactgcaacctccgcctcccaggttcaagcaattctcctgcctcagcctcccgtgtagctgggactacaggtgccggccacaacgcctggctaatttttgtatttttagcaaaaacggggtttcaccatgttggtcaggctggtctcgaactcccgacctcaggtgatccgcccacctcagccccccaaagtgctgggattacaggtatgagccaccatccccggctttcctgagattcttaacagaatccaaaacccaaagaaaggttgtctgctacaggtattgtgagaggctatcagagcttaggaactaacagccgacagacattccccgcataagcgtcagtgcacaaggtgagctgagaggtgaagctgctccggagctctgcagggaggaaggaagactcggtggggacgaccaacaggaagagggtctagtacttacgcccgcttcttgaggtggtgccgcgtgatcagcccttggtctatcacagccccgaccacccggtgcctcagacgccgctcccgattcaacacccgccggcgtttgaacagcttcttcttcagctcctgccggggagaaagatgcgaatcagatggagtgggctcgccgcgacccggggcccctccaccaggcagccccggcccctcactgatcccatctcgtgcgagataaaagggctcaggaacgcttgaggaaacaaagtcgcggcccccacacagtcaccgttcggggccggttgatctttccccccggagctcccatagtcgcgattccactccagttcacggtccgtacttccgctcagcgccggatccgcggggctccgccccggccttccgcgggccaatcgcaactcgggggcgggtcctcgggctatataaaggagctccgcggtgcgggaggcctttcggagggtggtgagctagtaagtgtggttttagctgtagtagccagattgggcggccgggagtggtgggggtgccgggtggaaggctctgggcggggtctcaggaccctccttttcttggcggggatcgggcttgtggtgccgctccccgtaatgtacggaggaagagggaaagggctctggccccctcggcgtcat

SEQ ID NO: 7351 - DNA, 2300 bp, Homo sapien
aatgcaggggccgtaactgacttccatcttggctctgcccagaacattcagctcacagtggccccctgaatgagccacctccctcacctggctcttcactttggtcttggaagaaggcctcagcatcctcttcctcaccatcagtgagcagcagcagctcctcatggggcaaatggagatccccactctcttcattcacctcactggattccaccacaatagacggcagatgggacttttgagagaaatcctgaatagggacagcagggaggttgggccaaactggagggtaagccagctgccagacacaggctgaggaagtactaacctgaatgtgctggtgaccttcaaccttgccaatttttcctctgtcccagagagggttgggcagcctgggactttctggatgctgggaggagcctgggctatttctagtccaaagcccatcctccttgcttctccctggcacaagggccatggtggtgattcttagagtgcaagatgattgaactcagaggagagtactgctgcccagtgcaccccacaaactgttcctttaatcttctttggagcctggccccttaagcaccgactgtgctaagcgattatacgctttcaggggaggggaaaatgcccaagaggtgagataggatctttatttctacttactccctggagacactgggatggcaacaagggtaggagacaagggcacctggattaaagccctgtgggccaagagttgtgataaccaacttggaatttcctgactcctatgcttactgatttttcccaacctggtatgtttgtatgttatttaatgaatatttatatggtgtttactctttggcaggagctgttttaattgctttacatataactaatttaattatcctaaaactgtgagacaagtactgttgttataagcttcattttctgatgcagaaaccggggcacaagaacttgcctataatcagtcacacagctaagaggtgttttcttctgtaaagcagaattcagtatgttacacgaatccagccttttagtggttgaaaacaaagcaaaacagccgggcgcggtggctcacacctgtaatcccagcactttgggaggccgaggtgggcggattgggcggatcacgaggtcaggagttcgagaccagcctgacctacatagtgaaactctttctctactaaaaatacaaaaaattagccggccgtggtggcgggcgcctgtagtcccagctactcgggaggctgaggcaggagaatggcgtgaacccgggaggcagagcttgcagtgagccgagatcacgccactgcactccagctgggcaacagagtgagactctgtctcaaaaagcaaaaaagaaaacgaagcaaaacaaaaagcaataccagccgggcgtggtggtgcacgcctgtaatcccagctatccgggaggttgaggcaggaggatcgcttgggccctggaagtcgaggcttcagtgagccatgatcgcgccactgcactccagccctgggcgacagagcgagaccttgtctccaaaaacaaacaaaaccacgcccacacactaacaacaacaacaaaaccaaaaaaaaacccaaacaataccaagtgtgtaccatgacgagaaaaggaataggttgtttgtaaaataaatgttaaagataagtaactattacccatttctccaaccagtatacttgactttgagtgtttgttccagagttgaggggatggagagggatgtgtatgtgtgtagatgccctccatgcgctgtgttgaaaacgcgcgggtgactgcaggaaaccacagagcacagctcgggcctctactgatcgggaaacgtcggaagacagaaaaatgggcaatcataaaacccacggcaaccatgaagacacgcactctccccctagcaatcccaccccggaattgaggacacagggtccccgcgctcagcccttggtgccagcacttcttggacacctcaaccccctcagctaaacctgagatccaagcgctccggattccaaacgtttcctcgagcaggtcctctctagccggccgcttatctatggtttctgctatagggcgctctagcctgcgccaaggggtagtgagaccgcgcggcaacagcttgcggctgcggggagctcccgtgggcgctccgctggctgtgcaggcggccatggattccttgcggaaaatgctgatctcagtcgcaatgctgggcgcaggggctggcgtgggctacgcgctcctcgttatcgtgaccccgggagagcggcggaagcag

SEQ ID NO: 7352 - DNA, 2300 bp, Homo sapien
atggtgaaaccctgtatctactaaaaatacaaagattatcctggcatagtggcgcacccctgtagtcccagctactggagaggctgaggcaggagaatcgcttgaacccaggaggcggaggttgcattgagttgagatcgctccattgcactccagcgtgggcaacaacacagaaattctgtctcaaaaaaaaaaaaaaagctttatttggtgttctgactttaataacagcagcctttttttcaattgcagtcttgcttgggaaccacaggatagacaaaagaggagcaacttggttgactaggctgtggggctttgaccccacttatttaatcccctcagtggcagctccaataaatcctgaccagatccagagattggggaccactttacatttctaaattaatgttttacaataatcctcgtagttatgacctttcatagaacagggctgaggtttgtaacatgctggagttcaaccaggatctgtgactcaaagcacactccttttactactagtaagtcagcctcctaagcttgtttaaccagaggttaaataatggccacagaaagcattgtggcatatgttaagtgctagatgcccctccaatctcgctccaaggacaggagtcctgagtgtccactataggcatccattacttcaagacttcccaggatagttcagatttcaagaatgtcccacggttatccctggaagtacactccaacctgacaccacatgacctgttttgaaaatgtggttggccgggcgcagtggctcacgcctctaatcccagcactttgggaggctgagacgggtgaactgcctgaggtcaggagttcgagatcagcctggccacatggtgaaacccgcctctactaaaactactaatatcagccgggcgtggttgcggacgcctgtaatcccagctacatgggaggctgagtaaggagaacagcttgaacccaggaggcagaggttgcagtgagccaagattgcgccactgcactcctgcctgggtgacaagagcaagactccatctcaaaaaaaagaaaaaatgtggccgcggcagggcgaggtggttcacgcctgtaatcccagccctttgggaggccgaggcgggcggatcacctgggtctggagttcgagaccagtctagccaacatggtgaaccctgtctcaactaaaaacacaaaagttagctgggcttggtggcgcgcacttgtgatcccggctactcgggaagctgaggcaggagaattgctggaacccaggggcggaggttgcagtgagccgagatcgtgccactgcactccagcctgggtgacattgactccgtctcaaaaaaaaaaaaaaaaaaaaaatgtggtcagatacctatcgggatcagcctcttctggtggggtgggacaggcagcagctccaggccgcgcccccagcaccgaccacgcgtctctaagcattggtaggtgtcgactgcagggctcattctgggtggaggaacatgattttattggttctttcagttcaccacatccgactcgcgtctcggccctggcccgccttgcggaccttaaagcagtcagtccagggtttgggggaaacgtgctcacccgacggcagctcacaggaccccggagagtcctggcatggtatctcggtccggactctccgctgggcccacgaaggagaaaggctgcctcggattcctgcgcccaagccaaggtccggcgcccacggaggcaagtccggtctcacggtgacctcccgccggcgccgccttcgccgccaaccatccagttcttcctccaggccacgttctcctgcgtggtcgctgcctcctgcagagtggccagcaatagctgctgggtcctggccgcctcctccctgctccttgggtcctgcagtggcatctcctgagggcaggaaggggagttcgcaggagctccagtccggggctctccacccgcccacccttcctcgggactaccagttgcttctacctttagcatttcctgcttccgccgctctcccggggtcacgataacgaggagcgcgtagcccacgccagcccctgcgcccagcattgcgactgagatcagcattttccgcaaggaatccatggccgcctgcacagccagcggagcgcccacgggagctccccgcagccgcaagctgttgccgcgcggtctcactaccccttggcgcaggctagagcgccctatagcagaaaccatagataagcggccggctagagaggacctgctcgaggaaacgtttggaatccggagcgcttgga

SEQ ID NO: 7353 - DNA, 2300 bp, Homo sapien
cagtggggataaatgcttaatgggttaaatactgtagctggaaggcagacagcagtggtcaaagcaggcttttcttagaaggcaaatcctgaatcctgaaaaactcctgggagttagtttactaagtgaagagacaggacatcctaggcggagactggttggtgcacaggccaagaggagggtgaagtctggtttgcaatatgcacagcttaccctcaagtggtgggtgatgaaactgcacaataactaccagcatttacatactctgccttgccaggcaccaaagtaggtgctattgtgatctccacttgagagggggttctaacccccctccccgcaaaaaaagccaaggtgggcgcagaaggaagtcagaccactagcatttaagttgtcccagatggccgagtatgtagctcacgcctttaatcttagcactttgggagggcgaggcaggtggatcacttgagctcaggggttggagaccagcctggccaatatggcgaaaccccgtctctacaaaaaatagaaaaattaggccgggcgcggtggctcacacctgtaatcccagcactctgggaggccaaggtgggtggatcatgaggtcaggagttcaagaccagcctggtgaagatggtgaaaccccgtcactactaaaactacaaaaattagccaggcgcggtggcagccacctataatcccagctactcgggcaggagaatcgcttaaacccggggcaggcagaggttgcagtgagctgagattgtgccactgcactccagcctgggttacagagtgagattttgtctaaaaaaaaaaaaaaaaaaaaaaaaaaaaggagagagagagagaaaagaaaaagaaaaattagccgggtgtggtggcatgtgcctgtagtcccagctacttgggaggctgaagtgggaggatcgcttgagcccaggaggctgaggttgcagtatgtcaagattgcaccactgcactccagcctgggcgacagagccagatcctgtctcaaaaacaaaaatagctgggtgtggtggctcacgcctgtaatcccagcactttgggaggccgaggtgggtgaatcacctaaggtcaggagttcgagaacagcctgaccaatatggagaaacctcatctctactaaaaatacaaaaatggctaggctcgttggctcacgcttgtaatcccagcactttgggaggccgaggcaggtggatcatatgaggtcaggagttcaagaccagcctgaccaacatgatgaaaccctgtctctactaaatatacaaaaattagccgggcatggtggcgtgggactgtaatcccagctactcaggaggctgtggcaggagaatcgcatgcacccaggaggcggaggttgcagtgagccgagaccgcgccactgcactccagcctgggcgacagagcgagactccctcttaaaaaaaaaaaaaaaaaaaaaaaaagctgggcatggtggtgggcgcctgttatctcagctatccgggaggctgaggcaggagaaatgcttgacccgggaagcggaggctgcagtgagcagagatcgcgccactgcactattgcactccagtctgggcaacaagagtgaaactccatctcaaaaataaaaaataaaaaaaaaagtaagttgtcctagatggtggaagtgtcacggatttttaagcagggaggtgaagacaggactacatgattgtgttttgcaaaaatccctttggcagtcaggcagaggatggctcaattccctaaggagaatgagtgggccaaagagcaagacatttcttctgctcctggcaaacattgccaaagaacttcccaaagcattgcgctaagggaccatattccttctaatttctaaggagggtgaggcaggatgaagttccgggaactggcttcattccgcccacgggtttcagagccgcaccagctttcttccccacagcagcctggcgccttggcttggtgggttgcctccctgttcccacccacggaaagtcctggcagcagggccagaagttttatggttctcagcggcacccgtcgacatccgcccccacgtgacccaaacagatccggcacttccgcttcccctcggctttcttctcgtcggtgttcccggctgctatagagccgggtgagagagcgagcgcccgtcggcgggtgtcgagggcgggttgcctcgcgctgacccttcccgccctccttctcgtcacacaccaggtccccgcggaagccgcggtgtcggcgccatggcggagctgacggctcttgagagtctcatc

SEQ ID NO: 7354 - DNA, 2300 bp, Homo sapien
tccgtccaccttggcctcccaaagtgctaggattacaggcgtgagccaccgcgtccggcctgtgagcagaatgttttaaagcaccccgaggaaggctgatgggctgacagaattaagagctactcttttgaaccgttggcttagcaagagttggggtgactcttgagagacagacaacattgaggctgtggcatatggccctcccacaggagacttcccaaggtccttggcctttgttagaacctggtatagcaggttctggaaactgtgtgggtgggaggcaggggtgacagagccagctgtaaccaaactcacttgaattgccctagaaattatttctgggacatgagaaggctggtgctctctggtaactgctactaccttcttgtccctacttcctgcctcagatacctgctatacaacttcccgatgacctgcgccttcataggtgttgccagcaacttcaccttcctcagcgtcatcgtgctcttcagctacatgcagtgggtgtgggggggcatctggccccgacaccgcttctctttgcaggtcgaaaggggcaaggacccccttttgtccctttgatctttgtgggtggtcaggggtatgttggggattaaggcatgagggtcctgattgttagtgagggaagtcagtcctggctgctcagtagtttttcctccacaggttaacatccgaaaaagagacaattcccggaaggaagtccaacgaaggatctctgctcatcagccaggtaaaggtgttggctggggagctgttgaggtgggctaggttgagctgggctgggccagaaggagtccctgcttcatccagtatgaggcttagggtatcaccgactgagacaagggtcaaaggaaaggcgaggaaggtgaggttggcactgccgtccaggcacagccaccctaaccctaacctgtcctctccctctttggaggtgcagggcctgaaggccaggaggagtcaactccgcaatcagatgttacagaggatggtgagagccctgaagatccctcagggacaggtatggcgcagccaccacactctctccttcctgactccttggctttctccttcagtgtctgggtctgacccctgcattccccttttggctgcagagggtcagctgtccgaggaggagaaaccagatcagcagcccctgagcggagaagaggagctagagcctgaggccagtgatggtgaggggcatcctgcagcgtgacctgggtggggcccccggttaatctaatatcccatttgagattttgtttttccctttcctggcccaggttcaggctcctgggaagatgcagctttgctgacggaggccaacctgcctgctcctgctcctgcttctgcttctgcccctgtcctagagactctgggcagctctgaacctgctgggggtgctctccgacagcgccccacctgctctagttcctgaagaaaaggggcagactcctcacattccagcactttcccacctgactcctctcccctcgtttttccttcaataaactattttgtgtcagcttcttccttgactctgaaatgggttcagggccatttgaacaccctgtgtcccccatgcatctctcactttccgccattagaggggaggtcttcttgtccaggggaaggcctccagacctgggctattttaagcacagatgtttccattcataagcctaggaagtccaaggagggagaagctatcctggcccctagcaagctttcccactccctgcatgtgactttcatctcccccagaggagggggatggtgtagggcaggtctgcagagctgggagacatcattctggccccctctacacccctcccttcctcccttcctccctttctctgtccattgggaggcagaagacaggaaatgactgccatggatgtggtaggatttttaccaaaacagcattttgcggctcaggcccgtgctgttcgcagctgttttcctctaatatcagccaggtggccgccttctatgttcccctccccatcccgttgtatgacttcagccttcggattctaagctcctggctgctttccacattccactccccttccagaacccaggcatcctgggctccagctgaaaccattgcatgtggctttccccatccctggccccgtgactcagtccctctgaagggagcagccctcttttttggcaatcaccagggaggtggggggaggaggaggggagctaggtggtgacatcacagtcgaaggttataaaagcttccagccaaacggcattgaagttga

SEQ ID NO: 7355 - DNA, 2300 bp, Homo sapien
agctgctctgccacctggacgccacccctggccatgggatgcagcagctggtggttcctggaaagagagggtgagggaaaagagtgactcctttccccagggaggtggggacaaaacagcttactggactggctttgaggaacgagagatagcaggatagcaaagtcattgtttcatatatatggcctttctccaaatgattgtgccactctgccaattaccccttccctttcctccactgtgttccctcccgcccagtgctaaatctcctcagtggaattccttctccagtcatttgatgctgggacaaaccaccttgattctcattcacagctatataacaaagaataagcaccttacgattcttagaaagagctttacacacacggtgatactgaatccacactgctaggcagctgcacggagagaatgtgcgacttgcctaaggtcgcacggcctgactcgaaaccagtagccttagagtagccacaattgcttcccgagtttctcctctccgcctcgagcagagctcgctcaccgacacggctacaccccacgcccggcggagcgccctgcagccaaccgccgcttcccgccagtcccctccagctcgggggtgggcaaagcgcccggagcccctacctaatcgtgcaaccatggaaaccagcccgccggctgccacagggctgccgactcaccagcctcgcgcgctgccagggcaaccgtgagacgggacttccggctcccggggaagtcccgcccctctccgccggccgcttttgtagccgtgggaggcggggcttcagcccagggcggggtccagcacggcggggcggggcgggacggggcggagccttcccgagctgcgaggtcgctgtctccttgcgctcgccactggctctctctgcggcaggtttccctccggttaccgtgaccaaaggggaaagacgcctgcctccctgcaggccccaagatgtgccccaggggatgcgctgactgcagcctccgctcggctctcccttgagactgcaatcacagccctccgtgcacaccttcaccacaggccatttcacccgcgaagcggccgagtgaggcggtcatccagctggcgctgatttttatcgcccacagctcctaggacctgtaggcatctaaggcgggggcattcgcctagagcatgttgcagtttgcggcaacctgggcctcttgcgttgttgcgcaggcagattagtgccctgttcccagcgtggtagcattgtggacctcctctgaccctaactggatacactctccctcagagtccccacagcacattatctagactagcttttggcagtcttctattttgtagacgtctaatcaccccagataaagtccttcagaggcaaggccagtgttgtgtacatctttgcacactgctgcgggcgtgggaagtaatctattcaaaatgaatgaaattcttaaaaccaatccatccccccgcccccttcacgccagcccacctatttccagtatatttctgctgactgtccccacaagggcccctacctcctctttgtccggtcctttgatctggtctccgcacacctctttttccccagcttcctccttttggtctaccttttctgtagacatcttcctgacgagcctctgttgactctggatcttccactgagtcacttgtggctaaaacgtgaagtggcgatccagacgctgatacctgtggcgcatcacattttcctggatatggaaaatggagggtccctgggagagaaacgaagattcaggtgctaagtgctgtgtcagagtagagggaggaaaggaggaggggggcgactgcccagctgatgtcagattttcaaatgagcagggtcccccgcagccagtacagactccactgcaggggccgtcataggcccagaccacgccatttgagagggggagtcggccttggcctcagctctgttggggaggtctctagcccagagtcaggatgcctgcaatgggggaggggcaggcagtgaactagcgacagtgggggtgtgcgcagggatgcaggcagctaggctcccccactggccaggcagttggtatgctccaggatctgagcagctccttctagcatccttcatccttcaggtaccagccatccagacagtgcttgagctgcagaaactgagaccagacctctggcctggccctccccaggggcctcctttcgtatagtcactgcttctgcatcagatactttcagctgcaactccctactgggtggggcacccatttcaggcagaaggttt

SEQ ID NO: 7356 - DNA, 2300 bp, Homo sapien
gcacagcacagcctggccaactaatgggagccagccagggtcccacctacctttatccgacacaagctggcttcaatcttaagctgttccaccatcttgcgtgcttgcccaatactcatagtgctgttcaccggggtctcacctttcatcctggaaaaaagagggacctctcagagcacagtctcagctggaggcccccctccatgctcactccacaccaacctttacaaggctgtggtcataccccaatattttgttcccctcctatcctcctcctcctcctccagtggactgtctcatccctgtattcctcatggaaaaaaatagggtgggatgaggtgctccccaaactccctcatggcctgggccacagatcattaaaccttacacaaatgatttaaggcttttcagcccttcaaaccatgtgtgttcccagctctgaagacctcaaccaaccctgatgaggagggcacatcacccctgtctgctccagtgagccccaacaggagaaaaacaggccattacttacctgaagccacaagcggcagtagcagccctgggtgtagggtcagtggagggtaccaaaaccttctgcctgaaatgggtgccccacccagtagggagttgcagctgaaagtatctgatgcagaagcagtgactatacgaaaggaggcccctggggagggccaggccagaggtctggtctcagtttctgcagctcaagcactgtctggatggctggtacctgaaggatgaaggatgctagaaggagctgctcagatcctggagcataccaactgcctggccagtgggggagcctagctgcctgcatccctgcgcacacccccactgtcgctagttcactgcctgcccctcccccattgcaggcatcctgactctgggctagagacctccccaacagagctgaggccaaggccgactccccctctcaaatggcgtggtctgggcctatgacggcccctgcagtggagtctgtactggctgcgggggaccctgctcatttgaaaatctgacatcagctgggcagtcgcccccctcctcctttcctccctctactctgacacagcacttagcacctgaatcttcgtttctctcccagggaccctccattttccatatccaggaaaatgtgatgcgccacaggtatcagcgtctggatcgccacttcacgttttagccacaagtgactcagtggaagatccagagtcaacagaggctcgtcaggaagatgtctacagaaaaggtagaccaaaaggaggaagctggggaaaaagaggtgtgcggagaccagatcaaaggaccggacaaagaggaggtaggggcccttgtggggacagtcagcagaaatatactggaaataggtgggctggcgtgaagggggcggggggatggattggttttaagaatttcattcattttgaatagattacttcccacgcccgcagcagtgtgcaaagatgtacacaacactggccttgcctctgaaggactttatctggggtgattagacgtctacaaaatagaagactgccaaaagctagtctagataatgtgctgtggggactctgagggagagtgtatccagttagggtcagaggaggtccacaatgctaccacgctgggaacagggcactaatctgcctgcgcaacaacgcaagaggcccaggttgccgcaaactgcaacatgctctaggcgaatgcccccgccttagatgcctacaggtcctaggagctgtgggcgataaaaatcagcgccagctggatgaccgcctcactcggccgcttcgcgggtgaaatggcctgtggtgaaggtgtgcacggagggctgtgattgcagtctcaagggagagccgagcggaggctgcagtcagcgcatcccctggggcacatcttggggcctgcagggaggcaggcgtctttcccctttggtcacggtaaccggagggaaacctgccgcagagagagccagtggcgagcgcaaggagacagcgacctcgcagctcgggaaggctccgccccgtcccgccccgccccgccgtgctggaccccgccctgggctgaagccccgcctcccacggctacaaaagcggccggcggagaggggcgggacttccccgggagccggaagtcccgtctcacggttgccctggcagcgcgcgaggctggtgagtcggcagccctgtggcagccggcgggctggtttccatggttgcacgattaggtaggggctccgggcgctttgcccacccccgagctggaggggactggcgggaagcggc

SEQ ID NO: 7357 - DNA, 2300 bp, Homo sapien
ctgtacgactgcactcccgcaccctcccctaaatcccccctcttcggcctgtttaccttttaacttggcttcgttgcacgtttgtgtgtgtgtgtttgctcttcgcagcctcttgagcgtcttttgtacttaattcttacactgtggacgctctctcgcgcccgccatcccccgacccctctgatctccgatccttgacgatgtctagcctgcattgattggcccttttccctgggtatggcagatctattgcttgatgatcctctccccccaagaattctaacacaggagctgtcctgaggctctggatgactttattcttcaaatggctttaccctcccagtagctccaggtgagactgagagcaagaacctggcccatccctctccattgtctgagcaggtcaccgagggaagcgggcaggacgcgctggcagagtctgacggggccctgctgtgggtggagcaaagggtgcctcatatctctggggtgcttggggtcggccacaaaggtggtaggaaatggggtcgacagataggtgagggtgggccttgtgcttcagataacctcacatggtcaggcaagggttagggatgggatgcaaggagcctaaggggctcacaacaattactgacctaaggaagggcccaggagagggaaaagggaggagttgtgagaagggacaggggagctcagaggagagcacagaagaacttcttctcccggaaggggttctccgaagtgggcacaggggtgatgaggggatcctcacaggcgtgggcatcacagtaagtcatcaggtctgctgctgccttggacacctgggacacagccaggaagggtattgttagccaggacctctgaaggggactgcagcctccctccccaaatgggttctcttttgccatctccagggctccttacgacttgtcttctccctcatcccccccagaggcctggggacagctctctctacagagccccagactcctcccctgacctcagggagtgaaggaaagaacgcatctcttatcttgagctttgggaacctgcagcacagcacagcctggccaactaatgggagccagccagggtcccacctacctttatccgacacaagctggcttcaatcttaagctgttccaccatcttgcgtgcttgcccaatactcatagtgctgttcaccggggtctcacctttcatcctggaaaaaagagggacctctcagagcacagtctcagctggaggcccccctccatgctcactccacaccaacctttacaaggctgtggtcataccccaatattttgttcccctcctatcctcctcctcctcctccagtggactgtctcatccctgtattcctcatggaaaaaaatagggtgggatgaggtgctccccaaactccctcatggcctgggccacagatcattaaaccttacacaaatgatttaaggcttttcagcccttcaaaccatgtgtgttcccagctctgaagacctcaaccaaccctgatgaggagggcacatcacccctgtctgctccagtgagccccaacaggagaaaaacaggccattacttacctgaagccacaagcggcagtagcagccctgggtgtagggtcagtggagggtaccaaaaccttctgcctgaaatgggtgccccacccagtagggagttgcagctgaaagtatctgatgcagaagcagtgactatacgaaaggaggcccctggggagggccaggccagaggtctggtctcagtttctgcagctcaagcactgtctggatggctggtacctgaaggatgaaggatgctagaaggagctgctcagatcctggagcataccaactgcctggccagtgggggagcctagctgcctgcatccctgcgcacacccccactgtcgctagttcactgcctgcccctcccccattgcaggcatcctgactctgggctagagacctccccaacagagctgaggccaaggccgactccccctctcaaatggcgtggtctgggcctatgacggcccctgcagtggagtctgtactggctgcgggggaccctgctcatttgaaaatctgacatcagctgggcagtcgcccccctcctcctttcctccctctactctgacacagcacttagcacctgaatcttcgtttctctcccagggaccctccattttccatatccaggaaaatgtgatgcgccacaggtatcagcgtctggatcgccacttcacgttttagccacaagtgactcagtggaagatccagagtcaacagaggctcgtcagg

SEQ ID NO: 7358 - DNA, 2300 bp, Homo sapien
atctattctttaggacatttaagttgctgttagagctaattaatcattttttaaagtggttaatcatagctcatgcctggtctctagttactgcttaaaccccattttcccacctagcgctgtagccacgcagttataatctgatgggtaggaacattgagtgtgcagaaaaattgaagagaggcgctttgttttgtttcgttttgttttgagacggagtttcgctcttgttgcccaggctggagtgcagtggcacaatctcggctcaccgcaacctctgcctcccgggttcaagtgattctcctacctcagcctcccaagtagctgggattacaggtacccgccaccacaccggctaatttttgtatttttagtagagacagttttcaccgggttggccaggctggtctcgaactcctgacctcagatgatccgcccgcctcggcctcccaaagtgctgggattacaggcatgagccaccacgcccggccggccaaaaagaggctttcttaaaaatcaaggttacatttattaaacactctaattttttttttttttatttaaccatgtctgagctgttgtggaaaatttcacttactcccctggaacttgcccaacaccgtgatacagtgggggtgagggaggcaaggtgcttggtccctgccatgccacatttgccatttaagcatgtacagtacaatctattcattgggtatttgggtgcctgatatgtgccattatcaggatacagggattaaaacggacctgacctgattgatccttcctggaattttcaccgtgccaagaaggaactgaggctcctccgcaacagaatgggggtagggtcccactccaggagggcaaacttctcccgtttcttcatctctaggatgagggaattaattagaagatctccaggacttcttagagctcagaagttccatcaacagtaaaaagttgcttgggacaccttaaggtgacccaagttcactgggtgtccctggaattcatgaagatatccttaggaggctaagttcagttgctggtgataacaacctttcttcctttggtttcctttatccactttgctgtcttctgtgcaaagatacctggaagctggaggtaatgagctgtccctactatttcaaagcagcctcccttcccgaagtatatccaggcacaaaacaggagccagcctaggcttttcctggggaggatgcgtccctgagtttaggggacctctagcaggagcacacgtactgggattgttacgttctttgtcttgtccctggtcccatctcgcctctgtgcacccttggaaggaaaagattctaggaggcattctggtgttcgtaaacctccgccatgtttgagtcctggagatgaccatgacatgttaagccttaagtttggtccctgcccagacagcatgctggacttttgcaaggcacattaggggtgcggccactgctttctggctgctgtggctgaatcggcctgaggggaaaatgaaagcaaaaacaagccccagttctactaggaaacccaaactgagcaacttcaggcttatccagctcctgggaagaccaggaagcaactgaggagcggtgcaccgagacggacagggtcgggggttaaccccctgccgctaatatttccgctccaaagggagcctctcctttcttggcaaaatgtagaaacctagattccctcgcaagatccacgcgaccagcgtcggccacgctgtacttcctggggtccccttgtttagtgattcttcgttatggccgcccgtgtgccttcgactcaatcgggaggacaccgaaatccagatttcggggttgcagggcgcgggccccggcttggttagggcaggggcagccattttgagaccagaagagggcggaagggaccatattgagaacgccggttgcctgggggccgccattttaagagaagccctgtacggtaaactccgtgacgtgggggctgccatgttggtacggccatcttggaatgggagtggctgtgggcgcagccatcttaggtataaaatcggctccagtcgcggtaactgaagccaagctccgcccctaccctcctaagagttcctctgctgtacgactgcactcccgcaccctcccctaaatcccccctcttcggcctgtttaccttttaacttggcttcgttgcacgtttgtgtgtgtgtgtttgctcttcgcagcctcttgagcgtcttttgtacttaattcttacactgtggacgctctctcgcgcccgccatcccccgacccctctga

SEQ ID NO: 7359 - DNA, 2300 bp, Homo sapien
cgctgtgcctagccgccttggctcgttttgaaaaagatacagaaagggaaatagtgagccaggcgcggtggctgacgcctgtaatcccagcactttgggaggttgaggtgggtggattacaaggtcaggagctcacaaccagcctggccaagatggtgaaaccctgtctctactaaaaatacaaaaaaaattagtcgggcatggtggtgggcgcttgtaatcacagctactcgggaggctgaggcagagaattgcttgaacctaggtggcagagtttgcggtgagctgggattgtgccactgcactccagcctggacaacagagtgagaagactcggtctcaaaaaaaaaaaagtgaccgtagggtaatttaaactcaaaggatcaagggagaggcttctgtgaatcagttatttgttaagtaaatatttctggtacatctactgtttgtctacatttcttattctgctttttttttttttttttttaaagacagagtcttgcccttgtcgcccaggttggagtacagtggcgcgatctcggctcactgcaacctccgcctcccgggttcaagcgattctcctgcctcagcctcttgagtagctgggattacaggtgcccgcccagctaatttttgtacttttagtagagacagggtttcgccatgttggtcaggctggtctcgaactcctgacctcaggtgatctgcccgcctcggcctcccaaagtgctgggattacaggtgtgtgccactgcgcctggccgcagggagagattattatggttcagattaaaatatggcagttggagtgaatgatctcattggtataacttgatttctggtatcacgttatgtttgtgttttgtttgttaatttggctgaagtctgtaatgcaatacataagacagagagtaatgtctacataagaaatattaatattttgattgatcctcctattcccttaaaacgtgattttttttcccattgctgcctttagttcctgacatcccaccgagtctagcaactgcttgctcttcaaatactgataatccccaggcatgggaactggtttgcatatctatgagccagatcctcagagtttactgagaatgaactatgccagtccataactcttacttaggcactcagagaaatgtagctcagttttataaaattgagggccaactggattcatctaagaatcatgagagccccattgaactgaatttccactgggactcagcttctgaagttgacgtccagagactggcagatgtgctggcctatcacggacaggtggtaaatgagagcccttgtactcttgtcttctcttctccttgtatagatgagcagatgcctttaggcttgggtcagtttctcattgagtctctcttctgtcagcgaggccagagtgcagtggcactcagcctcccgagtagctgggataacaggcacctgccaccatgcctggctaattgttgtatttttagtagagacagggtttcaccatgttggccaggctggtctcgaactcctgacctcaagcagtccgcctgccttggcctcccaaaatgctgggattacaggcgtgagccaccatgcccggccatctctgagtctctttttaaaatgttatttcttagcatcttatctgaccaacaccagaactttctcagttacttttagcctctggttacctgcttctgtcctgatgagaaactttaacccagttcactcctaatttattatagatcacttaagaacttgtaaatctacatagccctttgcctgggtctgttacaatttagggaaaacttagagtagaaaaagttaatgtcattatttagatgcgagtgggtataaacgtagcacatttttgtgcagtaatagatgaggcatagaaagtcatatgcttcttgtagagttttcataatgagttcttacccatctatgcacttttcaggcccacaagcttctctcttactcttatagccaacttctctttgcctgaaaaatgcgactatatggatgaggtgacatatggggagctggagaaggaggaagctcagcccattgtcactaagtacaaggaggaggcaaggaagcttctgcccccctccgagaagcggacaaatcgccgaaacaaccgaaacaagcgtaaccggcagaaccgaagccggggccaaggctatggtgagtcttggggacctgccagccccctacttcagtccattctttgtgcttagtacagcaagatgtgcaagggaaggccaaggaaaccaagtcaggtcattaacaat

SEQ ID NO: 7360 - DNA, 2300 bp, Homo sapien
taactctaaatgaactagattaagatttttctcttcactggttaactattaaactcgacactgttacactagaggctctcccttacagctcaaagaggagcaaggttggattttcagattctctgtggctcaagctctggtaacatgcttttaatggaacggactttgacggacttcgatttttgcttaacatttttacggcgaaaaagttaggtcaggtagcccaaagacctgaccctctaactgtgggcctagttctccgtgtaatccccaattgcttagcactttctcagctaagaaaaatataacaagcaccgtgggagactgttccacaggtagctcacaagtagttcgcatgcaaaatcactcactgccatccactatcaccaaggaaccaagttaggcaggaaccttcctcctgcaaagagtagggccacgagaggcggcctaacccctcagaaaggtgggtagagaatgaaaggagttccatcaaatggcactttgaggcaagcgagaacaaggactcggaccctgcggtgcagggcggggtgctagatcaggggcgcagccggcaggttggagccgggctcggctgccagctcctcaccctgttcctcggcggccttgtcacccggcacctcggatcccggcgtctcgtccccgctccgctcctcgggttcgtcttcctccctcttgccgaggccctgctcttcgccaccatttaccccgcctgacccggccgtggcctccgccggcttctcggaagcatctggctcggccgcggcctccatggctgccgcctccgggggctccggcggcggctgcgcggcctgacccaaggcttgagcagggggtggctcctcgtcctcgtcctcaagcagcgcctcctcgtcctcctcctcctcctcttcgtcctcctcctcgtccccgcccgggccgccgcccgacgcggccacaggccgaggctccgccttgcaggccccgccgggcccggccccgccgccgccggcctcgtcctcgagcatctcggcgtccagcgcctcctgcagccgctgcgccagatccaccttgaggccgcgcgagtccaggccccgccgctgcagctccgaccgcagctcggtcactttcagccgcttcacctccatcgccgccgccgcctcctccgcctcccgccgcctcctcccctgcgaaccgtcgaccgagtccgaccgcgcaggcgccgccgccgccgcccgcctccgcctcacgcgccagcactgagcccgcgcgagcgagcgcacgcacgcaggagcggaggccgcgcacggtcccgctgcgcagtgtttgcttctccttcgtctcccctccccctttcggctcacggagcccaaaacaacgcagcagggagctgtttcccctccaggcccttggttccccagccgcgggcaggcgcgcgcggaggacgacggagttcctcccgcttcctcccgccctctggcgcccccgggccaatcgccgccggtgcttttatcgcgcagccgcagtggagtccaagacgggcaaggctggctgcagctcaagtgcctcgtagcacggaagcgtgtgcgcgccggtctttcagtacttccagccggggagttctgcgcagccgcccggagctccccgatgccatgcccctcccaccacccttacttccgtctgacttccatttgctgtggcgttttaggggtcgctagcctcttttccctactgtctgtgcttgcagcagtaacgacaaaaaaaaagtcattagagaatgtgttgcaacatgtaagcctagtagcaattgtttttctggctaggaagcaaaagggctccccagaacgaagaaatactgtaatccgggccctcctttttcctcaacgcctcaacttctacccagcaacagaggcccttgaacccgccctttttctcttattggacaacttgaatcgtcatttgccgttccgattggtcatccgtgatcgtccggatttttccaattggcgaagctgccaggggaattttttttttttttttttcccaggttggtccgctgaggaggcggggtcgtttctgcgggattatttttccggagcctcttctgattgggtggtgtggcgcaatgcgcgcgaccctcaagataccaaactgtacgcatctctgaccctttcctctccttgctcctgctggtaaaccgaagcccaggagacttccaggtttgggcatctgcagagggcgaggaactggtcacggcgccgggtgggcttgcagctgtgacgcttatgtggacacctcagtgt

SEQ ID NO: 7361 - DNA, 2300 bp, Homo sapien
cctgcggtgcagggcggggtgctagatcaggggcgcagccggcaggttggagccgggctcggctgccagctcctcaccctgttcctcggcggccttgtcacccggcacctcggatcccggcgtctcgtccccgctccgctcctcgggttcgtcttcctccctcttgccgaggccctgctcttcgccaccatttaccccgcctgacccggccgtggcctccgccggcttctcggaagcatctggctcggccgcggcctccatggctgccgcctccgggggctccggcggcggctgcgcggcctgacccaaggcttgagcagggggtggctcctcgtcctcgtcctcaagcagcgcctcctcgtcctcctcctcctcctcttcgtcctcctcctcgtccccgcccgggccgccgcccgacgcggccacaggccgaggctccgccttgcaggccccgccgggcccggccccgccgccgccggcctcgtcctcgagcatctcggcgtccagcgcctcctgcagccgctgcgccagatccaccttgaggccgcgcgagtccaggccccgccgctgcagctccgaccgcagctcggtcactttcagccgcttcacctccatcgccgccgccgcctcctccgcctcccgccgcctcctcccctgcgaaccgtcgaccgagtccgaccgcgcaggcgccgccgccgccgcccgcctccgcctcacgcgccagcactgagcccgcgcgagcgagcgcacgcacgcaggagcggaggccgcgcacggtcccgctgcgcagtgtttgcttctccttcgtctcccctccccctttcggctcacggagcccaaaacaacgcagcagggagctgtttcccctccaggcccttggttccccagccgcgggcaggcgcgcgcggaggacgacggagttcctcccgcttcctcccgccctctggcgcccccgggccaatcgccgccggtgcttttatcgcgcagccgcagtggagtccaagacgggcaaggctggctgcagctcaagtgcctcgtagcacggaagcgtgtgcgcgccggtctttcagtacttccagccggggagttctgcgcagccgcccggagctccccgatgccatgcccctcccaccacccttacttccgtctgacttccatttgctgtggcgttttaggggtcgctagcctcttttccctactgtctgtgcttgcagcagtaacgacaaaaaaaaagtcattagagaatgtgttgcaacatgtaagcctagtagcaattgtttttctggctaggaagcaaaagggctccccagaacgaagaaatactgtaatccgggccctcctttttcctcaacgcctcaacttctacccagcaacagaggcccttgaacccgccctttttctcttattggacaacttgaatcgtcatttgccgttccgattggtcatccgtgatcgtccggatttttccaattggcgaagctgccaggggaattttttttttttttttttcccaggttggtccgctgaggaggcggggtcgtttctgcgggattatttttccggagcctcttctgattgggtggtgtggcgcaatgcgcgcgaccctcaagataccaaactgtacgcatctctgaccctttcctctccttgctcctgctggtaaaccgaagcccaggagacttccaggtttgggcatctgcagagggcgaggaactggtcacggcgccgggtgggcttgcagctgtgacgcttatgtggacacctcagtgtcgctggtggttcacctcggcttcccagtttatttattgacgtcaacaaataaatgttgaataaggaagaagagttagaattgcttgaagccctctggagttttagcactagtcccgcccactcccttctacttccaggtcgggggggggcgggtccaatagaaaggcggaagccagtgtcccaggcgttctcacgcccgcaacaattcctgagtagggccttgcttgagttcttcggaaagtctcatccacccccacatcgcctctttaggaagtcacttaatgttgggcttcattattcccacatccctttccttactacttgcctgcacttcttgagaaaaagactgcagaaaggagaggtggggctttcagtagaaacaagcaaaccgcaggtccctgtggggggactctccaggaagaagggtaatttcctgcctccttaaattggctgctactgtcagttattttgctcccaaccccagagcttcacttgctccttcacttcccagttccgcaagaaccgtgggc

SEQ ID NO: 7362 - DNA, 2300 bp, Homo sapien
aaattagctgggcgtggtggctggcgggcgcctgtaatcccggctactgggcaggctaagacaggagaattgcttgaacccgggacggggaggctgcagtgagcccagaccgcgccagtgcactccagcctgggagacagagcgagactccatctcaaaaaaaaataaaataaaataaaataaaataaaataaaataaaaaaataaagaaatgcaaactgataggccccacgtcagacccatccgaatctctggggatggggccgaggaggttgtgttttaacagactctccaggtgaagtctgagaagccctgctctatggcaacttaattacagccgcacagattgacaggttattccaattcatggcagaataaatggatgacagtaaaaaaaaaaaaaagtcagcgttttttcccccaatgttcacagatgttcatgttcctgtcttaatgctctctagccaccctttagccccgttcttaccagctagattgttatagcagtctgtctgggtggtatgcaatatgttttcttgttcaggcgtgagggccgggccctgaggtccgagattaggtaacggagagggcagactcggatccagaccccgcagctgaagcagagctcgatggtacctactcacagcatctcggtacttcccttcccggtagcgctggttcccttcctccttgtacagctgagcctcctgcagacgcttctccataactgtcgcccacggttcttgcggaactgggaagtgaaggagcaagtgaagctctggggttgggagcaaaataactgacagtagcagccaatttaaggaggcaggaaattacccttcttcctggagagtccccccacagggacctgcggtttgcttgtttctactgaaagccccacctctcctttctgcagtctttttctcaagaagtgcaggcaagtagtaaggaaagggatgtgggaataatgaagcccaacattaagtgacttcctaaagaggcgatgtgggggtggatgagactttccgaagaactcaagcaaggccctactcaggaattgttgcgggcgtgagaacgcctgggacactggcttccgcctttctattggacccgcccccccccgacctggaagtagaagggagtgggcgggactagtgctaaaactccagagggcttcaagcaattctaactcttcttccttattcaacatttatttgttgacgtcaataaataaactgggaagccgaggtgaaccaccagcgacactgaggtgtccacataagcgtcacagctgcaagcccacccggcgccgtgaccagttcctcgccctctgcagatgcccaaacctggaagtctcctgggcttcggtttaccagcaggagcaaggagaggaaagggtcagagatgcgtacagtttggtatcttgagggtcgcgcgcattgcgccacaccacccaatcagaagaggctccggaaaaataatcccgcagaaacgaccccgcctcctcagcggaccaacctgggaaaaaaaaaaaaaaaaaattcccctggcagcttcgccaattggaaaaatccggacgatcacggatgaccaatcggaacggcaaatgacgattcaagttgtccaataagagaaaaagggcgggttcaagggcctctgttgctgggtagaagttgaggcgttgaggaaaaaggagggcccggattacagtatttcttcgttctggggagcccttttgcttcctagccagaaaaacaattgctactaggcttacatgttgcaacacattctctaatgactttttttttgtcgttactgctgcaagcacagacagtagggaaaagaggctagcgacccctaaaacgccacagcaaatggaagtcagacggaagtaagggtggtgggaggggcatggcatcggggagctccgggcggctgcgcagaactccccggctggaagtactgaaagaccggcgcgcacacgcttccgtgctacgaggcacttgagctgcagccagccttgcccgtcttggactccactgcggctgcgcgataaaagcaccggcggcgattggcccgggggcgccagagggcgggaggaagcgggaggaactccgtcgtcctccgcgcgcgcctgcccgcggctggggaaccaagggcctggaggggaaacagctccctgctgcgttgttttgggctccgtgagccgaaagggggaggggagacgaaggagaagcaaacactgcgcagcgggaccgtgcgcggcctccgctcctgcgtgcgtgcgctcgctcgcgcggg

SEQ ID NO: 7363 - DNA, 2300 bp, Homo sapien
gtatatataaaaacatatatatattttttgagatggattctcctgcctcagcctcccaagtagctgggattataggtgccaagctaatttttatatttttattattattatttatttattctttttttttttgagatggaatttcactcttgttgcccaggctggagtgcaacggcacgatctcggctcactacaacctccgccccccaagttcaagtgattctcccgtctcagcctcccaagtagctgagattacagacatgcgccaccacaccctgctaatttttgtacttttaatagagacagggtttctccatgttggtcaggctggtctcgaactctcgacctcaggtgatccacctgcctcggactcccaaagtgctgggattacaggcatgagccactgtgcccggcccatttcttagttttaattcctatacagtaaatattgtatggcttgtaagaatgaacacagtgtcttgaagaggcatgatctcaagctaaggccaacatatcctgaatgtatgtagcacaagtttgttgtatagatgaactctccctaattctggttaggtctgatcggagggcctgactgcagaataaagtagagatgcttagggtggtgggtgaaggagtgaggattagggcaccgagtttactcctctagtaacactacctgggtcagacggggcagttatcagtgactcccaacttatagccttttcctctgggtgtgtagagactctcaaagatttcttcagtagacacggtttttgcttcttctctcctgtcctgggacattttatgatcctgaccccattcttacccttcctaccagcacctgctcagcacgctctggaaacaaagaacactctatcctctcactgtaaattgactgtagagtccaggctagggacaccacgacatcatccctgtagctgctagttctttcatgccatcactgagccgggagccccggaaacttagcttggaggagtggagcagtagggcatcttaaaatgtttttttgtttgtttgttttagatggagttttgctctgtctcccaggctggagtgcagtggcgctatcttggctcactgcaacctctgcctcctgggttcaagagattctcctgcctcagcctccctagaagctgggatttcaggcacgcgccaccatgcccagctgatttttgtatttttagtagagatggggtttcactatgttggccaggctgctcttgaactccggacctcaagtgatctgcccgtctcagcctcccaaactgctgggattaaaggcgtgagccaccgaacccggcaaatcttagaatttttgagaggaagggaccttcaagagacaaacgcagttcagggacgtggggctattgcccacagtcaccagttggttctctttttttgggggggtggggggatagggtcttactctgtcgcccaggctggagtgcagtggcacgatcttgactcactgcaacctccgcctcccgggttcaagtgattctcctgcttcagcctccccagtagctgggattacaggcgcgcgcccccaagacctgctaatttttgtatttttagtagagacggggtttcagcatgttggccaggctggtatcgaactcctgaccccaagtgatccgccctcctcggcctcccagagtcctgggattacaggcgtgaagcactgcgcctggcctagttggttctctttttccctgtcagcctgtagcgggagtggcttgctgtcagctcgggtccgacactgcagggttcccgacctccagcctcgccaggagagcgccgcgttcagcgactcggagccgggtacctcctgcctgctggattaggtagaaggagaagctcagccaatcctgagggctcggaggcaaggaaggcgggacgaagaggaaaagttgaggacaggagcgtcacccaatccaacgcctgactgcaaaagcgatggcggcgagcacccaattgtagacggcagttagagggaggatggttagtggagagcggaccaatccgtgacaggggagggcaatcttaagccaattaaagctgagaaggtgggaaggggcggagctcgccctgtggctgctcggtggtgggtgaggtatcagctttctccgctagttcccaccctggtagtccttagcccctggaatgcgtgagggagatgcttagggagttctcgaagtggggcgtagaggcatcgcctggcaaggcctgggagcgaaaaagatctctacttcgtggagccgttggacgctaccgggtgg

SEQ ID NO: 7364 - DNA, 2300 bp, Homo sapien
aagttaagatttcatttatataggcaagcacacatgactttttagcaggattacatttttcacagaagattggtacatagttatagcaatttggttggctatagacaatgtttctttttgggaagtatacatgtaactttttttttccaatttttttttatttggagtttcgcactgttgcctgggctggagtgcagtgtcaagatcttgcctaactgcaacctccgcctcccgggttcaagacattcttctgcctcagcctctggagtagctgggattacaggcacctgccaccacacacggctaattttttgtatttttagtagagatgggttttcactattttggccaggctggtcttgaacttctgatctcgtgatttgcatgtaactttttttttttttttttttttttttttttttttttttgagagggagtcagccgggcgcggtggctcacgcctgtaatcccagcactttgggaggccgaggtgggcggatcacctgaggtcgggagttcgagaccagcctgaccaacatggagaaaccccgtctctattaaaaaaaaaaaaagagagagggagtcttgctctgcatcccaggctgaagtgcagtggagcgatctcggctctttgcaatctcagcttcccgggttcaagcaattgtcctgccccagcctccccagtagccgagtagccgggattacaggcatgagccaccagtgcccggcgcatgtaacattttttaacagaggatgaaatagtcatggatttcctacacttcagcctgggcgacacagcaagactccgtctcaaaaaaaaaaaaaaaaaaaaaaagagttaatctataatctgagaacagaagttgtaaactatatgtgactcgcagtcatatctctctcgaggcttaaagtgttttttgggcttccaatagctcttaaatttttttttttttttgagactccgtcttgctttgtcgccaggctggagtgcagtggcgcgatctcaactcactgcaccctccgcctcccgggttcaagcgattctcctgcctcagcctcctgagtagctgggactacagacgcctgccaccacgcccggccaattttttgtatttttagtagagacggggtttcgccatgttagccaggatggtctcaatctcctgacctcatgatctgcccgcctcggcctctcaaagtgctggtattacaggcgtaaaccacagcgcccggcctaaatttcattattttctgtagcttcttggccttttggctaaggctcgtaaacattttttttttatttctacaccaatttctgtagattattatgagaattaagggagagaattatatcaagcgcttagcacagtgtctggcatctaggaagaaagtagtaagtgatagcatttatttatttatttattttatttattgagatggagtttcgctcttgttgcccaggcatctaggaagaaagcagtaagtggtagcatttatcaatctatctatctatctatctatctatctattatctatctatctatctatctatctatctatctatctatctatctatctatctgttgagatggagtttcgctcttgttgcccaggctggagttcagtggcaagatctcgggccgcctcccaggttcaagcaattcagatagttgccgaccgggcgcggtggctcactcctgtaatcccaacactttgggaggccgaggtgggtggatcacctgaggttgggagtttgagaccagcctgaccaacatggagaaaccccatctctactaaaaatacaaaattagtcaggtgtggtggcacatgcctttaatcccagctactcgggaggatgaggcaggagaatcgcttgaacccgggaggcggaggttgcagtgagccgagatcgcgccactgcactccagcctgggcaacagagggagactccgcctcaaaaaaaaaagttgtcgtttgatggctggggggcgggggtgaggggcggggcttagtggttctcgcccacgacggcgaggcccaatcagacccgcggagctggtggagttccgccctcgcggaggaggtggtgttccgccctcctagtcgcagcaagcgcggaactggggttgcggcgtctaagtgtttccggtggattcccagggactgtcggaggtgtggactctgcctgcctacctggtctgggaagatgttctaccatgtgagcagggctcagggtggcggcaagggctgggtggaaaggaagagcaaggccaggcgccggcgcgagactccccttgtcg

SEQ ID NO: 7365 - DNA, 2300 bp, Homo sapien
tttgggaggcagaggcgggtggatcacaaggtcaggagttggagaccagcctagccaacatggtgaaaaccctgtctctactaaaaacacaaaaattagctggtggtagtggcaagtgcctgtaatcccagctacttgggaggttgaggcaggagaatcatttgaacctgggaggtggaggttgtagtgagccaagattgcgccactgcactccagcctgggcaacagggtgttactccgtctcaaaaaaaggaaaaaagaaaaaaagtctgacaccaaagccatcatagttcttgccaggcattgggtgtgtggagcgagccacctttctcccatctgtggccatggaggtctcactactgccttccctggttcctgcctccactcagattgggagcaaatgagctccagacaggttggatacaggttcactacatctaataggtcccgggcagtcccggtctccctcccatcttctagtgtctccaaggttgctgatggctgtccagaacagtaaacctaagcaaggaggtcagccagctgcccaggtctggctaagctgacttcaggctcagtcagaccttagaggagagcgccctctctctttcccttaacgcacaggtgggcagacacttgaaaccacttctaatatggttctgaatatgagtggaagagactcagcagggtcacattctccttaggtggggttgccatggcaaccacagtcgcatccatctggctttgccagctcgggtcccaggggattttcttttccagcggcagcagcatctaaccctgagagggggaaagagaaaaaatgtgtacattcatgctcccttgcagaatgttcccacagttcactcagtgcaaactaccccatcttgggtgaacttaaaggaattcactgtatgccttgtgacatgtgagggaaagaaagtttctctcttttttttttgagacggagattcactcttgttggccaggttggagtgcagtggcgcgatctcggctcaccacaacctccgcctcccgggttcaagcaattctcctgcctcagcctcccgagtagctgcgattacaggcatgtgccaacacacccggctaattttgtatttttagttgagatggatttttctccatgttgatcaggctggtcttgaactcccgaccccaggtgatcccccgcctcggcctctcaaaatgttgggattacaggcgtgagccaccgcgcccggccgggaaagaagtttaacctccaactctgccagggactctcacagacattaatttacaacaaccctgtgaagtgcgcattattactccatattaggtaatttgcccaaaggcagtgtcagaattttaacccaggtcggtctgattccaaataccatcctttactcactaagcccactgcttatcaattaagaactgcccaagtagctgctattgcagtgggagttggagaaagagagctgtcagtgtgcgtgtccaacggtcatgcaaggcgaggtaggccagggcttgtatttggttcacaggcgtggggagaatgcgaagtaggtgcagaaagagcagaaccctggagtccggagcttgcacgggatgttcggccgggtcagaagtcccttctgcctgccgagaacacctaccgagagccccatctatcccttcaggaaggggaagtggcatgtgatgttggggaggtaggccgggcaggaaaactaagccagacaccaaaatctaaagctttgctgcagtcgcgaaaatgcgggtgctcagaaactcgcgagcaaacaagacaaagaaaatcaagacgctgtctttgagactgtttatttcctcgttactattgtggtggtaaaaaaaataaaatatgcttattaaacgtgtgttaaaacaatacacacctactcgcaaacgtagcaagagaggttgctttaagaagcgggaatcttcagcgtcacgtgaccgccggtctctacagtctgttcacactggccaatcaagagccaggaagcctcctggagggccggaaactttccaaggcgcccgccgactggctgtattggggagggcggggccggggccccgggagagggaatgagtgtgagctcgtgagtgggcgccgccgccaccgcccccgccgccgtcgtctcggtagcagccttcgccacgccggggtcttcaggtgagcaggccttgctctggtccaaggactccccattcccgacgccgactgcttactcaccagtcttggagcccgcaccgcgagggcccgcccccttggctgaccacgtgac

SEQ ID NO: 7366 - DNA, 2300 bp, Homo sapien
gattacaggcgctcaccaccatacctggctaattttttgtatttttagtagagacggggtttcactgtgctggccagggctcgtctcgaactcctgacctcctgatccgcctgccttggcctcccaaagtgctgggattacaggcgtgagccacagcgcccggctggtattttccttataggcccagctggtattttccttatagttaattcttttttttttttttgagacggagtctcactttgcttcccagggtggagtgcggtggtgtgatctcggctcactgcaacctctgccccccgagttcaagtgattctcctgcctcagcctcccaagtagttgagattacaggcaactgctactgcgcccagctaatttttgtatttttagtagagatggggtttcaccatcttggccaagctggtcttgaactcctgacctcaggtgatccactggcctcggcctcccaaagtgctgggattacaggcgtgagccacagcgcctgtccaatcacaggattttaaattgtataatcagagtccaagtctctggttggttgtttttatgcagattgtttgaactgagtctcagtttacatctaagtgaagccagtacttgcctgattgtatagggtagcagtatgcaaactaaattttggagttgtcagtaatgagcattatttagcacacagggcagtgatattgggtatattttttattgtctccctttgtaccttatctttattcccaatgcctagcttaggtatacagtaggttccaaataaatatatggttgaatatgccaatcagggaatttaggaggattgagccctgtctaggatcagagataaaggtaggtctttcatgggaaagggtccttgagagggaataagtatcaaagacatgctaactgtattccttctcttccttccaggcagtagaacgagtcctgtacccacacctgtccacctactggacaaacttgcaggctgtgctggatgattattcagtatctaatgcccaggtcaaagcagatggacacaaagtctatggagccattctggtgagtaccgtccccttccagcctcccttccctgcatgagcttagcagccaagcaggcttactttggaatatttgatgggcccaggttcctcgaattttttgcctatcttagtccttggctcttacaggtggcggtagagcgactgctgaagatgaaggcccaggcagcagagcccaacaggggtggcccaggtggcagggggtgccggcgcctggacgacctgccatgggacagccttctctttcaagagtcgtcctccgggggcggtgcagaacccagctttgggtccggcctcccgctgccgccagggggcgcggggccggaggacccttctctttcggtgaccctggccgacatctaccgggagctctacgccttcttcggtgacagcttggccacacgctttggcaccggccagcctgcacccacggctccgcggccgcccggggacaagaaggagccggcggcagccccggactcggtgcggaagatgccgcagctgacggcaagcgccatagtcagcccgcacggcgacgagagcccccggggcagcggcggaggcggccccgcgtcggcctctgggcccgccgcctctgagagcaggcccttgccgcgcgtgcatcgggcgcgcggggcaccccggcagcagggccccgggaccggcacccgcgacgttttccagaagagccgtttcgccccgcgcggcgccccgcactttcgtttcatcatagccgggcggcaggctgggaggcgctgccgcgggcgccttttccagactgccttccccgcgccgtacgggcctagcccggcctcgcgctacgtgcagaaactgcccatgatcggccgtaccagccgccccgcccgccggtgggcgctctcggactactcgctgtacttgccgctctgagtcagtggccccttcgttccttgtaaataaatcccgcccccggaaatgacgtctccaccttcgtgggtcgcgccggataaggtgggctttgggcggggtgctgctgcagcggcgcttcctggtggtcagggcgccatggcgctgtcctggctgcagcgcgtcgagcttgcgctctttgctgccgccttcctgtgcggggccgtggcggccgcggcgatgactcggacccaggtgcggctgcggggcggggtcaggtaggcgggggagctggccggtctggacatggcgaggccactttcgctttccgaccgggcttgctgctgctcggag

SEQ ID NO: 7367 - DNA, 2300 bp, Homo sapien
tgtagcctctaattcctgggcacaagctgtcctcccacctcagcctccagagtagctgggcctataggcatgtgccaccttattttattttattattttttttttttggaggtggagtcttgctatgttgcccaggctggagtgcagtggtgcgatcttggctcattgtaacctctgcctcccgggttcaagcaattctccaatctcagcctcccgagtagctgggattacaggcacacaccaccatgcctggctaatttttgtattttttttttttttttttttttttagtagagacgggctttcatcatgttggccaggctggtctcgaactcctgaccttgtgatctgcctacctcggcctcccaaagtgctgggattacaggcatgaggcactgcacccagccaaatttttatttgcttgtttgttttgagacagggtctcactctgatgcccaggctggagtacagtggtgtgatcacagttcactgcagcctcaactgctagggctcaggtgattctcccacctcagccacctgagtagctgggactacaggcataggccacagcacctggctaatttttttgtatttctttgcagagatggggtttcaccatgttgcccacctaggcctcccaaagtgctgcggttataggtgtgagttactgtgcctgggctcctgaaattttaaaaggcaaaacttttggctgcttaaaaaaacctaatagttggctgggagaggtggctcacacctgtaatcccagcactttgggaggctgaggcggccagatcacgaggtcaagagatcaagaccatcctggacaacatggtgaaatctcgtctctactaaaaatacaaaaattagcggggcttggcgttccacgcctgtagtcccaactactcgggaggctgaggcaggagaattgcttgaacctggaaggcggaggttgcagtgagccgagatcacgccactgcactccagcctggtgacagagcaagactcggtctcaaaaaaaaaaaaaaagcaaacagaaaaacacaaacctgatagtctataaaaaatttgcctgtgtataaattaacataaaaaactttaaaggtaaaatggaagttccttttcatatactgttctgcaacttagtttctttacttacaccatgaacatctttccctaccactgtaaaaactatcttgagcttcttgacagctatttaatattccttatctttgagaagccattggtagaacatctggacttttactaatgtctcatttgtataaatagtgcaaggatgtataagaatgtacatatttgttggcaaacttgggtgcttttatggagtggactttcagctggcatttacgagtcagagttcttacagagctgcctgttcttccactccaggtgccttcaggacaacaactgggactacaccagatctgcccaggccttcactcatctcaaggtaaggtctggaaatacagtggcaaaaagactaggatctctgggcctccaggaggtcaggttagctgagtggggttgctgagtggcgagggtaggcctacctctactgaccttcatttttctccaggccaagggcgagatcccagaagtggcattcatgaagtgatcgtagtcatgcctcagaagcagtcccccctgtaaatagtccttggatattaccgtctggttgtcgtctgtcatctcctcctgtctggcccgaggccgccccgtgactgtgaccgagggagggagggctgcctgatccctctcctcgcctgccttctggaagacttcagaagattgagcctcactggtgccaggaagccaaagcttactttgtagaactgacactaaactacccgaaggacttaggtgctttgtgtacttaaccccaggacctccttactttttaatataaagagtgatgttgtatttcgtgttctgcactttttaatataaagagtgatgttgtatttcgtgttctgcgtgctggattggttgtctcctcccagccctgagcgaggggggcgggccctctagcgggggcgcccagggagggcggaaggcggctctgcggcaggaagccccaccccggaagtcggctggccatggcggcgccttggaggcgatggcccacggggctgctagccgtgctgcggcccctgctcacctgccggcccctgcaaggcacgacgctgcaacgggatgtgctgctctttgagcatgatcggggccgcttcttcaccatcctcgggctgttctgcgcgggccagggcgtcttctgggcttccatg

SEQ ID NO: 7368 - DNA, 2300 bp, Homo sapien
gcctgggcaacatagcaagactccacctccaaaaaaaaaaaataataaaataaaataaggtggcacatgcctataggcccagctactctggaggctgaggtgggaggacagcttgtgcccaggaattagaggctacagtgagttatgatcaccactatactccagcctggatgacagcgcaagaacttgtctccaaaaaaaaaacaaaaaaactgtcaggagccctcattatttactactagccctacttcagtgcatccccatcctacacatgccccgcactcacttctgggaccactcgaggttcatgccagactgggtagagaatgcttgcaacatttcctgctgctctggagagagggtgggcaccgggctggaggaaggcgtgggtgcaggcatagcgaaggctctttggatctcttcagaactggcattccgcacaaatagctcatcatttacaatacatagccttgaggacaaagagcacttaaaaagctagacagagataacatcatcctcccaacatcattcctattctctgattctttcaatatccacaaggtccccctcccactcttagctattgttaccttttatcatttatcccctcccatggaatcaatgtttggaaggattatctactaaacacactagggttctcccaacgcatggactttagctcttttaattcatcctcacaacaaacttaggaaatgaatattgttatatgaattttcagatgaggcagcagcctacttgctagaagtggtggagccaggatgaaaacccagacggtacaattccagagccaagctattaactggctcttaactactatgtgagctttctctgatttcctgttgcctttctgaaatcaccccaaagactgactctaccctccaattaccacactgttggccatggattaggactggtatccaatgcgaaaagcagaatacttaccctgaattgctagcaggaacagcaatgaatgtccgggtgaaggctcgcaaagaatcccgggactttccgtccactgcaataagaacagcaacaacaccttagggtcactagtgctttatgtttacaaacagcttcttgaatcatggtctttgatataaagaatcctagcaagtcagagaggaatgattaagtatataagggtataagggaagcacaggtggggtgaagggtcaggtcagaaaggacaatagtaataactacggccgggcacagtgtctcatgcgtataatcccagcactttgggaggctgaggtgggcagatcacgaggtcaagagatcgagaccatcctgtccaacatggcgaaaccccttctctactaaaaatacaaaaattagctgggcgtggtagtgcgcacctgtagtcccagctactcgggaggctgaagcaggagaaccacttgaacccaggagacggaggttgcagtgagccaagattgcgccactgcactccagcctggtgatagagtgtgactccatctcaaaaaaaagtaataactactaatccactgatagcatctgtatgccaggccccaggccaagcactttgtaagtcacttcagtttacttcctatagcaccactatgagacggctattactaaccccatcttacaaataaagaatctgtcttagaggtaatgttacttgtccacagccccgcacaaccaaaactaggatggaaactaagaactgcctgactccaaagtcctcctaatccccaggcttttcccacatccagacaggacaggtggagaggtaggccaagccaagacggcttgggggcagaatgggagaaggagctcaaaaagaaaatgggagagaaagtagctgggaagctaagagtgctgaggaaaattccagctgggggtgggaccacgctacaaactcgggactctaaagattcttaccttccttgaagactccattgacagaaaaacacagcaatgtgctctgaaagagaagcagcatcaggtacaatgtacacttctcagagcctgagtgcccccccttgcctattaaatgccacccccaccccaattctaggcttctgtcaggcgcaagcaggagcttactgtctgggcgcttatgtctaccacgaaggaattgacgtcgtgctgggttttgggcaactcattgaggaaggcaacaacgttgagacgcgtgtgcttcagcagccggaaccgcaaggctgtgggtagaggagaaagctcagtggtgctgccacacactcctgagttctgactgattccttcccatgcccttttcccatattttgttc

SEQ ID NO: 7369 - DNA, 2300 bp, Homo sapien
ctcaaactcctgagctcaagccatctgcctgcctcggcctcccaaagttctgggatcacaggtgtgagccactgggcccagtctacactgtcaacttttacttcctttccacaggatggccatgagctacccccaccaattgcctttgatgttgaagcccccacgacgttaccgccctgcaaggtaggaagcatggacagagtaagaacttgtgtgtggagagaatactgcttccatgttcctaatacctgtttgatttcagggaagctattttggaacagaaaacttgaagagtctggtcttgcacttcctgcaacagtaagtatcccagggtcccccctccccaccccgaggttgagggggaatggtgggcagacccaggcacacatcaatctttttgttttgttttttgttttgtttttttttttttttttggacagtgtctcactgtgtcacccaggctggagtgcaatggtgtgatcttggctcactgcaacctctgcctcccagggttcaagtgattctcctgcctcagcctccccagtagctgggactacaggtgtgtgccactgcacctggctaatttttgtatttttcgtacagatgggatttcactatgttggccaggctggtctccaactcctgacctcatgatccacctgcctcttcctcccaaagtgttgggattagaggcgtgagccaccgcacctagccattttttttgtatttttagtagagacagggtttcgccatgttgcccaggctggtcttgaactcctgggctcaagctattcacccatctcagcctcccaaagtgctgggattacaggcatgagcttccatgcccggccacaactcactcttgggagctactgggtccttgtatggctgtagaccacagagcccatactttcttttttgtttttcccataggtactatgcaatttacgactctggagaccgacaagggctcctggatgcctaccatgatggggcctgctgttccctgagcattcctttcattcctcagaaccctgcccggttagtatcacatcccagaatctgcccgggaccactgggtttcccagcagatacagggcacacctgctggcagcactgctctgaacaccacgtccattccttttattcccccagaagcagcttagccgagtatttcaaggatagcagaaatgtgaagaagcttaaagaccctagtaagtgtgtgatacgaacaaaatatgggaaaagggcatgggaaggaatcagtcagaactcaggagtgtgtggcagcaccactgagctttctcctctacccacagccttgcggttccggctgctgaagcacacgcgtctcaacgttgttgccttcctcaatgagttgcccaaaacccagcacgacgtcaattccttcgtggtagacataagcgcccagacagtaagctcctgcttgcgcctgacagaagcctagaattggggtgggggtggcatttaataggcaagggggggcactcaggctctgagaagtgtacattgtacctgatgctgcttctctttcagagcacattgctgtgtttttctgtcaatggagtcttcaaggaaggtaagaatctttagagtcccgagtttgtagcgtggtcccacccccagctggaattttcctcagcactcttagcttcccagctactttctctcccattttctttttgagctccttctcccattctgcccccaagccgtcttggcttggcctacctctccacctgtcctgtctggatgtgggaaaagcctggggattaggaggactttggagtcaggcagttcttagtttccatcctagttttggttgtgcggggctgtggacaagtaacattacctctaagacagattctttatttgtaagatggggttagtaatagccgtctcatagtggtgctataggaagtaaactgaagtgacttacaaagtgcttggcctggggcctggcatacagatgctatcagtggattagtagttattacttttttttgagatggagtcacactctatcaccaggctggagtgcagtggcgcaatcttggctcactgcaacctccgtctcctgggttcaagtggttctcctgcttcagcctcccgagtagctgggactacaggtgcgcactaccacgcccagctaatttttgtatttttagtagagaaggggtttcgccatgttggacaggatggtctcgatctcttgacctcgtgatctgcccacctcagcctcccaaagtgctgggattatacgcatgagacactgtgcc

SEQ ID NO: 7370 - DNA, 2300 bp, Homo sapien
agaacaagtagaacagctaaaggtgaggcaggctcaaattagatgtttccaacccagtcttactacttctcacacccccaccccccacacacaaacccagtgaccactaaacccttctttttcctctagctgatcatgagcaaacgatacgatggctcccaacaagcccttgacctcaaaggcctccgttcagacccaggtatggttgacagcagtagttctcagataggtggtgataaggtgggatctgtcagggagggaaagtttgaggatgttttactgctaatgctggcatgggcaaaccctctcagtcttccctttccttcccttctgcttcctgaagatttggtggcccagaacattgacgttgtcctgaatcgcagaagctgtatggcagctaccctgaggatcattgaagagaacatccctgaggtaaggcctttggcccagtattaggcatgaggaagcagggtgtgttagataggaagtggctggagggcagattcgtctctgatccacttgctggtggtgcctcctctaaactcttctctcctcacagctattgtccttgaacttgagcaacaacaggctgtacaggctggatgacatgtctagcattgttcagaaggcacccaacctgaagatcctaaacctttctggaaatgaagtgagaattgatagctcggctatatttttgaaggggtgggtagagggtgtagagagtttgtccagtgatggcaagaggcaagagagagaactcaggccagatgtgctggtttgcaactctaatcctaacactttgggaggccaaggcaggaggatcacttaaggctaggagtttgcacgcctctagtccaagctgccccagggggctgaggtgggaggattgcttgagctcaggagttcaaggctgcagtgagttatgattgtgccgttgcattctagcctgagcaacctgtctcaaaaaaatttttttaatttaaaaaataaattagtcgagcatgatgtcacatgcctgtagtcctagctacccaggagtctgaggtgggaggatctcttgagtccaggagtttgaggctgcagtgaactatgatcatgccacggcactgaacttgggtgacagagtgagaccctgtcccaaaaaaaaaaaaaaaagaaaaaattttaaaagattagaaaagatctcagagctaagcgtagggactgggggtatggggagccagctggctgtcttcaccagggtctcctccctttgttccttccaccctttgcagttgaagtctgagcgggaattggacaagataaaggggctgaagctagaagagctctggctcgatggaaactccctgtgtgacaccttccgagaccagtccacctacatcaggtcagttgtagcctgtgtctcccctcctggggaccttcaccccctgggaggctgagctaatgcatcctgaccagggcccgtctgcggagatgtgcagccctgagctggaaccacctgtcctttgagaggatcgcgtgctccccactttggtctgtctgtgtcttccagctttgtcctgagatgttctctcttctcttctgacttgactatctgtttgctgggtctgtggcctttctctttcttcctgaacacaaccttttctagaatctccctaccctgttgttccaggaaaggcatctcccctttctactctaaccagagggtatcttgtacataccctatagatggggttgccttgtgccaagagcctggtgtccatgggttgaggaagccctccctacctgggacttcctactgagatgggccttccctcctttgtactgtgatggcccctcttgcccttgcgccaagagggacccttttctcaggatccacttgcccagggctgttgctgtccatgctgaggttgaggcctcctaggggctggtggcatgcaatctgtctctcttgcccagtgctatgagctgggctctccctgaagaagaaacctgggttccccaagatgtgaccagagctggggccccgccagcaggcgagggaatcccaaggcaggtgctgggcgtggaggccacgggggcataggctaccaaggagacagagaactgaccccctcgggggcgctgcctctccctcactcacacactgcacgtcaccctgtttggccccggtggatggctggttagccagagacgggtaagattcctcagggaaggaacaacctaagacaggcacagtcgcagaggggccatcaggagagaacttgggggcaacagaggtggggcatggaccctcaccc

SEQ ID NO: 7371 - DNA, 2300 bp, Homo sapien
attcagagatcctcaagtacttccagtctgtcacctccaaccggtggctcatggtcaaaatcttcctcatcctcattgtcttcttcatcatctttgtggtcttccttgcttgaaccctctctactctgaggcactctgttggggtttgggaccctcctgggaaggcaagtggccagtgctgccactgagcctgtgcagggtacttgggagaaaggccctgtttccctggaactgctaagaatgaccactgcccctgatcccccaccccttgcctctggccaccctgtcctccccccaccaccctcaggcctatgaaacacacagggttctagatttgaactctgctgtgaagtgactggaagggagcagaggccagctgggggccagtgggggaggttgtttccactaggagatttttataaaccctctccagcctctcccaaaggaagcgttggcagcaaagggagatgatgcccttacccaccttcctgtgagtgaagagaggaagcagccccagggaccaattttcccaattgacctctttcttcctctttcaccatgtgaggcagggagccctgagcccttcagctgcctgcacaacccctgacattggctgctggtgactcaatctgccaaatgtgctgcagctcgttttctcccaattacagcaagactgtcagcctcactagccatgtcatcatttctgggtgggagcgtcgaagggcctaggcagcgagtggagagagcccactgcccagtaccagaactgaaagggttgggctaatggctctgccaggtatcactgctgacacaggctattttgggctctgacacacagctgcctctaggcaggggagaaccaagtgttgcaacacttcattagcgtggaaacttcctttcacacaggggagcaggatcccagagggggtccctgattgggggcaacttccaggactatctcaagcagtgtttggacctgtttcatctgtatcctccaactatttggccgtaattcttccttgagctaagcgaggcagaagctctgcctgcttccaggagtggaaggtgaagaatttgttcccaactccagttgaggcttttgattccctccaagcacttcaccaaatcaaagccagtcacagagaatggagacacctgcccagaatacccaccgtccagggagattagtgtgctttgttcttcctgaccgagactcacaaccacattctgaggtcactcgagtgcccctgtctcatacattccaaaggaagttgaagctatagagacaacagtcaggggctggtggtggtgcttttgggggtctaggagagcccaaggccctgatattttaaaatgtcctcctcggcatctccagcaagttgccactgctggtgagcttcactgtctgccccgttgacacgatgggtttctagtaggggacgccattgatggaaggtctgtgaagacaatgctcgccaaacccctgacagatgtcgtatcatttgactcagcaactcagggcggggcggggtgggggaaattcataacacaaattcatttatttcacaaatatatgttgagtttttaccatgtgccaggcatagtacctgccgagtcaagccctcgaggaaaaaaagcccttaattagtcaacgttcgagctcacattctaattctcaacttcgtgatttgttaatccatcttataggcgaagaaagcgaggtatagacaaggagccgagctgaaacactggctagattccggtaggggtctgagccatcactcccacctggaggcgcggtctccattcctctgaagccctttgtgcggcccccttcctcactgagttctgggctgcggcggcagcactgtgctctagcactaactctgaagctgccagggcagcgtcagcggacagatgaaaaggtgcggggacatgctggctgccagccggggttccgcaagttcaggtcttgggcggggcgtggagggccaggccccgcccctcgaacgacggccttaagtgtgcgcacgcgcagggggccgcgctttctccgggcggcggcaccgcccacagcctgggacgtcagcggcgcgcgacgtgctttgctgtataaatgcggtggcgcccggcgtagggacacttcggtcctgagcgcttgggagttaggttgtttgccggcgtagcggccagcgcctgagcccgcccttgatcttcgctgtggcatggcggacgaggggaagtcgtacagcggtaagtgctggtcttcgggtcgggaactggctatctggggcgcgggt

SEQ ID NO: 7372 - DNA, 2300 bp, Homo sapien
ggcctcattcaggtgccagattgcctgggtttaaatcctggtttccctaaaagctgtatgaccttaaactaattatttcaactccctgtgccttagtttcctcacctgcgaaatggaaatattagtagaagctccagtctcagggttttgttgcagattaaatgttgaaatggaaagtgattggaacaggaaacaatgaatggttggttattggccagccagttatcacggatgcttccccccttctctagggcgtctactgggctgtctgaaggggctggcaggcagtgtgcgtgggttgcagtgccacccttcaaagcctctactagcctcctgtggcttggacagagtcttgaggatacacaggatccagaatccacggggtctggagcataaggtaagttgtctctcccacctccaactcatggtcttgtggaggccccgcctcctgtgccctccgttcatgtttctgtctcagcatgcctggctccttaaggtccctcatcttttgcaggtttatctcaagtctcaattgaactgcctcctcttgtcaggcagggacaactgggaggtgagcagttgggcccgggaatgtgggagccaagggcatagatgtgaggacctccctatggagaggaaaaggaggcagctggaatgcagacttgggactatctgtttacctgcctggtcacttaatttctctgagaggcattaacagttaaaatcctgagagggttattgccaacagcatggatggggttgctttctaggagcagggaataaaggtggtggtacccagagggattctttctcagccagggtctccttccctgtgggtttgtccctgtgcccctgactacttttctttttttttttttttttttttttttttaaacttctttttgtggagatggggtctccttatgttgcccagtctggtcgctaagtcctgggctcaagcaatcctcctgccttggtctcccaaagtgctgagattacaggtgggagccaccgtgcccggcccccctgactcctaagctttcttcccactcaccaggatgagccccaagagcctcaagaacccaacaaggtgcccctagaagacacagagacagatgaactttgggcatccttggaggcagctgccaagcggaagctctcgggtttggagcagccccaaggagctctccaaacgagacggagaaagaagaagcggcctgggtccaccagcccctgacgcccctgtgcccactttgtaaataaactgctgaacacccaccatgaccctgagccttttgtgatgggagaaaggaatgaggggtagcttggggtgggggctgcctgagctggggcgacgggatatctgatgtcacaaaagccgggcctggaggcaggcaggctggcgtgggtggcacggagtccagggccacgcggggccatgggctgctgccaagacaaggactttgagatgtctgatgagcagtccaaggaggaagagtctgaggacggcagggaagatgagaccacagacacacaaagagggcccagggagtgtgagagggggcttcccgagggtaggggtgagctcagaggcctcgtcgtcccctcaggcgccgaagatatcgacttgaactccccggaccatccgaatcacaagtcgaacgaaagccttctgattaccgtgctgtggcggcgactatccacgttcggtcgtcggggctcctcgcggccaagcaagaggcaaccagaccagattcggaagcaggagagtccgatccgagaaggcaaccaggaggagccggagaagggatgaccccagacctgctctcagtccgccccaacctccagagaataaaatttctaacgtatacctgcacgaccactctgggggactgggcgcggacaccaccgggcagctggttctttaaggctccttcccggaggcgggcccagccccctgagcgcctgctgtagtactctggggcggggtcacggtggcgccttagccaatgggagggcgggatcgctcttgcgtttgggtgtggggcgtgtctttcgggtcgctgggcttgaaacgcgtgggaccgccccctcgtcactgggggtggggttacgtgtaggtgacgtggccgcttccagtctttggtcgggtttcggcggcttcagtgctcggggaggaggcagtgacggccggtgagattggaagtggcggcggcggcaggcggcagaggggaggtaagattcgctttaagaggggatctggccgccgtgtcagctctggggcagtggttttacggggg

SEQ ID NO: 7373 - DNA, 2300 bp, Homo sapien
ccaggccagtctcaaactcctgggctcaacttgagctcaaccaccaacaaggtgatgtagctctgaaagcaaagattaggaaggtgctaagtggttggatgactggccttgctttcttccaaagatgatgaaagagggctgtgaagcaggctgcataggtttggtggtggtaattctgacaggtgaggtctggaaagcctgtgggggggactggatgtctgaactggttcttgagggatgggtagaattttgactggtggagaaggggataagggtattctagaaagagggtactgcctgggagaggccaaggactggaggcatgctacagggtacataaataggataaatagcatttgatttggaagttgataacaaggaagcgtttttttttttttgttttttgttttttttttatatacggagtctcactctgttgcccaggctggagtgcagtggcacagtctcggctcactgcaacttctgcctcccaggctcaagcgattctcttgcctcagcctcctgagtagctgggattacaggcatccgccaccacgcccagctaagttttttttgtatttttattagagacagggtttcactatgttggccaggctagtctggaactcctgacctcaggcaatccgcccacctcagcctcccaaaatgctgggattacaggcgtgaaccactgcacccggccaaggaagcattttaatacaagatgaacactatattaggttgggattaaatgtaaagggctttaagtgctaggttgagagatgtgcacttttattggtgttggtgagttattcatttattgtttttgtttttctgagagacggagtcttgctctgtcactgaggctgaagtgcagtggcatgatctcggctcactgcaacctccacctccctggttcaggcgattctcctgcctcaacttcccaagtagctaggactacaggcatgtaccaccacacccagctaatttttgtattttttagtagagacaagatttcactatatgttggccaggctggtctggaactcctgacctcaggtgatctgcctgccttggcctcccaaagtgctgggattataggcgtgagccactgtgcctggccaagttatcagtttttgaataggaagtaccatagtcagcactgggagcctgtaggagtatggaggatggattggagacagcaactgggagacttttgccacaggtcaggcaagtcgatacagagcccgaacccagctagggagggttggcaggtgtgagaaagaacataggcgcaggctgtgcagatcctggggagagacttgcttggacttctcgggagggatattttaagcaagagactgacatttagtgcctgaaactcagagcaaggaacccaagaagttggtgtttgactttgaccaagccctaaattcagaccagccctagtaagcaactcaagattcagacagaccagtacagccagatgctagacatagctgtgaacagcaaaagcactctggaatatcacagagttgatttctagctgtggttgtaacatagctgagtggcaaattagtttctcagcgcttctatttcctcacttggtaaaccctcaccctgttgagaaagttgaattaacagattaggaagctggaagctgtcaagccctgcctagagcccagtgacctagaggcttccttctaaactggactgttagtagggaatctggttgatatgagtttggggcctagagaatacttttatacttttttttttctttaaacattagtcaactgtagtagtaaggaggagagaaagattagaacaaggagtttaagcacttaaaaaatcccaactctatcctttctctgcagcaccctcatcacatgtgtggattctgggattctcagagtctggcatgacaaggacaaggacacatcctctgacccagtgaggctcccctgccctgatggttgggggaggtgggctggggtaggtgcctaatgatcacgctggggaagggaggattaaggactctggaacggactcttatctcctattctttacagctcctggaactgagagtgggccctggggtgtgtaggatgcgccaagacccagcacacccccatgtggttgccacaggtgggaaagagaatgctttgaagatatgggacctgcagggctctgaggaacctgtgttcagggccaagaacgtgagtgacaagagtgtgaaggagctgttcctgaagtcgagggaggctgaggccactgacgatgcattagagactagatgg

SEQ ID NO: 7374 - DNA, 2300 bp, Homo sapien
ttgctccgtccactccacgcatcgacctggtattgcagtacttccaggaacggtgcactctcccttcggggagagaacaaccgttgtttaatggaagatttcgatcagttagggtacaagctaaatagttatgttcttgttgtttgagttggattaggtgtttttatcgctagtgtgttgaatgacgcgtgtttgagtgtcttgttgagagaaggttttgttttataactgagcacggagcgtagtatctccatgtggtcttcagcaatcttcatacttcagcctctggggtagttggaactattgagcgcttgccaccacccccggctaatgttttccatttttatttcttatttattttttttgagacgtcgtcttgctctgtcgcccaggctagagtgcaatggcatgatctcagctcactgcaacatccgcctcccgggttcatgcgattctcctgcatcagcctcccgagtggctgggactacaggcgcccgccaccacgcccagcgaatttttatacttttaatagagacggggtttcaccatgttggccagggtggtctccatctcttgaccttgtgatccgcccgcttcagcctcccaaagtgctgggaatacaggcgtgagccaccgcgcccggcctgttttgtatttttagtggagacagggtttcacaacgtgttaaccaggatggtctcgatctcctgagctcgtgatccgcccgcctcggcctcccaaagtggtgggattacaggcgtgagccaccgcgcccggcctggtttcgcgtttgatgtgttaaacctaggtcgcgctcggggtttcaagcgtgaaatcctagcacttcgggaggttggggcgggcggattgggtaattccagcctgactaacatggtgtgaaaaatcccgtcttcactaaaaaaccaaaagaaaagtgaatcaggcctggtggcgggcgctctagcctgagagacagagcaagattccatctcaaaaaataaataaatcttcgcgttagataaagggtttacttgtaaactggtaatttgttgcttttctgtgttaatctctaggtaaagtagcgacttccctctcctatttacgcatgcgctattactgtatttctactgagcgatgactttctctgcgtttctcatgtagcatagcacagagtacttttagttgtttttgttttttttttttgagacggagtctctgacgcccaggctggagtgcagtggcgcaatctcggctcactgcaagctcctcctcccgggttcacgccattctcctgcctcagcctccggagtagctgggactacaggcgcccgccaccacgcccggctagttttgtttttgtatgtttagtagagacggggattcaccgtgttagccaagatggtctcgatctcctgacctcatgatccgcccgcctcggcctcccaaagtgctgggattacaggcgtgagccaccgcgcctcgctgtccgcctcttgaagagtaaacgaggccgggcgcggtggtttagtaataccagctgtaatcccagctacttgggaggctgaggcagaagaatcgcttgaacccgggaggcggaggttgaggtgagaggagatcgcgccattgcactccagcctgggcaacaagggcgaagttctctcaaaagaaaaaaaaaatcgtcggtttccttttcccatctttctttcgtgacttatattccagaacgaagccccacacatcattaatgatttgaatcgtttctaaagtgtttcttaaatcgtttcttaaatcgtttgttgtttcttgtctaacagtccagaacacatattacataatggagccgggagacagactagggctggcttgatccggccacgcagtccaggaaaggtgcttttcacccccaagtgcaaaatgatcaatgtattcttccgatctacataaacaagcacctcctggtttcattttcgtaaagcaaaacaagcatggaagctttactgtttcggctcttcaaacttccagcaactacactgcgctgcatcggactcgacgcccgctggtgacgcacacgctgcgccggaagtgtgaactgtctgcctccaggctttgtcatggcggctgctgctgcacgctggaaccatgtgtgggtcggcaccgagactgggatcttgaaaggtgggtggcaggctcgggcgtcgggaagtgcaggggtgcactcgcgcccctggcgtgactgacgccttcgtctctcaggggtaaatcttcagcgaaaacaggcggcgaacttcacggccggagga

SEQ ID NO: 7375 - DNA, 2300 bp, Homo sapien
catctttccctctcagtgaagggccagatgtttgctggcggacagtacaaatgcaaggtgcgggtcgtgcctcgcccctatgtcctcagttctcacaaactccggagagtgagtgtcaccatttcccccgtttaaatggggaggaaacaagagcctaaataccaagcccaggccattaagtcaggaactggagagcagggagcccaacctccttttttggactccaaaacctgtgctttgacaccgcgccgcggcttctcccaagaaaggtcccggagaggggcgccgccacctgcagcactgtcccgccgccccctggaaagccgaaaaacccctaggatgggagactaacgccacaatcggggaaaaggaggccacgcgggcattgaaatcacgactggtgtgtggaccaatcccaggatcctaaaaaagcgaaaggggcgggtttatgcaaaacaaactgagcagggagcaggcggcggaagaagtagaggacgtttaaatagggctgtttccaaaatatagccactactataaagaaagaataatgaaaactgtgtttcggaattataatgtattgggagataatttaacatttagtgcctggatagttaccataactggttggaagatgggaaggataaggccgccgaggcgaccgaagtaaaggtatcgcttctcggccttttggctaagatcaagtgtagtatctgttcttatcagtttaatatctgatacgtcctctatccgaggacaatatattaaatggatttttggaaataggagatggaataggagcttgctccgtccactccacgcatcgacctggtattgcagtacttccaggaacggtgcactctcccttcggggagagaacaaccgttgtttaatggaagatttcgatcagttagggtacaagctaaatagttatgttcttgttgtttgagttggattaggtgtttttatcgctagtgtgttgaatgacgcgtgtttgagtgtcttgttgagagaaggttttgttttataactgagcacggagcgtagtatctccatgtggtcttcagcaatcttcatacttcagcctctggggtagttggaactattgagcgcttgccaccacccccggctaatgttttccatttttatttcttatttattttttttgagacgtcgtcttgctctgtcgcccaggctagagtgcaatggcatgatctcagctcactgcaacatccgcctcccgggttcatgcgattctcctgcatcagcctcccgagtggctgggactacaggcgcccgccaccacgcccagcgaatttttatacttttaatagagacggggtttcaccatgttggccagggtggtctccatctcttgaccttgtgatccgcccgcttcagcctcccaaagtgctgggaatacaggcgtgagccaccgcgcccggcctgttttgtatttttagtggagacagggtttcacaacgtgttaaccaggatggtctcgatctcctgagctcgtgatccgcccgcctcggcctcccaaagtggtgggattacaggcgtgagccaccgcgcccggcctggtttcgcgtttgatgtgttaaacctaggtcgcgctcggggtttcaagcgtgaaatcctagcacttcgggaggttggggcgggcggattgggtaattccagcctgactaacatggtgtgaaaaatcccgtcttcactaaaaaaccaaaagaaaagtgaatcaggcctggtggcgggcgctctagcctgagagacagagcaagattccatctcaaaaaataaataaatcttcgcgttagataaagggtttacttgtaaactggtaatttgttgcttttctgtgttaatctctaggtaaagtagcgacttccctctcctatttacgcatgcgctattactgtatttctactgagcgatgactttctctgcgtttctcatgtagcatagcacagagtacttttagttgtttttgttttttttttttgagacggagtctctgacgcccaggctggagtgcagtggcgcaatctcggctcactgcaagctcctcctcccgggttcacgccattctcctgcctcagcctccggagtagctgggactacaggcgcccgccaccacgcccggctagttttgtttttgtatgtttagtagagacggggattcaccgtgttagccaagatggtctcgatctcctgacctcatgatccgcccgcctcggcctcccaaagtgctgggattacaggcgtgagccaccgcgcctcgctgtccgcctcttgaagag

SEQ ID NO: 7376 - DNA, 2300 bp, Homo sapien
gctagtttgattcatcatagaaactgcctacttggtggcataagctgtaaggaacaaaaaatatcaactaacctctcagctctgaaggcttttcaatggtatatagcaacaagctgctcctgaatcaaaaaatcattcaattagctaattatcccaaacagccaaaactattttagttacggttgctaatggacaaactaagaaaaggtaaccaaatgtctcagacaattccttatggaataagctctcatgccctcttcatgttaaccctggtgagttcacaattactggttcccaggctaaaacaggggtaaggcaggatgtttcctcctcattggagcagaatcctggaaagctacaactgacaagcattcgtctgaccctgggcagatcagtgggcatctatctgagaaaaaaggggcatatatcagtgggcatctatctagaaacatcactacagagaacaagaggaaccagaaaactttatgggttaagcaggctttggtaacaaatatcaaaatggctaagttatctattagataataggcccatagaattcgaaaaacaacttactgtaagatagaggcagactgtcatcaggaatacctggaaaggaaagcaaattagttattttaaggtattaggatggaatgaagcttattcataaacaacaactgccatcagaactctaacatgctattaacttttgtacctcacagaacatcagcttatcaattcaaatcatctgacagtaacgtgatcgatatatggatgagggtaacagcacacccttacaagaactgtagtaccgggttgcgatctccctccccagaaaatcatttcaagaggaacaagatggaaggcgccaaaaaacattgttccgccggccacttgttttcttgaacatttacaaagatgacatacaccaatttggataattacctgtattcaccctgggaggcagctgaattccccaggatagattatgagatgctgtagacaacagaggaaagcattttatgtacctaaaaatagtcattcaaagaccccttaagacctctctctcacttctcagtagtaagatgacatcacttgaaagttcagccatatgcttgtcattttgtgttcatcatggagtggttatctacaaggtctcctctgtaagagcataaaccatgtacacctacctggaacattactgtaacgctggctttgcataaagatgggtcttgtcccattccttcaccagtaagctcttgtgggctgaacatctgaaaaaataacacccttcactaacacctcagacaaatcaatagggccctgacatttgttgcgtacagtacagtgctactcagaattttctgttttctccactaatccatcagaaagagagagttcagttcgtaaaatcatccccgtagcaacttccacacactcaacgaaagagcagagattaagaaatggccgtaagaacttactgcaacaacagagctctcttcggttccaacgtgcgcgtaaatcctgcagacaggagcccaataagacattaggtcaactcagggcatttcgaaaacgctattttctgaacagacggctaagcaagaggcttgcagggcccatctcctcagagttatttatcctcacggagctcagtacaggtctgtgaaaaggtcctcatcataggaagggggacctacacggcccgccatcgccattttgtccttcacaaagccccactgctacttttaagcctcgaggccacgcacaagaccttatccgccagtcgccctggccaggcagctacaacacagaaggcatagtgcgtgctatgctatgttcgcacaatcgctcaaaagaaaataaaagaaaaagacaaagtacaaaagagtaacagctataaagaccacgaagccacttaccacgagcagtagaaaaatgagaacgaatctccccggggagacgattaaataccatgccgcagaggcccacgggatttgggggcggggctacggcgagcgcacgcgcatacgttgaccgcatgcgaccccggggagttgtgggtagagagttccagggaaggagggcgtagacaaagcgccacctgaacttgcggcgcgaaaaaggcgcgcatgcgtcctacgggagcgtgctggctcaccgaccgcattgcggcttggttttctcacccagtgcatgtggcaggagcggtgagatcactgcctcacggcgatcctggactgacggtcacgactgcctaccctctaaccctgttctgagctgccccttgcccacacacccca

SEQ ID NO: 7377 - DNA, 2300 bp, Homo sapien
ggaaatactttccagttttatattctaatactccccttttgcccatctttcatgaattgtagctacacacttccttctttttctagcaccaagcttgtgctccagttgttcctttaactggaattcccctcccaagtctttctaccctttcaggcccagacactctataaagcatttcccgactgccattcccacacacaacctccccagccttgtctgtctactctgggccatcttgattttccagtttatctgtcccacattttttttttttttttttttttttttttgagacagggtcaatctcagtcatccaggctggagtgcagtgcagtggcttgatcacagctcatttgcagtctcaacctcctgggctcaagcaatcctcccaccttagcctcccaagcagctggggctacaggcatgcaccaccgctcctggctaattttttctattttttttgtagagatcggtatgggtttctcactatgttgcttagactggtcttgaactcttgggctcaagagatcctcccgccttggcctcccaaaatgctgagccaggccgggtgtggtggcccacccctgtaatcccagcagtttgggaggctgaggcaggaggtcacctgaggtcagtagttcgagagcagcctggccaacatgatgaaaccccgtctctccgaaaaacacaaaaattagtgtggcatgatgatggcgggagcctgtaatcccagctactcaggaggctgaggaaggagaatcgcttgaacctgggaagcggaggttgcagtgaacagacatcccgccactgcactccagcctgggcgacagagcaagcctccgtcttgaaagaaaaaaatgtttggccgggcgcggtggctcacgcctgtaatcccagcactttgggaggccgaggcaggcggatcacccgaggtcaggagttcaagaccggcctgaccaacatggagaaaccctgtctctactaaaaatacaaaattagccggtcacagtggcgcatgcctgtaatcccagctactcaggaggctgaggcaggagaattgcttgaacccgggaggtggaatgcagtgagctgagatcgggccattgcattccagcctgggcaacaagagcgaaactccgtctcaaaaaaaaaaaaaaagaaagaaaaaaatgtttataaagtgtgcttgtacacgtagatgtttaccacaaacgactgaactaatgttgtccggtctcagtaaaacagtctatagctgactgcaaccatattgatcaggcaggagttgcagcaggcagcaccgccggagctctttagggttccccatcaataaaatgggggttgtcatcctacctagctcttgggattttggtggattaatcgattcatatagtgtgcttaaaacggtgctccataaatgttagctaatgttggcccgtagtagtccaagatctaaagaaaacgcaccagaaggcaggacatagggaaccagttaggaaaaaatcagatcctgtcttcagtgaagcacttacgtcctgacatactttcccgaaatggccccaccaaaggggacctcctcccgagcttagcccgggatccagtacctgagtcgtcccccgcgctgagaccctggacaccagcctccgaatgtgagccaggcaactggcgcggaatcgacacgacggcgatcgaggcttcaggaggctgtagctccatggaggcggatcctgcacacaggtttggggtgtgtgggcaaggggcagctcagaacagggttagagggtaggcagtcgtgaccgtcagtccaggatcgccgtgaggcagtgatctcaccgctcctgccacatgcactgggtgagaaaaccaagccgcaatgcggtcggtgagccagcacgctcccgtaggacgcatgcgcgcctttttcgcgccgcaagttcaggtggcgctttgtctacgccctccttccctggaactctctacccacaactccccggggtcgcatgcggtcaacgtatgcgcgtgcgctcgccgtagccccgcccccaaatcccgtgggcctctgcggcatggtatttaatcgtctccccggggagattcgttctcatttttctactgctcgtggtaagtggcttcgtggtctttatagctgttactcttttgtactttgtctttttcttttattttcttttgagcgattgtgcgaacatagcatagcacgcactatgccttctgtgttgtagctgcctggccagggcgactggcggataaggtcttgtgcgtggcctcgaggcttaaaagta

SEQ ID NO: 7378 - DNA, 2300 bp, Homo sapien
gatccacctgcctcggcctcccaaagtgctggtattacaggtgtgagacaccacgcctggcctttttttttcttttttgagacagagtctcactctgtcacccaggctggagtgcagccgcgcaatcttggctcactgcaacctctgcctctcgggttcaagcgattctcatgcctcacccctccaagtctgggactacaggcgtgtgctactatgtccagttaatttttgtatttttagtagagatggggtttcaccatgttggccaggctggtcacgaactcctgacctcaagttatccgccaccctcagcctcccaaagtgctgggattacaggtgtcagccaccacacctggcctgttagtttttttgaggcagagtcttgctctatcacccagactggagtgcagtggcccattcttggctcactgcaacctctacctcctgggttcaagcgattctcatgccacagcatgagaagtgggattacagggattagtaggtgggattacaggtgtgagccaccacacccagccaggcccagataattttaaaatttatttttttatttatttagaaatggagtctcactatgttgccccgtctggtcttaaactcctggcctcaaggaatcctccctccttggcctcctaaagggctaggtgacaggcatgagtcacactgcgcccagccttgagcttttgtgctcgagatatagtccattcagaacctctggttggcacttcttatctggcacatgcagggcaccttggatctcttattatctttgagcactggtctgaacccacttgcttgccttctcccaggggctgccccgtgcaccccttgttcctagggtggggatggggttggatgcctggggttgcagaggggactagcagagggtgacccttttctctatgctattacttcagatcttggcttttgctttcttccaaatacacagcaatcttggcttccagcctaggtgggaaagggagaaagaaccgatttcctccagctcctctctgaaagtagcccaactggcactgtttaggaacaaggagttcctgagagtgttggcaccccacggtgttgatgtccggtagttccctgctgtgaaccctgtctctgccccacttcaatccaaggaccctgtggagggaattctaggcttcttcaaagcctctgcagtaccagctgcctccaaggcctaacatagtgaagtgatagggagacaggaccttgggggagtttggggataactgtgggagttcctgcaaggtgggtaagagtctggccatggcatcttctggtctattccacaaaaaaggtggatgcctctgagacctagctctgttatgttcattacagccctatcagtctcttctggatgtctgattcctagctgccaaacatccaggtgctagcagctgggggtggggtaggataagaaggggggtgtctacctcaaccttcctgcccaaaccattcattttaaagtactgtgaagaaggctggattagtgttaaattcaataaagttaacaaagcaaagtattgtagtgagtacacaataaatagttgctgcatgaggaatttcttgaaatgaattcaagatgagtcttgaaaaacgagtgggagtaagccgtgcacggaagcagaggtctagcagaggtctagcgccaagtcccagaggcctgagagggcaagccttggtgggggaaaaggcagaagttgtgactggctgcctctgagagtgcaagtagccatgcaaagttgggaaaaccagacggcggccggagccgtgaaccaggggcaaatggaggatggtgttggggtagtcactagcctgccggaatggaagaagaggggcgtttgggggcggtaaggcctaaaggacactggaggggcctcgggatttggggcaggatcacaggcctagtccacttaaaggtggctccgtgccaggccttcccagaatcaggttgaaaagaactttagggttagacaggttggagatgagaaattggaccatgcaggaagtactgtcggaggcgtgttcctgactttactaccctgagccgcccacggctggggcagtccccgaggttccaccttaaggggcgggccggggcggggctccgctgccccttcccagaggccgcgcctgctgctgagcagatgcagtagccgaaactgcgcggaggcacagaggccggggagagcgttctgggtccgagggtccaggtaggggttgagccaccatctgaccgcaagctgcgtcgtgtcgccggttct

SEQ ID NO: 7379 - DNA, 2300 bp, Homo sapien
cggctgggtacgcacccgctgggcactgctgctgctcttctggctcggctggctcggcatgcttgctggtgccgtggtcataatcgtgcgagcgccgcgttgtcgcgagctaccggcgcagaagtggtggcacacgggcgccctctaccgcatcggcgaccttcaggccttccagggccacggcgcgggcaacctggcgggtgagtgcagcgcgcccccgtcccgggtacctccggttgaatctggtggcttgcaccgaccccctcccctgtccccagacggatctagatggttcttccctccatcccgtaccgacgactgttcccccttcccccaccccctccccggcacattgtccttccctcctttctttgaagaaagccgacccgcccctcactccgtcacgagggtgggtgactcagcgtcctccttccccgcggcgccagaagccagttgcaaccggtttctgaagtaatgtgcaggactccttacatcagctcctctgagtctcgtgattcagccttgcctccctctctccccctttgccccctccccgtcccacccttaggcgctgggagaagggagggtggggaggtcaggggcctctcagaggggcctcacttgttaacccagcccccatttcaggtctgaaggggcgtctcgattacctgagctctctgaaggtgaagggccttgtgctgggtccaattcacaagaaccagaaggatgatgtcgctcagactgacttgctgcagatcgaccccaattttggctccaaggaagattttgacagtctcttgcaatcggctaaaaaaaagagtgggtatcctggggttcccaaggaaacagctagaaaggacttggccagaggaaaagtaggctagaacttttgtctggtttcctgctaactggctctgagttttcctagggcaggtagaggggagatttgttagtcttcagcctaaaatggatttgtccagtcgtctgggggctttctacttggctgtggaatcttgagcaggtcatttaacttctgggcttcagtgcccttatttgcaaaatatagatatttactaaaccagtggttttaaacttgtaaaacagtaggtttttttggggggggggaatcccaaatattgttttacgactcgatatagacacatgtttaaaaaggttcactttgggagtggggaacacaggggccacttctctgcactataaactttctgccttccaatatctttttttttttttgagatggagtctcactcttgtcacccaggctgcagtgcagtggaacgatctcagcttactgcagcctcctcccccagggttcaagcgattctcgtgcctcagcctcctgagtagctggtactacagccgtgtgccaccacacccagataatttttttatttttagtagagacaattttcaacatgttgaccggtctggttttgaactcgcctggcctgccttcccatatcttaaggcccttccttgctcacatctgtttcaatggaatgaattttgcccgggttcaaattcaagcttttgtaccaagtaatacataggaaacactcagtgacttgcatttgtgatttccttattttcccttaactcatagactgtctcatgattgcgtcttcctccgttgttttaggcatccgtgtcattctggaccttactcccaactaccggggtgagaactcgtggttctccactcaggttgacactgtggccaccaaggtgaaggtgagtgttggagctgatggctggtggaagtcagatgctggggctgggacagtcctttcacagcaagccctgtagacccagcctgactccagctgagggtccctttgctccttaggaccaaggaggaatgcctcctcctatagccaaaggataggccaatagcacacctgtttttcttgttccttttctgacctcttatttttcttatttccttgactctgaggatgagacagtgccaggaagggaccttctcagaagtcagtctggaagtttgatttttctttcttttgggagaggaagccctttctctgtgagaatcctgtcctgactggtttcccagttcttgtttgatgtgtttggaatagagcccagtctgaaattataagcactggggtactcctatgtgtctgggactctatgccaagtattttatagatgttttctaattctctgtataaccatacaaggtatataatttgccataggttcaaatgtgtacccagcaggctaggagtagggctttgaatgtcacctagctcctgatgtct

SEQ ID NO: 7380 - DNA, 2300 bp, Homo sapien
ctcttctcccctcctgcctcagtttccccatctgataagggtgagctagccaagtctgggcggggacgtcagaagagtgatacagtggtgggggtggcggggggcgtcatccccctgcgtccgcgactgcacagacttcagaagaaagccgcgtgggacagaggggggcactcaggaggaggcaggggaaagctggacaccctccccacccgcccacaaaataagtgtttttatttctaaagggacgtgtgcagaggcggtgggagaagagaaaagggagaccaaggagactggggggaggtggcaaagagggagcctgattcagattcggaaatggatgttgagcgtggaggcctaacacccccacactcagccacgtgtacgcgcacaagtacacgcagccccaccgcgccgcccaagccgcagccgcaaacccagggcagcccagcagggggcatcccgagtccgcgcccaagggtagggactggtcaagttctgacccaaccctgaccggctgggtgaccctgggatggaaaggggatgctcacttagatttctctccaagctgcagcgtctgcttgacttcagcagggaggaggactgggtgcctgctggaaccccagctggctttgagaagcacagatgcccccacatgtacctgccacgtgtgcccaccagtagctgctgaccaaaccccaggaactccagtttcagctccacttggctccattggccaactgggctcctgggtgagaaagccccaggttaccctcaggcaccagcattggcggggttgtgggggcggggggcggcgcttggtggggaaatgagtaggggaaacccctgccccagactccagagccctgggcttagagccaagtgacctgagcccaaacacctgcccaccacatgctaatcatacctctgctcttcagatttctcacctacaaaatggggataattgatgctcccattccttcccacctctcaccccaagacttcgacacagcccagtgggcaaagaacacagcagccccagaaggcagtccctgcagcctccaactctcctccccagtcagctcccggggaggtctctagggccaaacagaggcggtgcaggacccacatctctagggcaaacggccccccaggggttctatctctgaggaagctcaacacagaagtccagaccagcctggcagggagggatgctggcctcacccagtagggctgagggagattgggaggagggctcatctcctcccaggtacacacctgtgagccctgagtgggagtcaggggagacagagcttgacaagctgggaggagagctgtctgtctgcctgtctgtcttccaagtggaagcttggggtggagcaggcaggtagaggctgcctcacttgtcagaattagcaagttccacagttgggcaacactcagccacacatcagatacagacacacgtgtgcacacgcgtcctgcctccagactgatagggtcacacctgcacttacacaggctgcatggtgacatgagtacacagggacacacatatgcaaggcactcagccgcacatggggcaggcacctggccctctactcatccccgaaaagcagacacccatataccctcacaacaggctatgcatagcccaatgctagcgcacacagcccagcatgcgggcacgttcactcagcccccgggcgggtgcgccagccctctgggtctgttccaagttggagcctctcacgtgaggcccaatgtgtcatttccaaacagaaggaatctagctctctcacagcagggaggaagagcagggtgtgtagttgggtgggtgggtgcgtgggcatgtgcaggggggagggcgtgtgtgcgagggaagcaggcatgtgaataccagggcatgtgtgttggggcatggtgcacaggggctgggggctctaaggttgggtggggggaggagcccaaggaaacagtgtgcctttgtgagggtgtgtgtgccgccgggtctgtgcagtgggtgtgggtgtttgtctccctgtatccgccttctctcccgtccgggacttttagccttcctgggctcgccttcctcatgtcctttctcctccctcttggggctcaaattgggtgccctggtgaaggaggggggcacactccagaacctagtccaaccccagacgctgcctgaggcttccctccagctcccctcccttccttttctccctttcctccctccctctctttccctttctccctccccgctaaggctggcgtgccagggggtgggacatgccaat

SEQ ID NO: 7381 - DNA, 2300 bp, Homo sapien
caggatattcagcagcatatctctaccctctaaaagccagtagcaccaccaccatcctgagtcatgacaaccaaaaatatctccagacattgccaagtgtcccctggggggcaaaatcaccgccagtcaaaaatcaccgttcttaggataagatatacttaggcatattttctttctaaaatcaatgtgatagtcccaccttttcaccagaaacaaataagaagagccagtaaccactgaattacagggcatatgagctactttaagcttcttacctatattagttcatttaatgctccaaaaactcaaggcagccaacatagctattatccccatcttgcaaatgaggacactgaggtacagaggagtttagtcacttgcccctagttccacagccagtaagtgtggagtgaggatgtgggtccaagtagactgactccagagtccatgttttatataatatgaagtgcataagttaataacaagaagctgccatctactctctctcactgtcctcaatctgggatccaaccaactggatcccatggaaacccatcaaatcagagctccacacttccctgatcacatgtaactcaggagccaaaactctgttggaggaattcacgtgattgtcttagagttgtggctaaaaacacagtgagttcatgctcattgttttaaaaaataacactatggctgggtgcggtaggtcactcctgtaatctcagccatttggaaggctgaggcaggtggattgcttgagcccaggagttcaagaccagcctgggcaacatagcaaaaccacatctcttaaaaataaataaatacatgtgtgctggtgcacacatgtagttctagctactcaggaggctgaactgggaagataatctgagcctggagaggtcaaggctgcagtgtgccaagattgtgccactacactccaggctggatgacagagtgagaccctatctcaaaaataaattaaagaggccaggcatggtgtctcacgcctataatcccagcactttgggaggctgagatgggcagatcacctgaagtcaggagttcgagaccagcctggccaacatggtgacaccccatctctactaaaaataacaaaaattagccaggcgtggtagcacatgcccataatcccagctactcgggaggttgaggcatgataatcacttgaacctgggaggcagaggttgcagtgagctgagattgcaccattgcactccagcctgggcaacagagtgagactgtgtctcaaaaagaaagagaagagaggagaagagaagagaagaggggaggagaggggaggggagcgaaggggaggtgacaaaggaggggaggggaggggagaagagaagaaaacaagaagaaaagaaaagaaaaaagacactatggacagaagacaatatgactaagggaaaaatctgacccttggaagggtcagaagaatcactggaagaatcacccgacattgtgtatgacgttggtcttaggtcccactccaagagcggcctctgacttctgttgtttcttccaaatgaataaaaccatggttctataagatgtgagctgtccccagaagaacaaagactggggttgtcacatttagcaaataaagatacagggtgcccagtcaaatttgcatttcaaatcaatgaagaattgcttagtataagtatgtctcatgcaatattagagacatactcatacttttaaaaactcttcattgacctaaaatgcaaatttgactgggcaccctgtaatttccctggcaacccttcccaaaagcagactatttggatctcatccactaaaaagggcagaaactcctcaagaggccaccacacttcccagagcccagtctccttcctaaaaggaagacaaataggtccaatagatcccactctggccccccctgcccccagatgcccccctaatacacccctctccctgctcctattcagtccaccctctcctgccctttataaccacttggagaaattccactgacacaaggaatccttggagggttaatccttctgataccaagtcacactttaactcattccctccaggccaaggattaaaaactgcccatgcaagggtcaggtctccagcagaccctgaaagctgagctgccctgacccccaaagtgaggagaagctgcaagggaaaagggagggacagatcagggagaccggggaagaaggaggagcagccaaggaggctgctgtccccccacagagcagctcggactcagctcccggagcaacccagctgcggag

SEQ ID NO: 7382 - DNA, 2300 bp, Homo sapien
gtctcatgccctctgagcatcaagatttttctaggtggctgggtgcagtggctcacggctgtaatcccagcactttgggaggctgaggggcggatcgcggggtcaggagtttcagaccagcctggccaacacagtgaaaccccgtctctactaaaaacacaaaaaattagccgggtgtggtgatgcgtgcctgtaatcccagctacttgggaggctgaggcaggaaaatcacttgaacccgggaggtggaggttgcagtgagcagagatcatgccattgcactccagcccaggcgatagtgcgaggctccatttcaaaaacaggaaaaaaaagaaaaatatttttctaggtaaaatgaagataatgttgcctgtcacccagagtttcatgggcctggtacacaggaaggctcactaactgtaagccattcctgccataattctcgggaagaggaggatagagtgccaggcccttgccatggttttgggaggaagtcactgataatcttggtaagagcaggctcagaagaccatcagggcaggaggagtgatgggcccaggaagctgccaccatcagctggggcagtggcctgaggccaggcaaccaatgtccactccctgagggcctcaccggatccaggtcacccacaggggctacagctaaagctgatcctgccttggaccagacttctccaaacaccactcctttctccccacatctcaacctcttcctttcctcttatcctggtgaccctcaggaactgctcagaatgagccaatctcaaaagcatagcctgggggcaagggagagtgggggtgactgcctatttgccaatcccaagaccccatgctgtgctcactccctccccacaactcccccagcagagttagtcctttgcagggagaatctgaaggtcccaaagcctagtccctgacctcaccttagcctccatccccctcccaagctgccctgtggctgcagccctgccctttcttctccagagagactgggaatgcagcccaaggaaggctggggaggtggatgtgcaggaccctccagcagcagtccagccttgaacatgccatcccctcccccagccccacctgccttggcctagagcctggggctcctagttaaggaagacacccaacaataacaagtggcccaggtcgggggcagaggaaagtgtcttctggaaggggaagaagagaacactggaatttgtgctggctgcaggcagcccaggggcagagtttgtccaagtttaaattccatgaaatctgcagtgagatagctcaggtttctggtcctcctaccccttggccctggctgttgatgttcttccagcctctcaaaaggggctctggagtgggaggagccactgtgactggtctctggcccccaggtggacaccagagtccatacgctggttggtcttgtctggaaagtcctcgaaggccctgaagatactccggcgggtggctgtcttcaatggcaagaaggaagagggagaaaggctcagcttggaggtaggggctgaggactatagtctgggagcagaacccctgtgctccactcttgggctggcccctccccttgcctctgttcccctggctcacagcctataccacatctgattccctgagctcctctagaggcaccacgcctgcatctccctctcttcgtcctgcccactagctggtcattaatggcacccctccccctcctctgcccgaaggagctcaaactcaacctgcagaaggagatctccttggccaaggccaagtacaccgcaagtgacctgttccggatacccatgctgcgccgcatgaccttctgtctttccctggcctggtaacccccctctccctgcccacaccctgccaaggaaggggtgatagacaaggcctccagtaggctcacttaagggcaaggcctagggcatctgaaagagaagtcagagaatcccctctcctgggccaccacagcccagccccaaccccagaaatctgctgcattcctgccccacacccaggtccagccatcagggtctgcttccctctggggtcacaatgccccacccctcacccacaggacaaatgttccaggccccttccccagctcacatccctgccgctcagtgtccccatgctctccctctctgtcactgcccccctctgggtcagctctgccctctggaaccccacagagcaaggctagaccaatgggtttcagactcgaagacaaaaattatgtttatctcaagttttctcctctgtctgactttctcctgctccctg

SEQ ID NO: 7383 - DNA, 2300 bp, Homo sapien
cacaattcctgatatcactaatccaatcacatccattaggggttggggggcgctgcccggatgcagctgcccctggctgggcagttcagatatgtatactctggcttaactccagcagcctcagcggggagtcaccaggctcctttaaacaacattccactaggacaggaacagatggataacccaagccaattaggaaccagaaaatctccaagaggccaaatgcccagaacagggggagctcagggcggcagcccagctcactgcaagcctcacagtcgaaaatcttcctaaaacaaccccttggctgccttggagcataatttaatcttcctttgatgactccagatctcgccctgcctcaggccactctgagaacatcaataactgctgggcccaggtgggaagccgaggggcagggctggacccaggttgaccagctgaccctgccctgcggtaggagggaagctcagtctggaccctgggggctggatactgccttggtggagaggggggcccaggaggagaatggaaagccctccccaaccaagaaggggagccctaaaggggcccctccctagcccctagagcaggtgggaaggggcagctcccaggggtttctggaggtaggaacagagaggtaaaggcaggcaggagtgatgttgaagaccagcctaggtgacttttttttttttttttttgagacgtagtcttgctctgtcaccgaggctggagtgcagtggcacgatcttggctcactgcaacctctgcctcctgggttccagtgattctcctgcctcagcttcccaagtagctgggactataggcgcgtgccacatgcctggctaatttttgtatttttagtagagatggggtttcaccatattggccaggctggtctggaactcctgacctcgtgacccacccaccttggcctcccagactgctgggattacaggcttgagccaccccgcccagacctctaggtggctctttaagggagaggcaatatattaatagtacagtgcccccataggcttcgtagagaatgttggttctaagggagggaataggcttagggccaccctgcccctgccctgtgcttcctggctgggggatggtgaggaggtcacttaatctccctttgcctcagttccctaattattaatgctagactagtcacagggctgccgtgagggttaaaagagcctaatgttggtggctagaagttgaggtcttagactgaagtctctgctgaggaaaagaccagaagaacagataggctctcaggtgagactggacattttgctttgttttgatttgttttgtttggcttgtctgtatttcccatgttttatgcaggaaacacacattattatataattaaaataatattcagagtgaaaataaaacagcagggactacatttggtccccagggggaagcggctgatcaggagagaagcctgtccattgagggtgggatggaagggggcagttcacctgtgtcagagacacagacacggaggtcctggctgccccaggggcccaggagatggcagccctgcgtcctcagggatagatgaaagtgacattttctgtctgggtgtgccctaacacttcctgagaggcaaatccccttcccctactcgggaggtgccaggcaggggaggtagcacacaggagaatgctgcctgcttacgggcaccagtgcctttcccattggttgtcctcagcatcaagtcctctgaacatcagttgagagggaccttgaaccctcagaggtcaggccagattccttcccagaatctcccctcggtgagcctgccagggctgctcgcgttgggcggatgtacaaaacggaggcacgtctcagacttcccatttgggcccgtggtgtccagccagcagccctgctaggctcagccacgctgccccacccccagcggccctcgctgaggcagccctttgaggagagctgggcttggtgggtccacagcactctccctgccagtgacgttaatccgcaaaagaaagtcaaacattagcccgggaaacagcttatgccttatataagcccccctgggggaggcacaaacacagcttgttagagctgagctgccctactacagcagctgccggcccctaggacagagcagggacctcaactacactgatcaccagccccatcggatccagacccggccaccaggtgaggagggatggagggcctccccagcccaggcacctaggaatcccagggatctcccaaggccaggctccacttgcgactagccaagc

SEQ ID NO: 7384 - DNA, 2300 bp, Homo sapien
gcaagttatttaatgtgtctagtcctttgttttctcaggggtaaaatgtagataacaagggtgagaactaaaataaggaaaacattaaaagtgcttacaacagaatcgacttatagcgaatactcagtgaattcacagctgtaatcattctttacatcattttattcttgtggttctgaatggtttgccttgctggaacgttcacttcttactatttttacactgtgtcagtaactttagtaaaatataattgtgattgtctaaccccattatggggtgaattgtgtctcccactcccaaaattcctatgtcaaagtcccaacccctaatacctcaaaatacaaccatatttggggataggttaaaatgagacccatagggtggggccctgatccaatatgactagtgtccttataagaagaggaaggaacaccaggtgtgcacatgcataaatgaaagaatatgtgaggacatgacgagaaggcagctattgacaaaccaaagagagaggctcagaggaaatcaaatctgttgacaccttgatcttagactttcagccttcagaactgtgagaaaataaacttctgtaaagtcaccttctgttaagtctgtggtattttgttatgcagccctagtgaactaaaacatttctaacaatttacaacaaaaccctgtgatgtattagatttcctgtttggaatagatccatgaaagtcatttcctgaacagagaatctctgcaggctggacaggaatctgcttttttttttttttttttttttttttttttttttttttgagacagagtcttgctgtgtcacccaggctggagtgcagtggcacaatctcagctcactgcaaccttcactcccaggttcaagtggctctcctgcctcagcctcctgagtagctgggattatgggtgtgagccactgcacccatccaggaatctgcatcttaagatgtttcacgggtgaccagtttgaaattcaaaaataagaacttcttgtaggcagaataaattctggagattctgtttgtttctttgggtttctttttaatcaacctgtcttttcccattatatccgtgcatgctatttagctgctagcttttgaatatccttgtaggtacacaattatgccacacctttaactgtaattgtgtacttattattccctcatttaaaaattgactcttgcagtccctcatccactgcttcattatctcaagaatcttcccacaagagtaggtcaagctggctgggcatggtggctcatgcctgtaatcccagcactttcagaggctgaggtgggcagatcacatgaggtcaggagtttgaggccagcctggccaatatgatgaaaccccttctccataaaaaatacaaaaattagctgggcatgtgggtgaatgcctgtaatcccagctacttgggaggctgagacatgagaattgattgaacccaggaggtcaaggctgcagagagccaagatcccaccgctgcactccagcctggtgacagagtgatactttgtctcaaaaaaaaaaagagtaggtaaagttaatttgtagagggatgactcccctgctccatggcatctatccaggtatcattaaacagtttctccttaatcttccatagcacactgtgtatcttccttatagttatatgatgacattacagtacaattatttacaaacctatcatttatatgagacattgagctcaaattttattttaaacttataaataaatatatgtaagttaacattgctttatttacagcaatagcaccagaaagcccaaaatgatatttgaatgaatcaataaatctggtgaaatatactactataatacataaaagcactatttcctttctctttgtttcttatcctaatttccctattttaaaaaatctttaaagccctgtcattggtatgacttgaactgaagcagaactacacttagcaaaagtcaatgtttaaactcaacattccactttcctttaactaagaatagtttttattaacttttagtaaaactcagtcctagtccaaaaaaagccctgctctctgatctttgtacaagaacatcataaagcaattcactttggattttctaatatcccatttctaagaagaatggcagactattgaacaggtgtattttaggtcacgtggggactgcatccacctgaaaatccaccgttgacttatcaggaaactcagagatcaggatctttcacagagtagtcttttaagaagattcagttgtcaacagctagcagtctctttgccaa

SEQ ID NO: 7385 - DNA, 2300 bp, Homo sapien
gaattatacctcaatgaggtatacattttaaagaattttagtcctaatcaaggtgcaattttctcctatattttgtctgcaattcttccatagcacattgtgcgtctcacataatatttacaatatcagattacaattgtttatgtactctatcttactcactgaactgcaagatttttgaacctggttgtacacattattcaagatactgacacagaaaatgtccccacaaataatatctgaaagaatcaataagccagtaaaagtaaacctccatatgagcttagcactggcttactactctggttcttatcactacccactctccccacatttgaagtaatttacttccagtgtgagtttgtggtatgctttggcatgaagcagaacatcagtcaacaaaatggaaggtttgcaccatattactcattttaattcaactcagattgtgtttattaatccttaatcaaaaattggtacttaacaagaaagacatttgctttctgttcttttcacagagaaaagaaaaagcactttgcctttgagtcccacagattacacgttctggaaagactgcataccaagtagcagatttattttagtttgtttacaaaaaaatgtgcagaccaaagttcaatgctgctattggggagctactaaagacatcaataagtagatgtctaatgtttaaacacatttcattgaaaatggttggaagtatctgagccaattatttcttatgtgaccctaaagaaaacagatacctacctgaccccaaaactacttgaggaaattgcttccgtgaccctgctgcagatgggagagagggcccattaagaagagagtggggtcaggatcaacacacacacttagtgtgatttaaggaaaggaaatattttctctttgaacttatctggatacagtcattttgtctcctcttggggatcacttgtccagcctcaatggcctttcaggacctcctagatcaagttggaggcctggggagattccagatccttcagatggttttccttataatgttcaacgtcatagtataccatcaaactcagctggagaacttcgcagcattcatacttgatcatcgctgctgggttcatatactggacaatgacactatccctgacaatgaccctgggaccctcagccaggatgccctcctgagaatctccatcccattcgactcaaatctgaggccagagaagtgtcgtcgctttgtccatccccagtggaagctcattcatctgaatgggaccttccccaacacgagtgagccagatacagagccctgtgtggatggctgggtatatgaccaaagctccttcccttccaccattgtgactaaggtaagaggcctcattttcctctcttgtgtacatgacctggctgtttagaataacacaagaaatgattgtgcttccagcctttagtcacatgtaggtgcttattcttcattctttcaggaaacattaattgcttctctactgaatgccagatacctgcacatttaatgagtctaatgaattcaaaagtagatgtgaccctgctatcatagtgcttttatccttagtaaaaccaaaatttaagcaagcatttatgaataatgtgttaaaaaatgttctgctaagtaaagaatgctcagcctgtggttgaaaattataaacctctgggaaatcactgaaaacctccaagtccagactatatcttacaacaatcatatgagaaagtctaggggtgaaatttaggcaaccaaaaatatttaaaggttctcaaatgatttcactgtgtggccaaggttgagaaccatttagtatggaataaaactgggcactaataatatctaaaagtttaggaatagcttccaagagaaagttgtgcttaagttgagacctgaacagtgaatatcaggtaatgcagaaaagggaagctagggaggaagatagaatgaaacttgcaggctattttaagacattttgataaggttacactgaggggctataagcattgatatgagggtttccttttcttccagtgggatctggtatgcgaatctcaaccactgaattcagtagctaaatttctattcatggctggaatgatggtgggaggcaacctatatggccatttgtcagacaggtgagtgtctatggagcatagctctcttcaagggtattttcatcaattcatgaaacacttttcatctagaaatatttttggaaatcacactatcctgttgctcccttggtccccagggatttgtagacacaaaaggaaaattatgg

SEQ ID NO: 7386 - DNA, 2300 bp, Homo sapien
aaccctagaagaaaaactaggcaataccattcaggacataggcatgggcaaggacttcatgtctaaaacaacaaatgccaaaattgacaaatggggtccaattaaatgagagagcttgtgcacagcaaaagaaactaccatcagagtgaacaggcaacctacagaatgggagcaaaattttgcaatctactcatctgacaaagggctaatatccagaatctacaatgaactccaacaaatttacaagaaaaaaagaaccccatcaaaaagtgggcaaagtatatgaacagatgcttctcaaaagaagacatttatgcagtcaaaagacacatgaaaaaatgctcatcaccactggccatcagagaaatgcaaatcaaacccacaatgagataccatctcacaccagttagaatggccatcattaaaaagtcaggaaacaacaggtgctggagaggatgtggaaaaataggaacacttttacactgttggtgggactgtaaactagttcaaccattgtggaacacagtgtggtgactcctcaaggatccagaactagaaataccatttgacccagccatcccattactgagtatatacccaaaggattataaatcatgctgctataaagacacatgcacatgtatgtttattgtggcactattcacgatagcaaagacttggaaccaacccaaatgtccaccaatgatagactagattaagaaaatgtgccacatatacaccatggaatactatacagccataaaaaatgatgagttcatgtcctttgtagagacatggatgaagctggaaaccatccttctcaaccaactatctcaaggacaaaaaaccaaacaccgcatgttctcactcataggtgggaattgaacaatgagaacatttggacacaggaaggggaacatcatgcaccggggcctgtcttggggttaggggatgggggagggatagcattaggagatatacctaatgtaaatgacttgttaatgggtgcagcgcaccaacatggcacacgtatacatatgtaacaaatctgcacgttgtgcacatgtaccctagatcttaaagtataataaaaataaataaataaattttttttaaaagggtgaactgtatggtaaatgaattatacctcaatgaggtatacattttaaagaattttagtcctaatcaaggtgcaattttctcctatattttgtctgcaattcttccatagcacattgtgcgtctcacataatatttacaatatcagattacaattgtttatgtactctatcttactcactgaactgcaagatttttgaacctggttgtacacattattcaagatactgacacagaaaatgtccccacaaataatatctgaaagaatcaataagccagtaaaagtaaacctccatatgagcttagcactggcttactactctggttcttatcactacccactctccccacatttgaagtaatttacttccagtgtgagtttgtggtatgctttggcatgaagcagaacatcagtcaacaaaatggaaggtttgcaccatattactcattttaattcaactcagattgtgtttattaatccttaatcaaaaattggtacttaacaagaaagacatttgctttctgttcttttcacagagaaaagaaaaagcactttgcctttgagtcccacagattacacgttctggaaagactgcataccaagtagcagatttattttagtttgtttacaaaaaaatgtgcagaccaaagttcaatgctgctattggggagctactaaagacatcaataagtagatgtctaatgtttaaacacatttcattgaaaatggttggaagtatctgagccaattatttcttatgtgaccctaaagaaaacagatacctacctgaccccaaaactacttgaggaaattgcttccgtgaccctgctgcagatgggagagagggcccattaagaagagagtggggtcaggatcaacacacacacttagtgtgatttaaggaaaggaaatattttctctttgaacttatctggatacagtcattttgtctcctcttggggatcacttgtccagcctcaatggcctttcaggacctcctagatcaagttggaggcctggggagattccagatccttcagatggttttccttataatgttcaacgtcatagtataccatcaaactcagctggagaacttcgcagcattcatacttgatcatcgctgctgggttcatatactggacaatgacactatccctgacaatgaccctgggaccct

SEQ ID NO: 7387 - DNA, 2300 bp, Homo sapien
atacccaaaggattataaattattctaccataaagacacatgcacacatatgtttattgcagcactgttcacaatagcaaagacttggaactaacccaaatgcccatcaatgatagactggataaagaaaatgtggcacatatacaccatggaatactatgcagccataaaaaagatgagttcatgtctttgtagggacatggatgaagctggaaaccatccttctcagcaaactgacacaagaacagaaaaccaaacacttcacattctcactcataagtgggagttgaacagtgagaacacatggatgcagggaggggaatatcacacactggggcttgtctgggggtgggaggctaggggagggatagcattaggagaaatacctaatgtagatgatgggttgatgggtgtagcaaatcaccatggcacatgtatagctatgtaacaaaactgcacgttctgcacatgtatcccagacttaaagtataataataaaaaaaaactaaaaaaataataaggtcaagtatggtcaagtacatagagatagggaatggaatggtgtttacaagggctggggtgtgaggggtgggaagaagtggggagatgtaagtcaaaggatacaaagtagcctatatgtaggatgaacaagttgaagtatctcatgtacaacaggagaactgtaattaataacagtatcttgtgtttttgataaatgaatagattatatgtgcttttgccaaaggggggaatgggtaacttttcccatttgtgagatgattgataggttaattggttccactatagttagcattttatatatctctatatatctttatctatatatatacatatgtatcttataacatcatgttgcttatcttaaatatgcacaataacattgattttaaaaaaacaaacaattgtatatacattctatggaataatattcagcaataaaaaggaacaaagtattcatatatacagcaacttagatgaatatctgtagagtttctgatttttcaaaagccaacctgagaaggatatataccatattattctcctagaaggagggatatctgtggagatgtaactgttcactatcttgattgtgatgatgggcacactaaattacacacataaaattgtatagtactatatgcatacacggatacagataaaccaacaagggaaatattaataaaatcagtagattgtatcagtatcaagatcctggtattatactacattgtatcatactagcatcttgatgttgatacaatattatactacagttttgtaaaatattaccattagaggaaacagggtgatgagtatatgattactccttgtgttatttcttgcaactgcatgtaaatctataataatctcaaaaaacatttcattaaaaatctaaaacatgggaaagttatctgatgcaaactataagaaacctggcatagccatgttaacgttaaaaaatatataattcaaaatgaggagcatcactagagatagaggcatagtttataacaataaaataaacaatttatctggattcccaaaactaacatggaaaagatcttccaatgtgctatatataaatgaataaataagcccaaggaaataaactcctatatgagctgaacactgcctttctcttctatttatatttcatataatttaaagttatgtgagttcctcatgtgatttaacctgaagcataatatcagttaacaaaagatagtaatggcatcacattccaatttgctttaaaaagcaaaacatggtaattgggatttgcatttattcatcattttaatctaaattcagtactaaaggagaaaaaccctgactttctgctcttttcatggaaaaattataaagcagtttacttttgtgtctctcaaatttcacttcctagaaataacaacactgtttaaccgatttcttttagcttatttagagaacatgtacatgccaaagtccaatgtaaatttcatgagtcacttgaggacaaacatatttggagagagtaaacctttaaacggattttattgtcaacagctagaagtatctctatgaaataatgatctctatgactacaaaataacatctacctcctgatagcaaaagaactgaggaagctctttccactacggctgtattgcactggtgagtccgggcccatggatgagaaattgatgcgaggatcaatacaagcttaatttgaattaataaaaggaaatattttctccctttgaacttatctccgtaaagccattgtgcctcctcttggg

SEQ ID NO: 7388 - DNA, 2300 bp, Homo sapien
cactggccgtcagagaaatgcaaatcaaaaccacagtgagataccatctcacaccagttagaatggccatcattaagaagtcaggaaacaataggtgctggagaggatgtggagaaataggaacacttttacactgttggtgggactgtaaactagttcaaccactgtggaagtcagtgtggtgattcctcagggatctagaactagaaataccatttgtcccagccatcccattactgaatatatacccaaaggattataaatcatgttgctataaaaacacatgcacatgtatgcttattgcagcactatttacaatagcaaagacttggaaccaacccaaatgtccaacaatgatagactggattaagaaaatgtggcacatatacaccatggaatactatgcagccataaaaaaggatgagttcgtgtcatttgtagggacatggatgaagctggaaaccattattctcagcaaactattgcaaggacaaaaaaccaaacaccgcatgttctcactcataggttggaattgaacaatgagaacacatggacacaggaaggggaacatcacacaccggggccagttgtggggtggggagacaggggagggatagcattaggagatatacctaatgttaaatgacgaattaatgggtgcagcacaccaacatggcacatgtatacatatgtaactaatctgcacgttgtgcacatgtaccctaaaacttaaagtataattttaaaaaaaagaaaatgtggcacatatataccatggaatactatgcagccataaaaaatgatgagttcacatcctttgtagggacatggatgaagctggaaaccatcattctcagcaacctatcgcaaggacaaaaaaccaaacaccacatgttctcactcataggtgggaattgaacaatgagaacacatggacacaggaaggggaacatcacacaccagggactgttgttaggtgggggtaggggggagggatagcattaggagatatacctaatgctaaatgatgagttaatgggtgcagcacaccaatatggcacatgtatacatatgtaacaaacctgcacgttgtgtacatgtaccctaaaacttgaagtataatttaaaaaaaagaaaaagaaacattatgttaaatgaattaagccagatatacaaagtcaagtattttatgattcaatgtataaatcaaatgtccacaataggcaaatccttagaatcagaaagtaaattagcggttgctaagtgggatgtgtgaataaaaatggagagttactgctaatgggtatggtttcctatgtggtgattaaaatgctctgtaacgatatagtagtgatgattgcacaactctttgaatgatcaaaacacattcaattgtatactttaaaagggtaaattgtatggtaaatgaattatacttcaaggaggtttaaattttaatagaaattttagtcctaatcaaggtgacattttctcccatattttgcctccaattcttccacagcacatagtgcatctcacataatatttataatgttggagtgcaattgtttatgtactctctcttacttactcaactataagatccttgaacttgtcacacacgttactttaggaactagcatggaaaaggtcttcacaaatactatctgaaaaatcaataagccagtaaaagtaaacctccatatgagcttactcctctgcttttcatcaccatctattctgtccacatttcaagcaatgtatttccagcatgaatttgtggtgtgatttgacatgaaggagaacatcagtcaccaaaatgaaaggattgtaccacagtacccttattttagtttaacttcgacttttttagattaactcttaatcaaaaattggtacttaacaaggaaaaacttgccttctgttgttttcagagaagtaaaaaaagcacctcacctttgagtcgccaaaattatgcttcctggaatgaccgcataccatgtagcaggtttattttagtttgtttacagaaaagtgtagaccaaagtccagtgctgactttgggagctactaaagacatgaaaaagtagaattttaaacacatttcattgtaaacgactgggagtatctgagcaaattatttcttacgtgactttagagaaaacggctacctatctgaccccaaaacgacttgaggaaactgtttccacggtcctgctgcagaggggaagcacagtcgtcaagaagagagtggggtcaggatcaaaacacatttagtgtgacttagggaaagaaaacat

SEQ ID NO: 7389 - DNA, 2300 bp, Homo sapien
agagggaatgtgataaatatatgtaaaggtctcaactttattagtgatcagggaaatgcaaattaaaacgctggtgaaatactattttacattcactcacctggaaaaatcaagaagtgtgacaatactaagtgttggtgaggatgtaaattaataaatcttacccattgctggtagaagtgaaattgggaccaccaattggggaaatagttctagtgttttattgtaaagttggatatttgtatatactcctaggtattacatcttgtgtgatgtctgcatgcatacaccaggatacaaattgggttcttctcaattgtttccaaccccaaattgaaaaaaaaaaaaaaaaaaaaaagaaccaacaaatcaccaagtggctttatcactaggtcaataaattgtggtatagccacatagtggaatattttactgcagtgaaaatgaattacaggactatacagcactgtgtatgtattatagaaacaactttgaaagaagaaaattgcagaagagaacttaacagcatgataccatttgtcttagtccatttgggctgctataacaaaataccatacgctgggtggcttataaacaacaacaatttatttctcacagttctggaggctgggaagtccaagatcaaggcaccagcagattcctgtcttgtgagggactggtctcagcaactgctgtgttctcacatggtggaagtggctaggtagctctgcaggacctcctttataagggctcttatgaatcccactcatgaccaaagggcccatctcctgataccatcactttgggggttagaattctagcacatgaattttatggagtcacaaacacccagaccatagcaccatttttataaagtttcagagaagcaaaacaaagtgatgtattagggatacaaagaagcgatttaaaaaactattttaaaaagtgagggtatgacagacacaaaggtcaggatagacgttgggcgtgcagagggagaagggataaggaaggaatccataggtggggagcatctgtactaggaatgttccatttcttacgtaggatggttttgtcatgggtagtaattacattatgtttcctaactgtgtgcgagagagaaggaaagagaaaatcagttggggaagactcaatgcagaagcggcctgcctgaaaagtcacagcaacaggcaaaaataaaacaacctggtaaaaaactcaggctccacctgcacacagataagcagacagggtccagcacagaagccttttgttctttgtataattagggagctcccaggaaagttttctccccttttcaggcatatacatggtgggaactttcacagggaggaggggggcttacctaaaacaaacccacagttatgcaaacaaaaaaggcggtgctttgtgcttgcatagatacataaccacagctgcgtaagacagctttactgataagagaagttactcaaactactacagagataagagattttcttgcaaaagcttttgaattcagctgtaacagggcaatccacttgcatactcagctcactgtggagagctttcttctttcgcttattaaactttcgctcccacctcaccttatgtcccgttccttaattttcttggagtaggacaaagaatcccgggtatcagtccagacaaggagaaactgctacattaaggtacattggcaagactgcaacatgtgtattccatgtactttttcataagttatctattacgtaagtgtagatttcattttctatatatttttaaaaataaaacaactctgaattgttcaagattttaacccctgattgtgcctcccaaggcttcctaatctggtctccatttacccctccaagtcacgcctctgttccaaaccgttcagcttctccagccactttaggcaccacctctgagcctttgctgtttccatgaccttccccaaaacgaataacctccttcgcccctctccgcctaaaagacccacagattcccgggcctctaagcgccccgtttcgtcccattctgttctcggacgcgctcactgcgcccgcgccactgtcgccaccccgcgcgcctctgccgtttgcagcccgcggcgctttcccctccgcggttcctccccgagccgcccccagtgcccaagcttccgcggctccgccgaccaggggccgcgccgactgggaactcgccaggggcgtagtcccctgcaaggcctgggggccggcgaggccgcagaggcgggatgggcctgagcccgggcgccgagggggagtacgcgctcc

SEQ ID NO: 7390 - DNA, 2300 bp, Homo sapien
gaagactgactaaacagactcattgtagcaataagacaccaagttctatcctggctctagtatagcatcacatgacagagggccctgaaagaaattaaaccattttaccccaaaatattaatatacatatttgacatattttgaaatggccctgcaaacctcactcttgtggggaaaatctgctctgcaaagcatccccttccctttccaagtcttttccctgatccaggcatctttttaggtctgataagagctctgatgcctgcttcctggaggcttcatctgcatgataaaaccttggtctccacaccccttaacttaacccagacactcccttctactgagtccaggtctgtaggtacttacttaactctttcaaccaataaccaatcaggaagtctttgaatccacctatgacctggaagcccacctcttcgagttgtgccacctttctggaccaaaccaatgtacatatcacatgtattgcttgatgtctcatgtctccctaaaatgtataaaaccaaaatctagctcaataaccttgagcacacgttctcaggatctcctggggctgtgtcacaggccattggtcactcatatttgggtcagaataaatctcttcaactatttcagaatttgactcttttcttcaagaaactggcccctccacccttagcttcctctcactgtgtatacagagcacccttcctgagcacgtctgattgaatttctccaaataagcaccttcagtaacccagctccacctactcggcaacatctgaacaaactcagctccgcacccaaagcccttctagttccatcctaagtcaatgcttctcaaactttaaagtgcatcagaatcacctggaggggctgttaaaatgcagattcctggccccagcttccagagagtgctcctcagttggtctggggtggggaccccaaacttgcatttttaacaagtttccaggtgaggctgatgctggtggcttgtggaccacagcttaggtagcactggctaagataccttatcccaggacccttcatgcactctccctccatccagggagctgcttactctgccctcagcaccccatgcgcttgagcctttgcccagcctggtcctggtccaggaattccctgctgccaagtctgatgcaatgggtcagatcctggaacctcctaactcaggataaagttgagaggttgtgctgctttttaaagggaaagccttattgggatttgaaccagaactggaaggactgtagtaaaatgcagatatttgggcccacccccagatacaggcctcgctgtgggacatgctgctatggtcactttctccatgtacagatgaacaaagggtggcccagagataggaagtgactttcccaagggcacacagcacattagacgagaggctgaagaggaagtcaagtttcaagtctccctcctgcgcagttctgtgcttcttgtgctgccttttccaagcttaaggggctctgctttttccccttccctcattctactttcttgtgaccccagctgggccccagcatttccagctgatgctgaaatggagcctcagggggctgtaaaacttggaaaaggaagaagagtagaggaaggggcaagaaaatgagaggaagagagccaggcgtggtggctcatgcctgtaatcccagcactttgggaggccaaggcgggcggatcacgaggtcaggatatcgagaccatcctggccaacatggtgaaactcagtctttactaacaatacaaaaattagccgggcgtggtggcacatgcctgtagtcccagagaggatgaggcaggagaattgcttgaacccaggaggcggaggctgcagtgagctgagatcgcgccactgcgctgcagcctggcaagagagcaagactccatctcaaaaaaaaaaaaaaaaaaagaaaatgaggggaagagataaaaccctttgtggtgaagggaggaaggaatgggaagtcacccaaggctgtccagggagctgggggtggggctgtttctggaacctaagcacacgtaccacctccccttcctctgacctaatgagggctcgagttggaaaccacaaaccctcgttggccccacaggagccagcctctggcttctctctgcaatggccatgtgctgcagacccggagtgggtagttagttggttaatgccagtcttcctcccctggacactgagttctgctgacagcccccgcccagccagagctctgctgtataccaccgggagtggggctggtgtggagcctggaggtcgc

SEQ ID NO: 7391 - DNA, 2300 bp, Homo sapien
acagagactccttctgaataacatgacatcctatcactcaggaaattccaagggtcttaggacctctgtgtctggaactggggtcaaagaccaaaaatatatttttttatcatgccacataaggcataaataaacttttattatgctacaaggcataaatttatttaaaaataaaaatttttattatgccacaaggcaaaaacccagactctgggattgttgaatgcagactcttgtgggggcccccttaaagagttttgtgatcctaaatatttcaaaatggagtcacttacgacaagtgactcagcccacagtgaaactgctgaaccctcaaaatgataaacataggtataaaggactgaggtaataagataacatctgctgtggccagacacccccaagacctgatgagaaactgaaaccaaaaggtggctgagataatgaccatggacactcctgcagagggccataaaaacagcaaagaaactgaccacggcaagacacctgtagaagctctgcccgagaaagctctgaggcttcctcatgatatccacagcggtccctggaagctctgcccaaacacagcaacatcgttcaacagtgttttgagtgaaacccagaggcatgctaacctaaacaacagaaatgggggttttttgttttgttttgctttgagacatggtttcactccagttgcccaggctagactgcagtggagcaatctcagctgactgcagcctgacttctgggttcaggcgatcctcccatctccgcctcccaagtagctgagagtacaggcacatgccaccatgcccggctaatttttttttctgtatttttagcagagacggggtctcgccatgttggccaggctggtcttgaactcgtgggctcaagtgatccacctgtctaggcctctggttgggtgtgaaaatatggcccagttctggccaatggagaagggaacaggtcatctggggaactgtgggaaagacttaactccctgaaaaaaagacaaatgagaattatctttccctccatcttttgggcatagccaggtaaaaatgggccactcaaggctgctacagccatgggagtccctgcagggcaacagtgcagacccaggaccagtgcaatggagacagcctgctgagtccttggtgaccttggtgagccactaaacccaacctgagtcaccctcttcctgcctttctgttaccgagacaatgggtgtccaggctgttgaagcccttttgagtttagttctgcttcttgcacccaaatgcattttaatggggccatgagctcccaggctccacatggtctaaggtacccctcacctccagggcatccccatggaatgaaacaccccctctggccttctcccaagacttctggcccaatattttctgggtgtctttacaagacaatgtcctatggggtgcactggggattgacatctccctgcctccgaatgcctccccttcctggagtaggaagagctgcccagggttctttttagaagagacctttattttggccaggtgcggtggctcacacctgtaatcccagcattttgggagaccgacggggaggcagatcacaaggtcaagagatcgagaccatcctggccaacatggtgaaaccccgtctctactaaatatggaaaaatgagccaggcatggcagcaggtgcctgtaatcccagctacctgggaggctgaggcaggagaatcacttgaacccgggaggcagaggttgcaatgagccgagatcgcaccattgcactccagtctgggtgacaagagcgaaactctgtctcaaaaaaacaaacaaacaaacaaacaaacaaacaaaaaagaaaaaaaaagaaaagacctttatttctcaagcaagggcagaaattcagggctccccttcgactctggctgctcccaaggtggctttaaagcaccaatgagtccatggcttgtgtaagaaatgattagtccttccatctagagaaatagctcctttttaaacagttgtctcttttaaacagtgtttagtatttaagtgaggttgaaacagtgtcaaaaggaaagtgaaagtgaaattctctccttcagcataaaagctgatccacaaacaagaggagcaccagacctcctcttggcttcgagatggcttcggtaagtttcccagggctttgcattactgactctacagcagttgggcagctccccctaggaaaggcctcagtccaggctcctggccttgggcacacagctccagagctcgtctttagaaggctgtcatgga

SEQ ID NO: 7392 - DNA, 2300 bp, Homo sapien
aggctggtctcgaacttctgacccaagtgattcacccaccttggcctccaaaagtgctgggattacaggcatcagccactgtgcccggccaaagcccattaaaattatatgtagcccaagatattcctggcatgtacatagaaagataacattgcctctagaaaggggaactgggttgctggaggctggaggctggaggtggggagaatggaggcttatctttccttttatagccttttatacaattaaacaaacatagagagcgtgcatgtgaacaaaaatgtaagtattccaggctgtaggcctagagcttaccagcaggctgggtgtggcctgccctaccctgttctctgtcagtagaactttgtcacctttcctgctcagcatgaacagtagggagacagcagaattctcattccactggcccttgatttgcagactctcctttcctatagctcctggacataatttcctgacactctgaacagcttggattcggtgaaaagccacaagccccagcatgagtacagtgatgttcctccccaactccgccctgcatggtctggttggtcattgtgccaacccacctgagatcctttcagcagacagcacgtggaagtcctcctgccccaggaaacaggggtgtgatgtggttgcaaggggagggcaggcataggaagaactgagattgctggactggaggtcagcccctaaaaagatgatcagcaagcctgagtgggaccggcccagaggtctctggacaatggggcaggagataattagccaagccaaccctactgtctccctccagaaggaatactttgaagattgtcccactgcaactcagaggagaatggagtggaggtgctgagagaggccgtctccatgggagcaagaccacatgaccacgtgagctgagggagtagctggtcatgcagaactgctgtggctcccaaagagttttccagttctggctccagtccatctgcatccccacactaaagctctttgtttgtttgtttgtttatagcctgaagagggtaagttattggtcctcgcccccatgccccacagtgaggatgctcagctccccccagccccacccaccccttcctgtccagtttgctcaggaccggacaactatatgtagatgacagaagagatacttatttggagcttgggtgagataagcatgcaggtgcctcaaagaagcaacctctacacacccagtactgggttttggtttccatttggtgtggaatgagtgtttctgaactgtgggtgagaggcagaaaggggagtggtttctatactgctgtccaagcaggctcactctgtttccagggtagaggaatgtgcctccaataatacgatttttctagggccatggggtttgaggttggtggaaatgtttgcctgtcccggcaaccatcattcccaatttggaggcatgaatctcagtctctctggggctcctctctcctttttgaaattttcccccatggtctctgtctctatatcctcccttgcccccacaaccactggatcttgcttgttccacctgaaacttggtgattgtcagctgtgcccctgaccacactgccactaagtccttctcaatctatatcctgagctctgattcctcttctgtctggctgattttcatgccgccttgcctacttgatatgtgctctgcccctgtttgaagacagggaaaattttacatgaaccttgatctatgttctgttttttttttttttttttttttgactgagtctcgccctgccgcccaggctagagtgcagtggcacgacctctgctcgctgcaaggtctgcctactgggttgacgccatttcctgcctcggcctctggagtagctgggactacaggtgcccaccaccatgcccagctaattttttctattttttaggagagacggggtttcaccgtgttagtcaggatggtctcgatctcctgaccttgtgatcctcccgcctcagcctctcaaagtgctgggattacaggtgtgagccaccgcacccagcctatgttctgaaatagttgtatatgggctgggtcacagggaaagtgaaactcagagctaatttaaggctggacacagagtcagcaacacacaagacatcatcttgaaggaaggatggctttggtaagtccccagaaacggttttaaagctttgatttgaggaacaaccaccctattagtgatgattatgtgtattcttgttggtctacagctctggcatggagggcacatgggcacatgctgagttctgggggt

SEQ ID NO: 7393 - DNA, 2300 bp, Homo sapien
atcttggctcacttcaagccccgcctcccgggttcatgcagttctcctgcctcagcttccggagtaggtgggactacaggtgcccaccaccacgcccagctaattgtttttttttgtattttttagtagagacggggtttcaccgagttagccaggatggtctcaatctcctgacctcgtgatccgcccgcctcggcctcccaaagtgctgggattacaggcgtgagccaccatgcccggccccatcaagatttcttacaaaaaattagctgctgcagcaatcacagaggctgagaagtcccaccatctgctgtttgcaggctagagaccctggagactcaggaaaggcagtggtatcattccgtctgcgtcaaaagacctgggaatccagggagccgatagagtaaatcccagtatgagggcagaagatgaggtgagctatctcaacacaagtagtgaggcagacgaaaaggggacgaatttctcattcctctagctttgttctaatcaagccctcaacagattgatgctccccactcacataagggagggtcatctgcttcacccattccaccaattcaaatgctgatctcatctggaagcacctcaacagacatgcccagacatcacacagcatctgggcaccccatggccctgtcggattgacacaacaaattaaccaccacggctgctatgaacatctgtggacaggtttttgtgggacacagggcttatttaagaaattggttattttctatttcttcaactaggtttattggtacctgttttgttattatttctagtgttttatacttatgttgcaattattcttctatatggatataagatttaataaaatcctttatttatttatttatttatttctgagacatagtctcactctgtaacccaggctggagggcagtggcgtgatcttggctcactgcaacctctgcatcccaggttcaatagattctcctgcctcagcttcccgagcagctggactacaggcgtgcgccaccaagcccagctaatttttgtatttttagtagagacggggttttgccatgttggctaggctggtctcgaacttctgacccaagtgattcacccaccttggcctccaaaagtgctgggattacaggcatcagccactgtgcccggccaaagcccattaaaattatatgtagcccaagatattcctggcatgtacatagaaagataacattgcctctagaaaggggaactgggttgctggaggctggaggctggaggtggggagaatggaggcttatctttccttttatagccttttatacaattaaacaaacatagagagcgtgcatgtgaacaaaaatgtaagtattccaggctgtaggcctagagcttaccagcaggctgggtgtggcctgccctaccctgttctctgtcagtagaactttgtcacctttcctgctcagcatgaacagtagggagacagcagaattctcattccactggcccttgatttgcagactctcctttcctatagctcctggacataatttcctgacactctgaacagcttggattcggtgaaaagccacaagccccagcatgagtacagtgatgttcctccccaactccgccctgcatggtctggttggtcattgtgccaacccacctgagatcctttcagcagacagcacgtggaagtcctcctgccccaggaaacaggggtgtgatgtggttgcaaggggagggcaggcataggaagaactgagattgctggactggaggtcagcccctaaaaagatgatcagcaagcctgagtgggaccggcccagaggtctctggacaatggggcaggagataattagccaagccaaccctactgtctccctccagaaggaatactttgaagattgtcccactgcaactcagaggagaatggagtggaggtgctgagagaggccgtctccatgggagcaagaccacatgaccacgtgagctgagggagtagctggtcatgcagaactgctgtggctcccaaagagttttccagttctggctccagtccatctgcatccccacactaaagctctttgtttgtttgtttgtttatagcctgaagagggtaagttattggtcctcgcccccatgccccacagtgaggatgctcagctccccccagccccacccaccccttcctgtccagtttgctcaggaccggacaactatatgtagatgacagaagagatacttatttggagcttgggtgagataagcatgcaggtgcctcaaagaagcaacctctacac

SEQ ID NO: 7394 - DNA, 2300 bp, Homo sapien
ggaggccaaggagggaggatcacttgagtccaggagtttgagaccttgtctctatttaaataaaaataaaaattaaaaagatgcaactaaattatgtggggaggcttaccagataacagttattttcctggagaacattacgttcagtgaaataagccaggcacagaaagacacatactttgtgatctcacttatatatggaatctaaaaaaatggaacccacgagtagggagtagaatggcagttacggcggttggggggaacaggggggtgtcagggagatgttggtcaaagggtacaaaatttctgttaggaggaatagaggaataagttcaccagatctattgcacaacatggtgattatagtaaataacaatgtactatgttcttgaaaattacggagaggttttgtgttctcaccacaaaagaagtatgtgaggtaatgcatatgttaattagctcgatttagttattccacaatgtatacatatttcaaaacaacatgttgtacatgacaaatacgtggcaatttttgtcaattaaaaagtaaaaaatgggccgagtggtggctcacgcctgtaatcccagccctttcggaggctgaggcaggtgggtcatttggggccaggagttcgtgaccagcatggtcaacatgctgaaaccctgtctctactaaaaatacaaaaattagctgggcgcggtggtgcacgtctgtaatcccaactactccggaggctgaggcaggagaatcgcttgcccggaaggcagaggttgcagtgagctgagatagagccactgcactccagcctgggtgacagagtgagactgtctcaaaaaaaaaaaaacaaaaaaccccaaaaagtaaaaaatgaaaaaagttatttcaacaaggtctgtacagaattctttccgtctcaacatctcctctttgaggataaggatgttgctttttcttctagtataaggaaggtgtccttcaacatggaaatttcatctgcttttaagacacagaaaaggggtcttcttgcacctgctgagttttaaatgcctttaattcaaaacagccaatatgccatggtggtgtgtatatacacacacacacacacacacacacatatacacacatatatacacatatatatacacacatatatatgcacacatatatatacacacatatatacacacatatatacacacatatatacacacatatatacacacatatatatacacatatatacacatatatacacacatatatatacacacacatatatacacatatatacacatatatacacatatatatacacacatatatacacacatatatatacacacatatacacacatatatacacatatatacacacatatacacatatacatatatacacacatatatacacacatatatacacatatatacacatatatacacacatatatacacacatatatatacacatatatatacatatatatacacacatatatatattttgagactgagtttcgctttgttgcacaggctagagtgcagtggcgcgatcttggctcactgcaacccccacctcccgggctcaagtgattctcctgcctcagcctcccgagtagctgggactacaggcgcatgcctccacgcccggctaattttttgcatttttagtagagacggggtttcatcgtgttagccagcatggtctcgatctcttgacctcgtgatctgcccgcctcggcctcccaaagtgctgagattacaggcgtgagccaccgcgcccggcccttggtggtatatttttaactccttcagtttttaaactataagcccattcttgagtgaaggcgaaagtaaacccatcatggccctgcagtgtgatgtgtgtgcagaggtcgagtgtgtgcgactcctggatgctgggcgcgcagggcatgggtgaggcgggaagaggcggtgccgggggcgcgggcgtcctgcagtcgccgggctcgggaccggggccgggcgctctgcgaggctctcattagccggcggcgcggggaggggccgggtgacctcacgccggcccggccaccgcggccattagacccggtccaattgctggggctgcagcgctgcctccgagaccgcgaggtgggtggatcgggtcttcctggaagggtgcgataaggccgggcgaggtgcctgggatgcttctccccttccgcgaggaagagatctaattgggtagggcgggtgtagactagcctgccgagccgcccgctggcacctgcagcctcctgggcgcccgccgggc

SEQ ID NO: 7395 - DNA, 2300 bp, Homo sapien
cttctggaaaacctcaagggaagctcaacctctgatcatagcacataactcaattcagagtgagatagctgaaggcaggctgtaaccagtattgtcaatatttggcactttcaatgtccagtgttttgatgaccctggatatttgagaaggaaataacacaaaacatgtttctcatttacaggggttgctttctaagttgtgactaatccttaagtccacctataatttgtactgttttgttccaaatgccaaaagcttctacaagggctacaatgctgatgtgctaacattgaccttgataccttgatgatgtaatattgagacatatatcagtatttgctggtcacttcctgagaagttggatttcagtgaatctctggggagcccttaaaataaactagggtattttgttcaatagtaaaagttaggtatttaatattaaaggaaccagaaagtgagtgagcagtgttagatgtaacatatatcttcttcatccattaattcaatagatatttgagtctctattatctgccagcagtatttagggactggggatatacaagtaaacaaaacagacaaaaattcctatctgtttggaacttacattcagtgggaagagacaaacacaatgaaaggtaaaacataagtcagatagtagcaggaagtctttttttttttttttttttttgagatggagtcttgctctttctcccaggctggagtgcagtggtgccatctccactcaatgcaacctctcctgcctcagcctcccgagtagctgggattacaggcgcctgccaccacgcctggttaattttttgtatttttagaagagatggggtttcaccatgttagcctggctggtcttgaactcccgacctcaggtgatccaaccacctcagcctcccaaagtgctgggattacaggcgtgagccaccgcgcctggccaagtggtatgaagtcttttggagaaaagtaatgcagggaaaaggagcagagaatgctgggatgtgcgtgcaagttttttttttttttttttgatggagttttgctcctgttgcctacgctggtgtgcaatggtgcgatctcggctcactgcaacctccgcctcctgggttcaagcgattctcctgttcagcctctggactagctgggattacaagcgtgcgccactacgcctggctaatttcgtatttttagtagagacggggattctccatgttggtcaggctggtctcgaacgcccacgacctcaggtgatccacccgcctcggcctcccaaagtgctgggattacaggcgtgaggcacggcgcccggcctggacttcttacattagctatcagagcggtgatggtgcgcatcagccatggccagggacaggaatatagggagatgataataaaggtggtaatgaagtcacggccacctgcccttatgaagtcaaaatcattaaagacccagtgacgttcatgccatccagggttgaggcctctcttctgcccacctgtggtcccaggcctagttaaacaccaaagctgtctctcacactggtggttccaggataaagcctcggcctggggcctggtctgcacgttaggcgccggccgcagctcgcaggaggacccgagccagcccgccccttcccgcacagcctgctgggagttgtagttcagtcgtcggagaaccacgccaagccccgccccagatgagtgcgcagtatgaggaccgctggccgggacccagtgagcgcgggactacaattcccaaaggacggtagcactcagcgccccgccaacaggtacccggcggctcgcttcgcgcacacgcggcaggcggtggcgggattctgccgcgtgcgctttcccgccccgcctcgcctagcctcgtcctgcgctcgccacgcctcgggctgtccgttgggccacgcagaccgcgctgcgctcgctccgtcgcggctccgcgtgccccaccttctggctagttttttctagagcccaggctccgcccgtttcccgcttccagggcccggttcgttcccgcccgcacccgtccctctcctctgcacccctgctgcttctgctttgaaggcggaggctccatgttgtcccctcagcgagtggcagcagctgcctcaagaggagcaggtgaggcgccgattttccctggatcgccccgcggccacccccgccgccttccctgctgtagttctgaaaagaacccccgcccgcgccgccgcccttcctcgtcccggggctgggaccgcgcgtccctcgccggggtcactcggtttccgaattt

SEQ ID NO: 7396 - DNA, 2300 bp, Homo sapien
ccaaatcattaccccattttacacacatgcaaaataaggtatggaaatttaaatgatgcccagggatgtagtattccaacttgtcccttccaagttgcttaaataatgatcctgcacatagagggcagaaagctgaactgtgtcccagtacagtcacagtgaatgatatttcctcagctgtctatcccacaggactgcgagtctctggaggataggaatgtgtcttatgcagcattatggcctatcacggtacctggcatataacaaatgacctatttttggaaagctttggaacctgagtcatggtggatgccattgcagaaaacaattttgctatttttgtgtttcataaaccacttgagtatcttgaatatttatgactttattttgcttttccagaatgaatatgctgattactaattttgatcactaaccacgcagtcatcatttccaaacacacagctcacttagcctagaacaaccgtgtgggtctttaaatcattttgcagatgatgaaatggattcagagaggttaagtagctcgcccaaggttgcatagctagtgaacatcagagccaggtaagtctgaccccaaagccagtagtctgtccactcaaatatgtctacatgtcacctacttctggaaaacctcaagggaagctcaacctctgatcatagcacataactcaattcagagtgagatagctgaaggcaggctgtaaccagtattgtcaatatttggcactttcaatgtccagtgttttgatgaccctggatatttgagaaggaaataacacaaaacatgtttctcatttacaggggttgctttctaagttgtgactaatccttaagtccacctataatttgtactgttttgttccaaatgccaaaagcttctacaagggctacaatgctgatgtgctaacattgaccttgataccttgatgatgtaatattgagacatatatcagtatttgctggtcacttcctgagaagttggatttcagtgaatctctggggagcccttaaaataaactagggtattttgttcaatagtaaaagttaggtatttaatattaaaggaaccagaaagtgagtgagcagtgttagatgtaacatatatcttcttcatccattaattcaatagatatttgagtctctattatctgccagcagtatttagggactggggatatacaagtaaacaaaacagacaaaaattcctatctgtttggaacttacattcagtgggaagagacaaacacaatgaaaggtaaaacataagtcagatagtagcaggaagtctttttttttttttttttttttgagatggagtcttgctctttctcccaggctggagtgcagtggtgccatctccactcaatgcaacctctcctgcctcagcctcccgagtagctgggattacaggcgcctgccaccacgcctggttaattttttgtatttttagaagagatggggtttcaccatgttagcctggctggtcttgaactcccgacctcaggtgatccaaccacctcagcctcccaaagtgctgggattacaggcgtgagccaccgcgcctggccaagtggtatgaagtcttttggagaaaagtaatgcagggaaaaggagcagagaatgctgggatgtgcgtgcaagttttttttttttttttttgatggagttttgctcctgttgcctacgctggtgtgcaatggtgcgatctcggctcactgcaacctccgcctcctgggttcaagcgattctcctgttcagcctctggactagctgggattacaagcgtgcgccactacgcctggctaatttcgtatttttagtagagacggggattctccatgttggtcaggctggtctcgaacgcccacgacctcaggtgatccacccgcctcggcctcccaaagtgctgggattacaggcgtgaggcacggcgcccggcctggacttcttacattagctatcagagcggtgatggtgcgcatcagccatggccagggacaggaatatagggagatgataataaaggtggtaatgaagtcacggccacctgcccttatgaagtcaaaatcattaaagacccagtgacgttcatgccatccagggttgaggcctctcttctgcccacctgtggtcccaggcctagttaaacaccaaagctgtctctcacactggtggttccaggataaagcctcggcctggggcctggtctgcacgttaggcgccggccgcagctcgcaggaggacccgagccagcccgccccttcccgcacagcctgctggga

SEQ ID NO: 7397 - DNA, 2300 bp, Homo sapien
atattaggaaaatggacttccttccagctggagtctccagattgtagcaagtgctgtcagagttagctaccagcatcatttatttccttatctagcacttaataatgtagatttttgtttgtttgttttgttttaaggagcagagcgtttaatagacaagaaagaaggaaggaagaagaaaacagctcccctaataatgcgatttttaaaaaaacatatgcacgtatcagaatgggtagataactggcttggttatccgatctgctattatttccctttgccatccaagagacagtttgctgcattatcagctgatgcagtaagtgccagggtaaggtattagccacaaagttattttgggaaatatttttctatgcctttttcagagcattgcaaaggccaggagtcatcctcccaccccctggggctttacctgaccttaaaaactcaagggcagatgtagtacacagcttgttctagaagatttccactggtcagatcgcctttcccctcagtggcagcttggctgaccacctcccgcttcatgaggctgcatctttacaggatctgctgatcctgcaattgtactttgggtcatcgattgctgctttagcagtaacagtcgacagccttgatttttattatttccaggatacagtcctcctttttttttttttatttgacggagatttgctctttcacccaagctggagtgcaatggtgagatctctgctcactgcaacctctgcctcccgagttcaagcaattctcctgcctcagcctcccgagtagttgggattacaggcgcccgccactacccccagctaatttttgtatttttagtagagacagggtttcaccacattggccaggctgttcttgaactcctgacatcagatgatccacctgcctcggcctcccaaagtgctgggattacaggtgtgagccaccgcgcccagccaacagtcctcctttaacaaagactatgcacctttccaatattttgaccagatgtagggagaaggcttcgaatttggcaatccagcccaggaaaagcaaaaaatgaacaaaatccaatataggctagaaatctggttttaaatacatgttctgctaaggacctcttttagtctatgaataaaattcaattatgtgtattttgtgccttattctgattttttttacttttttttttttttttaaggcaggaaggttctcgctgtgtggcccaggctggactccaactcctgggctcaagtgatcctcccttctctgccgtagcagagactacgggcctctgccactgactgcggccttattctgaatttttaatatctaattttatcatcccccataatcacagccaacattttcttatctcctggctcttcttcatcagctcagcattttttttccctctctaaaatatgtcgtctctatctgacagtctattcggaggaaaagagaaccttaagacccaaggtggacccttctctggcaacagtaacgagataagaatacgaagcaggttctgcgactgcattgcaatgtgattggaatgagtaatcgtttttcattctgtatagcatctttctccacctaccaaatggggggccgtgccatctctgcctctcggtgaggagatattacgacacagccagtgagattcacaaagcaccttgcagagtgggcctactctacactctggttttcagtttttattggagtcacaggtgggaatgcatcaaacaaaagatataggctctggaatgtacgggaaagagagtttccataatggaagcccaaagacatttctaccgttaaaatacataatctgccgaccctaaaacattcacataaagaggcaggagggaatactatcccgcagctccacgattagccgcagtcgtgggcggggattggggcttggatacgccttttgcgtctggtccccaagggacgctccccaaccctcggcgcgcgaggcgccgcgtgaggccggctttgcccctccttccctgcaagagcgcagaggagcggttcttgcgcctgcgccctgcgccgctgcgcgctttggcacccgcttggggccctttgtgcgcatgcgcgctcgcgctcccgccctctagctgcgctcggctgagtcagtcagtctgtcggagtctgtcctcggagcaggcggagtaaagggacttgagcgagccagttgccggattattctatttcccctccctctctcccgccccgtatctcttttcacccttctcccaccctcgctcgcgtagccatggcggagccgt

SEQ ID NO: 7398 - DNA, 2300 bp, Homo sapien
tttttttgtatctttagtagagatgaggtttcaccattttggtcaggctggtctcgaactcctgacctcaggtgagccactgcacccagccaagttaactctgtcttaaccaaagaaatcaatttgcacagtacaatattgatttaaatgacaagttagtacaagagattttggaggggccaggcgtagcggctcacacctgtaatcccagcactttgggaggccaaggcgggtggatcacttgaggtcaggagttaagagaccagcctggccaacatggtgaaaccccatctcttctaaaaatacaaaaattagctgggcttgatggtgcctgcctgtaatcccagctacttgagaggctgaggcaggagaatggcttgaacctgggaggtggaggttgcagtgagctgagattgcgccattgcacttcagcctgggcaacaagaaaaagactccgtatcaaaaaaaaaaaaaaaagattttggagggggtccacctttttcagtaccctttagtttagaacatcacagctatttatttgtacatgggacagattctccctgtggatagaatagaataattctagtctcatttttcagattcaggaagggcccattgcatctcctaaaaatcaaaaaagtctggccactagtttttttccttttcagattgtgagactaacagatttatagaggcagtctgtgctctgaattgttcagcttacagattgaagtctatcaaccctttatagtatcaggttatttgttttgtataaattattttgcttttgttgattagctctatcaaagaataaaaaacctcccaagatttctcaatcttaccgcccttctttatgctttctctgtacaatggaaaagtagaccaaaagtatttgtcatgaaaattttttatcatttgcagtttgtggcatgatatggcttttctgtttcactgttggcagttttatgcatgtcctgtaggataacttgatcgttttgttacatatttatgtgtgtatatatacatcctgtgtgtgtatatatatatttatgtaatttaaaaaataaaaagcatgctgcttggcttggctagctaatgtgtaattgtacctggtaaacaatttttttctttgaaattctgatcatagagggattgagctctctttgctctgatgagccatcttcagaaattatgacttcttcctttctttcatcttctgaaatacataacactggccttacaatactacatggagaaaaaagccatgtgttagggagccagcctattttagccaaagaaggaaaagaccacttggatcttctagatatgaaaaagatggaaaagcctcaggggaccagcaacaacgtatcagactcttcagtttctcttgcagcaggagttcattgtgaccgtccttctattccagccagtttcccagagcatcctgcttttctctcaaagaaaattggtcaagtggaagagcaaatagataaagagaccaagaacccaaatggggtatcaagtagggaggctaaaactgcattggatgctgatgacagattcactttgctgacagcccagaaaccacctactgagtactctaaggtagaaggcatttatacatattctttgtctccatccaaagtttcaggagatgatgttattgaaaaggattcccctgaatcaccatttgaagtaattattgacaaagcagcatttgacaaagaatttaaagactcatataaggagagcacagatgattttggtagctggtctgtgcacactgataaagaatcatccgaagacatttcagagactaatgacaagctttttccactgagaaataaagaggcaggacgttacccaatgtctgcattgctcagtaggcagttttcacacacaaatgcagcactggaagaggtgtccagatgcgtgaatgatatgcataactttactaacgaaatactgacttgggatctggttccccaagtgaaacaacagaccgataaatcttctgactgcatcacaaaaactacaggacttgacatgagtgaatataattcagaaattccagttgtaaatcttaaaactagcactcatcagaaaactcctgtatgttctattgatgggagcactcccatcactaaatcaacaggtgattgggcagaagcatctctccagcaagaaaatgctattactggaaaacctgtacctgactctttgaattccacaaaagaattcagtatcaaaggtgtgcaaggcaatatgcagaaacaggatgacacacttgcagaattacc

SEQ ID NO: 7399 - DNA, 2300 bp, Homo sapien
cagattcaggaagggcccattgcatctcctaaaaatcaaaaaagtctggccactagtttttttccttttcagattgtgagactaacagatttatagaggcagtctgtgctctgaattgttcagcttacagattgaagtctatcaaccctttatagtatcaggttatttgttttgtataaattattttgcttttgttgattagctctatcaaagaataaaaaacctcccaagatttctcaatcttaccgcccttctttatgctttctctgtacaatggaaaagtagaccaaaagtatttgtcatgaaaattttttatcatttgcagtttgtggcatgatatggcttttctgtttcactgttggcagttttatgcatgtcctgtaggataacttgatcgttttgttacatatttatgtgtgtatatatacatcctgtgtgtgtatatatatatttatgtaatttaaaaaataaaaagcatgctgcttggcttggctagctaatgtgtaattgtacctggtaaacaatttttttctttgaaattctgatcatagagggattgagctctctttgctctgatgagccatcttcagaaattatgacttcttcctttctttcatcttctgaaatacataacactggccttacaatactacatggagaaaaaagccatgtgttagggagccagcctattttagccaaagaaggaaaagaccacttggatcttctagatatgaaaaagatggaaaagcctcaggggaccagcaacaacgtatcagactcttcagtttctcttgcagcaggagttcattgtgaccgtccttctattccagccagtttcccagagcatcctgcttttctctcaaagaaaattggtcaagtggaagagcaaatagataaagagaccaagaacccaaatggggtatcaagtagggaggctaaaactgcattggatgctgatgacagattcactttgctgacagcccagaaaccacctactgagtactctaaggtagaaggcatttatacatattctttgtctccatccaaagtttcaggagatgatgttattgaaaaggattcccctgaatcaccatttgaagtaattattgacaaagcagcatttgacaaagaatttaaagactcatataaggagagcacagatgattttggtagctggtctgtgcacactgataaagaatcatccgaagacatttcagagactaatgacaagctttttccactgagaaataaagaggcaggacgttacccaatgtctgcattgctcagtaggcagttttcacacacaaatgcagcactggaagaggtgtccagatgcgtgaatgatatgcataactttactaacgaaatactgacttgggatctggttccccaagtgaaacaacagaccgataaatcttctgactgcatcacaaaaactacaggacttgacatgagtgaatataattcagaaattccagttgtaaatcttaaaactagcactcatcagaaaactcctgtatgttctattgatgggagcactcccatcactaaatcaacaggtgattgggcagaagcatctctccagcaagaaaatgctattactggaaaacctgtacctgactctttgaattccacaaaagaattcagtatcaaaggtgtgcaaggcaatatgcagaaacaggatgacacacttgcagaattacctggatctccacctgagaaatgtgactctttgggttctggagtggccacagtgaaagtggttttacctgatgaccacctgaaagatgaaatggactggcagagctctgcattgggagaaatcacagaagctgatagttctggtgagtctgatgacacagtaatagaggacatcacagcagatacatcatttgaaaataacaaaattcaggctgaaaaacctgtttccattccaagtgctgttgtaaaaacaggtgaaagagaaatcaaagagattcccagttgtgagagagaagaaaaaacatctaaaaactttgaagaattggtcagtgactctgagctgcatcaagatcagcctgatattcttggaaggagtccagctagtgaggcagcatgttcaaaagtacccgatacgaatgtctccttagaagatgtgagtgaagttgctcctgaaaagcctattactactgagaaccccaaacttccttcaacagtgtctccaaatgtttttaatgagacagaattctcattaaatgtgacaacatctgcctatttggagtcattacatgggaaaaatgttaaacatatagatgattcct

SEQ ID NO: 7400 - DNA, 2300 bp, Homo sapien
ggcccgggcccgcagaggaggaggaggagctggaggagggcgagggcgagagggcgggggtcccgggccggtcgccgcggggccgcgcccaccgccgccacccccaggagcgctggcggctggagtacctcatggagttggacggcggccggcgcggcctggtgtgcggggtgtgcgggggcgcgctggcctcgctcaagatgagcaccatcgagcgccacatccgccggcgccacccgggctccacgcgcctcggcgggcctgtccaggccctcatcgcccgggagtggagcgagaaggccgcccacctgctggccctggggccgccccgccccgagtccccccagggccccatcccccccggcactgccgcagcctccgacgaggggggaggggacgaggaggaggagccagaggaggaggaggaggagtggggtgagcggtggggccagagcaggcggagagggagagccgggcagttgctggggcagaagggactggaggatgggatagaagggcaaagatggggtgactggagatgagacgcggggcccagcccgctgccccccgccgtcgccaatgcggtcctttgtccctccttaggcgacgttccgctgtcccctggagctcccttggagcggcccgccgaagaagaggaggacgaagaggacggccaggagcctgggggactcgccttgccgccgccgcctcctcccccgcctccgcccccgccccgcagccgggagcagcggcggaactaccagccgcggtggcggggcgagtacctgatggactacgacggcagccggcgcggcctggtgtgtatggtgtgcgggggcgcgctggccacgctcaaggtgagcaccatcaagcgccacatcctgcaggtgcaccccttctccatggacttcacgcctgaggagcgccagactatcctggaggcctacgaggaggcggcgctgcgctgctacggccacgagggcttcgggccgcccgccccggcgccgcgtgacggcggcgcggacctcaagtctggcgctgtgtgtcgggcgtagcggcctagcgggcccccgggtcaggtcgggtcgggtcggatcggccccgccccgccctgtgctcgcccggcccttcggctgggagaccctcgcgtccggtgttagcgcttcccgcggccgcgccccccgctggccgggccgggcggagacgggggatcgggtggggccaccggcgtctgcgcggtgccacttgggtccctgagccagtcggtgcgctgcgggaagcgcactctcccatcggcccggagccctgccctccccgcgcagggcccacgttttccgagaatcctcagtggcctccacgtgttagcgccgagcgctcccggccgcaccccgcgagggggttctccgcaggccgggactgggggcgccgtcagtcagtattagggccgaaggggggccgtgcgggctctggctctggccctggctgggggcccagttccctgcagccttgcacgctggcaggcacggctcccggcttgggggctgctggctgcccttccctaattgggattctcggcctctcggaggccccggctgcggactggggcttccagcgggaggctgggccgcagggctcgggagccttcccggggtgggaaggcgcgttggaccgagggcggggctacgcgcccggggcccgggctggaccagctgcgcttacctccccggcaggctcagtgagaaccgtgcgcccggcggccccactctcctcccaggccgctgccacgccctccaggaaagctcttgtaaagggattagcacttttttcctttgctcctcttgccccgagggtctctgcttacccctaaaccaagtccgtgggagcccggggcacaggcggtcccggcagtcagccttcgattcccgccccatccccatccccctttgtccgcggtggatgcggcgtccgttctcaacccgcagggcctggggccgggcctcggcctcttttccccgtggcagccgcaggccctgtgtggcagggatggggccccgcgatctcccaggcaggtccgagagggatgtgtagattcattctcctgtggagaacaggtggccccgagatcaggcccttttttgctctttgtattttattttgaaactgtatttaatgcttttatatgaaagggggaggggcggggacagagctgacccagtcacccttatgtgcaaatgtcttatttattatgcgtgtatcagagataagctgtgaggtggtggagggaggacctgaaggaagga

SEQ ID NO: 7401 - DNA, 2300 bp, Homo sapien
ttttttgagacaatctagctctgtcgcccaggctggagtcaagtgcagcggcatgatcttggctcactgcaacctccgcctcctgggctcaagcaatcttcctgactcaacctcgtaagtagctgggattacaggcacacaccaccatgccgggctaatttcttttttcttttttcttatggtagagacagggtttcaccatgttggccaggctggtctcgaactcctgacctcaagtgatccacctgccttggcctcccaaactgctgggattacagttgggagccactgcgccccgccaggagggaaccactttaagtattgaaaacagagagaatgtaatgcagggttttggtgacacgattaacaggggttaacagggaggtctggaaagcccagcaggggacagagagaggcagtacagagactggcaaaagcaagaagctgcctacaactcctaacctgcagggacaaaaagaggaggtggactgagtagagcccaggggcatggatcatcctacagatgttgggaccacagctacctatccatgagctggagccacagagaggcctcatctgctgctggagatgtcacctgagcctgagcaagagagagaaagagaagaaataccatggctctttctttcctcctgccttctcttctcctgccactgcctcccattggctaaaccgaggcctgaagccagatgctctgggagcctgagaaactgccccccgcaagactcagcccactgcaatacagagcagagcagaggggcacggaagggatctgtagcaaatggtagagaatgaccattcagcagaaatagttaaacaggcttggtaatacctttgttgtaaaacctttaaaatatcagatacacttgcacataacaaaataattcccttaaaaatagactgcaaggccaggcgcggtggctcacgcctgtaatcccactttgggaggccgaggcagacggatgatgaggtcaagagatcaagaccatcctggccaacatgctgaaaccccgtctctactaaaaatacaaaaattagccgggcatggtggcacgtgcctgtagtcccagctacccaggaggctgaggcgggagaatagcttgaacctgggaggcggaggttgtggtgagccgagatagcgccactgcactccagcctggtgacagagcgagactctgtctcaaaaaaaaaaaaattaaaaaattgactgcaatccatatagactagttcacacctcttctcacacccccatcctactacgcgattctgaatactactgtgtctggtctgatataacgacattcgaagatggattttcagtgtcagacattttgcattttctgagctgaaatctcatgagggttgctatagaagagggagatgcacattccatgtcacagaagtaaaagctcacccagagtgtggttatagggcagcaatgtcatggcaactggactctggtcttggggctctcaagggattgctgtgtgtccttggagagggtcacaaaatctccggactcccgtgccaaaaatggaaatcatacccatcagggtggtttatgtccgctcacagtccactctgcttctcttctttgccttcccagaagggtccaaaatggtttttgaaagaaacgatgagccggactaagaaaacagataatgtgcccacggccacggagctggcagatgagaaggaattcggtctctgcgtttccataccaaggccctttccactcacccaccgcttctcttcctgcccggggcatctgctggcggaggaaggcttgtccacggaaaggcaaaagcgactcccgatcaaaatccgggggcacctggtagcgctctccacgccagcagaaacgcccaactgacttcttaatggagggaaaccccgggcttggcccgcagactgaggggcccgcgttgcgggttttgggggcccctctgcctctgcgcaccgggtggccccgggtcccctcggcccttcccgccgcctcccgggtccagggtttctaacggggccgcgtgcccggggcggggccacgcgcgattggccgcgcggcatcgggggcgggtccgcggctggccggccgggcgggcgccgacaatgagcctccataaaagggagcggcggggggcaggggccccggattgagccctccccgcccgggctcccgacgcgccgaggtctcggggaggcccggacgcgccggtcgcaggcccggccggcgagcggcgggcgggcggcggggagggggctgcgcggggcgggcggcgggc

SEQ ID NO: 7402 - DNA, 2300 bp, Homo sapien
gtgagctgagatcgcaccactgcactccagcctgggagatagagcgagattcagtcttaaaaaaaaaaatttcaagatggtgacagcagagcattaatccaagctcagggtccacctgagcacagggctctgtgtgactgcatggggtcgtgggcccaagaagccagccctgcctataaccagtgagggagctggtgatagctttctagcagagcagagatgttattggagctggactttgggaagattattctgacatgtctggtgcagtaggttggagggagtctaggcggggagacaagctcagcagccttgtgcaaagctagcaaggaagagaaaggataggtagggtaggggttggggatgaaggtcaaagggcaggggtgaggcaggggttagagctagagtgagaagcttggagaagatggagtctatttagacgagagtgtggaccagggagagactgctggaacaccaaccaccaactgcttcctctctcttttccctgctttccagaccctggcattagaggtgataccaggcacaggaatcagcaacgtgtctccctttggccaccagagggcagatgattctcaaggatcgaatttgggttggggagtgaggtgttctctgtcctcctcttctctctttccctcaccttcatgggtgtgccttcaccttcttcctcaacggttgggtgcctgaatagagctggtatggggcatggggagcagtgctgaagtcccaggatttactaagagtgtagtgatacctgttgccttaggaagtactttcataccctggtaattacatctgctcagatgcctatttctctgattgatgggatgaaggctggctcaagatgctgtagctgggagttggaggtcaagtagcaggggtccaatcagcagttttcccaataactcctggagcctctctgctcctgtacctttgggaacctgttgcctgagtctggtttctgactcctgcggggcctctgcctcctgcccaccttaagccactgatgggagggtgtggttccaacgtgttccaggtactatgggtgaggacagcttggcgctggggaaatcagcccaggatactccctgtccttggtaacgcagtgtaaggggaagtgaggaatggactgcagttgccatacagacttcctgttagtcaagggctctccaaagctgagaaggacctccgagttcatgaatccaatggcttcactttactgatggggaaaatgaggcccagaggaggaaagaaaagaaactttaaatgccttatcttgcagaggcattttaaaaggtaactggaattcagaaatgtcattttgaatgtcaacgcaggagcaaaggcaaaggaaagaggagcctaaactcagtgatgttatgtgatttttccaagatcacgcagcattggcacttggcagagctggggctgaaatgcagggccctggacgctcccgcatccggtgcagaggacgctgccctgggcctgcctggggccttgccgagccctgcggactagatgcgggaatgcacggatgaatccacagaagccaagatagacggtggcagacaggcaatagactgatgctgcatttgacaggtatattgataggctagatgataaaaagaagatgaattttatgagctgaccgacagatggacagaaatgcagacaggaagctgctatagaaccagaggatgccaatcacagggacggctaacaatcttgttttgtatttagtcaaatcacaagcacagacaggtgacccacgcttcctgttcaaggtttgaaaatgcccgaaaactgacggaaagacacgaagcgaatcagactccgagagccacccggggaaacgaccgggtgctcggagggcctcgggtgttgccggaaatggccgacgaccgccctcggcagggctgtgggagggggcgtggccggctcagcacgcggagcagcttcgggtatttccggaaactgccgaaagcccccttgaagtgggcggggaaaggccggtgggcgtggctggatggccgtggacgggggcggggggtaggcacccggggtcgcttcgtggatttccgtaaacagagccgaagcttcgtcttcggaatcgaggaggagagcgcgtccccggggtttaccttcttcggctgtttccggaattcacccgtagtctgtggccgggaggagaaggcgcgccccacctcccgtttctagccgcttcggatgtttccggctgctgccggcgaaaagagccgagggccggcggtggtggcggccat

SEQ ID NO: 7403 - DNA, 2300 bp, Homo sapien
caggaatcagcaacgtgtctccctttggccaccagagggcagatgattctcaaggatcgaatttgggttggggagtgaggtgttctctgtcctcctcttctctctttccctcaccttcatgggtgtgccttcaccttcttcctcaacggttgggtgcctgaatagagctggtatggggcatggggagcagtgctgaagtcccaggatttactaagagtgtagtgatacctgttgccttaggaagtactttcataccctggtaattacatctgctcagatgcctatttctctgattgatgggatgaaggctggctcaagatgctgtagctgggagttggaggtcaagtagcaggggtccaatcagcagttttcccaataactcctggagcctctctgctcctgtacctttgggaacctgttgcctgagtctggtttctgactcctgcggggcctctgcctcctgcccaccttaagccactgatgggagggtgtggttccaacgtgttccaggtactatgggtgaggacagcttggcgctggggaaatcagcccaggatactccctgtccttggtaacgcagtgtaaggggaagtgaggaatggactgcagttgccatacagacttcctgttagtcaagggctctccaaagctgagaaggacctccgagttcatgaatccaatggcttcactttactgatggggaaaatgaggcccagaggaggaaagaaaagaaactttaaatgccttatcttgcagaggcattttaaaaggtaactggaattcagaaatgtcattttgaatgtcaacgcaggagcaaaggcaaaggaaagaggagcctaaactcagtgatgttatgtgatttttccaagatcacgcagcattggcacttggcagagctggggctgaaatgcagggccctggacgctcccgcatccggtgcagaggacgctgccctgggcctgcctggggccttgccgagccctgcggactagatgcgggaatgcacggatgaatccacagaagccaagatagacggtggcagacaggcaatagactgatgctgcatttgacaggtatattgataggctagatgataaaaagaagatgaattttatgagctgaccgacagatggacagaaatgcagacaggaagctgctatagaaccagaggatgccaatcacagggacggctaacaatcttgttttgtatttagtcaaatcacaagcacagacaggtgacccacgcttcctgttcaaggtttgaaaatgcccgaaaactgacggaaagacacgaagcgaatcagactccgagagccacccggggaaacgaccgggtgctcggagggcctcgggtgttgccggaaatggccgacgaccgccctcggcagggctgtgggagggggcgtggccggctcagcacgcggagcagcttcgggtatttccggaaactgccgaaagcccccttgaagtgggcggggaaaggccggtgggcgtggctggatggccgtggacgggggcggggggtaggcacccggggtcgcttcgtggatttccgtaaacagagccgaagcttcgtcttcggaatcgaggaggagagcgcgtccccggggtttaccttcttcggctgtttccggaattcacccgtagtctgtggccgggaggagaaggcgcgccccacctcccgtttctagccgcttcggatgtttccggctgctgccggcgaaaagagccgagggccggcggtggtggcggccatgttgggagcagcaggtccggcggcggctgcctgtgtgccgggcgcggagcagtgccgctgagggcaggggaggagcgaggcaggcggccggctgcggcggcagagagtaggcggagcggcgcggcccggccgaaaggcggcacagcccagccgggggtcgggggggtgcggtccggagccgctcggagccggcgcggcctagcccgagcggcgcatccccgggctggcgtgagcggctgcccggcctccccgcacccccggccggggcccatgcggcgggtgctcctgctgtgagaagccccgcccggccgggctccgcgccttcccttccctcccttcctccaagcttctcggttccctcccccgagataccggcgccatgtccagcgctcggacccccctacccacgctgaacgagagggacacggagcaggtaaggagccccgagggctccccgaattctctggctgggccctttgcaccttgcggagcctcctccctcttctgctctcctcgtgcccctgctgccatcctgcaagcctcg

SEQ ID NO: 7404 - DNA, 2300 bp, Homo sapien
tctttttttttttgagatggagtcttgctctgtcacccaggctggagtgcagtggtgcgatctcggctcactgcaacctccgcttcctgtgttccagtgattctcctgcctgagcctcccaaatagctgggattacaggtgcgtgccaccacgtccagatcatttttgtatttttagtaagatggggtttcaccaccttggccaggctagtcttgaacacctggcctcaagtaatccacccgccccagcctcccaaagtgctgggattacagacatgggccactacgcccagcctctctttttttttcaagacaaggtatgactctatcacccaggctagagtgcagcagcacgatcttggctcactacaacctctgcctcctgggctcaatccatcctcccacctcagcctcccgaatagctgcaactataggcccacagcaatacgcccggctaatttttgtattttttgtagagatagggttttgcaagcttgtccaggctggtactgaactcaacaattcaagtgaactgcccaccttggcctcccaaagtgctgggattatagacatgagctaccattcccagcacaagactttgtctcttaagaaaggtcatgtgcctgtggcaagtccctatttatttatttatttttaaacagggtcttgctctgttgcccgggctggagtgcagtggtacgatcttggctcactgcaatcttcgcctcctgggctcaagtgatcttcctcttgaatacctggggctacaggcatgggccaccaagcccggctaatttttgtattttttgtacagacaggatttctccatgttgcccaggctggtctcgaactccctgggctcaagcaatcctctcacctcggcctcctaaagtgctgggatcacaggagtgagccactgcgcatggccatatgggacatcttgtaactgggagttggagtcctttgttttttaacccttcctccctcactgtatccagaaactgtcttttcatcctttgattctgagcaactatcgctatcaactgccatgagcaactatcgctatcaactgccaagagtcaataaaccagaggagcattcagtgtaggagagcttgtaaaactggcaggcactcaccagtggaaagcctggatgctcccacccccaaaattaactgtgactgttccacttgagaaacagccatattcctttactgtcccattgtagatgggaggcaggggctgctccctctttccagccagggtaagagcctccttcacaaaggataaccagaagagcctgcaacttaagcacaaagccaaaaccaaggtggtttactgccctttagctctctgagctgcaatcctcaccacaaggcagggagatcagcactgcagcctgggccatgaggcggggctcccccaggactcaagcctgcctgggaaaaacctgacatggcataagaggtgagaacagagagcaacctccagctcactctccttcaggcctggaagccacaatgcaaagagcactctccaaatctcctctgtcttcagagccacttgaaatgctgggctcctcttgaaactagattctactgagcaaccagggctttagaggcttccaggactactttcatccctgagaatctgcttgctggggtctggtcgctaaatccccagctactgttgccctagcaaacctttgttgagcagtactctggagccctggctccagttgcaaagctcagtgcgatctggctcctgccttccagaaacttaaaagaggtaaactatacagaaaacttactatagtcgctctgcccacctctgttgcttaccagctgactgaacatgagcaaagtgacataacttctccaaatctgtttcctcatttgggacataaagatactagctgtacccatttcacagaattagagtgaagattaaatgagaaaatctggccgggcgtggtggcttacacctctgattccagcactttgggaggccaagacaggcagatcccttgagcctaggaactcgaggccagcctgggcaacatggcaaaacacaggctctacaaaaaaacacaaaaattagccggggtgtggtgacaagtgcctgcaatcccagctacttgggaggctgaggtggaaggatcacctgagcccagggaggtaggctgaggctgcagtgagccgtgatcacactgctgcactccagcctgggtgacagagtaagaccctgtctcaaaggaaaaaaaaaaggaaaatccatgtcagtgtttaccatagaacgtggt

SEQ ID NO: 7405 - DNA, 2300 bp, Homo sapien
caacctccacctcccaggctcaagcagttctcatgcctcagcctccgagtagctgggattacaggtgtacgccaccacgctcagcaaatttttgtatttttagtggagatggggtttcgccatgttgcttaggctggtctcgaactcctgacctcaagtgatccaccagcctcggcctctcaaagtgctgggattacatggtgggggccaccatgcttggcccccatgtggcttttaatctaaatcctaccctatctcttcccagcttttctgtttgtagtcagtgctttgtatttcctcagtttacaaaatcccttactgtctcccacaaataggattgaggaaacagtccttctgtcacattgcaaagccctagaaaaatgaagggactagaaaaatgaagctgtttgatcctgctctggttctcagtctaccagtgagtgaagggccggagggcccgggcaagcttgagcccaggatccagtgggcccactgaagtcagggcccacttttggggggctgggaaaaggaagggttgctgtgggaccactgggataggcctttaaacagcacttcaccattggcctgaatcaaacattgtcattcccagtgtcccgagcaccttccctgagtcttcataccttctgcctcctagcttatggaggaggagccaggggcttatcttttgggggaaatgagagcacgattaggcatcaagaagggttgatgagaaactggtaagggggactgtcaagaacagcagagtgctgaaatggtgacaaaagctctgggctccggccccagctctgtactgagaagctgtgagattttgggcaagtctcataacctctgaatgccaatttctcaatggaaaacagggagactacctaccctataggtctgtgtttggagaaaacaaagtgtaagcgctggacatacagtagcatcagaaatgctgaatccgttggccagggctcatgtgtaaggcaaacatttcttggccactcctgagtagcatggtcttgcaggaatatatgcttaagtgctgtgagagcacagaggaagctttgcccttccctagagggttaatggctaccaacgtgagaaggtcacggagttccttaatgagagggagcctagcctagaataggggatgaatgagaaattgttctgagaaccagaggcaaggctgcaaccagcacatagacaggggtcgttggtctagaaggggagtcttctccagatgagagacagccagcttgccctgtgctcaccatgtgcccagatagtgggggcttagcaggaggaaggtgtgaggaatcccaggcctttggaattccttgagaaagcagtgttgttttgaaggtaaggcaggggattggtgactggaaacttggaggtgagtgagaacctagggatgaacgttcagaagcagggctggaaggaacttaaaagggacatttggattgtttctagcttttgggcaaaatctaggattaaatatgattttttcattgatagaatgctctatcagtgataaaggctcttaatctagaaaacatacacctcatagggggctttacagagtccccaaactccctgaaattatgctcaaaatattttgtgtctaagtggaatgtgcatgtttccaaggttaagcactgcttttttaggaagtaggaggtccgtccgccactgtcagcttgctggtttctgcttaccctcctccccacttcgttcttgagggggtggtttgctggtctttggcagggccgccactctgggtcagcacatctgagtcacacatgttcctccccagccctattggaggctttgttaaagtcatctgcccctacccaggtcccacctgccacaggtgagctagggttttatgacagccgtggctgcagtgagtctcctcgacctctcgccagctgttacccagcaaagcaccttggggagggtggggctgcccacttccggggagggggggagggggaggggagaaggaagttgatctaaacccgcctctttctctgtctcccttcctgccctattcccctcctgccccttccctcccaccttgcttctggtgtgctgtcctggaattgcacgcgcttcctgaccaccaggctctggcccttgagaagccagcggggctttgtccctgttgctctccttgccaaacccagtctctctgctagtggtggtttcggttgcgacaccgtccaggttcccaggcaggaaccgctcggcctggctgcttagctacttttcactgaggaggtggtggaaggtgt

SEQ ID NO: 7406 - DNA, 2300 bp, Homo sapien
ccagtggctggggatccctgctagagagactgggggtacctggggcagccctggagtagggaggcaagaaataagcaggatgctgagcctgggggtgcaggtttgagtctgggaaggaggcaagggggatgggggactcaactgaggccctgcctaatagggggcgggggcaagatggaagacagcaccgtaggagaggctggtgtgcagcaatggttgcctgccaggcaggaggggacagaaatgagagtctctccaaagggtggaggtgctggggacagggatggcgccctgccacttaggaggggtcggcctgggaagactctcagtcttgaatcagacctccttagctcagaccagcccctggtccattcattctcctttgtccagacctccccaccctggggcttggtgcccaatccatgatttaagaggaggataaaggccccgtagccctggcccgaggtgtggcgggcaacgtggccgctggctgggtggccccatgtggctcgacggcgcagcagccgggtggggtcgagcctggctttccctggctgtccgcaggagtccccgggaacaagcggccccagccgggtcgtggcccgaccgcaacaccccggccactcggccgcaggcagcgggtgggggcagggatccctggctgggccctaggctgcttctaaatttaggaatctgattacagagtggaccaggaagggaagggagaggagggcgcgagtgcgggctcggctcagtctgggcacagcggggtgtgcctgggtggaggtgtgtccaggagactggggctccgggtgggaggggcggcgggcgggggcttcagcttgtgtgcgctgcagcacgtgccccgggcggcggggacgggcacgggcgcagctcgcaggctcggagccgccgccggtgtgtgcgctggctctttgtgtgcctggcagggtggctgggtctggctttgaaagtctctgcccaccccctcccccatctccgtctgtgccgctctacccgcttccctgtctgtcactctgcccgtgcttgtccggggggagggggatgctgcttccagctggggtgacagtgaacccagtggggaggagacccagctcctctctcccctgcagcccagaccttcccctacacctcccactccccatccctcagcccttgctaccactgtttaggggtgcatactgcagcagttaaagggaattggggcgacccttggggacccacagatccaccagaagccagcctctggctgggtagctcttggaggaattcattccttgcctgtccagcctcccatccgttctggcccccaagggcgcataaggggggtcccccctgcggaagggggggcggggagttccttggcaggaagggaaatggaaggaaaagctgggctccacccgggcgggcgggcaggcggccccagggcccccggggcaggcggcagtaacccgagcccactggtgtgtggtgttggtgtgcgcgtgggtggggctgacccctggctactcctggggggcagtggggtctcccccaggggcaagtctgggagcccagggacgcgaggggagcccccgcagcgggacgcgcgccccaccagggtcctgatcccaccccctggaggtctggccccggccccctggccccgccccccgggccctccctcccaccccagggccagatgttcagctggcggaggcatcggctgggggaggggtgctgaggccgcagccggcactacttccctgccagcagcttcattgtgtgcgcgaggagcgagcggcggcggagagcgggcgagcaagcggcatcccgagcgcggcggggagagcgagcgcgccggggagggtgcgaggcggcacccgcggctgcgctccgcccgcctcccggcaactctgcccagcgccgcgcgccgtgcgcgccgtcccgccgccgtcgccgccgccgccgccgccggtgccccggccggctgccgtcgcgggcaggggtctgcttaggacacgggtccccgcccggggactggggcatccccggcgcagctgagaggcgcagagcccggggggcgcagattgcgctccagcgcccagccgctgaacggcgtgggcaggtgggcggtggggttccagggcgccccgaggacagggggccccgacttcaggggaaccccaaccctgaggggcgtacatagtaatcacgccccagccgcaccggaccttgcgctcatcccttgcgtcccccacttctgcacaaacttttctgacgccctggctcgtgggggt

SEQ ID NO: 7407 - DNA, 2300 bp, Homo sapien
ctatcggctcactgcaaccttcacctcccgggctcaagcaatcctctaacctcagcctccagagtagctgggaccacaagtacacgccaccacgcctggctaatttttttttatttttaaatttttttgcagagacaggatcttactctgttgcccaggctggtctcaaagtcgtgagctcaagcagtccgcccatctcagcctcctaaagtgttgggattacaggtgtgaggcactgcgccaggccacaactataaatcttgaccttccctgtgctctctccctgctttttcttccttctagagcctgtatcatttttttttttttttgagactctctctgtcgcccaggctggagtgcagtggcacaatctcggctcactgcaagctccgcctcccgggttcacgccattctcctgcctcagcctcccgagtagctgggactacaggtgcccgccaccctgcccggctaattttttgtatttttttagtagagacggggtttcgctgtgttagccaggatggtctcgatctcctgacctcgtgatccgcccgcctctacctcccaaagtgctgggattacaggcgtgagccaccgcgcccggccgagcctgtatcatttaactaactatgtatattacctatttatttcatctattatcggtctcctccttctaggatacaagggtggtgcctattctgtttcttattgttgttttccttgctgcttggaacagtgcctagcatacagtaggcactggataaatgttgttgaggccaccactgtactgagcactaaagttggaataatgaggctaagcacagtggctgacgcctgtaatcctagcactttgggaggccaaagtgggaggatcgcttgggcccaggagtttgggaccagtctgtgtaacacagtgagaccccatctcaacaaaaaataaataaaaattgagctgcgtatggtagtgcacacctgtagtcccagctactcaggaggctgaggcgggaggatcgcttgagcccaggaggtcgaggctgcagtgagctgtgattgcaccactgcactccagcctgggcgaccgcgagaccctgtctcttaaaaaaacaaaaagatggaataatgagcaaaacctgaaaaagtccatgaagcttaagtgttgggcagcatttcactaattttcgtcttgaagcatttcactaattttcgctccctacctggggagcactaggaagtgaagactctggctccacccctggagattctgggggaggttggcagaggtgtgcacactgcggaagcgcccccggcggtttggattcgggtcacgtgcgggtcactccggtgtgctggggatgggttgaaattaaaactttccgggatgcctggtgttcacgctaacagcactgtccactctctcctaaacagtgcttacgtgcccgtctcccctctaaaccctgaggtgtggcgctgagatggcacctcgctcctctctgtgccccctgggctcagcaccgcgtagatgcgagttaatttttattgagaacgtgaatgaatgagggggaatgaatggttagaagacgaatgaatgagtaacaggactctggttagaaaaggaatttcaagagtcaagatctggaaggtgggaaagtttccaaagacttccgctacgcgcgctagggctctggaggggcaggtactttagaggtcgagacgcgattggccgcctgggaaggtggctgtgccgccggctgctacgcgcggggccaaggagtcgctggccgcaggggaggtgctgccaaccacccggcccccagcggcgcgcgactcacggcctgggtgagcagccaggcctggcgccgccgttgccatagttacagacgcagccctgcgagggggcgggctctggccgcacgtcattcccggcgcgacgctcctccgcgctcccgcctcctcctggtcggagaccctcggccagcctagcgggcgctccacctgcgcgccggctcaccgctgccctgcgccggttctgcgccggcgcggtacgagggcgcgcggttgggcggggggggggggggaagctgcgaggcgcatgcgcgttgcagggccgtccgctctgctgccgccgctgttgcagccaccgccgttgccgcctccctgccggcaagtgtgtgaagaagaagctgagcgttgtcgccgccgctatgggggtgagtgaggcagagagaggagatgggaggtccaggggcgctcctcgctaccctcgccccctttgttcttaaacccccctctcacgtgacccc

SEQ ID NO: 7408 - DNA, 2300 bp, Homo sapien
ttccctggaagaggaacaaggcctagagatcaggatgagcattagttctgagcctgcctttctatcctatgagagaagaggaaggctttctccttcccctgctccagcctgttgccacagggtgacaccagagagaaaagcaactgttggccactgagaggcatttctgctgcagcctgagctatggcccggctgggccacggcagtggcactagtgcctcactgaggcagcgaggggcaagcctgaggagtgcaggcagaggggcctgctgctggctgggggctctctgaagagggagggtggctgtggggaggtgtgccctacccttagagagctatcagcaccaagataggaaaatcaatggagttaactacatgaggaacgagaagtccttctggggaagatgaggggctccctgatgttattctccccttgagactaagaacagaggtatttggggtagaggtgagaggcagaggagaaagaacgacgagggctggcagacaagaacaagcagaacctctggctttcttctatgaatcaaaagctcaagtcactgccatgagaccaggaggttaagcttagaatgcagcaacatccaggagcctagagaagcaatcatccccatggcgggtcccaagaacacctcattgttggtcctttcaggctctctgacagcgatggagaggcagtcttcctcccagagtcagctggtcccaacatgagcccactccatgaatccataaaaacagctggaaagagctttcttcatttccctgcatcttggcacaaaagatcttcccagtctccgttaacagcaattccaactgcgcaagcgtgagtctctctgaagccgccctctacacccagatcttacacccagtgtgttcctctttggggaccagcaaaccccagacccaggactccagaactttcataaaggtggacataaacattccatttgtccaagtgtgtatgtgtcaggggaggggaggttgccaggaatctaggggctgcagaggtgcgagaacctccactgcaggccccaggagccaaatgaggaggcagccactgtggaggatgagcttcactgcccggccccacctactcttccctctccctttcattcccttctagcactctggtctcctaggagaggaggagcagctgataccacttctccccagggttctgtgctctcagggcgcagcctggcacgtgcagggctggggaggccacagctctgaggacacccggtgaacagtgagaccaggaaagaggaaaggccttaggagagagcattgtgacttgaaagtggctctgagagttcagtggcagcagccaccacagtgcccacccgcgtgggagtgatggctgtccccaaacttggtcctccggctcaggatctcataggagcaatcctccccacagcaaccggacatgctgggggaagagtcatcaatttcaaatctgcaaggcaggcaggagaaaagggttggtggcaggcagctgagtgccttcctccctggcccgagaactcttctaccagccacactgatgagacccttaggatgagggtgcaggaggtggacagtggaccaaatcagagagcactgccataccatctccctgaacctgaacccccatggaccactggaccatgagctcaggcatcagaatgagtgagggccaggaccagaaaaatggccctgggcaggcccacctaccacccagaagggcccacacccagctccttactgcaacgcttctctgaagaactggtaggcaccatgattgtgtttaaatactgttaacataaccttcttcatctgtgtgctggaagaaagcagagcaaacgccttttagaaagagaaacatggccaggcatggtggcatgcacctgtaatcccagcactttgaggggcaaaggtgggaggatcatttgagcccaggagttagagaccagcctggaaaacatagtgggaccccatttctacaaaacatttaaaaatttaaaaaaatcagcccagtatagtggcatgtgcctttagtcccagctactccagaggctgaggctagaggatcacttgagcctgggaggtagaggctgcagtgagatacgatcacaccactgcactccagcctgggtgacagggtgagaccctgtctcaaaaaagaaaagacacagagactaaggtcatgcttcctttcctttctgcctttgtctgttacctccctttcacccacacgagtgttcctgaatttggcctctagcctctggaggtcttggacccccaca

SEQ ID NO: 7409 - DNA, 2300 bp, Homo sapien
gagtttgagactagcctgactaacatagcaagacccccctccagctctacaaacactacaaaaattaggctgggcgctgtggctcatgcctgtaatcccagcaccttgggaggccaaggtgggtggatcgcctgaagtcaggagttcgagaccagcctggccaacatggtgaaaccttgtctctactaaaaatacaaaaaatagccgggcatggtggcagatgcctgtaatcccagctactcaggaggctgaggcaggagaattgcttgaacccgggaggcggaggttgcagagagccaagatagtgccactgcactccagcctgggcaacagcgcaagactctatttcaaaaaaaaaaaaaaaaaaaaaaagccaggcatggtggtgggcacctgtaatcccagctacttgggaggctgaggtgggaggttggcttgagtctgggaggtggaggttgcaaggctgcagtgagccgagatcacaccacactccactccagcctgggcttagagctagaccttgtctcaacatcaataacaaaatgcagagtgcattttgaatgcaacaaaaggcttgttggtggaaatcagagagcagggtcgaaggtgtggaatattgaagagttttgagagttgaggctggacagtgacatccgggaattgggattttgactaggaagcaatggggagccactgaaagtatatgacttggtcagatttaggtttaaaaaaccaagaaggaagggatgggggagggagagagagtgatagggtaggaaggaagggaagttggctgctccagcatggtaactggaattgaagagtgtaatagtaattgagggaggtttggttactaggtcagtgtcaggaattctcaacaaaaacgacggaggcctggtggagaggaggggactctcaatagagagatttttttttttttttttttttgagacggagtcttgctgtgtcgcccaggctggagtgcagtggcgtgatctcagctcactgcaacctctgcctaccgggttcaagcagttctcctgcctcagcctccctagtagctgagattacaggcatctaccaccatgcctggctattttttgtattcttagtcgagatggagtctcaccatgttggccaggctgctttcgaactttttttattgttgttttttatttttgagatggagtttcgctcttgtggcccagtctggactgcaatggctcaatctcggctcactgcaacttccgtctcctgggttcagcaattctcctgactcagcctcccgagtagctggaattacaggcgcccaccaccatgcccagctaatttttgtatttttagtagagacggggtttcaccatgttggccagtctggtctcgaactgttgacctcaggtgatccacccgcctcggcctcccaaaatgttgggattacaagcgtgagccactgcgcccggccaatttttgtatttttcgtagagatggggtttcaccatgctggcaagactggtctcaaactcctgacctcagatgatctaccggccccggcctcccaaagtgttgggattacatgcgtgagccactgcgcccggccaatttttgtatttttcgtagagatggggtttcaccatgctggcaagactggtgtcaaactcctgacctcagatgatctacccgccccggcctcccaaagtgctgggattagaggcgtgagccaacgcgcccagcccgtacttttttttttttagtacagacggcctcccaaaagttctgagattacgggcgtgagccaccacgcccagcctgaatagagagagatttaacagtatgaatgaagggaggagtcaagaacagtttaggcttctcgcgtacatgattgggtggccccagatgtcattcacaagtataagccttggaggcggaacataactcgaagaagagcccttttgtgctccgcccatagcgtaggaaggtgtcaattggctgtttcgaggaacgcgccaaaaactgccaagggctgtgggaggtgtgttcttgcgtcatttccgagagacttccgcgccgcagtttccctgcttccccagctccagaacttccggccagcgcagccattttggcttcctgaccttgggctacggctgaccgttttttgtggtgtactccgtgccatcatgtccgtcctgacgccgctgctgctgcggggcttgacaggctcggcccggcggctcccagtgccgcgcgccaagatccattcgttgccgccggaggggaagcttgggatcatggtgaggaacggg

SEQ ID NO: 7410 - DNA, 2300 bp, Homo sapien
gtatttttagtagagacggggtttcaccacgttggccaggctggtctcgaactcctgacctcaggtgatccatccgcctcagcctcccaaagtgctgggattacaggcgtgagccagcgagcccggcctgcaggtgggatttagatgattcaggatagagaaccaaaatcctcacacagtaaaattaacaggacagatggaatgaggataagagaacagttatttacttatttattattattattatttttagatggagtctcgttctgtcgcacagactagaggagtgcagtggcttgatctcggctcactgcaacctccgcctcccaggttcaagctattcttgtgcctcagcctcctgagtagctgggattacaggcgtgcgccaccacagccagctaatttttgaatttttggtagagacagggtttcaccatgttaggctggtcttgaactcctgacctcaggtgatccacctgccttggcctcctaaagtgctgggattacaggagtgagccactgtgcctggccaagagaacagttattaaccaccaaataaaccatcattgaaaagagctaggcaaggccaggtgcggtggctcatacctgtaatcttatcactttgggaggccgaggcaggcggatacctgaggttgggagttcgagaccagcttgaccaacatggagaaacctcgtctctactgaaaatacaaaattagccaggcatggtgctacatgccttaatcccagctacttgggagtctgaagcaggagaatcgcttgaacccgggaggcagaggttgcggtgagccgagatcgctattgcactcctgttgctgggactacaggtgcatgccaccacacctggctaattttttttttaatgttttttatagagatgcgggggtgggtctccctgtgttgcccaggctggtctccaatgaaattctcccagcttggcctcccaaaatgctgggattacaggcataagccaccacacccagccatctttgctatttaaaaaattaaacgtggctgggcgcgatggctcacgcctgtaatcccagcactttcagaggccgacgtggccgggtcatgaggtcaggagatcgagaccatcctggctaacacagtgaaaccccgtctctactaaaaacacaaaaaattagccgggcgtggtggcgggcgcctgtagtcccagctactcgggaggctgaggcaggagaatggcttgaacctgggaggcagaggttgcagtgagccaagatcgtgccactgcactccagcctggatggtcagagagaaactctgtctcaaaaaaaaaaaaaatgttaaacgtaatttttagataattcacagggaacttaaagaagttataaagaggccgggcgcggtggctcacgcctgtaatcccagcactttgggaggccgaggcgggcggatcacgaggtcaggagattgagaccatcctggctaacacggtgaaaccccgtctctactaaaaatacaaaaaattagccgggcgtggtggcgggcgcctatagtcccagctactcgggaggctgaggcaggagaatggcgtgaacccaggaggcggaggttgcagtgagccgagatcgtgccactgcactccagcctgggcgacagagcgagactccgtctcaaaaaaaaaaaaaaaaaaaaaagaaattataaagattccatgtatcctttactcagtctcccctgcccccactaacatcttgcaaaaatgttgtgaagcatacaccaggatactgacagagtcagggtattgcgcatttccaccttcacaagaatccagactttccctttcacagccacatccacttccctccagcacctccgcttgactcttggcaaccattattttccttttttgtgaagtctttgcttttataaagaccctgctttagtggtggctcgcggctggagtctcagctactcttcaggcagggcccgaagatcgctcgtgcccaggagttcgagactaccctatgcaacatagcgagaccctttcttttctttcttcttctttttttaaaggtcctgctttaaaaaccagaaggacacagagcccaaagttaggtcatgaggctttggccttgacaccaagggatgctgtctccttgccggaagcagctcaccaaagccggcagagaacccaggttccgtggggccacgatgtggggctccgcgggcgccccggcgctggccgacttcctgtctcctgggtcagatgctgctccgcactgcagctatggtcgcatgcagtgcctgcc

SEQ ID NO: 7411 - DNA, 2300 bp, Homo sapien
ccatcattgaaaagagctaggcaaggccaggtgcggtggctcatacctgtaatcttatcactttgggaggccgaggcaggcggatacctgaggttgggagttcgagaccagcttgaccaacatggagaaacctcgtctctactgaaaatacaaaattagccaggcatggtgctacatgccttaatcccagctacttgggagtctgaagcaggagaatcgcttgaacccgggaggcagaggttgcggtgagccgagatcgctattgcactcctgttgctgggactacaggtgcatgccaccacacctggctaattttttttttaatgttttttatagagatgcgggggtgggtctccctgtgttgcccaggctggtctccaatgaaattctcccagcttggcctcccaaaatgctgggattacaggcataagccaccacacccagccatctttgctatttaaaaaattaaacgtggctgggcgcgatggctcacgcctgtaatcccagcactttcagaggccgacgtggccgggtcatgaggtcaggagatcgagaccatcctggctaacacagtgaaaccccgtctctactaaaaacacaaaaaattagccgggcgtggtggcgggcgcctgtagtcccagctactcgggaggctgaggcaggagaatggcttgaacctgggaggcagaggttgcagtgagccaagatcgtgccactgcactccagcctggatggtcagagagaaactctgtctcaaaaaaaaaaaaaatgttaaacgtaatttttagataattcacagggaacttaaagaagttataaagaggccgggcgcggtggctcacgcctgtaatcccagcactttgggaggccgaggcgggcggatcacgaggtcaggagattgagaccatcctggctaacacggtgaaaccccgtctctactaaaaatacaaaaaattagccgggcgtggtggcgggcgcctatagtcccagctactcgggaggctgaggcaggagaatggcgtgaacccaggaggcggaggttgcagtgagccgagatcgtgccactgcactccagcctgggcgacagagcgagactccgtctcaaaaaaaaaaaaaaaaaaaaaagaaattataaagattccatgtatcctttactcagtctcccctgcccccactaacatcttgcaaaaatgttgtgaagcatacaccaggatactgacagagtcagggtattgcgcatttccaccttcacaagaatccagactttccctttcacagccacatccacttccctccagcacctccgcttgactcttggcaaccattattttccttttttgtgaagtctttgcttttataaagaccctgctttagtggtggctcgcggctggagtctcagctactcttcaggcagggcccgaagatcgctcgtgcccaggagttcgagactaccctatgcaacatagcgagaccctttcttttctttcttcttctttttttaaaggtcctgctttaaaaaccagaaggacacagagcccaaagttaggtcatgaggctttggccttgacaccaagggatgctgtctccttgccggaagcagctcaccaaagccggcagagaacccaggttccgtggggccacgatgtggggctccgcgggcgccccggcgctggccgacttcctgtctcctgggtcagatgctgctccgcactgcagctatggtcgcatgcagtgcctgccgaagcccgcagcaggaatgctgccttcggtgattttaatttcacttttctacttctctcaataacaaaatccgcgtttcaaactccagggaaaagaaaacggaattggctccaggaggatctgcaatcaccaccgggaactttgggaggctgggaagatggagccaaaccaatgtgtggggtggaggtgcggatctggggcggccggcctctcctacaggtctcaggtccgcaggcctggcgtgccagcacctgccacgggactggaagcccattccttgacaacgcctaaggggatcccgttgctagggctgttgccaaggcggggcaacgaggaggggctcgcttccgggaggacggcaattggcaacccggaagcggtcggtagtgcggcgctgtttaaagatggcggcggaggaacctcagcagcagaagcaggagccgctgggcagcgactccgaaggtacagatccaaggagggatgtccggcccgggctagtgggggcgatgccgggccagctgctcccgaggagggaggggaggcagggccgctggctctgg

SEQ ID NO: 7412 - DNA, 2300 bp, Homo sapien
taagggctcgtgctagagccggccgccctcccgccgcgtgcagggactctgtcctcatcttccctcctgcgtaagccccaccgtaccccttccagggcctgtgccccacctgtagtattcaccaggcactggccattcagaatcgatgtcccgtggggcttgctggctctgaaacctccttcttcctagggcagcttgtcccaagaaaactccccctgccaccctgtccaccccatcagactcagcctgcacaccacctggctggcacacacccttcccaaatgccttccctgccaggctgtgagccccgtgggcagccaccccccatctgggtgctgggcttattaaaacatgaaccctaatatccctgtttttatttgtaacggcctctgacaacaagcatttctcaaatcagccaccttaggccctacaaagaaaagtgcccagatgcagctgagcccatctggatctgatttcaaaccagagtgagcactctcagatgtgtaataaaagcccttttccaaagaggggttcctgcagggggaatacagacaccagggcgccgcggcccttccacatgccgcactaatgagaggtgctggggagggctcggggttttgttttggattccagaacagcctgccctgccctccgtctgtgtggaagaggagggcggctgcgggtgttgaggactgaccccccacctaggaagtggggtgggcaccagacagaggccagaaacacggagacccaacttccccagttccctgatggtcctgcttcccatggtggggaaaggcagtgcttgttctggaagcccaggccatggcggcccagttggagcctttgaatgacatttagcaagaagagcaggtgccgggggaattggagccagctctgggctgggcggttggccctgcacggccaggagctcgaaaaacttcatttttctcttcccagtccttccacccccagggagggaaaaccaggtagctgcaaggctgggcaccatgcatggccaattgtcaggatttggaaagaggcaggagatagggagaataaccccagccccttccccggctcataggcaagtggcattaagaaaaaaaacaggatccaggctgggtacagtggctcatgcctgtaatcccatcactttgggaggccgaggtgggcggatcatgaagtcaggagatggagaccatctggccaatatggtgaaaccccatctctactaaaattaaaaaaaaaaattagccgggtgtggtggctcacgcctgtagtcctagctccttgggaggctgaggcaggggaatcggttgaacctgggaggcagaggtcgcagtgagccgagattgtgccactgcactctagcctggcgacagagcgagactccatctcaaaaaaaaaaacaaaaaaacaggatccaaagcaaagggggctgcagcccagtggccctggtggatgttgtcccagtacggtccctcatgtctctgggcttaatcactggtattgtttttggcaggtgaggaagcaggcagtgggcgagaagatggattcctttttggacagacaagaccagagagtgaagcgggaataactcatcctccctacctccccagcaaggaaacctctacaaacaggagcagccaagcaggactgaggcccttgccccccaagcatcttctcaaagaagggcatgtgggggcctgacagctcagctgcatgtgtcagcagctccagccccaccatgaacatctgaactcctcagcggggtaatggaccccctcctttcccccggagacacagcctgagtggcaggaatacagagcctttggagagtggctccctctcagctccgtcatgcaagaacactctctgcacccagcccattctgccaagtgacttaaaggaattaaaaaaaaaaaaagccttggtaaacaaaaagggggtaaaagccacgcagaggcccttcagaagaggtggcgggctgcagacaaaagggcaagagttgaaaagggctgtggaggtagcaagcagcagaggccaccctgctcagggctgggtgccaggccacagggcatgcccgacgaacagggagtcggaaccccctcaggccaccctcgggagtcctggggtccagaggggtgtccctgtaccccttgcacacaggaccctcactctgcagggataagccagctgcgcctgcagcctagggtgccaaggaggctgctgattgtggcccacagcctcatctgaacgccaggagaccaggataccgaggcaccggatcccctctc

SEQ ID NO: 7413 - DNA, 2300 bp, Homo sapien
cttagctcagtacagctgggacttcgtgcatgtaggtgttggctgtcctggttgcagtcagcaaggtccttcctttactctgagttactggaggggccacaactggtgaggtgacctggagcctgacccctacatcctgaaccgtgccttgctgatgttttcaggagagggtgcaggccttgctggtggtcctggaatgctgggggccgtgggctcttccttcctggcctctggctcccctttgccctcactcccagtactgatgactgcctaccctgctgctggcaagtctatgctgatcctctcttgggcagatttaatgtctggagtccaagggtgagcccgtgtcaccatcccagtggttccatctgcatccatggcaggtcagggatcctcgtacggccatccatggttattgccacactcagagtcagaggcctggagcacaggagcaggtttgcaaccagccagactctcttattcctagctgacagctcaagaagtttgagtcttaaggggctagggtaccctagggcagcaacactagtactagaaccttctctgaaaccctggctcgttcctccctcgtattaaaatatattcattattattattacttttgagatagggtctcactgtgtcgtccaggctgtagtgcagtggtgccatcatggctctctgtagccttgaacccttgggctcaagtgtttgcctgcctcagcctctggagtagctgggactagaggtgagtgtctaccaccataccagggtaatttttttgtgtgggggcgggtagagatgagggggtctcactatattgcccaggctggtcttgaactcctggcctctaataatcctcttgcctcagcctcccaaagtgctgggattacaggtgtgagcacttattcattattcattattacattcattatattattataatggcccggcctgtattcattatatttatcataaagtaatattaatagtacataaaaatatataaaagtacttaaaaatccatcctcgtgttttttgttttgttttctttgagacagagtctcgttctgtcacccaggctggagtgcaatggcacgatctcggctcaccgcaacctccgccttccgggttcaagtgattctcctgcctcagcctcccgagtagctgtaattaacaggcatgcaccaccacgcctgcataatttttgtatttttagtagagacggggtttcgccatgttggccaggcaggcctcgaactcctgacctcgtgatccacccaactcggcctaccaaagtgctgggattacaggcgtgagccaccgcgcccggccggtttttgtttaaaaaagaaaagaaaaaaaaaaaaaaacacacagacacacacaaaaacatcaccccaatccttccacccttgaacgccacttgaagcctaagtttcctgcctccaaattccactatttccaccctcgactctcctccccagctgtcctagattctgctccagctgagccttggccccggggctgttagaaggcagaggctctggggagaagtccccaaaccggatttacccgttcgtcgcacctgtccctaggagggcaggctggggtgtggaggcggtgccctgctgacccgcggggagagaagcccgggtctcccaggctgcaaaacgctcggcactgcggaagccgcgccaggctctcccagctcgatacgcagcggccggcgcgcctgctccgccgcggggccgagcggcagaggggcccggggctgcgtggaaggcccgggggcttcagcccgtgccggggaagccgacgctcagccaaccagaaagttagaggcggccgaggtctcgcggaggggaggcgcctggcggccacgggagaagtcgaagggctcaggcggggctccatccgcgacactgggagcccgggcgggcgcgcacgtgtgtatacgagtgcgtgggcccatccggcggcccggactacaagttccagggtgcccagcggcgctcccgggttttctggccgcgcctcccgctggctccgagcaggtcgccgctggctggcagtcgccacccggtcccagagtaaataagggagagacactcccgagcgccgtaaatagagtccaagtgggcggagagccgtcccgcgccgcccgctcatgtctctacagagccgactgtccggccgcctggcacagctgcgcgcggcggggcagctgctcgtccccccgcgcccccggcccggacacttggcgggtgccacgaggacccgcagcagcacgtgcggtcccc

SEQ ID NO: 7414 - DNA, 2300 bp, Homo sapien
gctgggactagaggtgtgcactaccatgcgtggttagtttttgtatttttagcagagatgaggtttctccatgttggccaggctggtcttgaactcctgaccttaggcaatccccaggcactcttcttcacaagttctaagtgctttataaactatcaaatcatgtaatcctcacaaccactatgatgtcaacactttttaatccccatttgaagatggaggcaactgaagtacagagaggttgtgcaagttgcttaaagtcacacagctgagagtttaggtatcatctgtttcagtagaaaaggttcctgtgagcagaagcttcatctggagctgccctggtcactgctacagtcctgcacccagagcagtgcaacacactttaaaaaaaggtgtgtgggaaatgggacctggctacgcagagataagctgctggggagaagatggaaggcctggaaaggccactgctggtcaggtgggcagcagcgtggtggccttgagacagtgccaagaagaaatgaaaggtgtccttgacagaatggatgtagatgaataagagaggcagccaaggcctcagaggaacctttgaccccgctttccttcatgctccctccaaaatgcatccagaatccaattcctgtcccctcctctgctcccatcctggctccctgggattactaccacagcctcctaagaggtatccctgctctcaccctcccctcttcctccacacagcagccagagggatcctgagaaaactaaaatcatgtcacttctctgctcaaaacctgccaatgtgttcaggagtagcaatggcctctaaccttgcaggacctggcccctgcttcctctcggcagctgtgcctcctgccatcctggctaccctgaggcagctcccaccccaggccctttgcactggctgttccataggcctgcaaggttcccccctacatttccatggatctcactcccttgctttcttcaagtcttttctcaccgtgccccacaattgaaaatgcaaaaccgctgggcacggtggctcacgtctgtaatcccagcactttgggaggccgaggcggggggggggggggatcacttgaggtcagtagtcttgagaccagcctggtcaacatggtgaaaccccgcctctactaaaaataaaaaaattagccgggcgcggtggcgcacacatgtaatcccagctaactggtaggctgaggcaggataattgcttgaacccaggaggcagaggttgcagggagccgagattgccccactgcactctagcctgggagacagagcgagagtttaagaccagcctggacaacatggcgaaatccatctatacaaaaaaaaaaacaaaaaaaaaaaacccagaaaaattagctaggcgtaatggtgcttgcctgtaaccccaggtacttgggaggctgaggtgggaggatggcttgagctcaggaggttgaggctgcaatgagctgtgatggcgccactgcactccagcctgggagacagtgagattcgactccgtctcaaaaaaaaaaaaaaaaaaaaaaaaaaaaaagcaggcggttagattgcacaggccctgaaccccatcctaaagcctccagcactttcaagtgagggattaccaggtttgcggatctgctgcaacttggctgcagtgtccaaaatgggtggggcaggtggaattaaagatgaggctgtggagacaagctactggcagagaggacacactttaaaccctgggaagatatcattacccagagagggggaaggatgaggacactgcagagcccaacatcatcgccagacccgagtcatgcggctcctttgttccaggaaccaaggctgaccctagaagcaatagcagcattttcactccgcaggtgcatctcttccacgctttggggtgcctgccctgcctccgacttctggggctgggatttaaggccctaccagggcacagctcgccagctcacaggcggtcaactactgattcagttcttcgtctccttcactcctttacatcggactcacgagggctgaggggcagctccctttcgttaagtgcttcccgcgtgctcaacaccgcacgaattcccctcggccctacaggaccaaacgaccggcgcgctgagaaagggtgtgcggttccactgaggacgcccaagcgggacagccgggcccgccgcggtgagatccccggcctgtccagcccaagcccaagcgccctcgcggtcacgtggcatttccggaacattcagaacctaacagccaggaggcaggagggccgg

SEQ ID NO: 7415 - DNA, 2300 bp, Homo sapien
aggcctgcaaggttcccccctacatttccatggatctcactcccttgctttcttcaagtcttttctcaccgtgccccacaattgaaaatgcaaaaccgctgggcacggtggctcacgtctgtaatcccagcactttgggaggccgaggcggggggggggggggatcacttgaggtcagtagtcttgagaccagcctggtcaacatggtgaaaccccgcctctactaaaaataaaaaaattagccgggcgcggtggcgcacacatgtaatcccagctaactggtaggctgaggcaggataattgcttgaacccaggaggcagaggttgcagggagccgagattgccccactgcactctagcctgggagacagagcgagagtttaagaccagcctggacaacatggcgaaatccatctatacaaaaaaaaaaacaaaaaaaaaaaacccagaaaaattagctaggcgtaatggtgcttgcctgtaaccccaggtacttgggaggctgaggtgggaggatggcttgagctcaggaggttgaggctgcaatgagctgtgatggcgccactgcactccagcctgggagacagtgagattcgactccgtctcaaaaaaaaaaaaaaaaaaaaaaaaaaaaaagcaggcggttagattgcacaggccctgaaccccatcctaaagcctccagcactttcaagtgagggattaccaggtttgcggatctgctgcaacttggctgcagtgtccaaaatgggtggggcaggtggaattaaagatgaggctgtggagacaagctactggcagagaggacacactttaaaccctgggaagatatcattacccagagagggggaaggatgaggacactgcagagcccaacatcatcgccagacccgagtcatgcggctcctttgttccaggaaccaaggctgaccctagaagcaatagcagcattttcactccgcaggtgcatctcttccacgctttggggtgcctgccctgcctccgacttctggggctgggatttaaggccctaccagggcacagctcgccagctcacaggcggtcaactactgattcagttcttcgtctccttcactcctttacatcggactcacgagggctgaggggcagctccctttcgttaagtgcttcccgcgtgctcaacaccgcacgaattcccctcggccctacaggaccaaacgaccggcgcgctgagaaagggtgtgcggttccactgaggacgcccaagcgggacagccgggcccgccgcggtgagatccccggcctgtccagcccaagcccaagcgccctcgcggtcacgtggcatttccggaacattcagaacctaacagccaggaggcaggagggccgggccgaggccggagcgctggacaacgcgggtagctggcgctcgagggacaggcagctcccaccggctaggacccccatcccgatgcgcgggcgaagggctggggccctgtgccgctggcgatcccggggaccgcctggaactcgcggcactcgggagcgagagggaaagcaacccagaggccccgcagccgccggcgacacagctacagaccccgactgcagccggtactcccatatatcaggggcggggcgaaacccggccttttgaagggcagcgatttaaaccaatcagcgcaaagagttggcaaccctccgcccaattggaatcgctctcattctgaaggcggttccgacatggagtccggcagcccaatgggagaggtggaaatttccagaacgatcagaaccaatgggcgcggccagcgcggctacgattggcagtgcaaaagaccaatccgtgtcgcagaagttcgctcctccctccattcgtggagcctgagatgggtgggtttatagaggagcgcccaatcctgaggtgcgggggaggcagggttgagggaattactccccgctgtccaatgagaaggaagtggagatgatgggctggacctcaagccaatagtagagcagcacagacattccccctagaagaactcgaccagtgagcaggcgaggaaggggcgggagccggggtcccggtagcttctagtaggttccagaaggcggcgcgtgcggttgggaacgcggagcggacggattcgattcaacggggttccggaccgcgctgcgctatggagcaggtgaagggggaggggcgggctgaggccccgagcctgctcggggaccggcggtggccaggccgcggtaggggggcggggcgggcgccggatccaggagaccggagctcggcgctggggccggacggggcg

SEQ ID NO: 7416 - DNA, 2300 bp, Homo sapien
tctttggggcgggcttaggaggagtcccaagctgtggcttggcacagctccatggctttgccaagaaggttgccagatggcgctgttgctcagcagctggaagggaatctgaaggcttccccaccccaagtagtaccaatgagaggttcagataagctttgggtgctgttaattctccacgttatagtggagatccagagaacaggattctaatgtgagatgctgagacctctgtggggagagggcagctatgctgttagctgctgttagatttaggagttgggtcatggattgtttttgttttgttatttgagatggagtctcaggctggagtgcagtggtgtgatctcggctcactgcaacctccacctcctgggttcaaacgcttctcctacctcagcctccccagtagctgggattacaggagcctgctaccacacccagctaattattatattttagtggagacaggtgtttcgccatattggccaggctagtctcgaactcctgacctcaagtgatccacccgcctcaacctcccaaagtgctgggattacaggcatgagccactgcaccccactgggtgatgggttttttttgtttgtattttttgagatggtgtctctctctgtcgcccaggctggagtgcagtggcgtgatccagctcactgcaagctctgcctcccgggttcacgccattctcctgcctcagtctcccgagtagctgggactacaggcgcccgccaccacgcccggctaattttttgtttgtttgtttgtttgtatttttagtagagacggggtttcaccgtgttagccaggatggtctcaatctcctgacctcgtgatccacccgcctggacttcccaaagtgctggggttaacaggcgtgagccaccgcgcccggcctgggtgatggttttaatgcacggctcttacctgagaacttagggtgctaagctttaattacacttttccatggttgcaacaagctgcgttttctaaagctctcttcctggactggggaggcctttggggcaggagtaaaacttcctcatttgctccaagagtgctgctttctgggctaggaaggcgctgagactagcagctggctggacttcctgctgttagtttcatcagctttcttttcccctgggaatccccggcaggccgcccccttccccatctgagtggcgatgctcaggtagcctcccccattggcaggactctgccgcccccaggcttgcccaccctgcatgctccaaccccagtgtgttcactggaaaggccgctgtcctgcgcagagctggtggcggacgtgccttgctctactgaagtccacatcctagggcaggtgatgagcaggagggtatagaccaccagagacccctgaggtgtcacctaagcagggacttgatgggagtgagcctcgtggggactcggggaggctcatccaagtggagcacagtggaggggtcgtgtttggagctgggtgacctgagggcccgggaggttgtggatggtctgggccaagtactgttcacttgttcacctggcaggtctgagttcatgagtttgaaggtagccctacgcggagctaggaaaaactgcaaaatggacttgtttccctctggggccttgagggatccttggttgatagggatagccaggctggagccgatttaacctgtgagtcccaaataacctggatacactctgtcgactcctgggctctccctccggcagcccagtgatgtttcaaagcccaaggtccccacctcatgtgacaggctgaggatggcagacacttcccacaaaagtggacctagccctgaacacacacagccgggggacttgttgagtttgcactgagcttccctccaaatgaggaagggggcgtttttatggtgttgagtcgctaagccccgctctccctagcttcctgtgctctctggggacaaaggtgggggggcccctggaaccctctgtgggctggcagtgtgcttcctgcacccagcgccagcccgccctggggaggggctgaacccgccctgctcgtgataaggcacaagcaagggctgccctgaaggaagctccaaagagaaaggagggcaggaagcccacggcccacaggggtgtagcccgagacccacctgcagcccccagcccttgccaggaaaggtaagctcaggcctcactgggaccctgggcccttctcttccttatcctcctgcagcctctgcccagcctgcctctcgccatgcggcagcctgaactttccacctccccggagaggcttt

SEQ ID NO: 7417 - DNA, 2300 bp, Homo sapien
tcaccccattggcagagcggaagaagggtattccatctgctgacagagccagagatgtgactcatgccctccccgaaggcaagggcagctcctgctttgtccagactcacctgccagagccaggggtccatcgatgaacacagctatttcacaatgggaccgcatgcctgcagagacagctggagctgaggcctgggcacctggagtgcagtcagcaacctaggcagactggggtcctgggctgggggatgcaggggtgctgctccatgccggacatggggtggccccagacaagtgttgtaacctttgaaggggacctgggaggacagagtgggtgggagtagctaggtggaggggagggcactgaccactgatgataccggggtctccaggcagtcctggggccaggtgaatgtgcgtccttccctggcaggacaggcctttgagtaggatggatggccagtgcttccagaatgtaccatggactagcatcgggggcagggcctgcggtgtctccaggggcatcagctccaacttaggtacctggttgaacgggtagcagtgagacccccttcgcaggcaggggtccctcccatctcgtctcgcacttgtcccctcaccccgacctgcagggaatggccctggttggcccggatgagaaggccagtgctgggatcccccagctgcagggcgaaccgctgcttcctattggtgtccaccacgcgctgcacatcttcagcagagaagccgcggaactggggcaactgcaggagggtgcccaggggcacgaagccatctgtgggcaggcagggtgctcaggagctaaccttgctctggactgggccagggttaacagggagccacaggcaaccgaaacaaagtctgggcttggagatcgcttgggcatcctctgtgggacctttagaaagtctcccctttctgggccgcagttttttcaacttacataaaaagaggatctgcctcacggaggggcagggaggtgagtgcccagcatagcgctggcccggagtgcacactcacaccaccagctgcaccgtatcctccagggctcgccctcggggtaagtgctgatctggctgcttggctggagggggcggtcaccaggcctggcccagacaagaactctcctcagtctgctgtggacatgacaggggctctaggccttgctctcctctgtgcatggggaggaagtgcactctgtgccttcctcagggagcggtggaggcagccatcagggaggagtcgcagacaggctcacgtttctctctgggctcaagccccagcctccaaggcccctacttaccagctcccatgggaagccccagcttcaaggccccatggcgcagggcataggacagagccttggacagctgcacgtctcggtcctgaaagaacccagcggtggcccctagtctccatggtgaccctgccctactgcccatcctgaaccctcaatgacccactgcagagagagcccagagagaaaggagtgccagtggtctccaggaatagtaggacccttcagctccgccccccagcaactcccagggagcctggactggtgggagggggtggggaggaggcgcgcacctgttctcggggtctgggagcccttctacccctggaccctgctgcttcctgcctccctcctccagagaagttcatggttaagacctgtggggggcagtgacgaggggggactgctttaaggccccttccacgtccccatccctcccagaaagtcacaaagcctcaggaagtgagcgctgggtgggagtatacggctcattaagttcaccacccccaagtccctgctgcagagagggaaactaaggcccagcaggccagacttgcccaaggtcacacggtcagccaggagcgcagggaggccgagccccgcaccccagatcgctggtgcgccccgcagggtggtccgggaggcagggccgacgtgccgacggaccgggcggaagcgtcggggcggcggggacaaacctccaggatcctcgaccgcggcggacccgccaatgaaaagccgcgtggaaagggggcgggcacttccgcttcggggaaggggcggagcctgagggacccggcggctggtgagcgcccgctggaggctggagcttccgggccctggaaaggggtccccgcgcgccccgggtcggaggcagacccctgggtttgggggacatgggcatttggggcgcctgaacccaagacctctggatggtagggatgcccgggcgtcctggataccctgcgggactcggggctcc

SEQ ID NO: 7418 - DNA, 2300 bp, Homo sapien
tgtttccattgaaaagaagaatccttggcggggcaaggcatgagaatcacttgaacccaggaggcgaaggttgcagtgagccgatatgccaccactgcactagcctgggcaacagagcaagactctgtctcaaaaagaaaaaaaaaaaaaagaagaagaatccggcctggtgcagtggctcacacctgtaatcccagcacttttggaggctgaggcaggcagatcacgaggtcaggagatcaagaccatcctggctaacaaggtgaaaccccatctctactaaaaatacaaaaaaaattagccaggcatggtggcggatgcctgtagtcccagctactcaggaggctgaggtaggagaatggcgtgaacccgggaggtggagcttgcagtgagcagagatcgtgccactgcattccagcctgggcaacagagcgagactctgtctaaaaaaaaaaaaagaaagaaaaaagaaaagaagaagaatccaaggcagagggtactgagggctagaattccactccaagtatgtatagctgcaaagccaacttcttccctcattgctggccagatgcctgcaggcctcctgccagcccagacctgtagaattctggcaagtcctaccccctcccttcatgtctaccaccctgtccaggtcaacctcactcacctcatcacagatctcctgaaggacactggaaaagagttcatgtaccaccagctgcccagcgaggtcctggtgctgggggctgccaccagggcacagggcctgtgagaggtcaggctcagcccctgctccccacctcttccccctgccccatctcaggaccagcaagcctatacctgctggccttgagggtctgatgtggcacagtgtaagagagttagtgatcctgagtctggtgtcctttccctgacagacaaccagaggtccagcttcaaaggagatacacagggggcaggggtggagtagggcatcttcttcctgtgcccaatctttcctcccgtgttttctagtttctcacaggactggggcaggggtcagtggggaggcaggtggactgccctgagcaaacttccagagaaataccaggccaattttccctttaaggaatgaggaaaccaaagctgggaggattgggagggtggagagctgcagctcccttgagctgtctgggtctttgtgcccagcctggaatctcacctgaggctcagggtgcccaccaggtacgtccaccagcccaggggcctcagccacctgccgggagcggcgcaggaagacaaggaagtcatcggctgtggctagtgcagcgcccacccccagtgggtccgccagataggcctgcgtgtcaccccagtcggtggcaccctgctgtcgcagccaggcagctgagctggaccagttggtgcccaggaagtctcggtaggaagtaaggcccaggcgcaggagcagctgtggcccccgagagccaataggcgccagggtggctgagtgcaggcggaacttgggggcgtcgaagagccagggttgggcctttagccgggtctcccagatggcagtgatggcctcgtccccacctggcagtgggcgacggtcatgggcggggctcagctcggcctgtatctgctcctggggcaggcccccgccagggcactgcagcagcaaggtcacctcaggatccatggtctgaacggggcagctctgggggaggatacggccaggcctgtcatccaggggggccactaccactcctgggctgcgcagctagccccctctgtcgcagacctcctgagggtatccgcagcgcttctccacccccctgaccactccttgggcagtaaaacgtgccatcttccccgcaggagccccgagtcccgcagggtatccaggacgcccgggcatccctaccatccagaggtcttgggttcaggcgccccaaatgcccatgtcccccaaacccaggggtctgcctccgacccggggcgcgcggggacccctttccagggcccggaagctccagcctccagcgggcgctcaccagccgccgggtccctcaggctccgccccttccccgaagcggaagtgcccgccccctttccacgcggcttttcattggcgggtccgccgcggtcgaggatcctggaggtttgtccccgccgccccgacgcttccgcccggtccgtcggcacgtcggccctgcctcccggaccaccctgcggggcgcaccagcgatctggggtgcggggctcggcctccctgcgctcctggctgaccgtgtgaccttgggcaagtctggcctgct

SEQ ID NO: 7419 - DNA, 2300 bp, Homo sapien
tcttttttttttttttctttttgagacagagtcttgctctgttgcccaggctagtgcagtggtggcatatcggctcactgcaaccttcgcctcctgggttcaagtgattctcatgccttgccccgccaaggattcttcttttcaatggaaacaatgataaatatcttgcctactccccaagtctgttgaaaaaggagtaagtggccgggcgccgtggctcatgcctgtaatcccagcactttgggaggctgaggtgggcagatcacaaggtcaggagatcaagaccatcctggctaacacggtgaaaccctgactttactaaaaataccaaaagttagccgggcgtggtggcgggcacctgtagtcccagctactcaggaggctgaggcaggagaatggcgtgaacccgggaggcggaggttgcagtgagccgaaatcgcgccactgcacttcagcctgggcgacaaagcgagactccgtctcaaaaaaaagaaaaaggagtaagtgtggcagggtgtggtggctcacacctgtaatcccagcactttgggaggccaaggccagcggatcacctgaggtcaggagttcgagaccagcctggccaacatggagaaaccccatctctactaaaaatacaaaaaattagccaggcgttgtggcgtgcacctgtaatcccagctactcaggaggctgaggcaggagaatcactttaacctgggaggcagaggttgcagtgagctgagatcgtgccactgtactccagcctgggcgacagagcgagactccatctcaaaaaaagaaaaaaagaaaaaggagtaagtgggagtcccagtcactaaattgacttctcttgggtgaccttgggcaacgtgttcaatctctctggttttggtgtacctgtaaaacaaacatgcccatcatctgacattctgtaatgctgggtccttgatctacaagctataaaatgctgtacacaggtaacaggcggtttttcattgagacgggcagggatgtgggcagtggcattgataggtgggacctccccccaccccaccctccaccgcaggtgaacctgccgctgctcaccctgagccagcccctgctgttgggcatcgcccgaaatgagaccagtgctggccgagccagtgccgagttctatgtccagtgagtaggctcgggtacatgatcctgggtcttgggaaggtgggtggtgaggagtgggctgaggcagctgtggctccacaggtaccccgcaggggctggtcacccactaagccacccttgtgttcttgtccaggtgcagcctgacttctgagcaggtgaggaagcactacctgagtgggggacccgaggcccacgagtctacaggaatcttctttgtggagacacaggtgcagagtgacaaaccatcttgcttggaggccagggctggggcctgcagaggcctggcaatgcatatcttgtaggggaggtgttggctgggtcacaattccctccagagtcacaagatttgccctcagtgcaagggaaaggtccagggacatgttcagccccttaacatgcctccctaaggacagtgcagaggtctctgaggctcaggaattctgggcacagccctggcaggagaagtggcaagcttgaatgcctgggtctcgttgtctccccacagaacgtgcagagattgctcgagacggagatgtgggctgaactctgcccctcggccaaaggcgccatcatcctctacaaccgggttcagggaagtcccactggagcggccctagggtccccagccctactcccgccgctctgaaaataataaacgactttattcttggattccgttggcatctgctatttctgtaacagagaggagcaatgggccctgagtgtgtaaggcaggacaagtgacttgggaaaaaaaaaaaaaaaaacccgcccagcctgtgtccccctctgcaagcaggggataagaactgtgcctccctttctttgctggctccagagaggctccggggcggaagcagctccgtaagatatacctcgctgcagaggggagcaacagcggaacggagacacggtggccgggccgaaaacgtcacaaagccgcagagagcgggctctgtcccgcccgctccccaggtgggcgcccgcgcctgtccagcgagtccgcaggctgggggaccggaggcaccaaaggccaatagacatgtaggggcggggtctccaccgatttttttttttttcctgacaggtggacgtggtcttggcatccacgccaatgagaatgtgagggcggggcc

SEQ ID NO: 7420 - DNA, 2300 bp, Homo sapien
aaaatacaaaaaattagccaggcgttgtggcgtgcacctgtaatcccagctactcaggaggctgaggcaggagaatcactttaacctgggaggcagaggttgcagtgagctgagatcgtgccactgtactccagcctgggcgacagagcgagactccatctcaaaaaaagaaaaaaagaaaaaggagtaagtgggagtcccagtcactaaattgacttctcttgggtgaccttgggcaacgtgttcaatctctctggttttggtgtacctgtaaaacaaacatgcccatcatctgacattctgtaatgctgggtccttgatctacaagctataaaatgctgtacacaggtaacaggcggtttttcattgagacgggcagggatgtgggcagtggcattgataggtgggacctccccccaccccaccctccaccgcaggtgaacctgccgctgctcaccctgagccagcccctgctgttgggcatcgcccgaaatgagaccagtgctggccgagccagtgccgagttctatgtccagtgagtaggctcgggtacatgatcctgggtcttgggaaggtgggtggtgaggagtgggctgaggcagctgtggctccacaggtaccccgcaggggctggtcacccactaagccacccttgtgttcttgtccaggtgcagcctgacttctgagcaggtgaggaagcactacctgagtgggggacccgaggcccacgagtctacaggaatcttctttgtggagacacaggtgcagagtgacaaaccatcttgcttggaggccagggctggggcctgcagaggcctggcaatgcatatcttgtaggggaggtgttggctgggtcacaattccctccagagtcacaagatttgccctcagtgcaagggaaaggtccagggacatgttcagccccttaacatgcctccctaaggacagtgcagaggtctctgaggctcaggaattctgggcacagccctggcaggagaagtggcaagcttgaatgcctgggtctcgttgtctccccacagaacgtgcagagattgctcgagacggagatgtgggctgaactctgcccctcggccaaaggcgccatcatcctctacaaccgggttcagggaagtcccactggagcggccctagggtccccagccctactcccgccgctctgaaaataataaacgactttattcttggattccgttggcatctgctatttctgtaacagagaggagcaatgggccctgagtgtgtaaggcaggacaagtgacttgggaaaaaaaaaaaaaaaaacccgcccagcctgtgtccccctctgcaagcaggggataagaactgtgcctccctttctttgctggctccagagaggctccggggcggaagcagctccgtaagatatacctcgctgcagaggggagcaacagcggaacggagacacggtggccgggccgaaaacgtcacaaagccgcagagagcgggctctgtcccgcccgctccccaggtgggcgcccgcgcctgtccagcgagtccgcaggctgggggaccggaggcaccaaaggccaatagacatgtaggggcggggtctccaccgatttttttttttttcctgacaggtggacgtggtcttggcatccacgccaatgagaatgtgagggcggggcctgaatagacgcaggaaatggcgacggccgcgggtctgtgagcagcgggggcggggcctggttgtggcccctccttctcccgtccccaagttccctgggtgggaacggggtcttggggtccctggctgggtggccagaccccgaagccagcgctgggaagggctgcggatgcccgggtcagaggaaggggcaggtccaaggacacgcgggtctggtcctgggcaagaaccgccccctctccgggcctgcttcagtcttcctttgcagaacaacgggccaggccccttccctctgcccccgggtgcttgaagtctagccccatcctggtccaatgcgctcttggtagcctcctttcccagctgcccgcccgccgccatgccgcccttactgcccctgcgcctgtgccggctgtggccccgcaaccctccctcccggctcctcggagcggccgccgggcagcggtgagttgggcgcggggggccggcccggttgttcaatgggtttctgtttgccctacgtgctgagttagttgtggtctctactccgtgtcaggaggctcccaggtttgtctcaggtaaccctcgccttccctgctgaggatcagagatagagaagacccccaaggtcata

SEQ ID NO: 7421 - DNA, 2300 bp, Homo sapien
tgagtgggggacccgaggcccacgagtctacaggaatcttctttgtggagacacaggtgcagagtgacaaaccatcttgcttggaggccagggctggggcctgcagaggcctggcaatgcatatcttgtaggggaggtgttggctgggtcacaattccctccagagtcacaagatttgccctcagtgcaagggaaaggtccagggacatgttcagccccttaacatgcctccctaaggacagtgcagaggtctctgaggctcaggaattctgggcacagccctggcaggagaagtggcaagcttgaatgcctgggtctcgttgtctccccacagaacgtgcagagattgctcgagacggagatgtgggctgaactctgcccctcggccaaaggcgccatcatcctctacaaccgggttcagggaagtcccactggagcggccctagggtccccagccctactcccgccgctctgaaaataataaacgactttattcttggattccgttggcatctgctatttctgtaacagagaggagcaatgggccctgagtgtgtaaggcaggacaagtgacttgggaaaaaaaaaaaaaaaaacccgcccagcctgtgtccccctctgcaagcaggggataagaactgtgcctccctttctttgctggctccagagaggctccggggcggaagcagctccgtaagatatacctcgctgcagaggggagcaacagcggaacggagacacggtggccgggccgaaaacgtcacaaagccgcagagagcgggctctgtcccgcccgctccccaggtgggcgcccgcgcctgtccagcgagtccgcaggctgggggaccggaggcaccaaaggccaatagacatgtaggggcggggtctccaccgatttttttttttttcctgacaggtggacgtggtcttggcatccacgccaatgagaatgtgagggcggggcctgaatagacgcaggaaatggcgacggccgcgggtctgtgagcagcgggggcggggcctggttgtggcccctccttctcccgtccccaagttccctgggtgggaacggggtcttggggtccctggctgggtggccagaccccgaagccagcgctgggaagggctgcggatgcccgggtcagaggaaggggcaggtccaaggacacgcgggtctggtcctgggcaagaaccgccccctctccgggcctgcttcagtcttcctttgcagaacaacgggccaggccccttccctctgcccccgggtgcttgaagtctagccccatcctggtccaatgcgctcttggtagcctcctttcccagctgcccgcccgccgccatgccgcccttactgcccctgcgcctgtgccggctgtggccccgcaaccctccctcccggctcctcggagcggccgccgggcagcggtgagttgggcgcggggggccggcccggttgttcaatgggtttctgtttgccctacgtgctgagttagttgtggtctctactccgtgtcaggaggctcccaggtttgtctcaggtaaccctcgccttccctgctgaggatcagagatagagaagacccccaaggtcatacaccgatttaagcggcagaggaggaagtttgagtccaggtcaaacccaacgctcttaccacagctctagtggtttccaagcatcgctgtatcactgtgcataaccctctgtggggggtgggagatggggaggtgtcgggtacaaaatccagattcctgggctctgctctggagattctgaactggaggaatcaattgggtgggggtcaggaatcagtttctttctctttttccttttttttttttttttttgagatggagtttcgctcgttgcccaggctggagtgcaatggagcaatctcggctcaccacaacctccgcctcccgggttcaagcgattctcctgcctcagcctcccgagtagctgggattacgggcatgcaccaccacgcccggctaattttgtatttttaggagagacagggtttctccatgttagtcaggctggtcttgaactcccgacctcaggtgatccgccctcctcggcctcccaaaatgctggattacaggcgtgagccaccgcgcctgtccaggaatcagttttttccaacaagtttttggactccactttgagaaatcctgacctgcactatgcctgaaacactccaaagggggtgctgatctggagacagatctgtcctgggacctgtttcagccctgtcagctcctggtggctgagttgaagggtgtggcccagaaggcagggc

SEQ ID NO: 7422 - DNA, 2300 bp, Homo sapien
tggacgcctgtagtcccagctactcgggaggctgagacagaagaattgcttgaacctgggaggcagaggtggggttgcagtgagccgagattgcgccactgcactgcagcctgggcaacagagtgagactccatctcaaagaaaaaaaaaagaaaaaaagagaataaagagaatcagctccgtggcacgcgtgagagtggcagggagatgcctactgccaaatgaatgagctgtgctgcatttgctgcttgtgcttgattttgtttggctcaatcccttcctggcagccagcatgaaagatttacattcgaaatatgaaaaactgtaaatgacaacgttagctcttggtgcagcgctgcctttaataagtaaggagaggctccagagaccaacttcaagcagctcttagcttgagagacacaagagtacgggccacgaggtgctgtggaggactggctgaccacactggaattcacccaccctcctgccctctgcccatcaccccggggagaacaggcatcacctgaaggcaatgtagtgcaggcccatgcccgccagcatgaggaggaggcagtaccccagcacttgtttgttttgtttgtgttgctgctgcctcaactggggcccctgtggcctcacgctgtgaaactgggaccagtactgtgcgttggggggtgtccaggagctgctgggaggcagaggaagggacattgtggaaatgagactacccaagagacctgggggtggggcaagctgagggcaggattactgtacctgtgtgtttggtgggcagacttgtcatggactgtggttcgtggagactttgggggactacctgagcggagctggtcatcatagctgcggcggctctgctcacggctgagcacacggtatgcctcgctcagctccacaaagcggctgtgcaggcttgggttcccagggtcccggtctgggtgcagctggggtggggcaggactccccttatctccctttgcctgtccctccccaggacccatgctgatgacatccacccaccagggctccagtcatacccagaggccctgcctggtcagtgaccctcactcaggcctgcccactcctcagaaggccagagagcatggactcctgcttcctcctgtgttcaagccctccccacctgccagccccctgcattcaccatatgccctggtccaggtttctcaagagcaggcaggcaggtcaagaaaaccaagcccagcccatcagacaggacccctggctcctgcccacagcctttcccctaccattgagcacctgccactccctatgagggctgaaaaaatgtggcacccgccagagatgctggtctactcctgggaatttgaagcacacccccactggctcaaagttcctgctccccctccccacctcaggggtacgggtacctctttggacttggagaagaaagctcgtttaacttcctcagtgctggcaccaggatgcacccccaacagttcataataagtactgggtctggacctgtggacagagtcccaaaccttgcaggggctgaaggaacccagaagctagctctgccctgccttctgggccacacccttcaactcagccaccaggagctgacagggctgaaacaggtcccaggacagatctgtctccagatcagcaccccctttggagtgtttcaggcatagtgcaggtcaggatttctcaaagtggagtccaaaaacttgttggaaaaaactgattcctggacaggcgcggtggctcacgcctgtaatccagcattttgggaggccgaggagggcggatcacctgaggtcgggagttcaagaccagcctgactaacatggagaaaccctgtctctcctaaaaatacaaaattagccgggcgtggtggtgcatgcccgtaatcccagctactcgggaggctgaggcaggagaatcgcttgaacccgggaggcggaggttgtggtgagccgagattgctccattgcactccagcctgggcaacgagcgaaactccatctcaaaaaaaaaaaaaaaaaaggaaaaagagaaagaaactgattcctgacccccacccaattgattcctccagttcagaatctccagagcagagcccaggaatctggattttgtacccgacacctccccatctcccaccccccacagagggttatgcacagtgatacagcgatgcttggaaaccactagagctgtggtaagagcgttgggtttgacctggactcaaacttcctcctctgccgcttaaatcggtgtatgaccttgggggtcttctc

SEQ ID NO: 7423 - DNA, 2300 bp, Homo sapien
ccgtgtgctcagccgtgagcagagccgccgcagctatgatgaccagctccgctcaggtagtcccccaaagtctccacgaaccacagtccatgacaagtctgcccaccaaacacacaggtacagtaatcctgccctcagcttgccccacccccaggtctcttgggtagtctcatttccacaatgtcccttcctctgcctcccagcagctcctggacaccccccaacgcacagtactggtcccagtttcacagcgtgaggccacaggggccccagttgaggcagcagcaacacaaacaaaacaaacaagtgctggggtactgcctcctcctcatgctggcgggcatgggcctgcactacattgccttcaggtgatgcctgttctccccggggtgatgggcagagggcaggagggtgggtgaattccagtgtggtcagccagtcctccacagcacctcgtggcccgtactcttgtgtctctcaagctaagagctgcttgaagttggtctctggagcctctccttacttattaaaggcagcgctgcaccaagagctaacgttgtcatttacagtttttcatatttcgaatgtaaatctttcatgctggctgccaggaagggattgagccaaacaaaatcaagcacaagcagcaaatgcagcacagctcattcatttggcagtaggcatctccctgccactctcacgcgtgccacggagctgattctctttattctctttttttcttttttttttctttgagatggagtctcactctgttgcccaggctgcagtgcagtggcgcaatctcggctcactgcaaccccacctctgcctcccaggttcaagcaattcttctgtctcagcctcccgagtagctgggactacaggcgtccaccaccacacccggctagttgttttgtatttttagtagagatggggtttcaccatattggccaggctggtctcaaactcctgacctcaggtgatccacccgcctcagcctcccaaagtactgggattacaggtgagagctaccgcgcctggccacaaagccgattttctatagcagatacctaaaggccagtgcccactgctagcagcctgcctagttcagtgatggagttagacgcataccctttctagtcttctgggaggagcacccccatgtccacagctgctgtcacacctcaaagtgaccagggacttcggatgccattggaccctagacaagccagggccactctgagccctccctatctatcacaggaagggttagactgaggttcctaaccctgtgtaagggtaaaaagctgtgaggcccctagagtggggtggaagggggcaggacttcagggacagcaggaattggattcccagggttaattgtgacccattgcaggaaggtgaagcagatgcaccttaacttcatggatgaaaaggatcggatcatcacagccttctacaacgaagcccgggcacgggccaggtctgtccctgctctattctgctccctgctccctgtccaggaaccacacttcgggatccctatcccaaccacccaggtgccctctcctccagggccaacagaggcatccttcagcaggagcgacaacggctagggcagcggcagccgccaccatccgagccaacccaaggccccgagatcgtgccccggggcgccggcccctgaggggctcacctggatggggcctgcagtgcgttcccgctttgcttccttccctggacggcccgctccccgaaacgcgcgcaataaagtgattcgcagagctcgtgtccggctccctccttaaggcccgacgcccccggccccggcctcgccaaggggcagcgccccgccctccgggtagtggcggcggcgactggggagcccagcctcctgggcggtgcgtcccctttcccctgccgcggcgggaggcgggagggggtgtgtggaggaggcgggccccgccgacggcctcgcccccccaccccgccgccccgcccccgccccacgggccggtggggagcgcgtgtctgggtcacatgagccgcctgcccgccagcccgggcccagccccccgccgcccccgccgtccccgccgccgctgcccgccgccaccggccgcccgcccgcccggctcctccggccgcctccgctgcgctgcgctgcgctgcctgcacccagggctcgggagggggccgcggaggagtcgccccccgcgcccggcccccgcccgccgcgcccgggcccgcgccatggggctctggctgtcgccgccccccgcgccgccgggctagggcga

SEQ ID NO: 7424 - DNA, 2300 bp, Homo sapien
atgaatgtctgcatcactaaatccagagcttgtcttgctccctcattgtgcagatggaggaaatgaggactaaggccccacagcagatcccaggcagggccagaattatgtattcatcactttcaagttattgccacgcatgggagtcagggatagcccagtcaatacagactgcctgccctcctgctcttcaccagggttcttttctagaaggagacagccttctgtggccagagagcttggggtaggacccagatctactgagtgaccttgcttgtcactacccctgcctctctgagcagcagtttccacatgtgcacatagagggaacagaagattgctgtggttggcgtcctcgggccccagagaagtttgagactatctttacgtaatagaaaagaacacttgttcttcctgccaggcagcgctttcagcatctgctgctttttgttccctgcagcttgaatctaaagcctcagcacctgccctgtcttaacttcactcccacctccctgaaagggaagcaccgcaagtctggggctggtgggcctggtttgggcggcaggctcccctcaacccaacccacagttttttgtttttttttttgtttttggacagagtctcactctgtcacccaggctggagtgcaatggcacaatctccactcactgcaacctccatctcctgggttcaagcgattctcctgcctcagtctcccaagtagctaggattacaggtgcccaccaccatgcccagctaatttttgcatttttagtagagacgggtttcaccatgttggccaggctggtctcgaactcctgaccttgggtgaaccacctgcctcagcctcccaaagtgctgagattagaggcgtgagccaccgcgcccgcccaacccacacagttttctccaccctcgcctcccttgcatcctgcagcttccttcatcatcagttgctgcctgagattctcctgacttgtctatcctagcccaagcccagcccctacccttctccctgcagcctccagtgcccagggctgagtggtttggggtggatgaaaggccaaccttgggcaccactgctttgcctgctgaagcaggacattcaggggcagagttaactcaattgggcagccactgggaggggcagccaccctaatggaggctttctctgaggtgttgggtcagagcatgtgggtatgatcttagtgggcctaaggcaggagtgggttgaaccaggagacaattcctgacagcgattactactttcaaatcattttctcagtcatgatgtcactggacatgccataggtcaattagcatgaggcagaaaggggttagggccccagagctaccgcctccagagcccagttagccccaccagtcacgcacaatgcttcacatgcacctcctcactttctcctcgctcgattctgaggtcagcatcatgattgtcttccttttacaattgaggaaataggctcagaaaggctaactggccggggggatttgacctcaactcagctgtctccctaaccttcaacctaggtttagctgcctctcaactgcaggttcattacttcagttgacagatgtttggtggctgctggggcgcctgaaaataagtctggtgggggaacaggcccagccagatcattccagtcatgagtcacagcccaggtgcacaggtagaggtaagcctggctcctgggagagagatgtgggcaggagcattggctggaagccagggcttgtcattggacatcatctcggtcctgcaggggccctgtggggtgggtgtcatcaagcccgtgttacacgcctgtattggatgacaaattctaccaagcacacagccgaccgggagttcaaacgtgagtgtcactgtgaagcccaggctccacagcgactgagggccgtgggccatgatgaggcccgggaaaacaggagtgctgtgggagaggctgggggcgacttgaaatggcgcctcaagaccccctccgggaacccacgcccgcctgaccttactatcacctcggccggaagtgtctccggccttttcggaagtcactttcacctaaccttacagactaccgctccgccggaagtgacgcagggcagcggcgtcgcgggggcggggctcgggaaagacccgtgccagcgggcgtgtggccgcgggtttcgcacggtccaataagggagggcggcgtggcccggcctggtagcgacgaggacgcgcctgcgcagaggcggcagcaccaccggggttgactccgggggcgcggcgaggaggtgagcgg

SEQ ID NO: 7425 - DNA, 2300 bp, Homo sapien
ggtgttgggtcagagcatgtgggtatgatcttagtgggcctaaggcaggagtgggttgaaccaggagacaattcctgacagcgattactactttcaaatcattttctcagtcatgatgtcactggacatgccataggtcaattagcatgaggcagaaaggggttagggccccagagctaccgcctccagagcccagttagccccaccagtcacgcacaatgcttcacatgcacctcctcactttctcctcgctcgattctgaggtcagcatcatgattgtcttccttttacaattgaggaaataggctcagaaaggctaactggccggggggatttgacctcaactcagctgtctccctaaccttcaacctaggtttagctgcctctcaactgcaggttcattacttcagttgacagatgtttggtggctgctggggcgcctgaaaataagtctggtgggggaacaggcccagccagatcattccagtcatgagtcacagcccaggtgcacaggtagaggtaagcctggctcctgggagagagatgtgggcaggagcattggctggaagccagggcttgtcattggacatcatctcggtcctgcaggggccctgtggggtgggtgtcatcaagcccgtgttacacgcctgtattggatgacaaattctaccaagcacacagccgaccgggagttcaaacgtgagtgtcactgtgaagcccaggctccacagcgactgagggccgtgggccatgatgaggcccgggaaaacaggagtgctgtgggagaggctgggggcgacttgaaatggcgcctcaagaccccctccgggaacccacgcccgcctgaccttactatcacctcggccggaagtgtctccggccttttcggaagtcactttcacctaaccttacagactaccgctccgccggaagtgacgcagggcagcggcgtcgcgggggcggggctcgggaaagacccgtgccagcgggcgtgtggccgcgggtttcgcacggtccaataagggagggcggcgtggcccggcctggtagcgacgaggacgcgcctgcgcagaggcggcagcaccaccggggttgactccgggggcgcggcgaggaggtgagcgggggccacagcccgggctggggggagccggggtgcaagagggcaggctggatcaggccgggcagaagcggaccgggctccgagtgtcaacgagagctaggtgacgaggaaattgggggtgggggccggagctgtccggagatgccgcagggggagggttctcacgccgcacggggcggagtcctgggactcggggcgggacgtggaaccgggacgggtgggacctccgagctggtgccagtggaaggcggagcccggcggcggggggcggagctaggagggtcgggggacggagcctggctcttgaaggaggagctggaggaggtgaaaggcggagcctcggggtcggaagcagagggggacggagcggaggcgctgggggcggggcttcagccggtgagtggcgtggctacggctccggaaaaggggtctagttctgtcgaaggcggggctgcaggcccgggggcggtaccgcgtcctccgaagggcggtgccaaggagccaagtgaggagcctggcccgagtaatggccccgggcgtcctcgcgggggtggtctccgtggtggccgggcttggggacgccgtaggccgagaactccaccgggagaggtggtgtgggtggagcgggctcggcggccagcagacacagggccagtctgggtgccccggagacccccaagggctcagagttggggcggcgccccgggcggaagcacagggccaggctggggggtatctcccgaggacccgggctcctcggagccacccagtggggatgtgtgggtgcctcggggccggccccctgcagcggccgcagaggtgttggtgtgctggaccgggggcagctgggtgtggcgtgagtggggccgcccagtcggggcaactgcagtgcagccagatagggtctggactttgcgtaaagggacaggcgggaactgaagagcggaggtggggactgggagggagggaaggtatgggggtgagcaaaggggcgggtccctggctgctgtggcctcccctgaccccctccccccgctgctggggtcctcggccaagcccccttctcactggactggtaagtgtggccccggagcccgggggagagggcggtgacccgggacaaaggggatcccccggggcaaggaagatacagtggcggtggaaccctcctgttacc

SEQ ID NO: 7426 - DNA, 2300 bp, Homo sapien
ggtcttcatggcctgcaggccccacttccacagaagctgttgggcattaggggctgtttgagggtcttccccctttaatctgtgtgcaccctcaaggtacaaacaatgcttgggttcagagggagctggcctggcctggtggggtgtggtggggaatttggactggggtaaagtgatcctcctatcaggccaggcttagggcaggaggccaggccacggatagggctcccggtggagagggtggatcctacctaatccgcaagagcgagggtcagcccttcctcggcacccagactggctgaagggaggctgaggccggaggaggggcacgggaaggggaggggtcagctcactctacccttccctgaactgagccctgtgagcccattgccttcacaatgcccagcctctgtcttctcttggtctcttctctctgactatagggcaaaggaggagcccaacatcctgggttggagtttggatgcagccccagctgtgtgaccccggggccaatcccaatccatctctgaaccccacccgctgcagagggcttccccccacaacatccaaagagtgtctttgaggggctggagcagaaacattgcctctcagatccaagaccctgtttggggtggcacaaggtgagcctgccttccacagaaacatcccccgggagctgcgcagccttattgggtggtgtctacagggtagtgaggaggttgagtagagacttcgtgtcagggggtttgagccacacagcctgggttcaaagtctcgtctcccgttttatctagcagtgcgacttaattaacctctgtggtgtagtaattgaactttccacgaattttcctatttaatctttgttacagccttctgaggaaatgcaggcacagaggaagacattcattctttcaaaatcatttgttcaaccaatgcagcggcctactacgagtgtgacatagttctaggtgctggagttcagcgggagccaggtaatttgcctaatagcagtggatttgaagactgttcaagcctggtagcaccagcagaccaggtcggcgcaggcctcagccccgtggcactcacaatctagaagtgggagacagacaatacacgaatgaatgagaccatttaaagatgcagaaaataaaatagagggagggaatgggatgcgccgtcggcttattggaggtgggccagggctatgtgaaggaccgaggagccgcagggcgggggtgcaggagccccggcacggcgccctctctgcggagccgactgggcggcggtcccgacgcacgctcctagggtcagccgcaattaccgcctttattattataagtcgcggcccccgcactgcccagctctttgcgccttagtttccccctctgtgcgcactcgggtcgcgaggcgcagaggacgccccaaacaactttgcgcttcccggcctggccgcagggcgggggaggggcggcgccgggagcggactccgtttcccacaagcccgagcctcgcgccatcttgccggtgggcggtggctgcccggggttggccgtttgggccggccgggtgccaccgctcacccccagccccggcttcttccgctgggggcgtgggacctgctactcggagagtctagggacccggacagctcctgcccgccttctccactcttcctttcccaggagcccagtccacgtgtcggtccgtgcggaggagcccgttcgctcctcgctggccgagggctggaggacctggacatcggggaccgcagcgtctcctcaccagactccctgtctgcacacgatgtccactcccctgcattctcagatagcccctattctcagatggcctcaatgaggacagaatgaggaagggtccaatgaagactagggtcctggcgtgagcgcaaatcgtcgtcctgagcgcttagaacgcctgggtttgggactggaaggttgcgtttggggagtacggacagctaggccaccccctgccgaatagaccctcccctacccctgcccgggggcggagtaggggagaggggcctgtagaggggctggccctttaagggggtgtggtcggggggcggaggaagagcgagacagagaaagcgcttcggcggctgcagctcgggcggcggccgcgggggacaaagggcgggcggatcggcggggagggggcggggcgcggccaggccaagcccgggggctccgcatgctgcagctgcccccgggcgcccccgccgccgccctcgccgcggagccgcgcggagcggagccggcgagctaacccgagccagc

SEQ ID NO: 7427 - DNA, 2300 bp, Homo sapien
cctgtggttgggggcccatgcccagccctggccctcctgcctgagccctactgggactggagtgtaccactgctcctcctccttctagcctcagtctgtggcctccccagccctaccccttccagggccccagcccccctccattagagtgcatccttgaagcagaggctctggggagggtcctgtgggtcaagaccgctccttcaatcaagggtagagtccggaaaggctgcctgccttcaccattactgcctgctgagataccctattaccattaccaaggatggaagaaagtgtctgggaaggaaggagccctgtaatgggggctgccctggcctccagagacacagggttgggggaggagagaggcttaagcccaggaaacaggtgcccatcctgtttttttccacaaggagctgctgcccaatgcttctctaaagtacgcttgcacaaggcctagggcccacagctcagatcccctaagctcaggccttggctccaggctttgctagccctggcacaagctggaggttccactgccccagagctgacctatgccctttcctccctccctggtatacccacagcttccagctactcatgtcaatttggcatctcccacccatttgcttatgtatacaacaacctttaggttctggacaaggtgactgaggcacctagagagactaggttctgccactagcaagaggctgctagcaagagccggatttgaactccagcctgtgagggcagaggccaagctccaccttgcatggttctgttttcccaatgaggtctagaggctcctgggcctcaggaagtcggagggttgaaatcctcctaagaagctgtgtgaccttgggcaagtcccttcccctctctgggcctcaagtggagatcataatcacaccccacagggccagggctgagagcgaggagatccgccaggttagagttgatggagaacttggcggggtgtggaggaaggccagggccaggcagggctccttgtggaggtctcagagcctggggcaaaggggcctgcaggggagctcctcctttgctgacccctcctcccccagagccagctgcatctctttctgggtttctaggtgacttggctggcccctctggatgagttctactttaaacctgctgctgttactgcctctgtattgggggggctcccacaggggcccccaggcaggaaccccccccaccagctaagccctgcgggaggggctgcagcccccacccatcccattgcccatgcgccttccccgctcccatctctggaacgcagatttcagggcacctgctgtgggccaggcactgcagagcccctcctcaaccctcctgtctggggacatccacaaagcttctgacccctctgggcagacaacagcgttccccccgcggttcccagccaagaggctcacagtcaggttccagtcatgggagtctgcagcaacaagaagggggctgttctagggctcactctcgaagaccaggatgcttgggtccttaaaggaggtggcaggcgcccggcctccctgggctagggacgggggaggggtgcctgccggcgggaggtccattagccggctaagtgctcccagggaggggggaccgcgcggcataagagtgggtgaggcgaagccagggcagaggggggcggaagaagcttttcctgcattcagctaagtgcggcagaagagggtgggcgacagggctgtgcagcgaccccccggcccaagtctagccctccgctggtactgcagccctagtcgctcggaaacctcagtgggctgatcccggaccgccttaagcagcgccctctacacccagtccctccagctgctccccaacagccacttcggcccccagcgccctccttccaccacaggcctgaagaatcaggttctgctgagccccgcagcaaagcccccgacccgtccgcgtgcccctgccccaatccccgctccggctgcagtcgccgccccggccgccagggggagccgacgcggtgggagggggcggggcccgggaggccccgccccgtccccgccccgcccgggccccgccgaggctctggtcggtccgggacagactggcgggcgggcgggcactgacgccgcggggccggagcgggccgcgcggtgggagcagcggcgccgtcggtccccgtcagggctccgtgggtccccgacccgcccctggccgggccatggcgggcgcccagcccggcgtccacgcgctgcagttggagccgcccaccgtggtggagaccctgcggcgcg

SEQ ID NO: 7428 - DNA, 2300 bp, Homo sapien
gggagcattgtcatggggagcattgagtagctgtgaggaatggtacagaaaaaatcagtctgagctgggcgtggtggctcacacctgtgatcccagctactcgggaggctgaggcatgagaatcccttgaacctgggaggtggaggttgcagtgagctgagattgcaccattgcactccaacgtgggctaaaaagggagacactatctcaaaaaaaaaaaaaaaaaaaaaagacatcattgctataaagacaattactggagcaattagtgaaatttaaagatggactacatattagataatatgttaatgttttgtttcctgaatttaattattgtattggagttatagaagagaatgtccatatatgctgaagtatttatgggtaaagggtcatgatgtctataatttactcccaaatgattcagtaaaagtaatgataattataacacctatatgggccaggcgaggtggctcatgcctgtaatcccagcactttgggaggctgaggtgggcgagtcacctgaggttgggaggttccagaccagcctggccaacatggtgaaaccccatctctactaaaaatacataaattagccgggcaaggtggcgggcgcctgtaatcccagctacttgggaggctgaggcaggaaaattgcttgagctgggtggtgtccagggcgcatcagtgagaccccggggagaagactgtcggcaccaccagcagtgtgtatatagtgctgggaagagggtcagcacctccttcatggggggcaggtgagggaatggccagctgtggcgggaatggcactgctgaccctgggttggggcccacagggcacagccagcagcgaggtgaatgccactgaggagatgtccacgcttgtcaactacatcgaacctgtcaagttcaagtcctttgaggctgctcgaagtgagtgggggtgggtggcaggcatgggagcttgcccagctcagccctgccaggtctgacgccctttcttggctcacccctaagagaggaacaaatgcttcgagatgtcgtcctttgtggagaccaaggccatggagcaactgaccaagagccccatggagtttgtggagtatcctttgaaggtgctgtgggcgggcaggccagggtggggcgctcggaggccggctccggtgttctgtccccacatatgccacctgcacagggtgctggccctccggcggccctcctgcaccctggcctggggcttgggcagatccaggcagtctcagggggcatggctaggctaagaaacagaggccgggtgtgggggtcacaggagcacctggctgaggccggaggtggaggctgatggggtgggccctggcacctgtgtggcccctgaccaccaatctcagatacaacaagcagcagctcagccgcatctaccccaagggcacccgcgtggactcctccaactacatgccccagctcttctggaacgtagggtgccagcttgttgcgctcaacttccagaccctcggtgagccctggccccctccatcttgaccccgaccctcagtcttactgacttctgacccacgatcctgctggtcttgcctgaatggacctctgaccctgtctcatcccagatcccaggggaacccagctcccgactcaccccgcctcctgcccttggctgataccagacccctcccctgtctgatctgtcctggatccggaccctgatgccatttgagcccgcccctgaccctggaccttggatgccatctgacctgatgatctcccattccccacatggcaccgtcctgcctgatccctgcccctgctcgacgtgcccgtggcaccccagatgtggcgatgcagctcaacgcgggcgtttttgagtacaacgggcgcagcgggtacctgctcaagccggagttcatgcggcggccggacaagtccttcgaccccttcactgaggtcatcgtggatggcatcgtggccaatgccttgcgggtcaaggtggggcttgcgggcggctcaggccaggggtgtcctgggggcaggactctcagcatccgcctcaccctccttggcccacccccaggtgatctcagggcagttcctgtccgacaggaaggtgggcatctacgtggaggtggacatgtttggcctccctgttgatacgcggcgcaagtaccgcacccggacctctcaggggaactcgttcaaccccgtgtgggacgaagagcccttcgacttccccaaggtgagcctggcccctgcacccgcccaggcacaggcagatccagcccagaccgccc

SEQ ID NO: 7429 - DNA, 2300 bp, Homo sapien
gccctaagtttcctcatctataaaatggactttgggcatttggtggggttgaggtcacgcctccagccaagggctgctgggttgaacctgagcttgccctgccgagtctgctgagcttccgtggccttctgcttgtgccctctgcccccaagccgctgttcctgttcccccatccccatgactttcgtctctccgaggctctccctgttctctcttttctgaggctcaggcctctgcttcaggaagccttccctgccccgcttcctgtggcctgatatgacccaaacgcctagtatcttccgctggggctgctctgggcccccgacaggcagttgactctatcaggtgatggatcggccagggtggagcagggcagctcagaacctgcccaacaccgggggacctgggtcttcagaaataggtgggcagtaggcctgcctgtgactctgggggaagggaagtggacagtcacagacacgcaggggctgggccacccagcatcccctcatccctgtgagggagatgttatgcctgttttacagatgaggagactgaggcccggagccatctgtcgtgtgctaggccacagctaagtcaagacgtcctgacctggaggcagggcaggcctggaccctccgtggtggactgtcttcagccagcctggacctgtcccatgcctcaagaccagcgaaaagtggcagagagcccacagtgcgggctccagggcggggctgggctcgcagcagggtcggcttggcacctcttcaaggcctctcccagcttcctggctcttcccaggctgcccgcctgcatccctcctccaggggaaggcggcctcttatctgggcttatctcctgccaattgagtatcttctttgctttgtttttgctgcagcctcaggcaaacagatggggtggggaggccagggaaacaggctccggagtagggccctcctccctcagggtcaatgcaatggccccagacttcctcacttcttctgtgggacgctgccctatcccccagttctgctcactccagtgtattccgtatctaggctcctcagcagccaactcccaccttcctgactctagctggtgtccactgagggacacactccaagtcagttcccaggtcctcaaataccagctgaatgtctaacttctgggtgtgacattccagcccctagaagcctggcctctgctgctcccctgtccttccatgggtccactcctccttgcgccgggggggatgaccctcacctcaccttccggtcgcagctctagctgcctcctccctgaagccctctctgactgccctgccgattccgggccctcgggagcttccgcgagcagggccgtggcgcaatgcatctctgtgcccggcaccaagaaccggcccgggttatagggggcgccaataaatctttctggaacggagcccccgctctgtccgggtccccgcatgaagcctcagtttccagcgaccgcgctgctgccagcctggctcagccgctccctcccgccccgcgaggtacccgggcggcgctggccccgggccggccacacagtagctgctggaaagggctgacccaaataggagcgagtgaccctctctggggggccgcggcacggtttgcagagcgcgggatcgggctgccggcagcgctgcggtcccaatgcgcgtgctggggacttggacctgggccgcgcagcccaggcccgcgagccgccgcgaccccttccgtctctgtcgctggatgtcaggcagagcctaagtttccctcgtaagacagcggcctcttttgaaagtatccgtgagagcactaccccggcctgccggagccccagtcgacgcacagaaaagcctcggcggcacagacgcgggctttattaacatttggtagtgagcacggcccccagggcatcgcgggggctcgggtcccggtgacgcaacggttaaacctggctcgcgacttagcgcaggcgcctgggggaaagcccggagcctgagggcggggccacggagccacttccggcggctgtgggcggaaaacccaaaacttccgatgggaccaagccttccgtggcttcacacgcaccggaagggaatctgggtcagccctccctccaaaggagacagcacggatcctctttttgcataggcctgagggaagtacttccgcccatattcaagatggctgcccagggcagtgggaacgggtggagtttcgggatgtggagcgaaggtcactgggagggggcggagcttcccctgcccaagttccgatcccaccaggact

SEQ ID NO: 7430 - DNA, 2300 bp, Homo sapien
ggcttatctcctgccaattgagtatcttctttgctttgtttttgctgcagcctcaggcaaacagatggggtggggaggccagggaaacaggctccggagtagggccctcctccctcagggtcaatgcaatggccccagacttcctcacttcttctgtgggacgctgccctatcccccagttctgctcactccagtgtattccgtatctaggctcctcagcagccaactcccaccttcctgactctagctggtgtccactgagggacacactccaagtcagttcccaggtcctcaaataccagctgaatgtctaacttctgggtgtgacattccagcccctagaagcctggcctctgctgctcccctgtccttccatgggtccactcctccttgcgccgggggggatgaccctcacctcaccttccggtcgcagctctagctgcctcctccctgaagccctctctgactgccctgccgattccgggccctcgggagcttccgcgagcagggccgtggcgcaatgcatctctgtgcccggcaccaagaaccggcccgggttatagggggcgccaataaatctttctggaacggagcccccgctctgtccgggtccccgcatgaagcctcagtttccagcgaccgcgctgctgccagcctggctcagccgctccctcccgccccgcgaggtacccgggcggcgctggccccgggccggccacacagtagctgctggaaagggctgacccaaataggagcgagtgaccctctctggggggccgcggcacggtttgcagagcgcgggatcgggctgccggcagcgctgcggtcccaatgcgcgtgctggggacttggacctgggccgcgcagcccaggcccgcgagccgccgcgaccccttccgtctctgtcgctggatgtcaggcagagcctaagtttccctcgtaagacagcggcctcttttgaaagtatccgtgagagcactaccccggcctgccggagccccagtcgacgcacagaaaagcctcggcggcacagacgcgggctttattaacatttggtagtgagcacggcccccagggcatcgcgggggctcgggtcccggtgacgcaacggttaaacctggctcgcgacttagcgcaggcgcctgggggaaagcccggagcctgagggcggggccacggagccacttccggcggctgtgggcggaaaacccaaaacttccgatgggaccaagccttccgtggcttcacacgcaccggaagggaatctgggtcagccctccctccaaaggagacagcacggatcctctttttgcataggcctgagggaagtacttccgcccatattcaagatggctgcccagggcagtgggaacgggtggagtttcgggatgtggagcgaaggtcactgggagggggcggagcttcccctgcccaagttccgatcccaccaggactggaagactcgcgtccagctggagctttgccgcatctgcgttgctgtgcccgcgctcttcgggcgaggaagtcccttctggtggagggagaaaagggttacatgagttagattaccatggcagctcgagccaggctctccacttccgtgagccttcctctaagtgagatcgggggggagataatgaaggccacaactcccaggaggctccacgccgggcggtcagggacgctcgcgaggacgcatgggcccccaggaatgggaactggttagatcccaggaactccgtgccggagacgggaagagaggatgcctagggccctaaatggaaaggccagagctggagacctagcacccagaagatgagaccgcaattcgagaatcaaagggccgggagcgatggtgagcgcctgtaatcccagcactttgggaggttgaagcgggaggatcctttgaggccaggagttccaggctgcagtgagccgtgatcgcaccactgcactccagcctgggcgacagagcgcacaggtgccagcaaggagcacaaataccagcatgcctggtcttccaagaattcggggaacccaggagctttggcctggagtgggatctagactacagatcccagcatgccctgtgagacacacacacacacacacacacacacacacacgcctggagtgggatctagactacagatcccagcatgccctgtgacacacacacacacacacacacacacacacacacacacgcctggagtgggatctagactacagatcccagcatgccctgtgactgacacacacacacacacacacacacacacctggagtgggatctagac

SEQ ID NO: 7431 - DNA, 2300 bp, Homo sapien
cgtgggaggatcacttaagcccagaagttccgggctgcagtgagctgagatcgcacctctgtactccctcctgggtgatagagcgagaccctgtctcaaaacaaaacaaaacaaacagaaaaaaagaaagcaagctatggggtccaatctgagagaatcgagtgtgggtgtttatccgtaagagagcgaggggaaagaggcctcttaagccttcttaatcctgaaaatggggaggaggtcttttaagctgcagtgccagagtgacatgacctagttttctatttttagagatggggtctggctatgttgcccaggctggtcttgaattcctgggctcaagccagcctcctgagttgctgggactacagacatgtgccaccccacccagcttgacctggtttttgtgttcagaagatatctgttgttgttccaggtgccaaggccagtgctgggcacaggggtgctagagcctactgagaaatggacatagaaccccagtgtccatccttccatcttggagcctgtgcttctcaccccacacagccctgctgtctgggaggactgtctgccccttgaggtcatctgcccctggccactgtgccaggacagtcctgctgtgggtacgagccacagggcaagaaagaacacatctgggagctggaaggcctaatcccagggaaagcatgtagcctggggcagggcaccaaggaggcttccagcccccacattctaaggaaagaaacaccaggaaggtgtggccttaggcaggccccttttccttttcggatcactgcctgcctgtcactgatttctgtcctaaccccacactaatagctgctatatatatatatatgtattttaagagctggagtctccctaagtcactcaggctggccttgaacttctgggctcaagcgatcctcctgccttggcctcccaaagtgctgagattacaggtgtgagccaccacgcccggcagcaaccattttttagctttaatgtgcaccagctctgtaatcaagtgcatcctatatgttcctgctaattaactcaacagtcctacaatggtggttattaattgctgttttacgaaagaggaaactggggctctgagagtttggggaccgacccaaagcattcagtgcctgtggatgcaactgggatgcagggagccagtgggctgggggtgaggtgtcccggcaggtggaggtggtggggtacttacctccatgatggctgctgctggttggctgctcctgctggtgactggcgtcccacaggaggcctggggcctggcgatgatgcttgccggagcctgagggcccgtcccctgcggggctggggcccaggcccctctctgcagagctggagtcttcctgctcactcggctcaaactctgggatctggaacatgctctgggctgtgaggacaagatgttacgtagtcaaggcacagctggggccaacggtggccctggaaggcagaggcaggtacccctggcttcctctcccaccgtagcgcccccaggcccgccaggcctcctgggccctcatctgtctgccgggtctggcctggcagggagctgaggctgtcggctcaggacctcagtctcccctcagaaccccggtggacccaggccccgccccgcccgtggtgacggcgcacaggtctcaccccaagcccgatctcgaggcccctgacccgggcctgccgcctccctccagcaccccgggctccgggccctagttgcttgggcaacgggaactgtcagcgacctggcccaatcacctctcggaacgtcactcgggtaggtccagaggcggggtcaacccggcccggccccgcccccccgccggatccaaggctcctcgtccgcatcctttttcctccctccttcggccccggggctcacatcctcgctgcctcacaccttgggcgtgtgtgggagcaggagagggattctctggggtccccatttggaacctggagacccacttctgccaacaagtccttcagcccctctgggccttagtttccccccagtgaagtggggatagtgacagctcccccgggagccagtgaaaactttgtgaagggagtgattactgcgggcgaaggcgcttggcacagccacaactgaagctcagccgtcggatgtgattattgttgctattgttaccgctccgcctggactgggtgcccggtcggaaagtcccgctccccgctcctcctcccaggcgcggaagcttcgcgccgcccgcctcgggggacacctcccgcgccatctcgggggcactgga

SEQ ID NO: 7432 - DNA, 2300 bp, Homo sapien
cactgatttctgtcctaaccccacactaatagctgctatatatatatatatgtattttaagagctggagtctccctaagtcactcaggctggccttgaacttctgggctcaagcgatcctcctgccttggcctcccaaagtgctgagattacaggtgtgagccaccacgcccggcagcaaccattttttagctttaatgtgcaccagctctgtaatcaagtgcatcctatatgttcctgctaattaactcaacagtcctacaatggtggttattaattgctgttttacgaaagaggaaactggggctctgagagtttggggaccgacccaaagcattcagtgcctgtggatgcaactgggatgcagggagccagtgggctgggggtgaggtgtcccggcaggtggaggtggtggggtacttacctccatgatggctgctgctggttggctgctcctgctggtgactggcgtcccacaggaggcctggggcctggcgatgatgcttgccggagcctgagggcccgtcccctgcggggctggggcccaggcccctctctgcagagctggagtcttcctgctcactcggctcaaactctgggatctggaacatgctctgggctgtgaggacaagatgttacgtagtcaaggcacagctggggccaacggtggccctggaaggcagaggcaggtacccctggcttcctctcccaccgtagcgcccccaggcccgccaggcctcctgggccctcatctgtctgccgggtctggcctggcagggagctgaggctgtcggctcaggacctcagtctcccctcagaaccccggtggacccaggccccgccccgcccgtggtgacggcgcacaggtctcaccccaagcccgatctcgaggcccctgacccgggcctgccgcctccctccagcaccccgggctccgggccctagttgcttgggcaacgggaactgtcagcgacctggcccaatcacctctcggaacgtcactcgggtaggtccagaggcggggtcaacccggcccggccccgcccccccgccggatccaaggctcctcgtccgcatcctttttcctccctccttcggccccggggctcacatcctcgctgcctcacaccttgggcgtgtgtgggagcaggagagggattctctggggtccccatttggaacctggagacccacttctgccaacaagtccttcagcccctctgggccttagtttccccccagtgaagtggggatagtgacagctcccccgggagccagtgaaaactttgtgaagggagtgattactgcgggcgaaggcgcttggcacagccacaactgaagctcagccgtcggatgtgattattgttgctattgttaccgctccgcctggactgggtgcccggtcggaaagtcccgctccccgctcctcctcccaggcgcggaagcttcgcgccgcccgcctcgggggacacctcccgcgccatctcgggggcactggagataaggaaaggaacctcctccctggctgggatggctgcccgggcgcgggaggagggccggggacccggtgagggaggaccgtagggcccgtgggggcttcacgcctggcaggcggccggccaggtgagcagggccgcgggcgcgccggggcgaggggcgggcccgcgcgggggattcggggctccgcgggttcaggcccgggggcggggcccgggggccatcttggctatgggcggaagttttcttcagagaccgagggacgggaatccgttgccgcccccggccgggcggcacgaccccgatttgggtataggagagaggagcgtgggaactggcggacccccatacaagtaaaggcgggcggcacggggcacggcccacccggggaccccctggatgcggcacggcccccgcaactcggccgccctcctgccgcctcccgtaaccccgggcgcccgccagcggcgcagctcgcgccaattctcgtacggtttcacgccgggtgcggcgctggactgcggagccagccgggccgctgcgcaatttgcgtagcgaacggcgcccgcgcaggcgcggagggggaggggggcggagcagcgggagccggggagccggagccccgggtccccacgacctgagccggctctcccatcagcggcctgaggacctggcgtccgcctcctccctccccttgaggctggagcgtggacgcggtgggggagggtggggcgggggcagctttcgagaattacgaggacaggaggcagaggccctccccatccgcattattggaggagagag

SEQ ID NO: 7433 - DNA, 2300 bp, Homo sapien
agagctggagtcttcctgctcactcggctcaaactctgggatctggaacatgctctgggctgtgaggacaagatgttacgtagtcaaggcacagctggggccaacggtggccctggaaggcagaggcaggtacccctggcttcctctcccaccgtagcgcccccaggcccgccaggcctcctgggccctcatctgtctgccgggtctggcctggcagggagctgaggctgtcggctcaggacctcagtctcccctcagaaccccggtggacccaggccccgccccgcccgtggtgacggcgcacaggtctcaccccaagcccgatctcgaggcccctgacccgggcctgccgcctccctccagcaccccgggctccgggccctagttgcttgggcaacgggaactgtcagcgacctggcccaatcacctctcggaacgtcactcgggtaggtccagaggcggggtcaacccggcccggccccgcccccccgccggatccaaggctcctcgtccgcatcctttttcctccctccttcggccccggggctcacatcctcgctgcctcacaccttgggcgtgtgtgggagcaggagagggattctctggggtccccatttggaacctggagacccacttctgccaacaagtccttcagcccctctgggccttagtttccccccagtgaagtggggatagtgacagctcccccgggagccagtgaaaactttgtgaagggagtgattactgcgggcgaaggcgcttggcacagccacaactgaagctcagccgtcggatgtgattattgttgctattgttaccgctccgcctggactgggtgcccggtcggaaagtcccgctccccgctcctcctcccaggcgcggaagcttcgcgccgcccgcctcgggggacacctcccgcgccatctcgggggcactggagataaggaaaggaacctcctccctggctgggatggctgcccgggcgcgggaggagggccggggacccggtgagggaggaccgtagggcccgtgggggcttcacgcctggcaggcggccggccaggtgagcagggccgcgggcgcgccggggcgaggggcgggcccgcgcgggggattcggggctccgcgggttcaggcccgggggcggggcccgggggccatcttggctatgggcggaagttttcttcagagaccgagggacgggaatccgttgccgcccccggccgggcggcacgaccccgatttgggtataggagagaggagcgtgggaactggcggacccccatacaagtaaaggcgggcggcacggggcacggcccacccggggaccccctggatgcggcacggcccccgcaactcggccgccctcctgccgcctcccgtaaccccgggcgcccgccagcggcgcagctcgcgccaattctcgtacggtttcacgccgggtgcggcgctggactgcggagccagccgggccgctgcgcaatttgcgtagcgaacggcgcccgcgcaggcgcggagggggaggggggcggagcagcgggagccggggagccggagccccgggtccccacgacctgagccggctctcccatcagcggcctgaggacctggcgtccgcctcctccctccccttgaggctggagcgtggacgcggtgggggagggtggggcgggggcagctttcgagaattacgaggacaggaggcagaggccctccccatccgcattattggaggagagagagcctcccccagcttggggagggggagagcggggcattgggcgcccctcgcagcggccgctgccctgacccgacgggtatcagccggctctccccctccacccaggacgacatgaacgaccgaggccagggagtcctctccttgggcctctgcatccccccatccttggctctggggtaggcccagggaggagacacccccaacccctatccggtctgtcctggagaaaagagactgcccttccatgcccctgagtgaggggcctggggcccaggctgcctgtgttccccaagggcaagggtctctctgttgaggaggaggggcctgtcagccacaacttctttcctcctgagcgccccatctccctctctgcaccctgcaattcccacccctccgtatttatttccctggtcccgccgacagtccctccttgtctgtctccgggattcaggcctccctccctgacatggagagtaacctgtctggcctggtgcctgctgccgggctggtgcctgcgctgccacctgctgtgaccctggggctgacagctgcctacacc

SEQ ID NO: 7434 - DNA, 2300 bp, Homo sapien
ggcggttggcgcggggagtatctcggaagtagaaggagaagagggtggtacgcaaggcggcccagagcagacagagggccaggaacaccgtctgatagctgagacgcttgtgcccatacagaagcaccagccagagctgggcatagacggagaagaagagcagggcatacagggtggtgtaggcagctgtcagccccagggtcacagcaggtggcagcgcaggcaccagcccggcagcaggcaccaggccagacaggttactctccatgtcagggagggaggcctgaatcccggagacagacaaggagggactgtcggcgggaccagggaaataaatacggaggggtgggaattgcagggtgcagagagggagatggggcgctcaggaggaaagaagttgtggctgacaggcccctcctcctcaacagagagacccttgcccttggggaacacaggcagcctgggccccaggcccctcactcaggggcatggaagggcagtctcttttctccaggacagaccggataggggttgggggtgtctcctccctgggcctaccccagagccaaggatggggggatgcagaggcccaaggagaggactccctggcctcggtcgttcatgtcgtcctgggtggagggggagagccggctgatacccgtcgggtcagggcagcggccgctgcgaggggcgcccaatgccccgctctccccctccccaagctgggggaggctctctctcctccaataatgcggatggggagggcctctgcctcctgtcctcgtaattctcgaaagctgcccccgccccaccctcccccaccgcgtccacgctccagcctcaaggggagggaggaggcggacgccaggtcctcaggccgctgatgggagagccggctcaggtcgtggggacccggggctccggctccccggctcccgctgctccgcccccctccccctccgcgcctgcgcgggcgccgttcgctacgcaaattgcgcagcggcccggctggctccgcagtccagcgccgcacccggcgtgaaaccgtacgagaattggcgcgagctgcgccgctggcgggcgcccggggttacgggaggcggcaggagggcggccgagttgcgggggccgtgccgcatccagggggtccccgggtgggccgtgccccgtgccgcccgcctttacttgtatgggggtccgccagttcccacgctcctctctcctatacccaaatcggggtcgtgccgcccggccgggggcggcaacggattcccgtccctcggtctctgaagaaaacttccgcccatagccaagatggcccccgggccccgcccccgggcctgaacccgcggagccccgaatcccccgcgcgggcccgcccctcgccccggcgcgcccgcggccctgctcacctggccggccgcctgccaggcgtgaagcccccacgggccctacggtcctccctcaccgggtccccggccctcctcccgcgcccgggcagccatcccagccagggaggaggttcctttccttatctccagtgcccccgagatggcgcgggaggtgtcccccgaggcgggcggcgcgaagcttccgcgcctgggaggaggagcggggagcgggactttccgaccgggcacccagtccaggcggagcggtaacaatagcaacaataatcacatccgacggctgagcttcagttgtggctgtgccaagcgccttcgcccgcagtaatcactcccttcacaaagttttcactggctcccgggggagctgtcactatccccacttcactggggggaaactaaggcccagaggggctgaaggacttgttggcagaagtgggtctccaggttccaaatggggaccccagagaatccctctcctgctcccacacacgcccaaggtgtgaggcagcgaggatgtgagccccggggccgaaggagggaggaaaaaggatgcggacgaggagccttggatccggcgggggggcggggccgggccgggttgaccccgcctctggacctacccgagtgacgttccgagaggtgattgggccaggtcgctgacagttcccgttgcccaagcaactagggcccggagcccggggtgctggagggaggcggcaggcccgggtcaggggcctcgagatcgggcttggggtgagacctgtgcgccgtcaccacgggcggggcggggcctgggtccaccggggttctgaggggagactgaggtcctgagccgacagcctcagctccctgccaggccagacccggcagacagatgagggcccaggaggc

SEQ ID NO: 7435 - DNA, 2300 bp, Homo sapien
ggccccagtccccctcaccctaggcccctgtgccaagtttgtctgccgcttcttgcccaggatcctgggggtcgtggctaccccctcctctggccggctccttgctgctcctgtcatagtgagcttgtgccgtccccctaggatggggggcatggccctggctgccagatgcccacagcaccctggcatgacctgccacctctgcttccacaccggagccagctacctctcctgtgcctgccactcaataaacagtgtctgcgccccacagttgtgcacctgtctgtcatctgccttgtgttcctatcacttttgcctgtttggcctaaggctgaacagacactagcccttgaagtgggctgctaggctgggcaggggtgacttaccccatcaaggctggtgggctgggagaggaggggcctgcagtttgcaagggaaggagaccacacaggcctttgttctcaaagctctcctggcccagaattgccccactacctccagatccctctccacttgaacagttgctactctttcctcaagacctgcgtcaactgttacctcctttaggaagccttctgtctcctggtcaagggacatggcccctctgctgggccccacagctccacattactgattatgtggccattgaggttctttgttttgttttgttttttgaagcagggtctcactctgtcactcagactggagtgcagtggcacgatcatggcccactgcagcctcaacctaccaggctcaagcaatcctcctgcctcagcctcccgagtagctgggaatacaggcacatgccaccattcctgactaattttttaatttttaattttagaggtggggtttcaccatgttgcccaggctggtgtcgaacccccgggctcaagcaatccacccacctcagcttcccaaagtgctgggattacaggcatgaggtaccatgcctggcagcttctgagtcttaaccccaatggattagactttctggaggccctgtttccctatcaccaccccaacctggtctttaggagtcaggagttagtccagggcttgctggggagttggcgcagtgactgagcagcccccatcttcctaccagggcgtgggtttgcccagatgtacaggtggtcccctagctatgccctcccgttagccctcttctccactgtccttagtagcatagtcactgccctctgcttccatggccctggcaggtctgtctgatggctaggagtcctttgctggagggtctgtcccctgcccacataggtggttgtcccagcttttcagagttcccttggcttatcactgggcctgcttcaaaaccctttacttgggaccatcctgggcaccaggccctcagggcctccagagagggcatctgagactcatagagaatcagcttgaagctggacaatcactttttgttgaaataaaaactgctaacgtttgtggggcactttattgtgtgtgccaggctctgttttgaggatttctaaacactggcctccttaatgcccagaacagcaccccgaagtgatgattaatcatcccttttctgtaagtgggaacagggagactccagagtttggtaacctgttcaggttccctaccagtagcgggtggtcagcctcaaagcccaggctgaaagccatccagcatgagggctgaggaccccagcaggcaccagagggtctttggagaggtcacaggttgtcaagtgggtgagaacagggcggggcaagttcaggaccagccagggcctgggtgttcaggcagtgggagagtggatgctggcaccagtgccatgctgggatctgcaggcagcttcagccacagccttccggggctgatttctgggcatggaagtgagaaccaaaagctggggcagggagcaccctggagggatagccggggagcaggtagagggccaaaacctggagtgggggcaggaggtgctccagcagcaactcccccagaggtgggtcccaacctccacgtcggccaattccaggtggccccaccgggtttcccccacccctttgtcccgcggagcccctccctcatgagtgctgagcccaagggccaggctgtccccaggggcggagagttgcggacccttcccgatccggtaatgggcctgggagatgccagattagcgtggtgcctgtccggagagacgggccagctgatgcccaggtcggggccctgccgctggccacactgggctccggtccaaggctagaaggctggcccctgctgcaacccctctccggctcctctgccaccca

SEQ ID NO: 7436 - DNA, 2300 bp, Homo sapien
tggtgggctgggagaggaggggcctgcagtttgcaagggaaggagaccacacaggcctttgttctcaaagctctcctggcccagaattgccccactacctccagatccctctccacttgaacagttgctactctttcctcaagacctgcgtcaactgttacctcctttaggaagccttctgtctcctggtcaagggacatggcccctctgctgggccccacagctccacattactgattatgtggccattgaggttctttgttttgttttgttttttgaagcagggtctcactctgtcactcagactggagtgcagtggcacgatcatggcccactgcagcctcaacctaccaggctcaagcaatcctcctgcctcagcctcccgagtagctgggaatacaggcacatgccaccattcctgactaattttttaatttttaattttagaggtggggtttcaccatgttgcccaggctggtgtcgaacccccgggctcaagcaatccacccacctcagcttcccaaagtgctgggattacaggcatgaggtaccatgcctggcagcttctgagtcttaaccccaatggattagactttctggaggccctgtttccctatcaccaccccaacctggtctttaggagtcaggagttagtccagggcttgctggggagttggcgcagtgactgagcagcccccatcttcctaccagggcgtgggtttgcccagatgtacaggtggtcccctagctatgccctcccgttagccctcttctccactgtccttagtagcatagtcactgccctctgcttccatggccctggcaggtctgtctgatggctaggagtcctttgctggagggtctgtcccctgcccacataggtggttgtcccagcttttcagagttcccttggcttatcactgggcctgcttcaaaaccctttacttgggaccatcctgggcaccaggccctcagggcctccagagagggcatctgagactcatagagaatcagcttgaagctggacaatcactttttgttgaaataaaaactgctaacgtttgtggggcactttattgtgtgtgccaggctctgttttgaggatttctaaacactggcctccttaatgcccagaacagcaccccgaagtgatgattaatcatcccttttctgtaagtgggaacagggagactccagagtttggtaacctgttcaggttccctaccagtagcgggtggtcagcctcaaagcccaggctgaaagccatccagcatgagggctgaggaccccagcaggcaccagagggtctttggagaggtcacaggttgtcaagtgggtgagaacagggcggggcaagttcaggaccagccagggcctgggtgttcaggcagtgggagagtggatgctggcaccagtgccatgctgggatctgcaggcagcttcagccacagccttccggggctgatttctgggcatggaagtgagaaccaaaagctggggcagggagcaccctggagggatagccggggagcaggtagagggccaaaacctggagtgggggcaggaggtgctccagcagcaactcccccagaggtgggtcccaacctccacgtcggccaattccaggtggccccaccgggtttcccccacccctttgtcccgcggagcccctccctcatgagtgctgagcccaagggccaggctgtccccaggggcggagagttgcggacccttcccgatccggtaatgggcctgggagatgccagattagcgtggtgcctgtccggagagacgggccagctgatgcccaggtcggggccctgccgctggccacactgggctccggtccaaggctagaaggctggcccctgctgcaacccctctccggctcctctgccacccacctcccggggctggccggctgtggggagccaggcggccgcaggtaaacggcttggggcggcgccggcggcgagggcgctgcacggagggaagcgcggcgccggaggggttaaccgcgggaggaggggggcttctgccggcgggaggggggtcccagccccggcggccgcccgctccgcccctgccgcctccgcggcccagtcggcaccggcgaggccgtgctggaacccgggcctcagccgcagccgcagcggggccgacagtaagtgcggtgcgggctccggtgcgcgggcaggactcaggggcagggacgccccaggggcgactggccgggcggggtgcccacctctcgcgcgtgggcgcctccgggagtggtgtggccgccggtcccgccgccc

SEQ ID NO: 7437 - DNA, 2300 bp, Homo sapien
ccctttacttgggaccatcctgggcaccaggccctcagggcctccagagagggcatctgagactcatagagaatcagcttgaagctggacaatcactttttgttgaaataaaaactgctaacgtttgtggggcactttattgtgtgtgccaggctctgttttgaggatttctaaacactggcctccttaatgcccagaacagcaccccgaagtgatgattaatcatcccttttctgtaagtgggaacagggagactccagagtttggtaacctgttcaggttccctaccagtagcgggtggtcagcctcaaagcccaggctgaaagccatccagcatgagggctgaggaccccagcaggcaccagagggtctttggagaggtcacaggttgtcaagtgggtgagaacagggcggggcaagttcaggaccagccagggcctgggtgttcaggcagtgggagagtggatgctggcaccagtgccatgctgggatctgcaggcagcttcagccacagccttccggggctgatttctgggcatggaagtgagaaccaaaagctggggcagggagcaccctggagggatagccggggagcaggtagagggccaaaacctggagtgggggcaggaggtgctccagcagcaactcccccagaggtgggtcccaacctccacgtcggccaattccaggtggccccaccgggtttcccccacccctttgtcccgcggagcccctccctcatgagtgctgagcccaagggccaggctgtccccaggggcggagagttgcggacccttcccgatccggtaatgggcctgggagatgccagattagcgtggtgcctgtccggagagacgggccagctgatgcccaggtcggggccctgccgctggccacactgggctccggtccaaggctagaaggctggcccctgctgcaacccctctccggctcctctgccacccacctcccggggctggccggctgtggggagccaggcggccgcaggtaaacggcttggggcggcgccggcggcgagggcgctgcacggagggaagcgcggcgccggaggggttaaccgcgggaggaggggggcttctgccggcgggaggggggtcccagccccggcggccgcccgctccgcccctgccgcctccgcggcccagtcggcaccggcgaggccgtgctggaacccgggcctcagccgcagccgcagcggggccgacagtaagtgcggtgcgggctccggtgcgcgggcaggactcaggggcagggacgccccaggggcgactggccgggcggggtgcccacctctcgcgcgtgggcgcctccgggagtggtgtggccgccggtcccgccgcccgccacgctccgaggcgtcgctgtgcggacgcgggggaggcggtgggagcgagctgcgggcgctgcgcggtggccctgctgtctggcgtgtgcacgctagtgtccacacacgtgtgcgtgggctctgggtgccctggcgcggccggcacgcccatgggggccggggatgccggggcgtctgcggagagtgcaggtggggtgcgtgcgtgcagcggggcggcgcggcgctgcagcctcgggatggagcgtgggcgcgcgggtctttgtgcccgcgcttggcggcgcgtgccggggcgtgtgtgcgcgtgggcgccgccgcccgctgtctcggactgacagctgtctcgggggctgtcgccccggtgtggcctttgcggacccccgccccgctttttccgggaactgggcgtccccagcacccctcctcgcctgggtgcggcggccgggacccgcccctgggttcctcgaaagcccggcggggcgcgggggcaccctggagggccagccaggaagcagggcgaggcgagaggggacggagaagccgcggagatgctgtcacagccgcagcgggcgagcagggacccaccattcccctgtccccgccttgcgctgtccggcctctcctccgggtttcccttcggacgcctccgagccccctcagcctcctcctcgagggccagctccccgcacccccaccaagctccacacatttcctcgctcgccccgcttccccctaggcaggcttaggctctctttcggcctcccactcgccttcctttcccttctcggtgccctcctctctttcctcacccggtagtcccagacaggggctgagggccgggcagcggaggtaaggggaaggctggagataggagggggactgggtgtgtccagccagagggatgtctgtggacagtgcagctgggggctttatggat

SEQ ID NO: 7438 - DNA, 2300 bp, Homo sapien
cttctcccagaaaagtcttcctcaatgtcatcactcaatattgcgaagcacatgccccatcgagcctactgggcagagcagcagagcagggttggaggggctggggagactgggcgtttcggtggggtaggggataggcaaattgggggttgataggatatgaaagttgggggtggttggcagggtggaggggcaggcaggctggttgggggtttgggggccacagggaggaggtgggggcatttcagctgtgggcagagatgaagtacctggacgcctaagcctcttgctgcttctccagctgccactgcccctgatggaactcatggagaatgaagctctggaaatcctcaccaaagccctccggagtaagctccccgccaacccccaagaactcccacgacagattctggtggattttgcagggctggggcccaggggggtggggtttcagggtgccttatgtcttgtcagatgcccttggcactcacaagtattccaagggccccataaaagttaaaagctgagggactgggcacaggaagacccagtgggggacatgtggtgatgggcagaggcctgggctccaggctgagtgcagcccctctccagctgagggaggcttttctgtggctgtttctccacctgcacagtgggatgaccgccttggtgtggcctcgactgcctctggttggggagttgtgaggagcctttggacagtggattatgtgggtgaacttttgctgctgtggtaggaaagcccagcggtgataaagggccagctgatggcttagagtgggtggctggtccagaaggtgggcaaactgctcgctaccaccgccctagttcaggcctgcaacctcttccctagccttgacctcatccatcctccaccttaacactcagcacccttagagatgcaaagttccccaggctaacacagacctgagtgccctgcgctactgctacctcgaatcatctgcggttcctcgaatcacacatgcggcgccccctggtggggagacctttcggttgctcactgccctgagccgagctctgccctcctcctaggctaccagttagggatcggcagggaccacttcctgactaaggagctgcagcgatacatcgaagggctcaagaagcgccggagcaagaggctgtacgtgaattaaaaacgccaccttgggctcgagcagcgacccgaaccagccccgtgccagcccggtccccagacccaagcctgaccccatccgagtggaatttgagtcctaaagaaataaaagagtcgatgcatggtccgtgagtcagtgcaggacagcccgcgtgaggcggacgcacgtggccccgcccttccccgtgaccttcattcggtcaccgcagtgaccttcattcggtcaccgcagtgaccttgagctttctccgtccgggccctatcggccctaccttccgggactcgcaatccaggacttattgcatgttttaagtcggcttcacccaccccgagttccgcagctctgtggggctactgggtctacggttcgagtgctcagttggtgtcgctttgggggaagggggtagggggaacggggcagcacctccctcctcgcgacggcgcgctaggctccgcccctcaagcataggtagcaggtccagcctctccgctcgtcccgcccttgcgttttcatctgtaagtggtctcttggctccgcgactgcagcctgcaccgcctcgcccactcctctcgcgcgcagcaagccccgcctcctccgttacgaaagagcgcttctggccccacttgctctcggctctattgtccccgccctccgcgtctccggccccgcccctcccaggggccgcgtacgcatgtgcgccgcagtggctcggcgggctgcggggcgggacctgcacgaaggcccgcccactggcgctgccggctccgccccgactcgtccgggcgcgcaggcgccgcccgccccgctggtctgattagcataggaccccgggccccgccccctgctttgcatgcgcacggccggccccacccccgctgtcagctggaggaagcggagtaggaagcggccgcgatgtccttttgtgtcctacaagcagccggcggcgccgccgagtgaggggacgcggcgcggtggggcggcgcggcccgaggaggcggcggaggaggggccgcccgcggcccccggctcactccggcactccgggccgctcggcccccatgcctgcccgaccgcgctgccggagccccaggtccgggggcggaggggagcgctgccgcgggggtg

SEQ ID NO: 7439 - DNA, 2300 bp, Homo sapien
ggatgaccgccttggtgtggcctcgactgcctctggttggggagttgtgaggagcctttggacagtggattatgtgggtgaacttttgctgctgtggtaggaaagcccagcggtgataaagggccagctgatggcttagagtgggtggctggtccagaaggtgggcaaactgctcgctaccaccgccctagttcaggcctgcaacctcttccctagccttgacctcatccatcctccaccttaacactcagcacccttagagatgcaaagttccccaggctaacacagacctgagtgccctgcgctactgctacctcgaatcatctgcggttcctcgaatcacacatgcggcgccccctggtggggagacctttcggttgctcactgccctgagccgagctctgccctcctcctaggctaccagttagggatcggcagggaccacttcctgactaaggagctgcagcgatacatcgaagggctcaagaagcgccggagcaagaggctgtacgtgaattaaaaacgccaccttgggctcgagcagcgacccgaaccagccccgtgccagcccggtccccagacccaagcctgaccccatccgagtggaatttgagtcctaaagaaataaaagagtcgatgcatggtccgtgagtcagtgcaggacagcccgcgtgaggcggacgcacgtggccccgcccttccccgtgaccttcattcggtcaccgcagtgaccttcattcggtcaccgcagtgaccttgagctttctccgtccgggccctatcggccctaccttccgggactcgcaatccaggacttattgcatgttttaagtcggcttcacccaccccgagttccgcagctctgtggggctactgggtctacggttcgagtgctcagttggtgtcgctttgggggaagggggtagggggaacggggcagcacctccctcctcgcgacggcgcgctaggctccgcccctcaagcataggtagcaggtccagcctctccgctcgtcccgcccttgcgttttcatctgtaagtggtctcttggctccgcgactgcagcctgcaccgcctcgcccactcctctcgcgcgcagcaagccccgcctcctccgttacgaaagagcgcttctggccccacttgctctcggctctattgtccccgccctccgcgtctccggccccgcccctcccaggggccgcgtacgcatgtgcgccgcagtggctcggcgggctgcggggcgggacctgcacgaaggcccgcccactggcgctgccggctccgccccgactcgtccgggcgcgcaggcgccgcccgccccgctggtctgattagcataggaccccgggccccgccccctgctttgcatgcgcacggccggccccacccccgctgtcagctggaggaagcggagtaggaagcggccgcgatgtccttttgtgtcctacaagcagccggcggcgccgccgagtgaggggacgcggcgcggtggggcggcgcggcccgaggaggcggcggaggaggggccgcccgcggcccccggctcactccggcactccgggccgctcggcccccatgcctgcccgaccgcgctgccggagccccaggtccgggggcggaggggagcgctgccgcgggggtgggcgggcggggcgcgggggccatgtgcgagcgcggcagggaggcgggcggggcgggctgcaggcggggtccgactctggggccagtccgggccacggttgggacccagtcgagggtcggactggtcagggttcaggcgggatccggcgtccgagtcctggtgggccggcctggggcaggatctggctctggctgcgggtcctgactcgggtcagggttgggcctccgatccagcccgctccggggcagggttcaatcccgcatttgccgaagtccctggggctggccggggtggaagacggggagggctctatgtctgggaaggggctctgaagaccacgtgggggcgctcgaaggggcctggggccaccctcctctctgggtcaaaggtcatcgcaccggcaggggagaacttcctcctccttggctctccccacttacttcctgataacctggtagaggtctcccgcgggcggggagggggaggcgtagcaactttaggcaacttcccaaaggtgtgcgcaggttgggggcgggacgcggcgccccgggaggtggcggcctctgcgacagcgggagtataagagtggacctgcaggctggtcgcgaggaggtggagcggcgcccgccgtgtgcctgggaccggcatgctgggg

SEQ ID NO: 7440 - DNA, 2300 bp, Homo sapien
acctccctcctcgcgacggcgcgctaggctccgcccctcaagcataggtagcaggtccagcctctccgctcgtcccgcccttgcgttttcatctgtaagtggtctcttggctccgcgactgcagcctgcaccgcctcgcccactcctctcgcgcgcagcaagccccgcctcctccgttacgaaagagcgcttctggccccacttgctctcggctctattgtccccgccctccgcgtctccggccccgcccctcccaggggccgcgtacgcatgtgcgccgcagtggctcggcgggctgcggggcgggacctgcacgaaggcccgcccactggcgctgccggctccgccccgactcgtccgggcgcgcaggcgccgcccgccccgctggtctgattagcataggaccccgggccccgccccctgctttgcatgcgcacggccggccccacccccgctgtcagctggaggaagcggagtaggaagcggccgcgatgtccttttgtgtcctacaagcagccggcggcgccgccgagtgaggggacgcggcgcggtggggcggcgcggcccgaggaggcggcggaggaggggccgcccgcggcccccggctcactccggcactccgggccgctcggcccccatgcctgcccgaccgcgctgccggagccccaggtccgggggcggaggggagcgctgccgcgggggtgggcgggcggggcgcgggggccatgtgcgagcgcggcagggaggcgggcggggcgggctgcaggcggggtccgactctggggccagtccgggccacggttgggacccagtcgagggtcggactggtcagggttcaggcgggatccggcgtccgagtcctggtgggccggcctggggcaggatctggctctggctgcgggtcctgactcgggtcagggttgggcctccgatccagcccgctccggggcagggttcaatcccgcatttgccgaagtccctggggctggccggggtggaagacggggagggctctatgtctgggaaggggctctgaagaccacgtgggggcgctcgaaggggcctggggccaccctcctctctgggtcaaaggtcatcgcaccggcaggggagaacttcctcctccttggctctccccacttacttcctgataacctggtagaggtctcccgcgggcggggagggggaggcgtagcaactttaggcaacttcccaaaggtgtgcgcaggttgggggcgggacgcggcgccccgggaggtggcggcctctgcgacagcgggagtataagagtggacctgcaggctggtcgcgaggaggtggagcggcgcccgccgtgtgcctgggaccggcatgctggggcaggagggcagccgcgtgtcaggtgtgaaaagctctggaggtgttttcatgagtccgtgcctgtgcgtgtggatgtggggagacctagtgagagtgtgtgtgatcatgagccttgactgagttcgtggatggggtgtgcgctccaggagaagtgtgtgagcacaagtgtgagcaggagtgagcacgggtttgggaaggccggtgcaagtgtgaaagccctcagcagagagcgagcctgcgtgggcttgtggggctcctgagcaccccggtgagtggagtgtgtgaactcggtgtgagcacgtccactggccttgggtctgctctccaatgcagaatacccagatgagggcagggtctcagaggtccccccaacatctggagaaaactgggaagtatcctgctcctggctagggattccaggtggggttgaaggttgcctgggggctacggttaccctgctccctggcctgggtgggagtaggggctttctaagcctcccccaggttcccaagggggagacctgctgtcagttactggccctgaagactctgtttccatggcaacagctaggagggggcagtgttcctgggcagtccttccttggactctgccccccttcttccccacttgctgggcttggaagcctggccctaggcccgaggttgggcaacccgtgtggcagggtgtctcccatcccccataccagtgctttcctgcgaacctatgggtctctccgtgcaggtgaccagcgccatgtccagccaggtggtgggcattgagcctctctacatcaaggcagagccggccagccctgacagtccaaagggttcctcggagacagagaccgagcctcctgtggccctggcccctggtccagctcccactcgctgcctcccaggccacaaggaagaggaggatggggagggggctgggcctggcga

SEQ ID NO: 7441 - DNA, 2300 bp, Homo sapien
actcctcacctcgtgatctgcctgcctcggcctcccaaagtgctgggattataggcgtgagccactgcgcctggcctttttttttttttggtacagagtttcgctctggttgcccaggctggagtgcaatggcacgatcttggctcactgcagcctctgcctcccgggttcaagcgattctcctgcctcagcctccggagcagctgggattacagacatgcaccaccatgtccggctaatttttttttttcgagatggagtctcactgtgtcacccaggctggagtgcagtggcacaatctcggctcactgcaacctctgcctcccgggttcaagcgattctcctgcctcagcctcctgagtagctgggactacaggtgcctgccaccacacccagctaatttttgtacttttagtagagacggggttttaccatgttggccaggctggtcttgaacttctgacctcaggtgatccacccacctcggtctcccaaagtgctgggattacaggcgtgagccaccgtgcccggccgtggtgtcttgagctgagtgcagaagcgcaaatagggggtaggagaaaatgcaccgcgaggagaaatgtgctgcgggcctgctgtctagctgtgtcatttggtcgttgcggggccctgtgaggccgggagggctgccagcacccaccatgtgccaggcctcgttgctagtgctggggccagttcctgccccggtggagctgccactgaagggggaggcgtaataaacaagataggtgagtgcatatgcagcgtggtctgttgtgctgagggctgaagagaaaccagaagcagggctcagaggccaggaggactctgcaaagggatttggcattatcacagggtggccagggaagatcttcaaggtgacagtgagcagagggaggtgagggagcctgtgtggacttcaggactagagctccaggcagggcctgtttgaggaacatggaggaggcgagagcaaggagtagaggtcaaaaggaggcaagaagcaggggcgtaggcctaggaggacataggttcgctttggcttggactcagagaagggaaatccccagagggttttgagaagaggaggtacaggatgtaatggaggcttaataggaccctcttggctgctgagtcgagaacagactggagcaagcagggacagccaagcgaggggcgaggtgacagtgactatcaggtcaagggtggaagtagttgccaggggcaggaggcggattctggaccttggaggaggtaaagcccaccagaatgtgtcggtggcttggatgtggggtgtgagaggaaccagagattctgcctaggtttcttcttgggcaagtgaacacgtggagtccacgtaggctgtgttcggtccgagatgccttctagacatgcaggatgtcaaggaggcagctggagagatgggtctggagctcacagcaagtccaggctagaggtagaaacgtgagagccccacggctggggaagattgccatgggattggagatgagctccaaggacagccctggcagtctggatggaagagcttgggaagatgctcagaaaccacaaagtggctggtgcggtgggaggaaaaccagagtgtatgctgtcctagaagcaaaagaagaaagtgtttcagtgtttctaggagcaggaagtgatcaacagccttagatcctccttttaggccaagtaacatgaggactaagaattgaccactggatttagcaatgcagaggtccttgtggcccttgatgtcggcagatgagggcagtgtggtccagagatgaggcttggggctgagatgcagccccgctgcctggtccagctcctccctcatccaggcagggctcccccgcccagcagccactcccctccctgcctgctcatggccccctgctctccctttcctccccatacccccagacctgtgcttgcccggggagagtcagggctctcctgtcagctgggtcccctcccagccccgggaggccgccactggagccctgcctcttcctggcagggagcatcgagtacagctgtccggcctccaacgagtgtgagatcaccaagcggagacgcaaggcctgccaggcctgccgcttcaccaagtgcctgcgggtgggcatgctcaaggagggtgagcgctgggcaggggctgggcgagggctgggggagtcggggacccgggccaggtgggggtgaggcctgggagttctggtgagtggactcggggaggacagctctggagagcaagccccaccctgcccacagcacca

SEQ ID NO: 7442 - DNA, 2300 bp, Homo sapien
caggacctgcctagcatggggtcagccccaagggctggggcggagctggggtctgggcagtgccacagcctgctggcagggccagggcaatgccatcagcccctgggaacaggccccacgccctctcctccccctcctagggggtgtcagaagctgggaacgtgtgtccaggctctgggcacagtgctgccccttgcaagccataacgtgcccccagagtgtagggggccttgcggaagccatagggggctgcacgggatgcgtgggaggcagaaacctatctcagggagggaaggggatggaggccagagtctcccagtgggtgatgcttttgctgctgcttaatcctaccccctcttcaaagcagagtgggacttggagagcaaaggcccatgcccccttcgctcctcctctcatcatttgcattgggcattagtgtccccccttgaagcaataactccaagcagactccagcccctggacccctggggtggccagggcttccccatcagctcccaacgagcctcctcagggggtaggagagcactgcctctatgccctgcagagcaataacactatatttatttttgggtttggccagggaggcgcagggacatggggcaagccagggcccagagcccttgactgtacagagactctattttaatgtatatttgctgcaaagagaaaccgcttttggttttaaacctttaatgagaaaaaaatatataataccgagctcaaaaacactgtgtttggtgtcattgggtcaagggttggggatacacacggcagaattcggaaacagggtatagatcaacaaaaatacacagtcataacaagaaaaactggcgcctggcacaatcaactctcagtttcctcttcactcagcagcatgttggggatcccgcggctgatggggaacatacgtccagattccgggcactgcagggtgccctctatcacttccacctgcgggcagggagggacagagctgagcactggcagcctcagtgcgggaggcaggtggcccgggaagcaagtgatgggccgcttctcacctccagcagcaggtggtgcatggtcctcagaaactcctcattctcctcatatccctcaaccggccctttcggcacctggatcagacgcaactgtgggcaagaggccaaaattatctccgggcatcccgaactcccgcctcagcccggctgaggtgtgcccgccccgcattccccgggatatgctggggcggggtaaggatcctcacgttatcggccgcctccaggaacgccgaccactccactttaggtatcatacgcgccacgaagttggggttgaattccacagggcagatacggacctcggtggcctgcagggcggaggagtttaggcaagcactggaccccggcccaccatcccgcccgaaaagggaagactgccgccggcgggtacctggaggcgcagggggaagccacgggaccccaccccccgcacatgcgagctcagcagattgtgggtaagcagtttcatgtcgccgcacaaactctcgccaggccggaaccggaaaaaggtcgtcctccgctgcctcacttccggggatgctcctctcgatgctattggatagccaggagaaccggaagtggcgaacttgctggaacttctcgtgtttgtgggagctgaggtaggtaggtgaaagacctgtcgggtcacgcgccgctaccggaagcgtctcagcaggaggttcctacggcgcacgcccagcttttttttgccacaaattcttcgtaagatgcaaatcatatgcaaaatagctgcaatgcaggagctctcgttgaatgcaaaataaacacattttactcctacacaggcgcctaacaccgtcgtcctctgtatcccactttcggttaaggggcagaaataccgccctatctgtaaattaggcccatggaagccgagccgcacctcattcctatatgcaaattagctgctccagtgccgaaagctccgccccatttgtagttgcgtcggctgtccagcacccagtgcaaacgaggcgtgggtcccggaagctctgttctgcgggtggccgctcgcgcctgcgcagtggaggcggcccaggcccgccttccgcagggtgtcgccgctgtgccgctagcggtgccccgcctgctgcggtggcaccagccaggaggcggagtggaagtggccgtggggcgggtatgggactagctggcgtgtgcgccctgagacgctcagcgggctatatactcgtcggtggggccggcggtcagtctgcggca

SEQ ID NO: 7443 - DNA, 2300 bp, Homo sapien
ttggccagggaggcgcagggacatggggcaagccagggcccagagcccttgactgtacagagactctattttaatgtatatttgctgcaaagagaaaccgcttttggttttaaacctttaatgagaaaaaaatatataataccgagctcaaaaacactgtgtttggtgtcattgggtcaagggttggggatacacacggcagaattcggaaacagggtatagatcaacaaaaatacacagtcataacaagaaaaactggcgcctggcacaatcaactctcagtttcctcttcactcagcagcatgttggggatcccgcggctgatggggaacatacgtccagattccgggcactgcagggtgccctctatcacttccacctgcgggcagggagggacagagctgagcactggcagcctcagtgcgggaggcaggtggcccgggaagcaagtgatgggccgcttctcacctccagcagcaggtggtgcatggtcctcagaaactcctcattctcctcatatccctcaaccggccctttcggcacctggatcagacgcaactgtgggcaagaggccaaaattatctccgggcatcccgaactcccgcctcagcccggctgaggtgtgcccgccccgcattccccgggatatgctggggcggggtaaggatcctcacgttatcggccgcctccaggaacgccgaccactccactttaggtatcatacgcgccacgaagttggggttgaattccacagggcagatacggacctcggtggcctgcagggcggaggagtttaggcaagcactggaccccggcccaccatcccgcccgaaaagggaagactgccgccggcgggtacctggaggcgcagggggaagccacgggaccccaccccccgcacatgcgagctcagcagattgtgggtaagcagtttcatgtcgccgcacaaactctcgccaggccggaaccggaaaaaggtcgtcctccgctgcctcacttccggggatgctcctctcgatgctattggatagccaggagaaccggaagtggcgaacttgctggaacttctcgtgtttgtgggagctgaggtaggtaggtgaaagacctgtcgggtcacgcgccgctaccggaagcgtctcagcaggaggttcctacggcgcacgcccagcttttttttgccacaaattcttcgtaagatgcaaatcatatgcaaaatagctgcaatgcaggagctctcgttgaatgcaaaataaacacattttactcctacacaggcgcctaacaccgtcgtcctctgtatcccactttcggttaaggggcagaaataccgccctatctgtaaattaggcccatggaagccgagccgcacctcattcctatatgcaaattagctgctccagtgccgaaagctccgccccatttgtagttgcgtcggctgtccagcacccagtgcaaacgaggcgtgggtcccggaagctctgttctgcgggtggccgctcgcgcctgcgcagtggaggcggcccaggcccgccttccgcagggtgtcgccgctgtgccgctagcggtgccccgcctgctgcggtggcaccagccaggaggcggagtggaagtggccgtggggcgggtatgggactagctggcgtgtgcgccctgagacgctcagcgggctatatactcgtcggtggggccggcggtcagtctgcggcagcggcagcaagacggtacagtgaaggagagtgggcgtctggcggggtccgcagtttcagcagagccgctgcagccatggccccaatcaaggtgaccgctggcccggccgggcctgacatcccccactacccccatggcaatccccgtcccgctagtctgagagtatcgctttatttcctgcctgccagacccctcccctccgcccgcccggctcatcccttcagaaggccctcgtggctgcccacctttctcgccaatcgtgggggcctcacctcccgggacagtcccgaggcattgtgttttttgttttttgtttttttttgagacggagtctttctgtgtcgcccaggctggagtgcagtgacgcaatctctgctcactgcagcctccgcctcccgggttcaagcgattctactgcctcagcctcctgagtagctgggactacagatgcgagccaccacgcccagctattgtatttttagtagagacgggatttcaccccgttgttcagattggtctcgaactcctgacctcaggtgaaccccccccgcccccccccgcctcggcttcccgaagtgctaggattacaggtg

SEQ ID NO: 7444 - DNA, 2300 bp, Homo sapien
agcctggcagctgtgcctgcaggaaccggggctgaaacccagcaggatactccagccctgtcagtttccaagggccctccctgcccgctcccactgggttaccccatatcctccaagtttcaaggtggccctgctcctcttaaggggccattggtgacaacagagaaagggagggaaggtttccccatgtgtcgcaaagggttgcataacatgctgtctaggttacaggaaaggagtggaataaaatggacaggggctagagggctgtatttgggggtgaggaggagtccctgacaacatggagggagaggatcttggccaggtctgagggtcccaccctcaggaggaggaagaggaagggcagcggcaggtggaacgttgggggagggtgtccaggcccctacacccaggaggtgtagaacaaaagaaggaatcttttgaagggggaaggatccatccccagagtacttgagggcttcatgggaccagagtgggtagggagagagagtcagaggtgagggcctctgaggagcccaaaggttgagagcaggatgaagtagaaagggaatggggtctcacaaggtttgggaggagaagggggaaggtccaaggccctggggacggttccaggaagtgagtgaaagacagaaaggtgggaattcgccatggggggaggggaggtcatggagtgggatggggtaagcccccgcgggggcgctaagggacagctgtttcagaagataggggaaatcaggccgggagtggtgtctcacacctgtaatcctagcacttcgggaagccgaggcgggggggggcggggggggttcacctgaggtcaggagttcgagaccaatctgaacaacggggtgaaatcccgtctctactaaaaatacaatagctgggcgtggtggctcgcatctgtagtcccagctactcaggaggctgaggcagtagaatcgcttgaacccgggaggcggaggctgcagtgagcagagattgcgtcactgcactccagcctgggcgacacagaaagactccgtctcaaaaaaaaacaaaaaacaaaaaacacaatgcctcgggactgtcccgggaggtgaggcccccacgattggcgagaaaggtgggcagccacgagggccttctgaagggatgagccgggcgggcggaggggaggggtctggcaggcaggaaataaagcgatactctcagactagcgggacggggattgccatgggggtagtgggggatgtcaggcccggccgggccagcggtcaccttgattggggccatggctgcagcggctctgctgaaactgcggaccccgccagacgcccactctccttcactgtaccgtcttgctgccgctgccgcagactgaccgccggccccaccgacgagtatatagcccgctgagcgtctcagggcgcacacgccagctagtcccatacccgccccacggccacttccactccgcctcctggctggtgccaccgcagcaggcggggcaccgctagcggcacagcggcgacaccctgcggaaggcgggcctgggccgcctccactgcgcaggcgcgagcggccacccgcagaacagagcttccgggacccacgcctcgtttgcactgggtgctggacagccgacgcaactacaaatggggcggagctttcggcactggagcagctaatttgcatataggaatgaggtgcggctcggcttccatgggcctaatttacagatagggcggtatttctgccccttaaccgaaagtgggatacagaggacgacggtgttaggcgcctgtgtaggagtaaaatgtgtttattttgcattcaacgagagctcctgcattgcagctattttgcatatgatttgcatcttacgaagaatttgtggcaaaaaaaagctgggcgtgcgccgtaggaacctcctgctgagacgcttccggtagcggcgcgtgacccgacaggtctttcacctacctacctcagctcccacaaacacgagaagttccagcaagttcgccacttccggttctcctggctatccaatagcatcgagaggagcatccccggaagtgaggcagcggaggacgacctttttccggttccggcctggcgagagtttgtgcggcgacatgaaactgcttacccacaatctgctgagctcgcatgtgcggggggtggggtcccgtggcttccccctgcgcctccaggtacccgccggcggcagtcttcccttttcgggcgggatggtgggccggggtccagtgcttgcctaaactcctccgccctgcaggcca

SEQ ID NO: 7445 - DNA, 2300 bp, Homo sapien
aggagaggcaggcagtttaccagggcagctcgaggtgcagtcagcctccttccctgcccccacctgggacccctgaaggggtggcaggttgtgggagagaaccacagtgacagaggttggtgggcagcacgactcgggtaggctgagcacctgcaaccctgggcagggaggctggctcccctcctactgagtgtctgttctcacagacgtgaccacaagcacccagcccctccaccttcagcaagcagctccctggatgcaccctccctcccaacacatctccacctccacctcctgggcattgctgtcatcatgggtcctgctccctgctgcccatctggtgcctctcccagcctcccagcttgggggctgcacacggtagcccatggccaaggtgcctgtagggtggaaggcaagctgctcatcagcttcagagagcccactgacctccaggcatcctctcttgtccccaacattccccccctactcctgctacccaccttgctgcggcagcatgggattgtcccaccctccacccctagggctatggggctcacccctagggctatgggcctccctccgcctcccacttgaggcgccactcccactgcctcaagggtcatttgctctatgaggccctgctttgaccttctccctgacctctcaagagtgtggcctgcctgagtcagcagtgggggctgacccctggggaccactacgcaggaagtgcctgggagccaggtattgatgtggttcatggcagggcagctccacgcggtgatggaatgcggactccctgtaggtggctgagaggcagcagcagtccacacctcaccaattcttgtgagggctgttaccacacctggggtgggcaggcaggcagcatcgcgcagggcacagaggccccctagactccacgcagtggggcctcaccatcacaggcgtggcttccctgcaccaaggggcagaggcccaggagcagggcctgccgtggcaatggcccccatccccacaccctgctggtgtccccacttgaggcccctcacacccagccaccactggtcaggcctcaccagcatcttctcccctccacagctcacctagactcttcccccagggagccctcctggaatgagcaagtgctgtgccagagcccctctccctgtccatcagatggtcctaaagtgacctgagctcttcctgggatgagggtgtgcccaggagggggtcaagtctgaaaggatggtggggctgggccccggcaggaatgctgggagccaagcttcccgccatggggtttccagactaaatggcatcaggcagcacccagagagcaggtacaaaggccacactgtgcgccacatgccatcggccaggcctcgccctctgtgctgcctctgtggggagcgcttcttcccttcctcttcagattgctggctccttctcagtgctcagtaacacctgcctcaaggctgggcacagtggctcacacctgtaatcccagcactttggggggtggaggcgggtgatcacctgaggtcaggagttcgagaccagcctggccaacatggtgaaaccccgtctctaccaaaaatacaaaaacttagtcgggcgtggtggcagacacctgtaatcccatctactggggagtctgaggcaggaaaatcgcttgaacctgggaggcagaggttgtggtgagccgagatcatgccactgcactccagcctaggggacagagtgaaactgtctcaaaaaaaaaaaaaaaaaaaaacttcccttgaaaggccctccctagctcccccttaattaagcaggaccccctacattctccctttcagcccatctgcgccctcaccattctcacccagtctgtgatgatgccagaatgcctggcgctcagcgaaacagccattcataaccaaggagatggccgcaaaccacaagtgtttattgcagaaatctggccaacattccaattgcagggccccagcacagggctgggcaggtgagatagggaggggtggaggaagtaatctggcccagggcctcagagctgtgagatgatattgggtgccaggctgcaggtgaggcctgtgccatctggttccacattcagggccttcactatgccatcctgtaccaccatggagaacctgccggaaagaggggcccagccagctgcatcagcctgggcttggaggctgggcatggagacaggcagtgaacagccaggggcccaagagaactccagagaggactccccccacagaggactctcccccacagaggactcaccacca

SEQ ID NO: 7446 - DNA, 2300 bp, Homo sapien
caaaaaacaaaaaaaaactaagatgtcatcgattataaaaatgtcactaagaaaagagaatgctgccagttaacgatgtcccaaggttctttcatcactagaatttttcttttgtatttctcgaaagagctctgtttcacttaaatgtagattcttatcatatataattctcatgcacacataaaaaggataatagaagcaaaataaattggttaccatgttcagaaaactccttcacatttagagtccaacttgtttgaatcatttttggtctgagagtcgtgatgtctgtgtctgcctgccacctccttctctgagtccttgagagttctacggagagcagtactgctccaaacattccataaaacagccaggcgctcttaagccagctttacaattgtgcagatgaagtggagccgagttttcactctgctctaggagtgtcactgacaggccgggcgtggtggctcacacctgtaatcccagcactttcagaggccgaggtgggtggattgcctgaggtcaggagttcgagaccagcctggccaacatggtgaaaccctgtctctactaaaaacacaaaaaagcatctgggcgtggtggcaggtgcctataatcccagctactcaggtggctgaggcaggagaattgcttgaacccgggagacggaggttgcagtgacccgaaattgcaccattacactccagcctaggcgacagacacagcgagactccgtctcaccaaaaaaaaaaaaaaaaaaaaaaagggagtgtcactgacaagcctggttcccttcccctggggtttcccaccatttgagtcccagggctaaaaagggttctgcttgcctctaggatttcttccaagctgctgacactcttctgaaggatttgatgctggtgcttttcaggtgtgggtcctgacagtgatgttgggacggcagctagccagacagcaactgtaccatgtaaactcacttcagaggtgtagaatgggggctgcgtgaggcagctcatgccgtcatctcagcccttcaggaggccaaggcgggaggatcacttgagcccaggagttcgagaccagcccgggcaacacagcaagactctgtctgtacaaaaaacaagcaaaataattagccaggtgtggtggcacacacccgtagtcccagttactcagaaggctgaagtaggagaattgcttaagcccaggaggttgaagttgcagcgagttgtgatcttgcaactgcactccagactaggtcacagattcagactctgtctcttaaaaacaaaacaaaacaaaaagtgaaacgtgaacattaagcatcttggaatagataaaacatgcataatttccaatctttttgctgaccatgcttccagctgcctcagagcagttgcacattctgttcctgctgcctggaataccctcccttcctttccactttgccctgttaacccagccatccctgatctcatgcgtactccaggatgccttccctgatcatcctgccgaggtcaaatcccctccccttcatagcacctagtatggctacaacagtctcgagtgtatagaggatggggtggggtgaggtcacaggaatgatgctcccttctatctggggttcaagggaggcttcttggaggagcatctgaaccaggcttcccaggggatgtggtttgggtaactttgagaaatactgaagggaaaagaaagaacgctgtagtgagtgaagcctggcatttgggaagatgggtgtgtgggtgaccaaactcaccacgcaaggcccagagcccttttgaggccctcgaaggtcccaggctggggtcatcctctccagtttcagtttgagaaaacaaggcccagagaggtgaagggctgttcggtcattgcccatggagccaggggagctgtgggccttccgccgccaacctctgggctagccctgcagagatgctaggaggatgcagggaggtgaggtgggggctgaggtaggactcagactgcccaggcccgcctgcacccggaaggaggaagctgcacagggtgtctgtggctggccccgggatcccccactcggggacttcctcttcctctcagggcaggtgcagctgccacagtgagacgggcaccccgacccgggcatggaggggggcaaggggcccaggctcagagacttcctgagtgggagtctggctacctgggtgagggggcaggtggcagcgggttggggaggggaagtgagccccagccaggggctggtgttggcgctggccgggggagggtgaggcagaaccagg

SEQ ID NO: 7447 - DNA, 2300 bp, Homo sapien
tgcctcagagcagttgcacattctgttcctgctgcctggaataccctcccttcctttccactttgccctgttaacccagccatccctgatctcatgcgtactccaggatgccttccctgatcatcctgccgaggtcaaatcccctccccttcatagcacctagtatggctacaacagtctcgagtgtatagaggatggggtggggtgaggtcacaggaatgatgctcccttctatctggggttcaagggaggcttcttggaggagcatctgaaccaggcttcccaggggatgtggtttgggtaactttgagaaatactgaagggaaaagaaagaacgctgtagtgagtgaagcctggcatttgggaagatgggtgtgtgggtgaccaaactcaccacgcaaggcccagagcccttttgaggccctcgaaggtcccaggctggggtcatcctctccagtttcagtttgagaaaacaaggcccagagaggtgaagggctgttcggtcattgcccatggagccaggggagctgtgggccttccgccgccaacctctgggctagccctgcagagatgctaggaggatgcagggaggtgaggtgggggctgaggtaggactcagactgcccaggcccgcctgcacccggaaggaggaagctgcacagggtgtctgtggctggccccgggatcccccactcggggacttcctcttcctctcagggcaggtgcagctgccacagtgagacgggcaccccgacccgggcatggaggggggcaaggggcccaggctcagagacttcctgagtgggagtctggctacctgggtgagggggcaggtggcagcgggttggggaggggaagtgagccccagccaggggctggtgttggcgctggccgggggagggtgaggcagaaccaggccggaggggagggctgggttcaaatgtgggggatggagatatggtgtggggggctgtggtgagggaagaggggacagaggcactcagaggacgggtgagaaggggtgcttgggctcactggggcaggtcggaggggctcagggttcactctgctggtcggctgacccctctgggctcctcacaggcgctgggactggccgggctggtcggggaggcggaggactcggagggggaagaagaggaagaggaggaagagccgcccctttggttggagaagagattcctgcgcctcagcgatggggccctgctcctccgggtgctgggcatcatgtaaggggcatcgggccggggcggtggcggggaaggatctgagaggaggggaagcgggtgggcggagcctgatgctcagtgggcggggcctgagggacggtgggcgaggcctgttgacgggaggcgggtcctcgagcccacctccggctcatagtgcccccagctcccgagggggacctcggatgctcagaggccttgacggacctgctgcctggcgagtgtggaacctgaaccacctgtggggccgactgagggacttctaccaggtaaggggtctcgagggaaaggcggagacaggaggggaagaggagccccttcgggaaggcgcctcatatagtctgcctctctgcctccaggaggagctgcagctgctgatcctgtcgccacccccagacctccagacattgggatttgaccctctctcaggtgctctccccacccacaccctcctgcctctgcccccgcactactctaccttccccgccccagttaaccccttgtggcatgtgccttgcagaagaagcggtggagcagctggaaggcgttcttcggctactgttgggagcgtcagtacaggtgagccggcggtgggaaggaaaggttagggtcgagctttggcggtagaggagggagatcctgcaccagctccccttcctgtctcccctcagtgtgagcaccgggaactcttcatccgccacatccagggcctcagtctcgaggtccagagcgagctggccgctgccatccaggaggtactgagacggttcggcagcccagactggtatggcacctgggacgcccttgccacaccgcggcttccactgaactgctcttcctgcgccccaggtgacccagccgggggccggcgtggtgctggcactgtctgggccagatcctggggagctggcacctgccgagctggagatgctgtcccggagcctgatggggacactgtcgaagctggcacgggagcgtgacctgggggcccaggtaggggcagcaggggcatcgtggactcaggttggggaactggaggaccatcagggagccggt

SEQ ID NO: 7448 - DNA, 2300 bp, Homo sapien
ggggaggcggaggactcggagggggaagaagaggaagaggaggaagagccgcccctttggttggagaagagattcctgcgcctcagcgatggggccctgctcctccgggtgctgggcatcatgtaaggggcatcgggccggggcggtggcggggaaggatctgagaggaggggaagcgggtgggcggagcctgatgctcagtgggcggggcctgagggacggtgggcgaggcctgttgacgggaggcgggtcctcgagcccacctccggctcatagtgcccccagctcccgagggggacctcggatgctcagaggccttgacggacctgctgcctggcgagtgtggaacctgaaccacctgtggggccgactgagggacttctaccaggtaaggggtctcgagggaaaggcggagacaggaggggaagaggagccccttcgggaaggcgcctcatatagtctgcctctctgcctccaggaggagctgcagctgctgatcctgtcgccacccccagacctccagacattgggatttgaccctctctcaggtgctctccccacccacaccctcctgcctctgcccccgcactactctaccttccccgccccagttaaccccttgtggcatgtgccttgcagaagaagcggtggagcagctggaaggcgttcttcggctactgttgggagcgtcagtacaggtgagccggcggtgggaaggaaaggttagggtcgagctttggcggtagaggagggagatcctgcaccagctccccttcctgtctcccctcagtgtgagcaccgggaactcttcatccgccacatccagggcctcagtctcgaggtccagagcgagctggccgctgccatccaggaggtactgagacggttcggcagcccagactggtatggcacctgggacgcccttgccacaccgcggcttccactgaactgctcttcctgcgccccaggtgacccagccgggggccggcgtggtgctggcactgtctgggccagatcctggggagctggcacctgccgagctggagatgctgtcccggagcctgatggggacactgtcgaagctggcacgggagcgtgacctgggggcccaggtaggggcagcaggggcatcgtggactcaggttggggaactggaggaccatcagggagccggttgtgcaagggagatggaagtttggggcccaggcatggggttgtggtctgaggtcttgggccatcagtgatgtcacaaccagatggcccaagaccccagaccacaaccccatgtctggtgttgtggttgggggtcgatgtgcagaggcattggataagttagtcctgacccttgacccctgacctacagcggctggctgaactgctgctggagcgagaacccctctgcttgaggcctgaggctccctctagggctcccgccgagggcccctcgcaccatctggccctgcagctggccaacgccaaggctcagctgcggcgtctgcggcaggagctgtgagtgtgcgcagcctgggaaggggactgagtggagaggggcagattaagcctggatgggaccctagccctggtggctacgggaggggtcaggcctgggaagggctgggggttgtgggcccccagaccctccctagactccccttccctccagggaggagaaggccgagctgctgctagactcccaggccgaggtgcagggtttggaggccgaaataagaaggctccgccaggaggtgcgctcacatgctccccgccaccgcggcattccctaacctccccgcacccggtcccattgcctccctcccaacccggctccttcccgtccctaatccctctggcccgcggctggctgttcccagctccacaccgtctggcccaggcccaggcgctgtcgggacaggccaagcgggccgagctgtaccgcgaggaggcagaggcgctgcgggagcgggccggccgcctgccccgcctgcaggaggagctgaggcgctgccgcgagcggctgcaggcggctgaggcctacaagagtcagctggaggtgaggcggagacggagccgcggggcggggcgtgcgcgagggggcgggccaggaggaggggcgagattgggtcccgagggcagagaggcaggttctctggaggggacagtcacaggtggagaaatgggtgaggacaaattcagggaggtggcgtctgggaaagggcctccagaggatggggcaggtgtaggggagtgggggggctgtgtaagtgatgcagccttggaaggagggctgttcccggggggga

SEQ ID NO: 7449 - DNA, 2300 bp, Homo sapien
ttcatccgccacatccagggcctcagtctcgaggtccagagcgagctggccgctgccatccaggaggtactgagacggttcggcagcccagactggtatggcacctgggacgcccttgccacaccgcggcttccactgaactgctcttcctgcgccccaggtgacccagccgggggccggcgtggtgctggcactgtctgggccagatcctggggagctggcacctgccgagctggagatgctgtcccggagcctgatggggacactgtcgaagctggcacgggagcgtgacctgggggcccaggtaggggcagcaggggcatcgtggactcaggttggggaactggaggaccatcagggagccggttgtgcaagggagatggaagtttggggcccaggcatggggttgtggtctgaggtcttgggccatcagtgatgtcacaaccagatggcccaagaccccagaccacaaccccatgtctggtgttgtggttgggggtcgatgtgcagaggcattggataagttagtcctgacccttgacccctgacctacagcggctggctgaactgctgctggagcgagaacccctctgcttgaggcctgaggctccctctagggctcccgccgagggcccctcgcaccatctggccctgcagctggccaacgccaaggctcagctgcggcgtctgcggcaggagctgtgagtgtgcgcagcctgggaaggggactgagtggagaggggcagattaagcctggatgggaccctagccctggtggctacgggaggggtcaggcctgggaagggctgggggttgtgggcccccagaccctccctagactccccttccctccagggaggagaaggccgagctgctgctagactcccaggccgaggtgcagggtttggaggccgaaataagaaggctccgccaggaggtgcgctcacatgctccccgccaccgcggcattccctaacctccccgcacccggtcccattgcctccctcccaacccggctccttcccgtccctaatccctctggcccgcggctggctgttcccagctccacaccgtctggcccaggcccaggcgctgtcgggacaggccaagcgggccgagctgtaccgcgaggaggcagaggcgctgcgggagcgggccggccgcctgccccgcctgcaggaggagctgaggcgctgccgcgagcggctgcaggcggctgaggcctacaagagtcagctggaggtgaggcggagacggagccgcggggcggggcgtgcgcgagggggcgggccaggaggaggggcgagattgggtcccgagggcagagaggcaggttctctggaggggacagtcacaggtggagaaatgggtgaggacaaattcagggaggtggcgtctgggaaagggcctccagaggatggggcaggtgtaggggagtgggggggctgtgtaagtgatgcagccttggaaggagggctgttcccgggggggaggggcggggcatggacagaagggcggggcctgcacaaagggcggggccaggggcgagggagaaagtacctgaagagatcttggtgggaagaagatggaagggagtggcggggcctagagactgatggggtgcagggtgggggagggaggcagggtctgtgacaggctgaggggaaggagtttgggaccctcaggcgctggagtgcatgggggctgcgtggctaccggttctccctgctctcccaccaggaggagcgggtgctctcgggggtgctggaggcgtccaaggcgctgctggaagagcagctggaggctgcccgagagcgctgcgcccggctgcacgagacccagcgcgagaacctgctgctgcgaacccggctgggcgaggcccatgcggtaaggtagccagagtgatcccacttgggttgccccgtcaccccatgaccccattgattccctagtggtccctagtgattcttgcaacctctgctcttggtgacctctagtgaccctccgacctacacactcggcctggccatggtgtggagggcttgtctgacccttccctcacccccaggagctggactctctgcggcatcaggtggaccagctggctgaggagaatgtggagctggagctggagcttcagcggagcttggagccacctccaggatcccctggggagggtgagggaccccactggaagggctggggtgggggcttcctatgctttccagcagtgtactggggagagcctctgactccctcccttctcccaagcctctggggtgtgtatgtgaggagccagg

SEQ ID NO: 7450 - DNA, 2300 bp, Homo sapien
cgcccggccaatttttgtatttttagtagagatggggtttcatcatgttggcctggctagtttctttcttttcttttcttttctttttttgagacagagtctccctctgtcaccaggctggaggcgtgatctcggctcactgcaacctccacctcccaggttcaagcgattttcctgcctcagcctctcgtgtagctgggactacaggtgcatgccaccatgcccagctaattttttgaatttttagtagagacagggtttcaccatgttggccaggatggtctcaatctcttgaccttgtgatctgcccgcctcggcctcccaaagtgctgggattacaggcgtgagccaccgcacctggccaacacacttttacttattcatttaaacatgtttacaggcatcttcttggtgccaggccctgtaccaggctctgggcacacagcagtgaccacgaagctagcaatccagtgtttgggcgtggcttcagcttccttccaagctaaggaaggggttagggcttttgccatgggggattgggcagccactgaaggctccccaatgggcaaagtgagcaaagtggtcaggtctgcgtgtgaaaaggcgcgaggaagggtgtttgggccaatgggccccagtgctaggggacctgtgagattgcaacacaggtaggaactgagtcatcctgcacaggcagtttccagtcccatttctgtacagacaaggaccctgaaattcagggaggaagagtaatttgctcagagacccattatgaggatggggggtggggagaacactgctgggtagacatggggtcaggcgttgtgcaagacaggcccagggtaagggggttctggcgaatgtgagagggaaggtgagagaccatctctggggtccactctgtggggtgtggctgagatgctgtctagccgggcgacctgcctactttccagctgtgtggcttggggcaagttacttaacctctctgagtctcagttttctcacttgtaaaactggaataaaaattgtacctgccttggctgggcacagtggctcacacctgtaatcccagcacttcgggaggctgaggtgggcggatgaccggaggtcaggagttcgagaccagcctggccaacatggcaaaaccccaactctactaaaaacacaaaattagtcgggtgtggtggcacgcacctgtaatcccagctactcgggaggctgaggtaggagaattgcttgaacccaggaggcagaggttgcagtgagccaagatcgcgccactgcagtccagtctgggtgacagagcaagactccgtctcaaaaaaaaaaaaaaaaaaaaaaaaattgtacctgcctcacaggatcctgtaagataatgagcgtagggagcttggggcaatgcctggcacctagaatggacctgttccatgggagggaatggcagcaggtaggcagtgaaggtgagggtagggctggcgggctggaagagccggctccaaggactgagagggtgggggaagctagggacaaagggggaattttgtgagatttcctggttggagcaggagaaggtggctggccagggggaggtcagggaaccagggggtctcaggttgtccactgggtggggaagcctcccaggcttgggggagggggttctaggagggctgtggccagggcccggaggagggcagggcaggggctgggcgggaggttctattcaccgtgcctcctaccccagtacttgcgctagtggctgtcagccagccaggcagcagtgcctcatcggacttgtagtttttcagggagaggtggtggccaagagtgtcaggaggtgcagtgccccttgggcaaggcctaggtgcagttattaagccaggaaggtagttttcagcagcaaggcttgtaggcttggtttccaaggcaggatttggctggcagctggtcatgggcagctgtccccgaagcttcatcctgccaggccccccatgtggcagaatggtttggtctccctccctctggggcacacaggccagaatgggcctcccgtctccttccaaagtggtgcagcccaaccgccaaaggccacaggtcacctagctggcagcatcctggcgccccctgcccccccagcccccactgtcagctcctgacttcctgtccctccagccctccgtggccttttccctgtagccaaggtctctcacccgacccacctctgctgagcctctctagctgtctcgctgtcacatggctggggtggcagcccaccgggcgcatccacctttcactgcgcacat

SEQ ID NO: 7451 - DNA, 2300 bp, Homo sapien
cttgaacccgggaggcagaggttgcagtgagcccagatcacacctctgcactcctggctgggtggcagagtgagactctgtctcaaaacaaaaacaaaaaaccaaatagtcttagaggagtagtgggatggagaagtgttatgagcagaaggctctgccgcagagagacagaagttgagaagggcagggtggtgacggtggagcttcaggaaccaggagcagggacttgtgggatccaagggaaggcatgggattggggcggggtggactaggctaaatgctgctggcagggcaggtccataagcgcaggtccttgaggcatccccaaggcactgcggctgtcccgcatgacctcccagggactctccttgcagctgcgccagggccccgcggggctggggcccaaaaagcgtgcggagcctcagctggtggagacccagaatgtgcggcttattgaggtggagcgcagtgtgagtgtgggcccacagtgggccctggggaggtgccccgtgcagtgtgagtgtgggtccacggtggaccctgggctggggggtatcccgtgcagtgtgagtgtggactcacagtgggcccgggggtgggggtgccccatgcagtgtgagtgtgggcctgtggtaggcactagggggtgcccccgccacctggctattgctaacccccacttctgggcagaatgcgatgctggtggcagagaaggcagctttgcaggggcagctgcagcacctggaggggcagctggggagcctgcagggccgtgcccaggagctgctgctgcagagccagcgggcgcaggagcacagcagccgcctgcaggtgggtggtggcccgggtgcccatccctgcccatgtactgccccctcctgctccttttggatcatcctgtggcctttttctatcccagctcccagccagctgccccacctcttccccagtctcatttatccttgtcctctgaccccagccaccattttgcaccatcctccctgccactatctcctcctacctgccgccagcccccacatctacacccatgtcgccctgcgctctcactgtcccagccctcccctccacagggcgccattagtcccattctgccctgtgccccttccggacagcctggcccagccagcctctgccgcctctcccctgctcaccatcagcctctggctggggcttgtactgcctgctgtgcccccagccctttgcctcctccacaactctctcattgtcttgggccctaccgtctgcccttagccccccgcctctcactcgatttccagccaggggttcctccccagcagcccctgcttccctcctccatcctaggccgagaagtctgtgctggagattcagggccaggagctgcaccggaagctggaggtgctggaggaggaggtgcgggcggcacggcagtcccaggaggagacccgcgggcagcagcaggccctgcttcgggaccacaaggccctggcacagctgcagcggcggcaggaggccgagctagagggactgctggtgcggcaccgagacctcaaggccaacatgcgggcactggagctggcccaccgggagctgcagggccggtgagcatcaccaaatgcccagctcctcccctggcaccccctatctgccagagaagactcccctcagcaggtctgactccccatcaggaagcacctccacctccgctctgtgatgccccggccactgctgtgccctctggggtagctgtgctccccacacttctgggttgggctccccgtggggctcacctattgggagtggtgggcacctggcatggcattctgcccaatggcttcctctgggggacctaggcttaggaggtgacagacccccccgccccgggtccagatagtccagccagctgcttgtggtggccataggttcacacagccctcttagccccttgtccatcccaggcacgagcagctgcaggcccagcgggccagcgtggaggcacaggaggtggccctgctggcagagcgtgaacgcctgatgcaagatgggcatcggcagcggggcctggaggaggagctgcggaggcttcagagcgagcacgacaggtgccgcccctgccacagcctctagcagctctcagtggccccatcctgaaagtgggttgggggtgtggggtcctgtctggcctcccctccccggcataacttctctggccagcactcggactggggacccaggtcccttggagagcagctctccttgcctcccaagggctcagatgctgctggcagagttgtctcggg

SEQ ID NO: 7452 - DNA, 2300 bp, Homo sapien
ggaccctgggctggggggtatcccgtgcagtgtgagtgtggactcacagtgggcccgggggtgggggtgccccatgcagtgtgagtgtgggcctgtggtaggcactagggggtgcccccgccacctggctattgctaacccccacttctgggcagaatgcgatgctggtggcagagaaggcagctttgcaggggcagctgcagcacctggaggggcagctggggagcctgcagggccgtgcccaggagctgctgctgcagagccagcgggcgcaggagcacagcagccgcctgcaggtgggtggtggcccgggtgcccatccctgcccatgtactgccccctcctgctccttttggatcatcctgtggcctttttctatcccagctcccagccagctgccccacctcttccccagtctcatttatccttgtcctctgaccccagccaccattttgcaccatcctccctgccactatctcctcctacctgccgccagcccccacatctacacccatgtcgccctgcgctctcactgtcccagccctcccctccacagggcgccattagtcccattctgccctgtgccccttccggacagcctggcccagccagcctctgccgcctctcccctgctcaccatcagcctctggctggggcttgtactgcctgctgtgcccccagccctttgcctcctccacaactctctcattgtcttgggccctaccgtctgcccttagccccccgcctctcactcgatttccagccaggggttcctccccagcagcccctgcttccctcctccatcctaggccgagaagtctgtgctggagattcagggccaggagctgcaccggaagctggaggtgctggaggaggaggtgcgggcggcacggcagtcccaggaggagacccgcgggcagcagcaggccctgcttcgggaccacaaggccctggcacagctgcagcggcggcaggaggccgagctagagggactgctggtgcggcaccgagacctcaaggccaacatgcgggcactggagctggcccaccgggagctgcagggccggtgagcatcaccaaatgcccagctcctcccctggcaccccctatctgccagagaagactcccctcagcaggtctgactccccatcaggaagcacctccacctccgctctgtgatgccccggccactgctgtgccctctggggtagctgtgctccccacacttctgggttgggctccccgtggggctcacctattgggagtggtgggcacctggcatggcattctgcccaatggcttcctctgggggacctaggcttaggaggtgacagacccccccgccccgggtccagatagtccagccagctgcttgtggtggccataggttcacacagccctcttagccccttgtccatcccaggcacgagcagctgcaggcccagcgggccagcgtggaggcacaggaggtggccctgctggcagagcgtgaacgcctgatgcaagatgggcatcggcagcggggcctggaggaggagctgcggaggcttcagagcgagcacgacaggtgccgcccctgccacagcctctagcagctctcagtggccccatcctgaaagtgggttgggggtgtggggtcctgtctggcctcccctccccggcataacttctctggccagcactcggactggggacccaggtcccttggagagcagctctccttgcctcccaagggctcagatgctgctggcagagttgtctcgggagcggggtgagctgcagggtgaacgcggggagctacggggccggctggcgcggctggagctggagcgggcacagctggagatgcagagccagcagctgcgcgagtccaaccagcagctggacctgagcgcctgccggctgaccacgcagtgtgaggtgtggctggagggccggtgggggtatgggcgtgtggtggggcagaaagcctagacccaggtggtcctgagctgggtcccaccctccgagccatggtgcccccctgccagctattgacacagctgcgaagtgcccaggaagaggagaaccggcagctgctggctgaagttcaggccctgagccgggagaacagggagctcctggagcgcagcctggagagtcgggaccacctgcaccgcgaacagcgggagtacctgtgagtgggccgcctgggagcggggtggggcctgcatcccctttgggcgttcctggggagagcccttagtgagggcctagggacagggttggagctgaccttccaggtcagtccaatctgcggc

SEQ ID NO: 7453 - DNA, 2300 bp, Homo sapien
tacaggaaccggagaaacgtcccctcaccccatccctcagccagtgacaccgtgggaacagcaggcttgggagtgcagccttctcggcactggagtgtcagcggaggccccaggcagcccaagagctcagggagccagggaccccaaggggagtccttggacaaggaggcctgggccctgagatcctccacggtcagcgccggggcccggagatggagctgggacgagtgtgtggacaggggggatggctggcccccacgagcagctccaggctggagttctggttcttccaggtggctcccgctgaggcagcggtctctgggggatcccccagctgaaggaggctggcaggagttggcaagagaaccccctgccctgtccaggtgggaagctgagtcccagtgctgggggactgtggcctgggctgatcttgagccttaactggacatgaggggcatgagaataaagctgaactgcagcctcctgagtcttgctctgtctgttggccgcactgggtacctcagggcaccaggacacatgccgccccagtcctgctggttggtgggggtctgtgggcagagggcccctgcctggacagggcagcacaggcctttctccagggtcttggccagtccggccggccaaagcccggatgtcctggtgaggtggagaggggatgacatcctgggtagccagcagggattggggtctaagatctgggctcaggggtgtggggcagtgaagcccctgttgccccgcccccaccctctcccagggcactgtcttctctctgttcacatcctcctcctactcatctcccctccctccttgaggttgagccccctccccagggagttctcagcctggcggggcatcacttaatgccaggggttgccaggagaggtgggagggacgctggctctctgaccagggcctctagcctgatgcctgagaggcggggcaattcggctggggtgcaggatgtgagtcagggtacctggggccacccaggggagggtggagctgcccagggctgagataaggcagcctgaacttggggggtgcagagctgggagggacggtccgtccggcctcccaggtgtgacctgcagcagcttgagttcctcctcctctcagccagggcttcacaggacaggggcgtggggtggacaccctggcctctccagctggcagaggagctgagagcccctcccaccggcctcagggtgtggggcctcatggctgtcccactctgctaggtggccccattggtggtcaggaagggaaaggcaggaagaagacggagcaggggctcaggaggaccagtcagcaggggccctgggcctcatggggagagggggcagccccgtgtggcactgacatctcttcttgaggcctgctcagggctctaagctgggtactgcaccaggctaggagacaacaggagcagaacacgtgaggtgcgcatggcacctggtgggctctgcacggtgactgggggctgaagtgcttctgcaggcacccccgacagaaagctggtcagaaaactggccactcctctccttgccatggggtcccaggccgggctccagccccctcttggtgatgaggctcctccttgcaaaggccagtcctctggggagaggggccctgctggccacccccaggacgatggagtggggtgggctccactgcctgagagttgggtgacttccaggatccagaccccctctcagcctgcccagcaccaggcacctcgtcccccaccttggggcacagactcctaatgtcctccagccactggctgcagccggcattcccgggcagattcctggcttggggactaatgccccagaggctccaggttacccacgggctcagggatggctcccacggggtgtttccagttcccgggagagtcgagtaaggtcccggagcgcacggccctgaggcctggcctgggggctcgggagacagggcggccccagccggccgcccaccggcagcccggcgctgtcacgttccagccgcctgactcaggccgcgcagggcggggagccgggaggcggtgccggcgcccgcctcggccccggaggcggcaccaggaagcgcccgccccggccggagccgccatgtaaccggcgccgcccggagcccgagccgcgcgggccccagcgacccgcccgccatgggggacgaggacgacgatgagagctgcgccgtggagctgcggatcacagaaggtgggtgtggggcctgactgcggctgcccggggcaggccgggacgggtcatggaccg

SEQ ID NO: 7454 - DNA, 2300 bp, Homo sapien
tcatggggagagggggcagccccgtgtggcactgacatctcttcttgaggcctgctcagggctctaagctgggtactgcaccaggctaggagacaacaggagcagaacacgtgaggtgcgcatggcacctggtgggctctgcacggtgactgggggctgaagtgcttctgcaggcacccccgacagaaagctggtcagaaaactggccactcctctccttgccatggggtcccaggccgggctccagccccctcttggtgatgaggctcctccttgcaaaggccagtcctctggggagaggggccctgctggccacccccaggacgatggagtggggtgggctccactgcctgagagttgggtgacttccaggatccagaccccctctcagcctgcccagcaccaggcacctcgtcccccaccttggggcacagactcctaatgtcctccagccactggctgcagccggcattcccgggcagattcctggcttggggactaatgccccagaggctccaggttacccacgggctcagggatggctcccacggggtgtttccagttcccgggagagtcgagtaaggtcccggagcgcacggccctgaggcctggcctgggggctcgggagacagggcggccccagccggccgcccaccggcagcccggcgctgtcacgttccagccgcctgactcaggccgcgcagggcggggagccgggaggcggtgccggcgcccgcctcggccccggaggcggcaccaggaagcgcccgccccggccggagccgccatgtaaccggcgccgcccggagcccgagccgcgcgggccccagcgacccgcccgccatgggggacgaggacgacgatgagagctgcgccgtggagctgcggatcacagaaggtgggtgtggggcctgactgcggctgcccggggcaggccgggacgggtcatggaccggctgggctcattcgccccctgtgcccacagccaacctgaccgggcacgaggagaaggtgagcgtggagaacttcgagctgctcaaggtgctgggcacgggaggtgaggacccccatccaccgggcaggcgtcccaggcgcggtgcccctgacctcctgcctgctcactcttgggcctgggccaggccactgagcaggccccccaccctttcccggcacagcctgccttgcctgccccgccctgcctcgccagagtttgcatgcccacttccagggcactccacattgacatcactcctccctccacggtcctgtgcgtgcatacccccctggatttgccaacaccctggggagggggactggcgcccctctcaagtgatttgcatagctcctccctttcttccaatatgggatccccctcccacattttgcaaatgccccagcgctggtttgcgcatcccttccccagccaggtgcacacctctgcctcccttccttgcactggcatcttttcacatccatctgatctctcgcaggtttgcatatgccccgcccccatgcctcgcagcaggccccctggagatgcatgctccccagcctggtttgcacatcctttccctggttttgctgggcaccctcccggggtgtgcacaccctttccttagaaggctctgccagctttttgcacacctgcctgttgccccagctccttcgcctcatttgcacaccctcctgggttggcatcgcccccaccccccaagcctgcaccaatctcccgctcacagcccaccctccacccactcgctgctcccacagcctacggcaaggtgttcctggtgcggaaggcgggcgggcacgacgcggggaagctgtacgccatgaaggtgctgcgcaaggcggcgctggtgcagcgcgccaagacgcaagagcacacgcgcaccgagcgctcggtgctggagctggtgcgccaggcgcccttcctggtcacgctgcactacgctttccagacggatgccaagctgcacctcatcctgggtgagcgcacaccacatcccaacggggttggggtggctgggggcaggcgaggccacctgacggggctgcttcctgacttccactgcacctcccagactatgtgagcggcggggagatgttcacccacctctaccagcgccagtacttcaaggaggctgaggtgcgcgtgtatgggggtgagatcgtgctggccctggaacacctgcacaaggtgggtgaagacctggccgcaggctgttgctatggaaactgggtctgtgccttggaaggaatctgcacgcagggcagcctcaggcttccccctgggcttc

SEQ ID NO: 7455 - DNA, 2300 bp, Homo sapien
taattgactcacagttccacatggctggggaggcctcacaatcatggtggaaggcaaggaggagcaaagtcatgtcttatgtggcggcaaggaagagagagaaatgagaacaaagcaaaaggggtttccccttataaaaccatcagatctcatgagacttattcaataccacgagaacagcacagaggaaaccgcccccatgattcaactatttcctcactgagtccctcccgcaagtgggaattatgggagctacaattcacgatgagatttgggtggggacacagccaaaccatatcaacagatgaatggctaagcaaaatgtggcctatccatacagtggaatattgctctgccttaaaaaggaaggaaattctgacacatgctacgcgtggatagacattcaggatctcgtgctaagtgcaacgagccagttatgaaaggacagatactgtaggattccacttataggaggcacctggagtgagatgcatagagtcagagagtggaatggtgggtgccaggggctgggggaggggcaaatggggggttagtgtggagttctggttgggaagatgaaaaagttctggagctgaatggtggggatggtcacacaacaatgcacttaatgtcactggactgtatacttaagaatggctaaaatgataaattttacgatatacatatttcaccacaataaaagttaaaaagaataatttagataaaccctgggaaggtgttcatcaaggtttccaaaatgccaggtggtcctggtcttagtcaggtgtctggatggagaatgctggtgccccaactcctcctcctgtctgtgcccacacgcagtgctgggccggacacttgtctgtcctgaggggaatgtgcagcctctgggcctccctggagagaacaggtgaaggaatgcctggggctctctctgtgccctcctcgggaggaaacgggacccaggcgatcttggacagaagcagggtcccgagcaggggatcactagctgcttccgtccgtctctcttcggccctcctgtctgccagctgcacctctgctctcttccaaggggcagcccccaccaggggcagttgtccagctcttgtgcctgggccggcactggcaagttcatttccatgggcataagcagtctccattctggcttggcagcaataaacctggcactggatgttgtcctggtccatacatatgtgccaatcggtccagactcctagagctcaacaaatggtcctgtgagagcctggcgctgtgtgagcccgggaaggcagtgcagtgcagtggccaggtcatgtcacccaggctagggcttggccttctggggagcacagcgagggatggcctgccctaaggaaggccctctctgaggtggggatggttttccagggttccctgggctcccaggtgctccctcctcccctgtaccccactcttccataccccggggctcatcccttctccacttgggtccttgttccactgaaaatctccccctaccctcccatctcatggttttcttcctccccgctggctctgccttcccttcaaccagcaccaatgccaaaatcagcaccaggagctgccattcatatcgtctctaccatatgcccatttgaatccttattgacaagcttgtgacctttgtcaaattagtgacctatctgagcctcagtttcctttcctgtaaaatgggcacattaatacctattttacagatggttgtgagatgggtcgtgcctgacaccatttggcgctcagccaactcttgtttgtttcgtcgattctgctgggttgcctggcattttgatttatctttaattcatacctttgaatctgctgtaaacttggcagccacatcaccaagctcgttagattgcaggttgggaagcctaattaggttctaaggaggttagaaatctgtcctcagggacaagttctcaagctttagaatgtggactcatgacgtcattttggtccctggaggcattcttctctagctgtatgtgggaagctctgtgttccaggctgtgaggctgccaggcaacaaagtttcccaagtctcaaggagccatgttgtgagtgtttgacagccaggtcttggaaaggaaggccaacatgccctgggctgatcagactccatcatgttgactcctgggaggcacatttttgagaaacaattaggaaccaggaagcattctgaggaggaaagccaggataaagaagactcagataaaaaagtcatcccaccaggtctggatgcagtgtgactgtatcagtca

SEQ ID NO: 7456 - DNA, 2300 bp, Homo sapien
gaattcccaacctcaggtgatccacctgccccggcctcccaaagtgctgggataacaggcgtgagccactgcgcccggcctcatctttttcttaaaccttcatttctaagtgaaatggcttctactcttaattcctgattttcttcactttctgatctcggatttgagatctcacttgctaccatgaaaaatgagactttattttcttaccatccacacttctattatctgtcactgctcagcctcttttaaatctatgggccccctctgtcttttcttttcatttcttttcttttcttttcagatggagtcttgctcactgcaacctctgcctcccgggttcaagcgattctcctgcctcagcctccggagcagctgggattacaggtgcacaccaccacatctggctaatttttgtatttttagtacagaaggggtttcaccatgttggccaggcaggtctggaactcctgacctcaagtgatctgcccacctcagcctcccaaaatgctgggattacaggcgcgagccactgcaccccgcccgtttttttcttttctttataaaagttgaaatacactagctgtatctagtttcgggatgtgcatgataattggatacattcctataatcaaatcagggtaattgggatgtccatcatcttaaatatttatcttttccttgtgccaggaacattaggattattcttttctagcaattttgaagtgtacaatcgattaatgtcaccctactgatctattgaacaccagatgttatttcgtctatgtaagtgtgtatttgtacccactcatcaacctttcttcatcccctcctttccccctccccttcctggcctctagtaagcaggttgctgttgcaaattacgtattgaagaaactggcgctttgtcctatggttgcctgcagtctggattttgctggtcacgtccccttagctttgttgagcaggctccccagtccctgtatttcttgtaatttgatagttggcaaactttttccataaagagccagcgagtaaatattttgggctttgtgggctataacagtctctgtggcaattcctcaactctgctgtcacagcgaggccgcagccagagacaacatgtaaacagcggagcagggctccgttcccacagcgcgggatctgggtcccagtttgcacagccctgagtcgagggtggatccaatccaggtctgatacagcatttcaatggtgatgccgcagccttccacactgaggcacttaacaccccattgttcccaattgcattttaactgaaaaaatacaaaaagagatcaaaactgaaagtgcagtttcctcatggtcccaccacattttggagaagtgtataaatggagaagtgaaagctccatcttctgccccttccccatgagagagcctctattcacagccaggtcagtttcttccagactgttaacatccgtgtgagtgcacatgtctacactgcgtggagcctgcctgcttcctgccccgcaggcgtgtctgctgtgggaaggctggagttctgaccttccccctccccctctgggtgacaggtggctcagttctcttccctgccacgttcaagaccaggttgggggagggggtgaatgtcactattcccctgactgccactgtggagaggggagaccctcgccccttttctgaatttttccttacccctttccttggaataaagcaaacaccagacccaaatggattttaagtgacactttcccaagagtctggagaggggacagagactggacgtggtgtgtcctgcctgagccgagtcatctggttacgagggcaggggcaggctggggtggggctcatgcgccccggaagcaccctggctcctcgctctcccatgcctctccctttatgtcctctgctgtccagcgcctgggccccggccctccctgggacaccatcctgccctgcccgagtcgtggctctccagtctctttcggggactcgcccctggcacccactagatggcgctcccggccactcagctccccctgcctcgcttggggtggtgctggacgtcgggagcgctggcctctgctctgctgatttgcaggtgggagtgcagggtgagcccggcgcaggggataggaggtgggggagtcgagagctggagtcaggcgccgctcacgctgggatgacggagtgttaacctcagactctgggtccctttgggccgaagctttaagaaaacaggggcagcgagcccggcgtcccaaggagccttgccaaactgggcatggagaacg

SEQ ID NO: 7457 - DNA, 2300 bp, Homo sapien
actataatctggggctacctgccttcctcccaagcccttctctccccacccctgcctgaggacccttgaggcacctgggaaagatgtgcctagtttgggaaaggctacagttccaggtgtgaccgccaggtggcagagcagctgcactaagccctgccccaagcagccccagaaaaacagaaaatacaaatgaaaaattccttggcctggaagtggaaagtcagttggagattccgggtgccttctggcaggtccaggaggtttgaccttctgctgtaagcaaagcctaggggtgtccatgacaggcaaagggcagggaagaagaaaaaatgtgaaagcatatggacggaggaaggagaaagaattgaagtgcttcctggacaccttggattccggcagccacctccagcccagagattttcaaagcaaggcccgggcccggtgtggtgcagtcagctggggacttactttaaaacgtgcactcctgggctcagcgcaccctgcagcagacgctcaagaaactgcgttctagccagcacacccgtgacttctggcacttgctgaggtttgcagacaccaacacagcaacacacttcactccacaggccagaagccaggagccagagagaggaggccaccacggaaggccatgtctcagggccaggcctacccccgacagcacggtgcttgctcaaaacaggaatagggtgcaattctttgcacgttagattaggcctttgggctgttttggactggggctctatccaaggagcccctctcctgcggcctcctgggctttaatttgggttggttctccacctcccccagtccctctctttttgctattttatcctaatgatttcctgcctggagaggccgaggaaggaaggagccccagctttgaagcccaggcctggaatccgactccccagcttgctggccggcctccatcctggctgagttccccaagccctccagggaggttctcggaggttcagggtccagacacccacccacacctcacccacacttccagcacttctcggacttctctccggaactgactcagccgcttccctctcgcactctgggaggtgacttcaggctggccctcattctgacccaaatcctgaattctagcttttggccgggatttggtccatgacaggctggagaccacacagcagctgcccaggggcatcagagaaagctcaggctgtggcgtctggctctgatctggactgcggcgagtgaccttgggcaagttgcctgccctctctgagcctcagtttccttgtttaagggaatttgccttgtttctctcctgggctgccataaggagtgaaggaaggggtgcaggcagtgaggtcagcccagagctgagcacactaagaggcaccacccagatggccatgggggagggctggcttcactctacctcgcccggagcctggaagcggggctggcctcagatgctgggtcacagcgtcgtgattttgctcacttccccaaccgcccgcctgctcagctgcgggcccacgaggggcttcaaagagaagccaggaaatggtagccatggtttccactgggggagcttactgtctaataaaggcaacctaaaacctcggaatagaagcttcccgaaatagtgagtctgcaagctggtctccccggcactgcctggtaggaggttcacatcaggaaagaaaagagcacagacttgggccttcctgccagctcgtgcccaccccacgtcctctcccacgcccaccagcaccatctccccagctagggaaggcccttcccaggccccacatctggcttcagagccttgaacagttgtcaggagggatgaagtttaggctgaccgttttctgatttaaagggcctcgcgtagaaggttctaaagatttaagaatgagatcagctggccagcagggagtggctgaggcctcaggtcctgagacatgaactgccttcctcactcagaagcccacgctgagattaaactttaaccaactcagtgaggcaacagcccagttgatatttcttccaaactgtaattcagtaacatcaaagcaccctgtctttttaaatagaatctgcctgactttcacttttggtgctggagaactcagaaggtggctcagccctctggtccacacttggtgggcagctcggatgccccaggcagcccgggcacagtgagcttagtccccttcaccccctccgcagagctctggggcatccgcacagtcactcctggacacaagataaggaggagtttccccgaggcatca

SEQ ID NO: 7458 - DNA, 2300 bp, Homo sapien
ggaggccaccacggaaggccatgtctcagggccaggcctacccccgacagcacggtgcttgctcaaaacaggaatagggtgcaattctttgcacgttagattaggcctttgggctgttttggactggggctctatccaaggagcccctctcctgcggcctcctgggctttaatttgggttggttctccacctcccccagtccctctctttttgctattttatcctaatgatttcctgcctggagaggccgaggaaggaaggagccccagctttgaagcccaggcctggaatccgactccccagcttgctggccggcctccatcctggctgagttccccaagccctccagggaggttctcggaggttcagggtccagacacccacccacacctcacccacacttccagcacttctcggacttctctccggaactgactcagccgcttccctctcgcactctgggaggtgacttcaggctggccctcattctgacccaaatcctgaattctagcttttggccgggatttggtccatgacaggctggagaccacacagcagctgcccaggggcatcagagaaagctcaggctgtggcgtctggctctgatctggactgcggcgagtgaccttgggcaagttgcctgccctctctgagcctcagtttccttgtttaagggaatttgccttgtttctctcctgggctgccataaggagtgaaggaaggggtgcaggcagtgaggtcagcccagagctgagcacactaagaggcaccacccagatggccatgggggagggctggcttcactctacctcgcccggagcctggaagcggggctggcctcagatgctgggtcacagcgtcgtgattttgctcacttccccaaccgcccgcctgctcagctgcgggcccacgaggggcttcaaagagaagccaggaaatggtagccatggtttccactgggggagcttactgtctaataaaggcaacctaaaacctcggaatagaagcttcccgaaatagtgagtctgcaagctggtctccccggcactgcctggtaggaggttcacatcaggaaagaaaagagcacagacttgggccttcctgccagctcgtgcccaccccacgtcctctcccacgcccaccagcaccatctccccagctagggaaggcccttcccaggccccacatctggcttcagagccttgaacagttgtcaggagggatgaagtttaggctgaccgttttctgatttaaagggcctcgcgtagaaggttctaaagatttaagaatgagatcagctggccagcagggagtggctgaggcctcaggtcctgagacatgaactgccttcctcactcagaagcccacgctgagattaaactttaaccaactcagtgaggcaacagcccagttgatatttcttccaaactgtaattcagtaacatcaaagcaccctgtctttttaaatagaatctgcctgactttcacttttggtgctggagaactcagaaggtggctcagccctctggtccacacttggtgggcagctcggatgccccaggcagcccgggcacagtgagcttagtccccttcaccccctccgcagagctctggggcatccgcacagtcactcctggacacaagataaggaggagtttccccgaggcatcacagggcttcccgggactgagggactgactcaactggttattggacagtgccccacccccaatccggctgaggggcaggaaggcagaaggtcttggtggccctggatcttgtggctgcaatcggttccaaacagcagttaggtcagcagtccgctcagccgaggcagctctgttcatggcgttctcgaagctcttggagcaagccggaggcgtgggcctcttccagaccctgcaggtgctcaccttcatcctcccctgcctcatgataccttcccagatgctcctggagaacttctcagccgccatcccaggccaccgatgctggacacacatgctggacaatggctctgcggtttccacaaacatgacccccaaggcccttctgaccatctccatcccgccaggccccaaccaggggccccaccagtgccgccgcttccgccagccacagtggcagctcttggaccccaatgccacggccaccagctggagcgaagctgacacggagccgtgtgtggacggctgggtctatgaccgcagcgtcttcacctccaccatcgtggccaaggtagggcctcccccagagccactcgagtcccgtcaccttggaggtcagagtcatggatcagg

SEQ ID NO: 7459 - DNA, 2300 bp, Homo sapien
ggaagctgttcttgctccccctcctcccgctccccctcctgcctctcttcctgttctgggagctgagctgctgattccttgccacgccccctcactcccccagcagcctccatcggaggacacagacccccaacctgtgggacccttctgcgcctgcgctgtcccctggcctcccttcctcacccccacactcacctggctcttcctccaggacacactcagcccaagcccctctctgccacagcatccccttgcctgagccaccatctcctctcaccaggcaggctgcaacccctcgcaggtgtcctctgcagtggccgtccacgctgccacagcactgagtgactttgcaaaatctcggaggttgatctggtcaataaaagctggcccaaagtcctccgagggccccactgcactgaggacagtcccttcctgcctaccccctgccctgcgctgggcttccatccacccccagctccaccagcctcctcctggggccccctgcacgcctgcagagcgcctcagtgactgtgcttcacccagaagctcttgcctatgctgctttgtgcccacacgcaggccgcaactcaatgctcttccttgaggaggccctccgaggccacggagccagagactcctgcccggccccaggcatgactgtcccagcccctccttgcttccctcatcacagtgcctggctctgacgatgcctggctggctcaaggcttgtttgttgtccacgtccccacaagcacacagggacccagggactgtgctccagagcccagctcagcacggtggcagacacgcagtcattatttcatgaatggaggactgccttcccactccctcctgccaccaccctactggctctggggtctgactacctgggtctgaatcccagccttatcccacccagccttgtcctacaaggtagatctcttcccttctctggagatctcttcccttctctgggcctcagtttccccccagcagtggggtctcgcacctgcccacgcagttgtcgtgaggatgaagcgagtgtccttgctcctgggtgctgctcagacaggtgcggccaaggtctgcctcgcatctccgttctgagcagaacgggcttgagtggcactaaatgcaatctccggttcagactcagccggcctggaggccaccgcagcccagggcactcgggcaggggccgagggctctgcatccgccccatgagcacccccttcacagcgcacaggtgagagcagtggattgcaaagtctcggcctccttactccctggccccttgcccagtgtcttgattctcatagcagccctgtgaggcatgtccttatggatgcccttgtgttacagatggggaaactgaggctcagagatgtcgaatcacatgcccagggtcacccaggaaggacagagctggggctcaaacccaggcatctgatgcccaaacctgtgttcttttttatttatttattagagacagaggctcattctgttgaacagcctgcagtgcagaggcgtgatcatacctcactgcagccttgaactcctgggctcaagccatcctcccacctcagcctcccaagtagctgggaccgcagacacctggctaatttatttatttatttatttatttatttatttatttatttatttatttagtagagactgaggtctcactatgttgcccaggctggtcttgaactcctggcctaaagtgatcctccagcctcagtctcccaaagtgctgggattacaggcatgaaccaccgtgcctggccccaaaccccatgttcttaaacactgaaactgaactgcaccctcccatggcaaggtacctgccacttttataacagaagcactctgagtgtacccctaaaagttccaagaaggaggagctggctgcaagagatcccctggcgttgttgaactcccagaaggcaagtacctgcccacatatccacgtcctcaggggcccctctccaggccccgtgtgcttctctcctgtgacaggtttgggaggaagccgatgctgagctggtgctgcctgcagttggccgtggcgggcaccagcaccatcttcgccccaacattcgtcatctactgcggcctgcggttcgtggccgcttttgggatggccggcatctttctgagttcactgacactgagtgagtccccggctcagcgcgctcctgccatgggggcgggggtggcaggagagaatggggctcaggccgccgcatgaggcctcacctgcacgtgtctgcatccttcagtggtggagtggacca

SEQ ID NO: 7460 - DNA, 2300 bp, Homo sapien
caaatataagggtaacagaaataaaacgtacaactgacagaccaagacagtagaagaatataacaagaaaacttaatggattcagtagaaattaggaacaaggaaaccaagatttaaagggaaaatgtggtaaacaagaaaacatacagtaagtccaaacatgtcaataattacaataaatgtgaacaggttaaaatcgctaattaaaaggcagaggtatttcttttggattttacaaaaggaaatgtaaagcttatttggcagctcaagctgatgaagctaaacatatcagttactaaaacaaagtctgcacatatttacaccaaactgtaaacagtagtgtaactcactggttgatgagtatatgagggatctttattttcatttcaatatgttctgaatttttgaggaagtgtgtaaattatttcataattagaaaataaatgaaatttttaaaaaaatcatccatgcacttcagcaagtctccatggaacctttatttgttgtccaaatcagttccaaagagcctctaaagaagggttccagactaccaggagctcactggaaataagaccaactggaccataatagaagaatgcaggtcatggctgggtgccgcaactcacaccactttgggaggccaaggcaggcagatcacctgaggtcaggagtttgagaagaatgcaggacagtgtaaagatgagattccactgacaactctgagccctagttgtaggcaggaataagtgaagagagcccgctggaggaggagtatttggactgtgcccattccacacagtatgtggcctaagggtgagcctggagacagcattccaggctggaggtccaacataagcaagggtgggaactgagaaagcatgtacagggcatgtggtggaagcagtggatgactcaaggtgcagagcccagggaggcaaagaagttggcttggtaagccatgtggaggggcagcgggaagagtcggtgaagcaaaaagaagcagatgggaggggcatttatgcctcaaatggagagttttatgcccaaagctcataagagcaaacacctgggttgccatcactgctgcactgcacatatacgcatgcacacatgtacacacatgcacttgtgcaaacacatgtgcacacatacacagacatgtgcacacacccacatatacatacacttcttttttttcttttctttttttttttttttttgagataagagtctttctctgtcaaccaggctggagggcagtggtgcaatctcagcttgctgcaacctctgcctcctgggttcaagagattctcctgcctcagcctcccaagtagctggaattacagctgtgcaccacgaccatgctcagctaacttttgtatttttagtagagatgggtttttgccatgttggccaagctggtcttgaactcttgacctcaagtgatccccccacctcggcctcccaaagtgctgggattacaggcatgagccaccacgcccggccatgcacacacactttttaactgctttgtgttctctggccctttcgcctacagaattagctatcgagaccaagggggttctcttggcctcggtccagcctttcctgaaccccacaccctgcatcagcacacactgctgtccactcacctgccctagtaagtcaccactagctgttgttgactgggagccccttggcttttaagcaggatttgacccaagggctcgcagtgcgtggtgggtccaggggcaggagttgaggcagaaagacaagggcagggacagctgtggagtgggggaggtgggagagagaaatccttaggaggcaaaactagccaggcttggcccctggtggatttgggaggcagggagcaggaggcgtgaaccaagacgctgggttccaggccagacactgtgacatgagaggccatagctgaggtggggctctgcaggaggcatagatttggggaggggacagagatctcagggtggcattgggcacaccgaacctggggagtctgtggggtgtctgttgatgctgggaagctccaccgaggactcaggacagggtaacagcaaagcgggcacaggacgccaaccacagcaggtgagtggaggcaggagccacgggtggggccaggccacacagcctgggaggcgcaggggctgggcagctgccagtgacccaagcccacacagagacttgcacagctgccccagccccaaattagggggatcccctggcccaccttctcttggctcagccactctgggaggtgggcacacaggggcaccgaa

SEQ ID NO: 7461 - DNA, 2300 bp, Homo sapien
gaatcatctcggaggcttggtaaagggctagctgagggccacagagcatgcagaggcaggaagcctttgggaagcaggaaggctgacctgaggaggtttaggaaggcttcaccagagccatgtgaggagaagagagaagagtggggacctcagatcttactggaaagacccccaaagagagtgctgtggggctgctatctctggaacaagcccaggttagtccagaaggcctctgagaagttgaggagagactaagggaagtggggcaggaggtggtgggcccatagggatttctgctcctgcttggctgatgaggaagaccaagcaagccccttgtgaggccccagtgtggtgaggtgtcgctgggtgtgagagagaaggcttcttgttaccaagggaagctggggactaaggacatatccatcccattccctttggggaggcggggcgagctctgtacctctaaggctaaactctaggggggaagtagaactgttaaatctccacttaaccagctgataactgtgcttttaaatgtccactggggccttccccaactaaaacccccaaatgtaacttctagccccccatgcctgtggggcctaaacctgctgataaccagatgtgataaacccataacaggacaaaaagttaaagggactgtaacagacatcgctaaaacctacagcccccagccacactgggctgctctctccagcggggtgaactttaaccctttgaggagttcatggcggatggggccaggggccacagggaccaagtttgctaacactgtggcttcctcttcattacccacctccctcttccagaatcagagaggccaagggagcagcctgggctgaggctgggacaacttgtgaccccaagagcagggagagctggacaggccctgttggggggtgggggaggaattgtggtttagatgaaggagagccagggccctccttcctttttgccttagatctgactttcctcttctagaaaataaccaattggattagagaggtagtgcccgaagtgtgaaagaaggaactcacttttctgtggccttagccaagtacttcccctttctgaggctcagctctctcctgatggggcagtgatggttactcagcccacctcacaggcatgttgtgagggtgagaggaaagaaacagcaggaaagtatcccagaacaagttctggggatgcttggagggaatattttattgttagcgcctgactatggtaggtgctcaataaatatttattggatgaatccattttccagttccaaagcatgtcctgtgaaacagtcccatgagatgcttcacaatagagagatttgtggtagaatgagtttgggaagtgctgaatcctgtttcttcctcttggagatgcatatgtgcattagtttaataaaggctctgagaagcccttggagaaagaaacctgttcgattgtgaaatgtttccttccccaactcatttgaccactgtgatccttctctcctttgttttcctcatgattcttatgtctgggaaaaaactttgatgcagaggtcttcctgggcctctctgggtctggtattccaggacttgtaccagagctgctaccactggccctctgcctcttggcctcttggccattagtaatgggcgttgctggtccaggggctatccttgcctgagtgggcagtgggagggtgctggaggaagaaggaaggctgagtggggggctggggagacaccccagtggccatcattggctagaggctggatggatgtttggatgtcccagaggcctgggtgtcccagagaacctgtttccaaagaggttgtgggcttcacaagttggactgtcctcagcccgggttttgggggcaaggcttacaggcaccgaactctaaaccagatctttaacgaggcactaaccagaggctaacaagggctaagccaggtctaaaacccccagtgccagcagctgaaggttccgggggagatggggcaatgtggtaggccctctgcccaccccctccctcccacaaaataagcagcaccaaaaccaaagttaaatctaaacttaaacataataaacatcttttctaaaaaccaaaccaaaacaacaaactcagagggttaaaccgacccccagatccactaaaaacaaacagaacagcccaaccccacccagctgggaattctgaggtgtcatactggagtgtggggtgagattggagctggagcgggttttattggctgtcagtgagcgaagcaaggtccctttaacattttccactt

SEQ ID NO: 7462 - DNA, 2300 bp, Homo sapien
atctctgcagtctctattgatctcttacatacctctgtctttcccttcttttttaccctctatatctccccctcccttctcagccttggcccccccatctctctccagttcccactcactggtattgattggcctctaggcggtttcccttcctttcctctcgccaccggctcctccctccctccctgtggaaccataaattttctgcctgctcagagctgtgtcagtctatattccagatccaggggcccaagaacgtgatagagagggcaggaggacgtggcctctgggggccccagccctgctcctggcatgcagtctctcctccagcactgcatggctcggggccctgcaccaccggaagcctcctctgggtgcctctgaggaccgctttcttcacttctaaagacctgggggccaaatccagctctggcatgtagtagggatggaggactggcagcagcattggggagatgtcctgggtcctgactgcatcctggagctgggggtggcacatggggctcgtggtgacagtttttgctcccaaatggagtttagaatcaataaataggagccagctctctccagcccctcccagcctcctctctcccagccctcccctttctcacttcacccgcccctgcctcctgtcctttccttacccagccctcctcctcactccgctgcactgtttcttcagctcccccaggtgccctctccacctctctcctcctttccctcctcctctaccctctgccttcccaccctctcccctgtccgagcaggttggtgcatacgacccggtgacgggaaaggagtctctctgtgcttacctctggggccacaggtgctttccagagcgtccaaaagtttgggggacagaacccaattggagggcatcctgaaggagaagtggtttcctcagcttgacatacgtggcccaggaagggttttgtcctaaatgggacactcagtgggcaggtgtcctctagaccccccatggagggagaggttggggctgggggaggggcagtggtagtggagaggaaggattggaggagtccaggagaggcttgtgcagggggctgggggagcagctttttggggaggtggtggggagttgtacgtgtgtggcatgtcttattcctgagtacctcgaaggctctgggtgcactgtatgctgtggaccctattttggagggtgagcttggggagcaggggtgtctgtgtgtatgttggccattcatgtcctgtgatcaaacgtgtgtgtgcacggatgtatgccctgtgagcatgtgtatatgctcccctgagagtaagttggtgtgccagtgtctgtgagcacatgcatgcatgtatgtgtctgagcctgtgtgcctacccgcacactgtgcccatatgggcacgtggatgtttccatacccaagccgatacacatctcagtgtgcacgtgcgttgcgaggggtggtgcagaggtggccgccgcggcatctcagcaggctgtgccagagagcattattggggttcatccgggtggggtgggcggggaggaagaaagtggcctctcttgctagcctcaatcccgttccattattcagcagggtcccttctccaggaggggggtgcaggaggagcgcgcgcgtccaggcgcgggggaggggcgggcgcgcgcagaggagaggagagcgccgagcgggctagccaggtgccgcgcggctgagctgcccagcgccgcccgcagatcgggagccgctctggtccctccgccctgccccctcctcctcccgcgcttcccctcccctctccgctctcctccttccctccctccctccctctctccctctctccctctctccctccctccctctcccttccagccctctcagcctctgcagcaacacttcgctgcctccatctctccgccggaatctcgcaggctcgcgcctttcctcggctcagccccgctcccctcctctcctatcccctcctctcctatcccttcattcccccctcacccggatttgcttcccttcccccttctcccgcccccccctcccccggccgctccctcctttcccccggcctccgtcgggcggcagcggcagcagcggcgcggccggccccagtcgccgtcggtctcccgccttcgggggaaccaggtctccgtccctcttctctcctccagcccgcaccgccccgctccccagctcggtttttccgcaggatttccctcgctctcccctccctgcttggcccccgcgctcccctccctctccactcggcaccatgccccctccccc

SEQ ID NO: 7463 - DNA, 2300 bp, Homo sapien
atttgattccagttccggcccgtaatcagggcctttcatagatgcgcagcccaatcccgtccacccccattccctccctcccaaagtttcccattcccagaactccttcaagcctttcccaactcttgggctctctcctagggagttcaaagcccagctcccttcccccaacaactagggcttggccttgggactctgggaagttctcctccgcaacacctgatcccctgccacagagcctaactccctggaatccctggaagccctagccagcccacagccgagcttcagtcaagacactggtcagtctgctgccctggccacgggctcagtacaacacaagacccgccaagataacccccggggtttggggccactttggattctctgtgacacatcgcccccttctgagaacaaggggaattcacagcactatgtcaagagatctgacagatctcagatctgagggagtggggcagttaattccatggtctctgaggaccctccccaagctctgacagtatgaggcaggctgatgcccaggggttcctatggggctgagggctgctttgggcatgtgcaagaaagtagatcacattgccctcagtaggctctggagaagctgcatctttcctgtcccaatgctcaggccttagctcaccctcctcctccctgatctctcagtcacccattctgggggcaggcaatgactgcttcaatgaccactgaagaggccctggggaatgtggcaccctgatgtgaccctgagcacaccagggaagcctaggtccaaaatgtccccaagctagcccagccgatgcccaagacaggtgactcggggactctagctcctgctacgtcctctgccccatagcgtctacctcacccaggaggatgctaagctccctattctcactccagccctcaaccaacataggcttctcaaccttggaggcccaggaggtccttggagggcctgggttacctactcctagctctggaatgaggccaccaagcaccctgtgagacgcatcctgcaaccaggctttcagtggtgacatgcagactcacaagagagccaagcagaacttggacaggaagatgtcaggctggacatagtggagacagggaaagagaggtggaaactgggggcagggaaccgagggaagcagcgtcgcaggaatggggtgatctcgctggggtgaggggtatctgggctagggccaggccttctccagaggccccagccccacctttgagatcgaggtttcgggcgccattggagtgctgcgtgacagtgcgggagtcaatcttgagcgtgtgcacgttgcctgggtccctggacaccaccacgttgtgccactggttgtcattgactggtttgtctgagttccccttcatcaaggacgggccattccccaggtcaaacacgtagtggatgtacctgccccacagtagggaggagacactgggtcagggcgggggtgatgctgggaaggtggggtgaggaggagctatggctggcaggggtcctaggtgccatgggaagagggattgaaagggagaccccagaggagagcgaccaaaaccaatggcaagagggctatggtgtgaggtcctgtcacggggagaatgtaaggaaggagggccaccaaggagccggctcttgtgacacaacctcagaagaggagctagaggggagaggtttgtgggtcagcagggtcctctggaggcagggactgggctgctctggagtggggtcccctaaggcaacggaggggcaagactgacttctgcctgtagagaaggtgacagtggacagagaacagatataacagggaactctggcaaggaagcagctggggagtcagcagtggaagagggtgtgcttctccatcttggctgaagagggagcctctcgacttacggtcggggacctgaatcttgacttgtgatctggggggattggacacctcggccagtagccaggagagctgtatgtggttcagcagggggagggggccacctccttgacagcagtgcaatccccagcccctcaccccttgaccagctcgatgacaatgaagtcattgccgttgcccgagttgaacagaagaagcccatcaggggccgtggtcttgaactggaagaagaggtgcatggaagcataggcttggagcgtggcgagtgccaggtagctgctgcgactcttgaaggtgacgggatcggccacgatggcacgcaggccaaagcgagcattgagctcacagtaggtgatgtcaccatccttgcactggtcc

SEQ ID NO: 7464 - DNA, 2300 bp, Homo sapien
atgccaaactgtcatgcagtggttctttcactgaggtttgtccctgcctgagatgatgcctgactgctgtacttctgaattcttatattagctttttctagtttttctgtctccacccgtaggaggagctgtcaggtagcaactgacatctctctctctctctctctctctctctctctctctctctctctctctctgtgtgtgtgtgtgtgtgtgtgtgtgaacctggaaatcagcattcctaagttaggaattgctgttagaattgtgtgtcactaacagtaggtggactctggctagggcctgagaggtcctatgagaaaatgacagttcttttttttcgtttttgtagaagtagctttattaaggatgcagttttacagctccatgactcctatagagcaaggctaccttctaggcagtgtgtgtagagtagccagaaaataacaattcttaattgcccgggtgttagatgcatgttttggctgtttagagtcttttcttttcccttttgttctggtcttcatcactgtccttgatcatcaatctgctggaatcctgacatgttaggcaagacataccatctatgacaccatctctgtcttctgctgggggagtgaagtcttgtgtctgaaagttaagcaaatgaaatcacctatgttgggttattctgtcagctctaacatccagtacctgtggtcctgacagtttctgtgagtagaagtggctccaggtagaatgggacaggcttctctagagggtggtatagacagcagttgctctcagacccagagacaagctagatgcccctacgtaaagatggcaaaatgggtaagagcataggctgccatggtttgaacctagctttgctacttgttagccgtgtgaacttgggcagttaacttatccacattgttcttcaacgtcctactctgtaagatggaagtaatatcgttgtaagaactaagtgaattaatatacgaaaatcctttacaatccaggcactattctgagtgatcaataaatggtactatggttattagctctagtggtcagggaaggcttcaaggaggaggtgggacttggccagaccttgaagaaggatgactgagtgtgagttatagaggtggaaaggaaagggcagggctttcccaccaggagagtagcctacatgaggaatacaggggatgtgaattgagtgggtcaggacatgatgaagagacaaagttggttgtgttttatggtagataagatcagaaccttagattagaatcagtttctagaagtcttgacttccaggctaagcacgtagcccactggaagttttcaccagacagatttgggttcaaattttgactgtcactaactagcagtgtgaccttggccaagttactcctactttctgagtcttggtttcttcagctctaaaagggagtgatagtaatatccattcacaatgtagcagtggcgggtaaaggaacaatgggcgtaaagagccaggcacaccctaagtgctcagtatatgcaaagtgttatttttattattcactcaacaaacaggagaatgcctttttttctgagccaggagccatgtaagcagctggatatagagagatgaatgaggcattgtcctcacttttggatatttcacagtcaagtcaggaaacagacatgttaacacagatgcaatagagattcaataagataattaataatagaatgtacatttctagagttggcacaaaagaggaaggctagctctcctttgtttagaacagagacaaatgtgtattgacctggatcttttttttttaattctttctttctttttttttttttttttttttttagagacctgggctgaagtgcagtggtgtgatcatagctcactgtaacctcaaactcctgggctcaaatgatcctctatttcaacctcctgagtagctgggactacaggcgcacaccaccatgtctggctaatttatttatttttctttttttttttttctaattttttttttttattgatcattcttgggtgtttctcgcagagggggatttggcagggtcacaggacaatagtggagggaaggtcagcagataaacaagtgaacaaaggtctctggttttcctaggcagaggaccctgcggccttccgcagtgtttgtgtccctgggtacttgagattagggagtggtgatgactcccaaggagcatgctgccttcaggcatctgtttaacaaagcacatcttgcaccgcccttaatccattcaaccctgagtggatacagcacatgttt

SEQ ID NO: 7465 - DNA, 2300 bp, Homo sapien
gggtgtgtcttgaagtggcaggtcccaaatgcttaggcaatctgaaccttggaccttgcagagaggagagatgtccctgtaggtgggagggacagggagatgcagcagctgcccggtgaccttttctgcccttgatgggcaaagctgggggtagggaaaggagacaagtgctcatacttacctccctccctgcccaggctcctctgtaagggtctgagtctgtctctgtgagccattgcatctgtctgtctatgccctgatgcctggatggacaaggggtgtgtgtgtgtgtgtgtgtgtgtgtgagtgtgaggaggctgcaggaagaggaacagtgggggatgggcaggaaagtgggctgtggggtcagggaggcgatttcgcattcataggccctgacgcagcagttccattctctggctccttcattggctttggtggggatgccctgggggtctctccaaggtcagagtgggccctaagtctgggacctggcttagggatcacccttctcgactcctaggaaaaactccttgcagcctgggtccccctcttaccccttcacaggctggggaaggagtttcccacccggggggttggtgtccgcattaagccactcagtaattgaccactctctttgaagtgcctgggcaggggtccaggatgactgtgggcaggtcccctgggtgcagctgttctgggcatgcattaattgcctggtgtaggtacctgtgtgcacaagtgtgtgtgttcttgggcagtatatgcttcctgtgggtgtgttaccatggtggggcatttctgcaggtgttcttatgtgtctctgggaatgcccagtgttcacagatatgtgtgcatggctgtgagtgccccaatgtccatgcattggtggttgaatgtaagtgttcttgcatgttgcctctggctaaggaagtgccaactaccaccagctgtgcagatcacagaccctgcaacagaaaccagggtcctggagtgagctggcagaatggtctggcacacatacacacacacactctgtctctcactgtctcattcagcagcccagtgaccaacctcggggtatacacactaagtgccagtgtgtgtacacttttattggcggagtgagtgaagggtgtcccccagtcccccacactcatacacatgcacagtgatgcatgtacccttacaggagagacctgcgccccccagcaccactctaactgaaactcatggatgggaggaggagaacagagaagggggctgctgccaggtgccctcagtcaccaggcatgtgcaggcgcaaccctgcccccacacctactcgtacctcggtccagggttccaggcagaactgagagtttggcctcaaactctgggattcccatgaggcaggactgggaaacccccaagttcctaggtctaccccgcccccatctctgcctttccttcccccaccgcctccgtctttatcccagcaaagccccttcctcttcagttctgggggctccaagccaggggccctccggacggtgggaggtgggggccaggctaccgactggaaaaagcccccagcagccatggacccaccgagtcccccttctctaggctcctcgaagcccgggcccgcccctgggggtagccagcagagggcgctgcggcccaggccccgcatcagccctgctctcgcggcgtcccaagtcggggtccacagcctctccttcggcttgtcccagccccgcgctgcgcgaagacctgctggccgtggggggagggtgcgggacccaaggccccgaactaaggggcgaggggcgaggggcgagagtgcttgggttcccggaaaagacactgaggccgggtttggggcccgcctggttgggggcccgggcgcccgagaacctcgagaggctgggaggagcgcgggtgctggggccgggacgcctgggtcccgcgcgagggagggagtgggcctgtggagccgctggactggcggcttctgagcccttgcattggctgcgctgctcgcccgtcagcgcagcgtggtccaatgcgcgcgtctcgggggcgggcactggtgctgatgctgccgtcagtcggtgttgcagggatgcggcggcgggagcagccgccctgactcgcggagcatcctcctcggagaggcaccgcggcggggcgggcgggcgggcggggacgcggcggggagggagagaggcgcgaggcggcagacaccgctagccctggctctgccacccgtcggagacggggcggccctgtagctctgctacccaccctccagcttc

SEQ ID NO: 7466 - DNA, 2300 bp, Homo sapien
cccgcccgcgactccgcagactcccgctctgcctctcccgggacaggggttcggtccgagcccggtgggaggctcccggagcgcagcctgggcccagcccaccccgcgccggcggccatggcaggcaccctggacctggacaagggctgcacggtggaggagctgctccgcgggtgcatcgaagccttcggtgagtggctcgggagggcacacggagcctgagcctagccccgagtctgagcccgggtccctgcctcccaggcacagtccagggcacagccctgacccggacccaccctgctccgcagcgtgcagtctctttaacgaaagcctcctccgcaacgcagggcagagagatgcacgcccttcagacagatgaggtttcccttctctagccttccccagcggcggcgaagggagggccgggtcccggactctgacacttgaggggcattatctgtctcccggggaatccggaggaactcgctatctccggcctgggagctgtttccggctaatggggggcggcttatctggtgaaggggtgccccttccccccaagcgctcaggaaatgacctctggattcttgaccccggggaacccaggctccttccgccccagctggttcccctccggacgatgggcggctcgggcgctcccctcctccagtcctcagggcgtgcctatctctcgcccaccacacctttcctctctaatttgcctcctgctctcggagtcctgggcaagcaggaggtgggcggggtcgagcgtgcacccgaaggaccgatacctggcgggttgcggggtgaggatgaggcatggtagctgcggacccagctcagccacctgtctttgacccttcggagtcagatgactccgggaaggtgcgggacccgcagctggtgcgcatgttcctcatgatgcacccctggtacatcccctcctctcagctggcggccaagctgctccacatatatccttcgccggccttgccaaggcccccgccgtcggagcccatgcgcagcccctctgcccagcccaggtgcagaatgagcctcgctcctaagtataggccactccttatcccagagctcaggcgtcgtcccagcctccaactagggcctaggctctgccccctccttgctcctagcgactcggtcctgtccccaggctctgtccccagccgaggccttgccctccttctccctagagtctggggcctgcccctgcttcaggcttgggtgcgccccgtgcatctctctctcccagagcccaggctttgctttcagcctccctcagcacctagtcctccacccccacctccaacccctcccagagctcaagcctcacccccagcatctccgcagagcgcaagccccatccctagaacgtgtctcctagaaccaggccccgcccccagcctccctccacgcaggcctccctttctagagttaagcggcctccttaaccctctccttcacctaccaacaatcccggaaggacaactccaattccctgcaggtgaaaacgtgccacctggtcaggtgagtctttcccctggggctctagcccctcccctttctcccttctctctggcttcaggctggcctggaggagggggcagggcgctgtttctgggagtgggtttgaaccctggcttgtccgggtgggcagtgctgccacaggctcaccccttcctgggtctgggccttaattttcttttctgcgcagtgcgggtggttgtctcaagggtctaatgtacacttggagtggcgaaggaaagagctggaaccatagtttgagggtctttttgcttaggtgactataatctcaaatagctccttgcagcctgctgggtgatggtgggggaagggctatcttgggtgactccccgctcctccaggtactggatctccgccttcccagcggagtttgacttgaacccggagttggctgagcagatcaaggagctgaaggctctgctagaccaagaagggaaccgacggcacagcagcctaatcgacatagacagcgtgtgcgtggggggagcacagagggctgggggggcactcagtatcctataccatctgtgcttaataaatgtctgttgaactgaatgagtgagggtcatgttgctctctcgcttaaaaaccttccatggctccctattgccttcaacatgcctcctctgggcagcttggcgttcctgcctcatcttccactgccaccacccatcccacacacctcctcctgtagctgcgctgggtcggctccccgtcggctgagctctcgagtcctt

SEQ ID NO: 7467 - DNA, 2300 bp, Homo sapien
ctggcgtcaccctccacgcctctcttcccagtgccgtgtccatactaggtcagcggccagcctcgctggccgggggcggggcgtctgcctgggtggggcccaccggggctgggagccgggacttgggctgaggcttcccggaccacggaggatccgcgctgtcgagggcaggacccaggagggggaggaagcagaggatgctcggcgccttcttggctccgcccttagccccgccctactgcggcgtttaagggtctcttagcaggtggctacactggatccaaagtcgggggagtgttacggcagggaacactcgcagaccgcctagtctaggccctcattatggggaaactgaggaacagaaaggtcctgtttctaagtcttacattaccaagactgaggtgcgggggcggtcctggatcccccgccccaaggctgggaggggcacgcctcggaagggaggtttggggtcggtggtttcacagtgagtgtgtctgaagccaaatggtcggaaaccgttacccgctctcctaggcccggctagtggggaccccaaccgcctgcggctgcccctcccaagttcctccctgttggccaggcatccaggtctccagtctccgagctgcggagaacccaccgccacatgcggctgcccctttccattcgaccctgtggggagccaggcttccggggccccgttcctcctgtgtgaactgggccccccgcccccattcccagacatcaaggccgcgtctccagatagccacgatttcattcctcgctccccacaggtccctctccccaaaatattcccatcttgtcctagcccatcccccagactatctcaaggaccagctgtccccacgcccccgacctccactaggcctgtgccacccgctgcctgcaggaagacgcccggtcccgggccgggttagccccatgggaacggtttgtctcgaaaacaggaacccgagctgggggctgggcggggcgccccttccccaccgcagtccgcttcctgcccctcccggcttcctccgcccgacacccaggcagggcggggggcactggggcgtccgcggttgggggaggggctcttcgtttcggtcccccctccgcgtcccgggcggcggggcctccggtcgcccgccctcggggcagctagtggcgcagccccccgcccgcggccctggcctcccgggcggcgcggcaggggaggggttaagctgccgcagggaccgccgcgtgcggggcgagagggagcccccggtgggggtggcgcagccggcggtgcggagctccgcgcaggggcggaggggggagggggcagcctggcgcgggggcgggggcggggcggcggggagcggggccgcggcgtggagagcgggcgggagccgcagccgcagcgaggccggcgggcgggagcgcacggaggtggggtcggccaggccggtgcgggctccttgcggcaggtcccaagagtgagtgggcgagcgcgggcggggcgccaggcgaaggagggcgcggcccccagcgactccccccccgcccagggcggcgcgggcgggctgggggcggcgagcgggtggggagtctgcggcccgggtctgggagagggggcagcggccacgagagctaaggcgcgctggatccccggagggcggaggacctccacggtgcacccagcttttcccagccaccttccagcggggccctcccccgcgtacccccatttggcagatgagaaaattgaggctcccagaggccaagtgattctcaaggtcacacgaggaagcggtagagccaggcggggacggctctgggtggctcttaggaaaagtccgcctgagaactccgtacaggagctcccctgtcctccagcctgggggagtgagtatgtgtagggccggggtacctttccgtggggcaaggctctgccaaaatctgggagtgaggggagtcagggagctggggccgcagggcgggccctgcaccgcaaatgggaggggggcgacggaatgggcgtgcgcacccatgggggtgtgtgcatgtgtgtgggagtgtacatgcgtggagaggcactgccttgcgtgtgtgcacacgtgtgaggatgtcagcgcctgtgtggccgcgggactcaaggctggcctggctcaagtgaacagcacgtccaggaggcgacctcgtccgcgggtttgcattctggggtggacgagctgggtatgtgtgcctgagggtttcttcgtgcaggtgtgcacagggtgtgggtgccattgtgtgtgagagacggaggatgggag

SEQ ID NO: 7468 - DNA, 2300 bp, Homo sapien
gcgccttgtacaaggtgaggggtcctgggccaggggttggcagggctttggtggccctggttgggatgaggcagaaggtggagatcctgccagcagagtgaaccagagcttccctttgacctgcagaacccaagagagtggacgcggatggtgatccggaacatagccacctctggcaagttctccagtgaccgcaccattgcccagtatgcccgggagatctggggtgtggagccttcccgccagcgcctgccagccccggatgaggccatctgagcctccagaccagaccccaaaccagcccttgagtctgtcacactctcttgggccagccccagcacctcatgcagagggtggggtactggagttagatctctaagcccctcctggaaccctcattttccccactctcaatgtcccagtgtccagcgtgactaaggacacgggcccccttccgtcctcgggctcccggtcccctcctatttatggggtctgaccaactgcacccactccctaataaattcattctccttgggagcctccttactcctctttgttgggaaatatttttagctcttggcgggctcaacagcagccgcgcagtcacccccttatcctccaccctcggcaggtgcgtcccacggcgggacggtgatgggaggtggagggggcgacccgtgggggcggggcctaggcctctccagcccctttcctggcgtcaccctccacgcctctcttcccagtgccgtgtccatactaggtcagcggccagcctcgctggccgggggcggggcgtctgcctgggtggggcccaccggggctgggagccgggacttgggctgaggcttcccggaccacggaggatccgcgctgtcgagggcaggacccaggagggggaggaagcagaggatgctcggcgccttcttggctccgcccttagccccgccctactgcggcgtttaagggtctcttagcaggtggctacactggatccaaagtcgggggagtgttacggcagggaacactcgcagaccgcctagtctaggccctcattatggggaaactgaggaacagaaaggtcctgtttctaagtcttacattaccaagactgaggtgcgggggcggtcctggatcccccgccccaaggctgggaggggcacgcctcggaagggaggtttggggtcggtggtttcacagtgagtgtgtctgaagccaaatggtcggaaaccgttacccgctctcctaggcccggctagtggggaccccaaccgcctgcggctgcccctcccaagttcctccctgttggccaggcatccaggtctccagtctccgagctgcggagaacccaccgccacatgcggctgcccctttccattcgaccctgtggggagccaggcttccggggccccgttcctcctgtgtgaactgggccccccgcccccattcccagacatcaaggccgcgtctccagatagccacgatttcattcctcgctccccacaggtccctctccccaaaatattcccatcttgtcctagcccatcccccagactatctcaaggaccagctgtccccacgcccccgacctccactaggcctgtgccacccgctgcctgcaggaagacgcccggtcccgggccgggttagccccatgggaacggtttgtctcgaaaacaggaacccgagctgggggctgggcggggcgccccttccccaccgcagtccgcttcctgcccctcccggcttcctccgcccgacacccaggcagggcggggggcactggggcgtccgcggttgggggaggggctcttcgtttcggtcccccctccgcgtcccgggcggcggggcctccggtcgcccgccctcggggcagctagtggcgcagccccccgcccgcggccctggcctcccgggcggcgcggcaggggaggggttaagctgccgcagggaccgccgcgtgcggggcgagagggagcccccggtgggggtggcgcagccggcggtgcggagctccgcgcaggggcggaggggggagggggcagcctggcgcgggggcgggggcggggcggcggggagcggggccgcggcgtggagagcgggcgggagccgcagccgcagcgaggccggcgggcgggagcgcacggaggtggggtcggccaggccggtgcgggctccttgcggcaggtcccaagagtgagtgggcgagcgcgggcggggcgccaggcgaaggagggcgcggcccccagcgactccccccccgcccagggcggcgcgggcgggctgggggcggcgagcgggtg

SEQ ID NO: 7469 - DNA, 2300 bp, Homo sapien
tcattcacaaaggagggatgaaaagctgagcagagaaggggagttgcagggaggccctgcaggggcgatgtggcagccctggggagcagcaggctggacctgggttttgaccctggggcatgggacttctcagcttttctctggaagaggagccaggaacccctttccggggagctgaccacagctctgtcctggcaggtacaatgcccaggagtactacgatcgcattcctgagcttcggcaggtcattgagcagctgagcagtggcttcttctcccccaaacagcccgacctgttcaaggacattgtcaatatgctcatgcaccatgaccggtgagctggttggcccgggaatcactcaggtggggccgcagggcagatcgaggctcaggtgtgtggtggggaagccggacgcgggtcctggtagttggagccaggcgcctttggaagcagcatgaccctctaggtccccggctgtccactgggacagggcaggcttggcccttgacctcatagaacttatcctagccccctaaaggaatagcacatgcctatcctttcccctccaggtttaaagtcttcgcagattatgaagactacattaaatgccaggagaaagtcagcgccttgtacaaggtgaggggtcctgggccaggggttggcagggctttggtggccctggttgggatgaggcagaaggtggagatcctgccagcagagtgaaccagagcttccctttgacctgcagaacccaagagagtggacgcggatggtgatccggaacatagccacctctggcaagttctccagtgaccgcaccattgcccagtatgcccgggagatctggggtgtggagccttcccgccagcgcctgccagccccggatgaggccatctgagcctccagaccagaccccaaaccagcccttgagtctgtcacactctcttgggccagccccagcacctcatgcagagggtggggtactggagttagatctctaagcccctcctggaaccctcattttccccactctcaatgtcccagtgtccagcgtgactaaggacacgggcccccttccgtcctcgggctcccggtcccctcctatttatggggtctgaccaactgcacccactccctaataaattcattctccttgggagcctccttactcctctttgttgggaaatatttttagctcttggcgggctcaacagcagccgcgcagtcacccccttatcctccaccctcggcaggtgcgtcccacggcgggacggtgatgggaggtggagggggcgacccgtgggggcggggcctaggcctctccagcccctttcctggcgtcaccctccacgcctctcttcccagtgccgtgtccatactaggtcagcggccagcctcgctggccgggggcggggcgtctgcctgggtggggcccaccggggctgggagccgggacttgggctgaggcttcccggaccacggaggatccgcgctgtcgagggcaggacccaggagggggaggaagcagaggatgctcggcgccttcttggctccgcccttagccccgccctactgcggcgtttaagggtctcttagcaggtggctacactggatccaaagtcgggggagtgttacggcagggaacactcgcagaccgcctagtctaggccctcattatggggaaactgaggaacagaaaggtcctgtttctaagtcttacattaccaagactgaggtgcgggggcggtcctggatcccccgccccaaggctgggaggggcacgcctcggaagggaggtttggggtcggtggtttcacagtgagtgtgtctgaagccaaatggtcggaaaccgttacccgctctcctaggcccggctagtggggaccccaaccgcctgcggctgcccctcccaagttcctccctgttggccaggcatccaggtctccagtctccgagctgcggagaacccaccgccacatgcggctgcccctttccattcgaccctgtggggagccaggcttccggggccccgttcctcctgtgtgaactgggccccccgcccccattcccagacatcaaggccgcgtctccagatagccacgatttcattcctcgctccccacaggtccctctccccaaaatattcccatcttgtcctagcccatcccccagactatctcaaggaccagctgtccccacgcccccgacctccactaggcctgtgccacccgctgcctgcaggaagacgcccggtcccgggccgggttagccccatgggaacggtttgtctcgaaaacagg

SEQ ID NO: 7470 - DNA, 2300 bp, Homo sapien
acctgggaggcggaggttgcagtgagccgagatcacgccattgcacttcagcctgggcaacaaaagcaaaactccgtctcaaaaaacaagaggaaacaaaacaaagcaaaaaccccatgaggatgccctctaatggtggaatttcaggcagtacagggtgaaattaccttcaaatctgcaacagaggtggggaaatccaggttggacctagatggtcaagaatcaacaagaggtagagggcagtgggggtgcggtgtgagagggaggcttggctggtgaagactgggagtttggggtggggcgactctgagtccagctatgcctggggccagcctaatctgagagtccccagctggtgtgagggtcttccctgagttgacttgtccccctgctgccaccccacagtgatcccagctgcagacctctctgagcagatctccactgcgggcactgaagcctcaggcaccggcaacatgaagttcatgctcaacggggctctgaccattggcaccatggacggggccaatgtggagatggcagaagaggcgggagaggaaaacttcttcatctttggcatgcgggtggaggatgtggataagcttgaccaaagagggtatgggggtcagggttcacgggcaaaagacacccaggtgtggctgctggagagtggtgctgggagcaagcggcacgtctggaaagactggtccaggcccagcaaggtcttggtcatggccagcaggattctgggaaactttagagggcgcttacagcaaataaggttaatgaaattggaaaagaaagaagtaatatagaactgaaggaaaaggaagagaatattatatcaaccctaagagataatattgtttgggaaatggaagtaaaaaaatccttgctctacgccgggtgcggtggctcacacctgtaatcccagcactttgggaggccaaggcgggcggatcacaaggtcaagagatccagaccatcctggctaacacggtgaaaccccatctctactaaaaatacaaaaaattagccgggcgtgttggcaggcgcctgtagtcccagctgatcgggaggctgaggcaggagaatggtgtgaatccaggaggcggagcttgcagtgagccgagatcgcgccactgcgctccagcctgggtaacagagtgagactctgcctcaaaaaaaaaaaaaaaaatccttgctccctgaaagccatgggcaaaagggaaatatgggcacagtagttacaaggggcctatggtcagaaacagttcttcagagaagacattatcctggcattacattaaaaaattttattttattttattttaatgtatttttttttttgagacggagtctcgctctgtcacccaggctggagtgcagtggcgcgatcttggctcactgcaagctccgcctcctgggttcacaccattctcctgcctctacctcccgagtagctgggactacaggcacctgctgccacgcctggctaattttttgcatttttagtagagacggggtttcaccatgttagccaggatggtctcgatctgctgacctcgtgatctgcctgcctcggcctcccaaagtgctgggattacaggcgtgagccactgcgcccggccttttgttttgttttgagatggagtcttgctctgtcacccaggccgcagtgcaatggcacgatcttggctcaccgcaacctccaccgcccgggtacaagcgattctcctgcctcagcctcctgagtagctgggattacagatacccaccaccacgcccagctaatttttgtatttttagtagagacggggtttcatcattttggccaggatggtctctatctcctgacctcaggtgatccaccctcctcggcctcccaagtgctgggcttacaggggtgagccactgcgcctggcctatttatttttatgtttttgagacagagtcactctgtcacctaggctggagtgcaatggcatgattttggctcactgcaacctccgcctcccaggttcaagtgattctctcacctcagcctcccgagtagctgggattacaggcacccaccatcacgcccaggtaatttttgtatttttgtagagatggggtttcatcatgttggccaggctggtcttgaactcctgacctcaagtaatccacccgcctcggcctcccaaagtgctgggtttacaggcgtgagccaccgcgccctgcttgaatcctgatatcttagcattggagagagattttccatgttattagtcttcaaaaatattttaaatgtttgtataaca

SEQ ID NO: 7471 - DNA, 2300 bp, Homo sapien
gtagctaggattacaggcatgtgccaccatgcttggctaatatttgtatttttagtagagacggggtttcgccatgttgatcaggctggtctcgaactcctgacctcaggtgatccacccacctcggcctcaaagtgctaggattacaggcgtgagccaccgcgcccggccagcattgttttttaatggtttatgaaacacttcttaagagaaattggaaattaacagaaaaatgtaaggaaaagttgtttgcatccccgtgtctgtggaggtgtattttggtgtttttttcccgatcttttttctctacttggaaatgtggcaggcaccacagaagacagtgtgcccgtgccttttgggggcaggggtagagcagggcttgggagcctggagacctctgtaggacttgaagtttggcccacatactaagccggtgattccagggctgggtctgccatggctcagaaagtgatcggaggccgggcgctgtggctcatgcctgtaatcccagcattttgggaggccaaggtgggcggatcacctcaggtcaggagttccagaccagcctggtccaacatggtgaaaccccgtctctactaaaaatacaaaacttagctgggcatggtggtgggtgcctgtaatcccagctactcaggaggctgaggcagaattgcttgagcccaggaggcggaggttgcagtgagctgagatcatgccattgcactctagcctgggcgacaagaatgaaactctacctcaaaaaaaaaaaaaaaaaagttctcagaaacagcttggctttctccgaaccaggctctcaatagtatcctgcagctgtccaggcttttgacctgcttccttggccttcagaacagaacacccagctcttcccctccaccggcccaccacccgggaggcccaaacagcctttgaactagcacaaggtcctggttcctttctcttaaagaacagcaggatccgaagcctgccctcacaagatgaggaggcagcagctgagaggcagggatttttttttttctcattggagagtctaaatttggtgaaggaatccaaagctcagaaaggtaaagcaaccagcttgaggtcacacagcaagtcagtgctggggccagaacacagcagtgaatgggaggatagccaaagcctccagggaagggctcaaagctgtggggctatgcacacaaatggggtgaggtcctcgaggtacagattaggcacccattttataggccaggtcacagagctggtttacaaaatcctgctcagagtgtggccccaggtggcaggaagaagtgaaagaaggcctctaatcacttcctaagcagtggaatcacagggagaacttactgtcattaaaccagtatgatgatggagtggggaatgcctcagtttctcccaccgccgagggcctataggactacagttcccagggccccgtgctgcaggctagcggcctcccgccaatgctggccagtaacctgagcatccctctccaaaaggtcacttcagggctccttgagggacagcaacagggggagcctagagctgctcagcttcggtgggggtggagtgagggctgtggccctgcctcacacaacctccctcacaccacccctgcaatgcagggtcgtgggcccctttctcaaagacatccagtggcctctgctagttgcacctcttccgtcaggggacactgacttggctcctgcaccacagcctgcagggggtcctggttccttttgccacaacacatggcctcccatcctggttcagccactgacagacagctccccaatccagcactctgcctgctccttcttgtatccaaccctccaaaaggcagggacaagggacagaagaccatgtgcaaggcctggaggaagtgggtcagcacaggcctgtgaacaagccaggccagtcttggcggcccaagtggagctcacctctccctcccctctcctctcctccccttgccctcaaaatagctccctgagctgccaggccaagaccctcccattgcaggggaggcggggcgtgctgcccagagccaggctttaaatccccttgaggctggggagctccactccttggctggaggcagtgctgaggccgccgtcccctctaccatcagtccagtccggcccgccctcctgcagccatgtcccggcccctgtcagaccaagagaaaagaaagcaaatcagtgtgcgtggcctggccggcgtggagaacgtgactgagctgaaaaagaacttcaaccggcacctgcatttcacactcgtaa

SEQ ID NO: 7472 - DNA, 2300 bp, Homo sapien
gggcggaggaagcagggaaacagatgagatcgtgctgcccaggtgtgatcatgctgggctggggcatgcagtgtcaccccgggacaaagcctggaaacagtggggagtgatggcatgacaaagacggaaagaagccacagaaaaggtagttggagaaagttaaaaatttcccagtaaaaatgttcctgagagcaagcgccctgggtgcaagaggggagagtagctgggaaaggatggaatgaacttggccttccctgcctgtaagatgtggatggtctatggggatcgggtcctcagtggcaggaacataaagtcttgcaggaaataggggtcaatgcaaagaaggtgtgtgtggccaaagcaggctgccacgattgggctgtgaggtgacggcatggttaacaagctactgcctgcctggcagtggactgccaagaagtctcagctctactcacagcaaccctccaagggacaagtgcgggctgtgaagaaccttggatgccaggccaagctggagtccaagctgtgcttagtggaggatggggatgaggcccaggagctgaggctggggtgcaaactgtgaaaggggaagagaccagacagctgccagcattgtttttttgtttgtttttgagacagagtctcgctgtgtcgcccaggctggtgtgcagtggcgtgatctcggctcactgcaacctctgcctcccgggctcaagtgattctcctgcctcagcctcccgagtagctaggattacaggcatgtgccaccatgcttggctaatatttgtatttttagtagagacggggtttcgccatgttgatcaggctggtctcgaactcctgacctcaggtgatccacccacctcggcctcaaagtgctaggattacaggcgtgagccaccgcgcccggccagcattgttttttaatggtttatgaaacacttcttaagagaaattggaaattaacagaaaaatgtaaggaaaagttgtttgcatccccgtgtctgtggaggtgtattttggtgtttttttcccgatcttttttctctacttggaaatgtggcaggcaccacagaagacagtgtgcccgtgccttttgggggcaggggtagagcagggcttgggagcctggagacctctgtaggacttgaagtttggcccacatactaagccggtgattccagggctgggtctgccatggctcagaaagtgatcggaggccgggcgctgtggctcatgcctgtaatcccagcattttgggaggccaaggtgggcggatcacctcaggtcaggagttccagaccagcctggtccaacatggtgaaaccccgtctctactaaaaatacaaaacttagctgggcatggtggtgggtgcctgtaatcccagctactcaggaggctgaggcagaattgcttgagcccaggaggcggaggttgcagtgagctgagatcatgccattgcactctagcctgggcgacaagaatgaaactctacctcaaaaaaaaaaaaaaaaaagttctcagaaacagcttggctttctccgaaccaggctctcaatagtatcctgcagctgtccaggcttttgacctgcttccttggccttcagaacagaacacccagctcttcccctccaccggcccaccacccgggaggcccaaacagcctttgaactagcacaaggtcctggttcctttctcttaaagaacagcaggatccgaagcctgccctcacaagatgaggaggcagcagctgagaggcagggatttttttttttctcattggagagtctaaatttggtgaaggaatccaaagctcagaaaggtaaagcaaccagcttgaggtcacacagcaagtcagtgctggggccagaacacagcagtgaatgggaggatagccaaagcctccagggaagggctcaaagctgtggggctatgcacacaaatggggtgaggtcctcgaggtacagattaggcacccattttataggccaggtcacagagctggtttacaaaatcctgctcagagtgtggccccaggtggcaggaagaagtgaaagaaggcctctaatcacttcctaagcagtggaatcacagggagaacttactgtcattaaaccagtatgatgatggagtggggaatgcctcagtttctcccaccgccgagggcctataggactacagttcccagggccccgtgctgcaggctagcggcctcccgccaatgctggccagtaacctgagcatccctctccaaaaggtcacttcagggctccttgagggacagcaacagggggagcct

SEQ ID NO: 7473 - DNA, 2300 bp, Homo sapien
gggactgttggcttacttttcccctttttggtaggacatttcattttggctgaattaatgcctttctgtgagaaggtgtcttaacttccccactagtgcggagaagtcaaatcctcaggtttactgtggctgaccataatatagagttcatggagctcttggtgggaaaatccaattctctgcgcttgtggtttcccaccaatgccaaattggtccagcctctcttccctcttgagtgtgaatttgtcaggtataaacttagtcatttctgcctctctagagggaacaccctgaagaacatagagaaggagtgcaatgccaagattatgatccgggggaaagggtctgtgaaagaagggaaggttgggcgcaaagatggccagatgttgccaggagaagatgagccacttcatgccctggttactgccaatacaatggagaacgtcaaaaaggcagtggaacaggtgagcggtgagcccagaaaggaagcctcctagcagaaacctaggtggaggccctaagcacttaactgtccattgcattttcactagataagaaacatcctgaagcagggtatcgagactccagaggaccagaatgatctacggaagatgcagcttcgggagttggctcgcttaaatgggacccttcgggaagacgataacaggtatgtgatcagtttaaaggagagtgtagagacctgaagaacctatggaagtagagattgttcccttgcattgacctctttttcctttaataggatcttaagaccctggcagagctcagagacccgcagcattaccaacaccacagtgtgtaccaagtgtggaggggctggccacattgcttcagactgtaaattccaaaggtgaggggctggctcttgcggtttcctggtagcctgcgatgtgcaggacaacttttctggcacattcattggttgctgttaatcttaccaagagaaacatcctttctgttagtgtggtctgtaatggtgtgatttaaagcccaggatgattagaaataggctgtacagatacccctgtttgtttgtcttgagcccaagaaaactggaagtttccattttgggtatgtttttactggggctcaataggaaattcactgcttttgctgttcagaattggttcaagaagactaagcaatctctacagatttctgaccagttgcaagtcagcactcgatatcaacactttctgactggctggcgaatatgtaaggttttgtttaggaagttcgttctggcagttgtgccagtcttgcatagattttcctttcctcaaactgggaatgaagtttgatgaaattgacttgagagaacctgtgcttcatcggtgctcagggtctcctgtgctcttcgcccaggggcccctctactctggtgatcccagatgcagaactgggcacgaaactgaagatctgatgagactgttgagagccatgcccagtaaggggttagaaagatgtgtgatgatctggtgattgaattcttcagaactttccatatgttggttcctcaggataaaagcttccttcttaacaagtttttcccctttctctgtttgtgtcccccaccccacttcaggcctggtgatcctcagtcagctcaggataaagcacggatggataaagaatatttgtccctcatggctgaactgggtgaagcacctgtcccagcatctgtgggctccacctctgggcctgccaccacacccctggccagcgcacctcgtcctgctgctcccgccaacaacccacctccaccggtgagcctgggggctggctctcttggtctggcttccccattctctactgcagagactgggagctatggccacgtggtttgggtagagcagacaatggatgtggatggcaacattgttcttccgggatctcaggccagtttggggacttctcacttcgggaagaccttgttcttgtgttctggtcctgtgtcataacccgaagaacaatgttgccactaggaggcgcaggcagggacgttggcaggaaatgctctcacgtagtctctcatgtctaccacccagagccgcccaccctggatgaattctggcccttcagagagtcggccctaccacggcatgcatggaggtggtcctggtgggcccggaggtggcccccacagcttcccacacccattacccagcctgacaggtgggcatggtggacatcccatgcagcacaaccccaatggacccccacccccttggatgcagccaccaccaccaccgatgaaccagggcccccaccctcctgggcac

SEQ ID NO: 7474 - DNA, 2300 bp, Homo sapien
tatattttacctatagatagattttggttgtagggttgtgttgtgtttcgtttctttttgaagattttttttttttttaaatttacattgtaggtcatagaccacaactgtttagtgcctttttggcctttttccctttaataatatgtctacaggtcaccagtcaattcctccaaaggttgaatttttaacaaaccttctttgcttcctggataactgggattagaatttagttgatctagccgatgcctgttggaggtgaagaagtcgggccagtctaacctctagaatactagcttttgcctttcacttctgcaatttgggaggaggttaaactgttgtgaggccttcacatggccaattgggtgctggtaagacttgtttttgtaactagctaagaatgcttaattctagacagctgtggggtgggaattagaaatgtcaagcatgttagaaataaaaccagagcagggtttttcctcccttctattcagttttgaaagaggccctaatgcctgattggttttgcttttgagcccaggttggagggaaatgcatgggttttcttaattaagataatttcttaaaaaggtgttatatcacttaagccactttattgttattttgatgctgcttaacttgcacagtaaaaacatgtttaaaacttttcttgtagacttaaatgtataagatggtagtctaatgagctggggtatgtttgcttttgttcactcttaatggattgtgctaacagtttatacaaatgctagaaacggaggtgtcatttagccgtcattagccatgaacaaacctgaccttttattccatcgtgtgtgtaacgtggtgtgacatggttccctttaggctgaagacagtgggagcagccgagttcagtccttgctctccaactaggcaaggttctctcaactaaaccaagggtataggagtcttgattactttcagtatgtttttttaataacctgatccacatggtctcttcccttcttgcagctgctactaaattttcattcagaatatcaagctatggtcctttttgtaatcttaactcaaaattctaggagtgtaacctctcttttttattaccgcaaaatccagctgtggtaaactgaccattttatcattacatttttttacttgtagcaacagcattttactccttaaaaaaatgagagagagaaaatctgctttctggacttgtaaactctggtggagaatcataggttttccccttgctgtttgcaggttcagaccctagacaagtatgaccaaatctgcatttgcagcctctcgcagaagctgctttagcactttaacgtttttctctacccagactccccaacctcgaacagccagaaaacaggttgtctcctgggccttggacacagccagccaggccattgaaggaaaagcaaagacgaagcgaaccatctctctccattgtgggggccaagtagctgcagtagccttcagtcccagttgcattgggttaaagagctcatacatactatgtgttaggggtacagaagcttttcctcatagggcatgagctctccaagagttaaccttttgcctaaacttggggtttctgtggttcataaagttgggatatgtattttttttcaaatggaagaaaatccgtatttggcaagaagactccaggggatgatactgtccttgccacttacagtccaaagattttccccaaagaatagacattttttcctctcatcacttctagatgcaaaatcttttatttttttcctttctcacacacaccccagacccctaacgttaagccagcttccatctccccattccacacgatcttgagtagcacacgttatggtcggttcctccgaagagtgttgtattagggtctgagaggcagaggggctgggaaagacttgttatagtccgtgtgggaatgagagaagtcggtgcagaatagtaaacgggagtctgtttcccacaggtccccttcccctgagcccatctacaatagcgaggggaagcggcttaacacccgagagttccgcacccgcaaaaagctggaagaggagcggcacaacctcatcacagagatggttgcactcaatccggatttcaagccacctgcagattacaagtaagcggaggggctcggtcatctgggatgaagacacatgcagatcatgggtgacctgctgggatgggacagtattggtactactcacctcttgcctcaagtcacccataattagcacttggtaccaatatttggttttagaaaagccgctggc

SEQ ID NO: 7475 - DNA, 2300 bp, Homo sapien
cagagggtgtaatagtcatgggtttgctgtcatctggtctaagtaaagcaggacaacaaaagggaagttatctataagaagggtcattaagaaggcagcaggtttttgtcccatgtttaattctctccaataattgtacagaacaagaaaaacaagcaggtctaatttattatctcagaaaaaattataaccatacatggctgagatcacagtcacctctctctccaggtttcaagtgttgtgggggttccaacatcttttctatttattttaaaaaaccacagcagaggggttgtgcaccctttcatatttcttggctatttggatttgttcttctgagacatgtccattcctattttttgctcattttctattgtttttgccttttttctaattagtttttaagatgtatttgtatattacaggtattggctctttatcatgtatggcaaatattttttcctcatctatcattgtctcttgacttttatcagtgttaattttcggggtaatcaagtatatctttttacagtttgaggttcctgtctttgcagtctctcaacccctagaatacccttatagtctcctaaattatattctaaatgttttgttgtttaaatttaagattctacgccatttatcaacgaaatcatcttttcctgattgaaataaaatactacatttgtggtatttccggattctgttgcactaatgtgtctttcctaccaacaatatcatattgttttattattgtggttttttgtttttgagacggagtctcatgctgttgcccaggctggagtacagtggtgcgatctcagctcactacacctccgcctcctgggttcaagcaattctcctgcctcagcctcctgagaagctgggattataggcgtctgccaccacgctcggctaatttttgtacttttagtagagacgggggtttcaccgtgttggtcaggttggtctcgaactcctgacctcaggtgatccccccgccttggcctcccagtgccttggcactggcctattgtgttttatatactatgtttgtcatctggaaaggcaagctcctgctccgtcttgtaaagttttcccagtactgtagtagttatttttatttttatttttgacagtctcgctctgtcacccaggctgaagtgcagtggccccatctcggctcactgcaacctccgcctcccgggttcaagcgattctcttgcctcatcctcctgggaagctgggattgcaggagtgcaccactacacccaactaatttttgtatttttcgtagagacggggtttcgccatgttggtcaggctggtctcgaccttctgaccttgtgattcgcccgcctcggcctgtcaaagtgctgggattacaggcgtgagccaccgcgcccggccgtagttattgttttatacgattttaagatcatttaattaaatcctctgaactccgtggagattccaatagaagtgtgtatttgtaatttttgaactgacaaccttctgttacctttcatctaatatgttgttgcatcagttcaaatactgttttaaatccttcgataagtcgtctctattcgtagctttttgggtcactttttttttttttttttttttccaaaaaaacaggaagtctttttacctgcagcgtcaactgagccggttttccggcgcgcgccagcccctcccctgctcccgccccaaggttctgcgttaccatgggaacaaaggttgacgtcacttagggcttccttgctggacccaagggtcgatggtgaagggagacgggtggagaggcggttttgctccatctacgcatgcgcacttcctgctccaggactcccccgccgtaaatctcgttccggctgggccttttccgccgcgactctcgcttaatcccggagaaactgccccctgggggaggggagtagaaaaaggctggaaccagcgacagccaatcccgcgacactacaacgcaggcgagattgattgagtccaccaccgcagccaatgagagagctcgccgtcgctccgtcatagagttcgccccaccccatcccctcctttctggactcggagctcagttcacgcagtaacaaatgaagtgcgcgctgcgacacctcccagcccaccgaactccgccgccatttcctcgcttggcctaacggttcggccaatcccagcgcgcatcaagaaggactgaggctccgccaatcggaggccgccgatttcgacccttcgcctcggcccggcccaatccaggccccggccccgccgcccccggcccgccc

SEQ ID NO: 7476 - DNA, 2300 bp, Homo sapien
gaaagaggttctaagaatgttcccaacctatgcttaccttttctggagccaggggtctttgcctaggtggggggcctggcctgtgccctctgctaaggggtgagtaagagactgatctgtgccctcccttccccctcgtccagggcacccagagccaaggttccgccctccaggaccctgagtgcttcgcccacctgctgcgattctacgacggcatctgcaaatgggaggagggcagtcccacgcctgtgctgcatgtgggctgggccacctttcttgtgcagtccctaggccgttttgagggacaggtgagggacagctgcacagaggtctgggcactacaggtggtgacagcagccacgggcttgtcagacttttctggcccaggggcagcatctgcccatccccttgggtgccgatgggactgagaccccctgggtgggatgggatggccagagcagggtcctggagttccagccactggccggcaaccttgctctcaccttgctctccccactggcccaggtgcggcagaaggtgcgcatagtgagccgagaggccgaggcggccgaggccgaggagccgtggggcgaggaagcccgggaaggccggcggcggggcccacggcgggagtccaagccagaggagcccccgccgcccaagaagccagcactggacaagggcctgggcaccggccagggtgcagtgtcaggacccccccggaagcctcctgggactgtcgctggcacagcccgaggccctgaaggtggcagcacggctcaggtgccagcacccacagcatcaccaccgccggagggtccagtgctcactttccagagtgagaagatgaagggcatgaaggagctgctggtggccaccaagatcaactcgagcgccatcaagctgcaactcacggcacagtcgcaagtgcagatgaagaagcagaaagtgtccacccctagtgactacactctgtctttcctcaagcggcagcgcaaaggcctctgaactactggggacttcggaccgcttgtggggacccaggctccgcccttagtcccccaactctgagcccatgttctgcccccagcccaaaggggacaggcctcacctctacccaaaccctaggttcccggtcccgagtacagtctgtatcaaacccacgattttctccagctcagaacccagggctctgccccagtcgttagaatataggtctcttctcccagaatcccagccggccaatggaaacctcacgctgggtcctaattaccagtctttaaaggcccagcccctagaaacccaagctcctcctcggaaccgctcacctagagccagaccaacgttactcagggctcctcccagcttgtaggagctgaggtttcacccttaacccaaggagcacaggtcccacctccagcccgggagcctaggaccactcagcccctaggagtatatttccgcacttcagaattccatatcttgcgaatccaagctccctgccccaaataacttcagtcctgctccagaatttggaaatcctagtttcctctccttcgtatcccgagtctgggacacaaaactccgcccccagcctatgagcatcctgagccccgccctcttcctgacgaaactggccccggatcagagcaggacctcccttccgaccctctgggaacctcccagaggtccagcccatctcggagcatcccggaggaaatctgcagagggttaggagtgggtgacaagagcctgatctcttcctgttttgtacatagatttatttttcagttccaagaaagatgaatacattttgttaaaaaaaatataaagcgcaagtccatgtttatctgggaaattggggatggggcggggagtggagcgccccctcttccctctgtcttctggctcccgggactttgcgctccctacctgtggagcgcgagcgacagtggcggcggaaggacgtaggctccgccccggccttggggcttccccgcgccgccgagggcccgtcccgcgggcgcctcctcccggactggcggtggggcatccccggcgcggccccgcccccgggcctcagccccgcccccgcggcctcagagccacgggcgcccgccccgccccgcgccgccccgcgccggctccgcagctcgcgcccgcccgcctgccggcccgcccggcgccgggccatggcgctgctgcgggatgtgtcgctgcaggacccgcgggaccgcttcgagctgctgcagcgcgtgggggccgggacctatggcgacgtctacaaggtgcgacgggac

SEQ ID NO: 7477 - DNA, 2300 bp, Homo sapien
ggaatccctaaatccatagaatatataatagagttgcagagaaagacgaggtagggccaaaggctgggtcagctacaggatatccagaaaggtatcttgttggacatagagggtgtaaacagggagagagtctttgaacacgtgggagggaagggatggagggatagtgggcaggagaatctgaggttgggtcacaggcttggaaagggagtgggagggagtgtggcccatcactacctggccccctttccccatgttaaagcacagaggaccctctttcattacctcccccttccacaggcaccaaattggacagctccggtgtggcctttgctgtggttggggcctgccaggccctgggtctccgggatgtccacctcgccctgtctgaggatcatgcctgggtagtgtttgggcccaatggggagcagacagctgaggtcacctggcacggcaagggcaacgaggaccgcaggggccagacagtcaatgccggtgtggctgagcgggtattgttccctccccccagccttgtccccttcatactgtagtagcccaagccacccaagggactccattttcttgggccacacccctttcttcccatcaccacccacataggaagggaagacagaagagccccttttcctggctgtcattccctgaagcaggcacagggtgggccatcatgagacataatgatctcatccccccctaagagctggctgtacctgaaaggatcatacatgcgctgtgaccgcaagatggaggtggcgttcatggtgtgtgccatcaacccttccattgacctgcacaccgactcgctggagcttctgcagctgcagcaggtgagggctgagccaatggggcaggactgggctaggccagacttgacttgctgtgggaccctgggcaggggcactttcccttcctgagcttcagcttcccctcctggaaaaatgggttagtaattcctggcctggcctttcccagggctcttgggagagtagaattgagatgtgaaattgctttgactccattaaagggctggtcccagaattttggcccttccacatggtgggtggtccctgttggttctgacccccacctctgcccgataggctaaggacccgttctcctccctgttccgtggctcataactctctccttcggctcctagaagctgctctggctgctctatgacctgggacatctggaaaggtcagtagagggaagtggccaggctgcgcctggtgaggccggggggctgggtggcagcctgaattatgatcctttcctaggtaccccatggccttagggaacctggcagatctagaggagctggagcccacccctggccggccagacccactcaccctctaccacaaggtgggggcatctaaggagggtgcagaagggagaccctaacagtggctgaggcaggggccctcatctgggcagatgagaagagaactttgtgtgttggggggtatcgcccatccagtctcactttgtgtcaactgtgtgcagaatcagttcagtcagggctgtctgaggggtgtccagggttccccagcctgggagtggcaggggctgcatttgtcccctcagccctgccttttctgccactgcttactgtccttcctggagtataacagaggtcaaatgtggcaggagcactgatgaagagggggtgttcacttggtgggtgtaggtggggaggagggccattgggctgggcttgaaagtctttggtgatgtgtagaagagtgtctgagaaagagaagggccctgagctcggagggcaggccccacccctgcagtctgccccaggcctcagccagcagtcctgtagacccagggaggagaccaggtagaagggctggcagcgagtggaggtgggagtggagatggagaggactccctgggatcttcctgtggccccttctgggtgtgccctggtggggcatttgtgccagcagggcagctggggctgcctccctgaggatcctctgcctcacctccatccagggcattgcctcagccaagacctactatcgggatgaacacatctacccctacatgtacctggctggctaccactgtcgcaaccgcaatgtgcgggaagccctgcaggcctgggcggacacggccactgtcatccaggagtgaggatccccctactagggcctgcagcctgtcctttcttcccctccatcagtttccaaccaccctcgtccaggactgaggcctggctcccacgccccatcccctttccatccagtccctaggcagcaagg

SEQ ID NO: 7478 - DNA, 2300 bp, Homo sapien
attaaattaaattaaactcaaagtcgcatactcccgagttgcctcagttctgggccagcttggaaggctggttaccctgtttactagtttttctactgatgtcctttttctgttccaggatttgatccagaacaccacattgcatttagttgttctgtctccttggtctctcatctgcaatgatttgtgggtctttccttatctttcatgaccttggctcttttgatttcttttgttttttgtttctgaggcggggtctcactgtgttgcccacgctggagtgcactggcgtgacagctcactgcagtcttgacctcctgggctcacataatcctcctgcctcagccttctgagtagctgggactacaggtgagcaccaccacacctggtcaattttttgtttttgtagagtccgggtctccctatgttgcccgggctggtcttgaactcctggcctcaagcaatcctcctgcttcagcttcccaaagtgttgtaattacaggcatgagcctggcatgaacttgacactattgagatatactggtcaggtattttgtggaatgtccctcaactctgttttgccagatgttttctcatgattagaggagagttataaattttgaggaaaatccagagaggtgaagaggtgaagtagggcagaaatttaatctgttttatttactgctatataccgagtgtctggaacttggcccatggtaagtaccaaaaatctgttttttttgaatgaataagcaaataaatgagtgaccgtggaaatttagtattatttcaaagtttcaaagcgttgttgatacaggccaggcacagtggctcacacctgtaatcccagcacttttggaggccgaggtaggaggatcacttgaggtcaggagttcgagaccagcctgaccaacatggtgacacccctgtctctactaagtaaaatacaaaaattagccaagtgtggtggcaggcacctgtaatcccggctacttgggaagctgaggcagaagaatcacttgaacctgggaggcagaggttgcagtgagccgagatcaccccactgcactccagcctgagtgacagagcgagactctgtctcaaaacaaataaacaaataactactctttggccgggtaaggtggttcacgcctgtaattttagcactttgggaggctgaggcgggcagatcacttgaggttaggggttcgagaccagtctggccaacatggtgaaaccccatctctacttaaaatacaaaaagttttctgggtgtggtggcggacgcctataatcccagctacttgggacttttttttaagacggaatctcactctgttgcccaggctggagtgcagtggcaagattctggctcactgaagcctccgcctcccaggttcaagggattccccgcgcctcagcctcccaagtagctgggaatccctgtctctgcaaaaaaaaaaaaaaaaaaaaaaaaaaaaaaaaatatatatatatatatatatatatgtgtgtgtgtgtgtgtgtgtgtgtgtgttatatgtatatatatttatgtatatgcacatacacacaaaattaggcgggagtggtggcgcacgcctgtgatcacagctactcgggaggctgaggcacgagaatcgcttgagcccgtgaagtcgaggctgcagtgagcccagatcgagccactgcattccagcctgggcgaaagagaaagaccgtgtctcaaaacaaacaaacaaaagctactcttagcacgtgttagagtatctcgcgggcggaagtgggaaacgagtgctgcacacagagtaggcatctttatatgttaacagacactgatacccagctaaagcggctgaacacatttactctctggcagtgtttaaaagtatctgtttttctcatattgttttattttaattttttctggatcaagcaacctgatctttttcctcataacttgccgaccgacccgtgacagcaaaaccggcagaagctcggcgacctcccaccccgagtctgcaggtagtgcccccggactacattttccagaaggcactgcgggcacgcttcctgcctggtcggcctgaagggaagggccaatccctgagtatctcgggaaggaggtgtccggagccgcggacctagagatcccagaagccacagcgcagcggcccggcccgccactatttccaggctcagcggggcaggggtgggcccagactccacttcccggcgggtagtgcgaccctaggggcgggacttcatgtcccagcaggctccgggcggcgtgcgccgcg

SEQ ID NO: 7479 - DNA, 2300 bp, Homo sapien
ctcgaactcctgcctgagcttcctgagtagctgggactacatggtgcacaccactgtgcctggctaatttaaaataatttttttttttttttttttttttttttttgtagaggcagggtcttgctttgttgctcaggctggtctggaacttttggcctcaagcagtcttcctgccttggcatgtcaaagccctgggattacaggtgtgagccactgagcttagctttgactgtttttgaaacacaaagtggctaaagcctgtaatgccaccacttctggaaggctgaggtaggtagatcacctaaggccaggtgttcaagaccagcctggccaacatggtgaaaccccatctctactaaaaatacaaaaactagccgtgtgtggtggcgggtgcctgtaatcccagctactcgggaggctgagacaagagaatcacttaaacctgggaggcagaggttgcagtgagccaagatcgtgccattgctctccagcctgggcgacagagcgactctgtctcaaaaataaataaataaataaataaattaattaattaattaaattaaattaaactcaaagtcgcatactcccgagttgcctcagttctgggccagcttggaaggctggttaccctgtttactagtttttctactgatgtcctttttctgttccaggatttgatccagaacaccacattgcatttagttgttctgtctccttggtctctcatctgcaatgatttgtgggtctttccttatctttcatgaccttggctcttttgatttcttttgttttttgtttctgaggcggggtctcactgtgttgcccacgctggagtgcactggcgtgacagctcactgcagtcttgacctcctgggctcacataatcctcctgcctcagccttctgagtagctgggactacaggtgagcaccaccacacctggtcaattttttgtttttgtagagtccgggtctccctatgttgcccgggctggtcttgaactcctggcctcaagcaatcctcctgcttcagcttcccaaagtgttgtaattacaggcatgagcctggcatgaacttgacactattgagatatactggtcaggtattttgtggaatgtccctcaactctgttttgccagatgttttctcatgattagaggagagttataaattttgaggaaaatccagagaggtgaagaggtgaagtagggcagaaatttaatctgttttatttactgctatataccgagtgtctggaacttggcccatggtaagtaccaaaaatctgttttttttgaatgaataagcaaataaatgagtgaccgtggaaatttagtattatttcaaagtttcaaagcgttgttgatacaggccaggcacagtggctcacacctgtaatcccagcacttttggaggccgaggtaggaggatcacttgaggtcaggagttcgagaccagcctgaccaacatggtgacacccctgtctctactaagtaaaatacaaaaattagccaagtgtggtggcaggcacctgtaatcccggctacttgggaagctgaggcagaagaatcacttgaacctgggaggcagaggttgcagtgagccgagatcaccccactgcactccagcctgagtgacagagcgagactctgtctcaaaacaaataaacaaataactactctttggccgggtaaggtggttcacgcctgtaattttagcactttgggaggctgaggcgggcagatcacttgaggttaggggttcgagaccagtctggccaacatggtgaaaccccatctctacttaaaatacaaaaagttttctgggtgtggtggcggacgcctataatcccagctacttgggacttttttttaagacggaatctcactctgttgcccaggctggagtgcagtggcaagattctggctcactgaagcctccgcctcccaggttcaagggattccccgcgcctcagcctcccaagtagctgggaatccctgtctctgcaaaaaaaaaaaaaaaaaaaaaaaaaaaaaaaaatatatatatatatatatatatatgtgtgtgtgtgtgtgtgtgtgtgtgtgttatatgtatatatatttatgtatatgcacatacacacaaaattaggcgggagtggtggcgcacgcctgtgatcacagctactcgggaggctgaggcacgagaatcgcttgagcccgtgaagtcgaggctgcagtgagcccagatcgagccactgcattccagcctgggcgaaagagaaagaccgtgtctcaaaacaaacaaacaaaagct

SEQ ID NO: 7480 - DNA, 2300 bp, Homo sapien
tgcaaccctgtctctttaaaataaataaataaataaacaaataatcacatgaaaaacccttcgtggggagaaacaccctgtttgcttcaaacattcatggaacacctcctccctcaacctgatcctgcccccatctcagcgaggtcccagtacgagaggagaggcaaacccctaaacaggtcttttaatgaaataatgtgttggccagtggctacagcctgtaatcccagcgctttgggaggctgaggcaggcagatcacttgagtccaggagtttgagatcagcctaggcaacatggcgaaaccccatctctataaaaaatacaaacatggctgggcccagtgactcacgcatgtaatcccagcactttgggaggccgaggcagaaggatcacctgaagtcaggagtttgagatcagcctggccaacatggcaaaaccctatctctactaaaaatacaaaaattagctgggtgtggtggcacatgcctataatcccagctacttgggaggctgaggcaggagactctcttgaacctgggaggcagaggttgcagtgagccgagatcgtgccactgcactctggcctgggtgacagcgtgagacaccatctcaaaaaacaaaacatcagcctggcctagtggtgtgagcctgtagtctcagctattcgggaggctgaggtgggaggatcacttgaacccaggaggttgaggctgtggtgagctacgattgcaccactgcactccagcctaggggacagagtgagaccctgtctcaaaaaagagaaagaagtgttgtctaggccgggtgtagttgcccatgtctgtaatcccagaactccgggaggccaaggtgggaggattacctgagcccaggagttcgagaccagcctggtcaacataacaataacccttgactccaaaaagtaaaataaaaaatcagctgggtgtggtggcatctgcctgtaatcccagctactcaagaggctgaggcaggagcctaagaggtcaaggctgcagtgagttatgattgcatcactgcactccagcatgggtgacagagagaccctgtctcaaaaaaaaaaaaaaaaaagtgttgtctgaagccaccaatatgtcccaccctttgatctctcctcatggtgcctggtccatcccagctggacagaaatcagaaataccactggacagagccagcccctcccctccccaacctcctccagcctatctcagacctctccttgcccttcacgttccaggtcagacctcaggccctgctcctactgaagcttaaaacgcctgtggtgttggtaccagcccagctccacctccaccccagggtctaacttaagagccaccttgtcctcagcccctcaattcgccttcctccttcccaagcctcagtgtgtccatctgccaaatgggcgtgaccatccctaccccaacttcctgtctcccacatcaactctaatgatacaatcaaagtaagattcagaaacttttttttgggcgggggcgggggggcgatgggtgccaagcgcgggcaaaccatggagagagcgaactacaattcccatccggctccggggccgcgggcgtccctagcccctctctcttagccaagggcaaggcggctgcgacccagggggcgagagaagttgcagtgctccgcgcctcctgggtcagggcccagggagggcccaggtaagtctgggtctggggccgcgcggggatctggggagtctttccgaccccgcagaaccccaccgcgccccgcgcagaagtcagttgttctccccggcccgcccccgcacttcctggccgggagttgggcccgcccccgcgcgcctccgcccccaccttcacctctagccgcggctcccattggccggcgcgcacctgcccgtccgtcggggggcggggcgcggcgcccaggtgagggcgcgctggcggcggcggaggaaggtgacagcggggagggcgggagaggggcgggggaggacgcgcggacagagcctcagacggttgggcggacggacggcccgacaggcgggcatgcgggcggccagactgtagccgagcagcgaggctccggccgcagccatggagcggcggctgcgcgcgctggagcagctggcgcggggcgaggccggcggctgcccggggctcgacggcctcctagatctgctgctggcgctgcaccacgagctcagcagcggccccctacggcgggagcgcagcgtggcgcagttcctgagctggggtgagtggcggggcggcacggagcgggggcgggcctaggg

SEQ ID NO: 7481 - DNA, 2300 bp, Homo sapien
cagcgggcccttccaacacagaatgacagaacacatgcccttggcgtgtctgactttggatagcaccctatcgtgagccagcctagacgagtcaccatgagtgacagtcccggctgtggttggggttgaccccgtggacaggagtgtttgacacagattgtctgaacagctgagaagtgaccaagcccacatttgtatcagcagggcacctagctattctttcaggctcttagcacagggctcggttgtttcagaaataggctccagccaggcatggtggctcatcctgtaattccagcactttgggaggccaaggtgggtgggcgcatcacctgaggtcaggagttcgagaccagcctggccaacatggcaaaaccccatctctactaaaaaaaatacaaaaattagccgggcgtggtggtgcgtgcctgtaatcccagctacttgggaggctgagacaggagaatcacttgaacccaggagggagaggttgcagtgagctgagatcacaccactgcactccatcccaggtggcagagcaagactctgtctcaaaaaaaaagaaaagaaataggctctggccaggcatggtggctcacgcctgtaatcccagcactttgggaggccaaagcaggaggatcccttaaggccaggagttagagaccagcctgagcaacctagtgagaccctgtctctatttaatttaaaaaaaaaaaaaaaaaaaaaggcccttgccgtagctcctatctccaggccagccaggccggagcgtggctggggaactgtcctgcctgccaagccaggccctttggtgatacgtccccagttcttcaacagagcagggtgcttgcccccacctcatggcatgcagggggtaccagggtagacatcatgtgggcatgaaggcttcagtgacagatgtgcctgtggccagggtcacagtcccctgatctccagaatataactgaggactgaggatgggcacttcctggggagcccatgtccctgcctgctcagaggcatggagactgcaggcgttgagcacagtggccctcgtacccactctgtctggaggccagtcagagggcatgtgggtgctacctggtctgagcagtgagaactgacccttcatcctttgccaccactgtcctcccattgtgccccaagtaccctgggccccacctcaccctgtagatgaggaattctcattctggcctgaacctccgtgagctgtgtgcacgggcgtgggtcagatgccggctctggaggacagagggctgcgtgtttttcttatttttaattttattattttattttttgatttttttggagatggagtttcactctgttacctaggctggagtgcagtggcgcaatctcggctcactgcaacctccgcttcccaggctcaagccattctcctgcctcagcctcctgagtagctgggattgcaggcgcccgtcaccacacccagctaatttttatattttagtagagacggggtttcaccatgttgatcaggctggtctcgaactcctgactttaggtgatccgcctgcctcggcctcccaaaatgctgggattacaggcgtgagccaccgcgcccggctggctggatgtttttctagatctctcccttctggagcctccctgtgagtggagccagctttgagagaggaacccatacaaaaacccaggtgactgaccctggcctcaaaggacaaaggacgtcctgagctgaggggtgtgggtgtggccctagctgagtttctctccttgcagggcagagagagctcccttgctcagccacctttgaggacagacaggacaaggggcaggcatgagcccctgcctggtcgtctgtgagaccatgtgtgactgccaggccccaggcacactgagtcaccgcgcctggaaaaccctgtggcctccagtgttgcctcacacctgccacttccttttcctggagtgagtggtgctctctgtgatgactcccaccggcctgggatctgcctgccacagtgtccctggggagactctagatccagacccacatggcacggggctgcctccctcaggcagttctcagccaggcccccacccagggcacaggctcaggctgagcggggtggtggatgggctggagccggggagaagggcagcaaggctggctggccgcagccctctgtggctggacacgacttggcaaggccgagggatctgagggctgggctactctcgagggctgccaggttcccagcttgctgcagggaaatgaagggggtgccgccctgaacagg

SEQ ID NO: 7482 - DNA, 2300 bp, Homo sapien
ccactccctggtccaagggccctgccccttcccagagtaaacccactgggggtctaagagtgggcgttgtcggctcccccagcttctgtcctccccagaatcttccagggtaaccaccaagccctcctgcagatcccagccccactcccctcagcagcagggccgcagtaggaagctgagccattcctgcgctccttttcttggtctccacctccgtcccgcaggctggatgcacctaattcacggaaatcaaccctcccctccctgtcttcttaagtgtcaatagcaaaacacaatgaaacttttagccattcccttctctggtgcggtgtgggtctgctctgcctcccctgggacggtggttttgtgtaggagggaggaggaggatcggctgtggcttgctgactttggggcagccccttggaggcaggggacagttgaggttcgaacacttctcccaatggcagctctcaagaggtcagtgctgccctgaggggtttcaggaagcaggatgaggtggtggcagtgggagccctgcaatgagattctggccctaagcccttctgtgcactgagggacagaatctgaggttccttcacccacttggacctcacttttccagttaagtggcctctgcacgcgaggagagtgagctccaggactctgcctgtctcagtgctgtgaatgaaacacagtgctcccgcccctcaaggagtgcaatgcccaagctcacttttctccagagaaactcgagacatgcccgtcccaacccccaggcgacataccaaagtacttcacagaccctgtcctccctgccaccccacgttcacggactccacatgcctttcataattctgcaccagcgaagagcctctgaaggaatctttgaatcctgccttccaggtccccgccctgcacggtcacattcctttccagacgccatccagctgtgcagggcagcttgccctagagccaagctggtggccaggcctactccaggcacagagctgaccttcagcagggtctgttcacttccaggcatttcagcccgccctcctgttttacggctgttgatgtttgtctgtcaaggccaggttgagtgcagccctttgggctaagggtcctgaagaggcggagtcctcttcactttccttgtgagggcacaccttttttgaaaggagagacatggcacaggaccagttttctgaatttggaagcctagagtttcagagctggaaggatcttagacatcatcttggcagcccccacctgactggttcaggaaaccgaggttcagagggtctggctgatgtgtggaagtcacccattaggtcagccagcactgactgcctggcttttgcacagccagttactgctttctgctgcttctacccgaaaaagagcaattcgagattgctttgtccgagaccggtgctttgatgacattggtgccacaggatctgagaggtggcacacgtttatttccttcttgctgccacctcatctccagaggatccctgatcactgatggccctgccgaaagggccctatcagcccacgctgaggcccagagctgtgccaggatgtgtagtgtggggagtgagcccggcgaggagggtgcaacaaaggaggcttttctctggctgatacagcctctcccagctgagtcttgaagagactcattgagtcgtgaacttgacttgccggccttctccccctatgtggctgctctaagaataaaatcagctggagcagaccaaggcaaggtgcagtcagggtgtcttaagagtgtcttgcaaaaacttattgcataactgggactgccacttgtgcgagatgaaacctgtgcgttcttggtgagatggaatcggaggcatctttgctgcttcccctttcttgttttctgccatataccctgggctctgcagagcaactggtttctgggtcctatagatattaactcactttctgggctcatttatgaggcatttttatgtatgtgatttcccagagccaattctgcttcccatccttctattctgtaatcatctctccagcgcctcctgtccccagcaggaaggccaggactggccttcatgcattgctactggcactggcgagagtgaggcccacgttttgctcgccctgcaggtcagctggtcttgctccactgccttgcagagcaccccttgccctggccagctgccctctgcccgtgggcccctggtcactgggggatggggccaaagggagaagctgatcggctcagagtcctcccgtctgttggaaaggcagcttca

SEQ ID NO: 7483 - DNA, 2300 bp, Homo sapien
tcagaaaacacaaaagaaaaaaaaattaggacattttcggtgtggggcatgacaagataaggaagctgcctggaagctgggtgccaactccatgaaattgggggaaactaattgctggtcacgtgggcctcaccagggtgacagagatcccttctttcagtcctttaagatctttggagaaagtcaagtggccatacataacgacagggtctgggttttgtttataaataacccaggaacattttgttgttttcagttttctagggctgggttttcccagcacacagggctctggggagatttgaaaaccatggcgcgtcaatgagaatgctgccggggcgccagtttggagcagcctcattgagacgactgaacaactacttcattcaggatcctcagccctgggcccttccctagatcaacccagaaactgcatctccggggtggatccctaacagtgctgagtaggaggcaaacactgtggcttctaaggctgacccgggaagtctggactaggcccgccggaggctcctcgtcaccaattggcatgcagcctctggtgacagctctgcctaggagcctcagtatcttcttttgagaataacaccaaaaaaaaaaaaaaaaaaaaaaaagggggggggcagtagcttgtgtgctttactatgatgaaaagaatcaaatcaaagcactaaggggcgtaagattgcaggcagggttggaattacttatccgctctccaatggttagggagcaagaggggagggcaagggaactatctattccctcggaagggatcttacaagcggtaggcgaacaaacctcccatcgtgtcctctctagattccaccactcagttcccctgagatatcccccgttctcagatttgagttcctgcctcttcctcttagcctaccagcccaagttatcccctgatacaggcccctagccctccaggcttccacatctcccagaagcgaggaagttggacctgaggctttcaaagtcgcaggttcaattcagatctctttaagagcccccagggtcctgctaccacaggttggtgtcttgatactggttacataacaatcagtccccaaagctctgacatcacccactgaagattctcaccagcctggacagccaaaggggtctgtgtgtggccggggaggatggcgggggagtgagccccatggaacagccaggaactggtaaggggaggtagggcacagatcccagtaaatgatggtaaatggtggtgaccccgagaggaaagtggaagtatttgggtttttaaacttccccctaaattcccacaagatttcattgttgcccccacacttcccctcttccccacatagggaatttccgatttcacttcccaatacgcaagtggccagagagcctcaacttcctcctcatgccctccctgccttgccccagctatagcctttgtggggaagccttctcttctcccgcgcgagtccggtgtcacccatgtcctccctcgcttgcgtccctctcccattcccaccccgtcggcctgaggggaggtcaggcctctcgctgcccatttttctttccccagtcaccagcccgccccggattctctactccctcagcttgctctgctaccactttcctgtctctccctctcccaaagcagataaaagatgaggggacaaagacagtgtgtgtctgggaagctgggctgagaggaggaggtgccgccgcctgggggtactccgatgcttccggggattccgagccagctggaggaccgcacgtggcgaacggcgggcgcggcgcgtagtcagggaaccagggtgcctgactgggtgtctcgtggagccatcccgcgggggtgtgggggggccacggtgccggaaggcgcgcggcccagaggccgtctccgccgaacgcccgctcctcgccttcctaaccgcagcactttcgcgagcctccctacgaggggcggggcgaaacaggtgcggttgccacggcacccggaccacagcctcgcgagatttggaatcagccaatgggggcggggtaggggaagacgtggcaccagtcggaggggcggggctgggaggggctcctccctaccgcccccaattccgccctgcccccgccgcggcggcgctagccgccactgagggaccgaccctataaaggccgctccgcgaggggtgcgcagcattcggcagagggcgcttcgacgggctgggctgtgcgcctgcgcagtgtgggtcgctcccgattccctgccccggccggccccgcctcggctccgcaccctc

SEQ ID NO: 7484 - DNA, 2300 bp, Homo sapien
tttggagatggactgatgttgatagcataaatctgggtcacatgaccaccacccttcacacaaacatgcgtgtgcatgtcagcaaattgctccttgcccagaggcagaactaggaactagttccagcagcttgaattgcagcgctcggctccatcatctccaggggccatccattcaccttgatgaggccactgccatgtttgcagtggattgcacggactgcagctggcccttggatggcatagccaagagcacagataagagctcctcactgcacggcaccgcaagcggaaaaggcacctctctttttttttttttttttgagatggagtctccttctgttgcccaggttagaatgcagtggtgcgatcttggctcactgcaacctccacctcacgggttcaagcgattctcctgcctcagcctcctcagtagctgggattacaggcacacgccaccatacctggctaatttttgtatttttagtagagacggggttttgtgatattggccagggtggtcttgatctcaggtgatctgcttgcatcggcctcccaaagtgctgggattacagacatgagctactgcacctggccttttttttttaagttgtctctagggaccttgtagatgttttcctagatcaggccatgacaggaccaagcagaccacttagaggggaggtgaggcccctttctgctggatgagggcgtttctgaggagagctagggggtacctcaaggccctgggtttgcagggaatggatttattaactgaagaataaaacactgggagtgggggatggcacagtttctgagataaaagaaaaatacttgaaccctccatcaatctgccatgggctcaggcagacaggcagaaagtgaaacagcggagaaaccaaaagtgaaagggtgcattcacattttatacaactttcccaccaaacaaactgccctactcagaaaacacaaaagaaaaaaaaattaggacattttcggtgtggggcatgacaagataaggaagctgcctggaagctgggtgccaactccatgaaattgggggaaactaattgctggtcacgtgggcctcaccagggtgacagagatcccttctttcagtcctttaagatctttggagaaagtcaagtggccatacataacgacagggtctgggttttgtttataaataacccaggaacattttgttgttttcagttttctagggctgggttttcccagcacacagggctctggggagatttgaaaaccatggcgcgtcaatgagaatgctgccggggcgccagtttggagcagcctcattgagacgactgaacaactacttcattcaggatcctcagccctgggcccttccctagatcaacccagaaactgcatctccggggtggatccctaacagtgctgagtaggaggcaaacactgtggcttctaaggctgacccgggaagtctggactaggcccgccggaggctcctcgtcaccaattggcatgcagcctctggtgacagctctgcctaggagcctcagtatcttcttttgagaataacaccaaaaaaaaaaaaaaaaaaaaaaaagggggggggcagtagcttgtgtgctttactatgatgaaaagaatcaaatcaaagcactaaggggcgtaagattgcaggcagggttggaattacttatccgctctccaatggttagggagcaagaggggagggcaagggaactatctattccctcggaagggatcttacaagcggtaggcgaacaaacctcccatcgtgtcctctctagattccaccactcagttcccctgagatatcccccgttctcagatttgagttcctgcctcttcctcttagcctaccagcccaagttatcccctgatacaggcccctagccctccaggcttccacatctcccagaagcgaggaagttggacctgaggctttcaaagtcgcaggttcaattcagatctctttaagagcccccagggtcctgctaccacaggttggtgtcttgatactggttacataacaatcagtccccaaagctctgacatcacccactgaagattctcaccagcctggacagccaaaggggtctgtgtgtggccggggaggatggcgggggagtgagccccatggaacagccaggaactggtaaggggaggtagggcacagatcccagtaaatgatggtaaatggtggtgaccccgagaggaaagtggaagtatttgggtttttaaacttccccctaaattcccacaagatttcattgttgcccccacacttcc

SEQ ID NO: 7485 - DNA, 2300 bp, Homo sapien
acaggcagggaggctgagggctggtggggtctcagactgtcctgggggcctggggctgacgtgtgccccagccagctgtcctcatccagtgctcccatgtcccccaggccacagctgagaccgtgtatgacatcctgtccccggcagcccccgtctcccgctccctgcaggataagcgctctgcgcggaggctgcgcaggggccagcagcctgccgacctgcgggagggtgtggccaaggcctacgacacagtgcgagaggtgaccaggcccccgccctgccccagtcccccatgcccatctcctcacacagaccccgccctgacctctggcttccacagggcatcttggatacagctcagaccatctgtgacgtggcatcgcggggccatgagcagaaggggctgacgggcgccgtggggggcgtgatccgccagctgcccccgactgtggtgaagccgctcatcctggccacggaggccacgtccagcctgctcgggggcatgcgcaaccagattgtccccgacgcccacaaggaccacgccctcaagtggcgctcggacagtgcccaagactgagcctggggtgcccggcacccagagggtgctgcccaccatgctcctgagcctcccaagagctgcagcccacgggcccggcccggcctggcccttcaggggatggccactgtgaaggacgccttcccagcctgcccgttgccaatctgctgtgagaggggggcctccctgccttggggccttagccctggctctgcacttttcctccggggagaaaggacactgcccctcccccgacctgggcccacactgctgccttctcccaggacggaggcttttggaccctcggaccccatcccactcagccaagtgtctttctgtgtctggggggaggaggggatgatatccgtgtggttcgatgtattatttttaagctccgtgagtgcgtgggtcagtgtctgcatgaagtggaataaactgcccaccgccagcccccctctcagatcctctgtccctgtgaaccctggcctcagccttgaccttggccccgccccagatcccacctctgcacccagcacctcccatgtcaccaccaggggtcgccatgcctcctggccttgcccagcagatcagggcacagggggacccagaggcacccagccctgcacgccttcccctggctctgggctctgccttgcccctcccaggaggctgccactccagccccactcctgatgtggcaggagctacgtggggctgccaggggagggagggatggtccttggagcccagctgaccctgcctggttgtcacttgaggccactcggggaaggctgagcctgaggcattctagatgttgctctcaccatccctagtgggggcttttggggtggcccaggccttggccccttggtttccactctgatctggggtcccagctccagcacttggaggggggaggggtgctggagcagcgctgcagccggaatcccaaccctcactgcacaaagctttacacaggaccagggagcgcccattgccccccacacatcttgtttcttgtgagctgctcccatcgcgctcctccctgccctgcttcccagtggcgctgcacagaggtgggtgggtccatggggaaaccaaggctcgggttgggaatcagggaaccctcaccttgctaggttccgcaggcctctggggttagcaaaggtcccccagccctgctctgtggccccttctgagtgggggagatctgggtactgggaacagagcagaagctttgtcccgagggaccctggggtcctggctgcccacggacagctggggcagcaggctggtaagagaccaggagggcgaggccctggaggagacagggctgtggagactcggtgctgatgccacccggagaggcagatggggcccagcctgatgcttcctggacccgccccaccctgcccgggcacagtccagggcttcctgcccttcgaaccgcacttgtgatcagtattgacggtggtgggataatcattaaccaccaccaggggctgggtcaacggctcaaaaggccctgggcccagggtgtccccacttcctccttgtgccccgaaggccagcccggcactcaggtaagaggcttcctgagtggtaggacccctgccgccctccctgtcctaggaggctcctgaacccaggcacctctctgaagggtggccaatcctgaggaagaaagggacctggacagccatggggtggccgggacgagccccttcctctctgtgccttggtt

SEQ ID NO: 7486 - DNA, 2300 bp, Homo sapien
gtgagcggatgccgcgacgtgcccactctaacatggtatgagcgacctgcaccatccaccctggggcagggcaccagaccgttggggatacatcttcacgcatgcatggattcacacacatacacgcattcccacacaaacacccaggttgtttgtgagcctgggagaagggcagagctaggggctgtgttagcgaagggaacagcgtgttcagaggcagggtggctgggtgagctgtcagggaacagctgggtgagctgctgccccagaggcccagcaggtgtccagaactcaccctctgctcccagctcaccatcaaagcgctgcatgtggcccccactaccaacctgggtgggcctgagtgctgtctccgcgtctcgctgatgcccctgcggctcaatgtggaccaggtgagtggtctacgtgagggcagagcctagggtgaccccactgtctccaggcctctgagtctgatccacatctggacctctcccttgcaggatgccctcttcttcctcaaggacttcttcactagtctggtggccggcatcaaccccgtggtcccaggggagacctccgctgagggtgagaggctgggccagggaggggagcgtctgggccttctgcctcccaggacagcacaggttcccagtcattcctggccccatccccagtctgtgacctcccctcccctagctcgccccgagactcgagcccagcccagcagccccctggaagggcaggccgaaggcgtagagaccactggttcgcaggaggccccaggaggtggacacagcccctcccctcctgaccagcagcccatctacttcaggtaggctgctggactgcgggtggggggccctgggccagattgctgggggccaggccagtgagcaaagaaccccctcttcctgctcccctacccagagagttccgcttcacgtctgaggtccccatctggctggattaccatggcaagcacgtcacgatggaccaggtggtaagtggggcggtcggatggggtggccatgtggggtcagctgtggctgagtccctctgggggccaggtcttgcatccaggcactgttagcagccagggcgctctccagtggctcccatgggctagctagctccctgagtcccattgggtaaacctggaccccctccctctcccagggcacttttgctggcctcctcatcggcctggcccaactcaactgctccgagctgaagctaaagcggctctgttgcaggcacgggtgagtccccagcaccccagcctctctccagggtccctgatcttccttctgttctggtcctgactggttgtgtggccttggccaagtcatcacccttctcagggcctcagtttctcctctgtaaaaaggacgcagttggctgggcatgatggctcacacattcaggcattcgagaccagcctgaccaacatggtgaaacccccccgtctctactaaaaatacaaaaattagccaggcgtggtggcatacacatgtaatcccagctactcaggaggctgaggcaggagaactgcttgaacctgggaggcggttgcagtgagccaagatcgcaccacttcactccagcctgggcaacggagcaagactccatctaaaaaaaaaaaaaaaggacacagtccctctgcacatgactgggtgggaccacagggagggtagagtgcccacagtacttgccacaggggtactgagtcctcctgaccccacaatccctccatgtgtggctctgcctcaccttctgcctcctcacctccctgccctgccaggctcctgggtgtggacaaggtgctgggctatgccctcaacgagtggctgcaggacatccgcaagaaccagctgcccggcctgctgggaggcgtgggccccatgcactcggttgtccagctctgtgagtgtctaggtttggaagccctcgaaactgcttttacccttgggcaacctagaagctgccattgggaataagaggaggaggtgggggcagggcagcctcgggtgtctctgagcgctccttccccctagtccaagggttccgggacctgctgtggctgcccattgagcagtacaggaaggatggccgcctcatgcgggggctgcagcgaggggctgcctcctttggctcatccacagcctctgccgccctggaactcagcaaccggttggtacaggctatccaggtgagtgggtgccctgtatctgggctgtgcaggacagagcagctggagccctctgcaccacagctccctggttctgtcctcaaagctcctc

SEQ ID NO: 7487 - DNA, 2300 bp, Homo sapien
gaagagttttcaggcagagaggacagcgtgaaagccgcaaattggggccaggcatggtggcttatgcctgtaatcccagcactttggaaggccgaagagagcagatcacctgagctcaggagtttgagaccagcctgggcaacatggcgaaaccccatttctaccaaaaaaaaaaaaaaaaaaaattaaccatttgcagtggtgtgtgcctatagtcccagctactcaggaggctgaggcaggagagttgtttgagcccaagaggcagaggttgcagtgagttgagatcgccctattgcattccagcctgggcaacagagtaagactctgtttcaaaaaaaaaaaaaaatgctggaagctggaagcatcctgacatttccaggagcagcagagcctgtgcataaccagcgacccagaatgtttcttttgagtcttacaagagacgaacccctcagggcttttgaggagaggcctctgtggggtggggctctgcagcaatcagggagggctagtgagcaggttcaggagagcctagatgggggctggccacaggttcagctgcggatggggtgtgtgagatacagagagtggtacagagggttcaaggtttgggcctgggaaattgcctggggcaggggggtcccacttgctcagagtgagccaggccagtgctgggcttcccaaggagccgctagaggcaaagggcagaggggcctcaggctgctcgggttggtgggctgtgctgcaagaacctgcgggagatgagtgtcagagcagggggccaggggcctctctgagacctgatggccagccagcgggtgtgcaggaagagggggaaggaaggctctccacggagaggggctacgagagcaaagtcctgaaggcaaaacaggcctggactccttgaggggcagagaccagtgcagctggcatgggaagcaagagcagggtcaggtctggagggagaggcaggtccctgctgggcatagaatagagaaggggtaggggccgggcatggtggctcatgcctgtagtcccagcactttgggaggacgaggcaggcagatcacttgaggccaggagttcgagaccagcctggccaacgttgtgaaaccctgtctctactaaaattagctgggtgtggtggcacatgcctgcaatcccagctactggggaagctgaggcaggagaatcgcttgaacccgagaggcagaggttgcagtgagccgagatcacgccactgcactccaacctgggcgacagagtgagactctgtctcaaaaaaagaatagagaaggggtctggggccagcccttccctccctcttggggccctgcttacctggccaggcctctgtccaccccacaggtaagcttccagcacgaggtgtacccagcggagccagccacaggccctgcggcccccagccaggagctggaggagcgaccgctgtcccgtcaggtgttcatcgtgcaggagctggaggtccgagaccggctcgcctcctcccagatcaacaagttcctgtacctacacacgagtgagcggatgccgcgacgtgcccactctaacatggtatgagcgacctgcaccatccaccctggggcagggcaccagaccgttggggatacatcttcacgcatgcatggattcacacacatacacgcattcccacacaaacacccaggttgtttgtgagcctgggagaagggcagagctaggggctgtgttagcgaagggaacagcgtgttcagaggcagggtggctgggtgagctgtcagggaacagctgggtgagctgctgccccagaggcccagcaggtgtccagaactcaccctctgctcccagctcaccatcaaagcgctgcatgtggcccccactaccaacctgggtgggcctgagtgctgtctccgcgtctcgctgatgcccctgcggctcaatgtggaccaggtgagtggtctacgtgagggcagagcctagggtgaccccactgtctccaggcctctgagtctgatccacatctggacctctcccttgcaggatgccctcttcttcctcaaggacttcttcactagtctggtggccggcatcaaccccgtggtcccaggggagacctccgctgagggtgagaggctgggccagggaggggagcgtctgggccttctgcctcccaggacagcacaggttcccagtcattcctggccccatccccagtctgtgacctcccctcccctagctcgccccgagactcgagcccagcccagcagccccctggaagggcaggccgaaggcgtagagac

SEQ ID NO: 7488 - DNA, 2300 bp, Homo sapien
cggcagccagggcaccagcgaggccctgggaatcagccacctttgtaggtccccggattcatctcctgtaagatggagataacctgccctgcctcgctaggcatgcagagcccttcacggggagtggggtagggtgggtgggcacactcctgcttccttggatggccctgggccaagcccctttcaccctctgggtgaacagtttgttcatctgttcagtggagttactgggcaggtcatccactccaggagagaccatccctgttctgcctgtggcaggatcagaactgcggtgccctcccagcgagcgggtggggccagcaggcagtggcccctgtgttcacatagctgctccccccaccccgcccctgcagagccagccactattcgagctgcgctgctccaacaatgtggtacacgtgcacagctgtgccgactcctgtgccctgctggtcaacctgctccagtacgtaatgagcacaggcgatctgcaccccccaccccggccccccagccccacggagatcgccggccagaaggtacaggtgaggcctggccacacaggctaccagagctcggccaggcccctcccctgccatggccctcgggcctggggttgggggagctctgtcctgtctcactcattgctcctcccctgcctggcccagctctcggagagtcctgcctctctgccctcgtgccccccagtggagacggccctcatcaaccagcgtgacctggccgacgccctcctggacaccgagcgcagcctacgggagctggcccagccttcaggtgaagtgggggtgctgtggggacagcagacacagtcaggcacccactgtgggcgcctctccaaactggcctctctcctataggtggccacctccctcaggcgtcgcccatctccgtctacctattcccaggtgaacggagtggggccccacccccttcaccacctgtcgggggccctgctggcagcttagggtcatgctcagaggagaaggaagatgaaagggaagaggagggcgatggagacaccctggacagtgatgagttctgcatccttgatgctcccggcctgggcatcccggtgcgtggtgggagggatggaccagtttgccgtccaggcaggtgtgtttggagcggggacggaacactcaggggtggttgcctggccatctggagctcccgtggtgagagaagcaggcaggaggtggttgccatcacctcgggggtggtgctaggtctgtgccaccctagggaggcagccctgatgctgggctttgatggagtagggggatttccagaggaagaggaggcctggtgttttgggcagagggactgggaaattcaagggatggaggaagaggagagggcagttagcaagagggatggagaaccatgtggctgcaagggccagtgggaatgtctgaactcacccaggtcttaggaggcagggctggcaggagcctggcattctcaggctcctcttggacagaccactcaggcatagactcgggtgatagcaacccaggagtgtcatctttcatcaaaaacagggaggaggccaagcatggtaggttacgcctgtaatcccagcaatttgggaggtcaaggtgggagaattgcttgagtccagcaatgagagattagcctgagcaacatagtgagaccccgtctctacaaaaaataaaaataaaattagccagatatggtggcacatgtctgcagtccctgctactcaggaggctgagaatggaggatcgcttgagcctaggaggcagaggttgcagtgaactgtgattgtgccactgcactccagcctgggtgaccgaacatgacccgaccctgtctataaaaaaaaaaaaatgaaaaagaagtgaggccaggttgctggggctgggggcagctgggctggatcgaacatctgtgtcacacgtctacctggcctccctgcagccccgagatggggagcctgtggtgacacagctgcatcccggccccatcgttgtgagggacggttacttctcacggccgatcggcagcacggacttgctgcgggcacctgcccatttcccagtgcccagcactcgggtggtgctacgtgaggtctccctcgtctggcacctctatgggggccgagactttggcccccaccccggccacaggtgaggaggagcgggtgcaggtggcagctggtgaaggttggggctcaggctggtccaggtctgactttcagcagctggagaccttgagccccatccaccccaggtgggcctcagtttcctcatccttcc

SEQ ID NO: 7489 - DNA, 2300 bp, Homo sapien
ggattgtttccgcctttctagagggcagttggagcctcctgatgagacccttataagcatttgtgctctctgacctgtaatctcatgtctgagggttgtcctaggatatgcgaataagagaggtgggatttaatgcttatggagtataagttaaaacagccaaaacgtatcagttaaatcacaagcctcacaacctgagcaaataagcatggcccacctagtaggtagaaaaccatgcagggattaaggtgaagctgaagaatcccttcaaaatataagaagatggagggtgcggtggctcacacctgtaatcccagcactttgggaggctgaggcaggcagatcacaaggtcaggagttcgagaccagcctggccaatatggtgaaaccccgtctctactaaaaatacaaaaatgagccgggggtggtggcaggcgcctgtagtcccagctacttgggaggctgaggcaggagaatcacttgaatctgggaggcggaggttacggtgagcgaagattgcgccactgcactccagcctgggtgacagagcgagactccgtctcaaataaatacatagatagatagatagatagatagatagatagatagatagatagataaaaaatatagaaagatgccacagtacagtgtttactcaaataacattggatacaggactgcgtacgttttaaaatcagtttatgaaggggtgtttatatgtctcggcgtgcagctgcagagaaagtttggaaggagatgtgtatggtggttttctcagaattagggattaggaatgatgaatgatttttattttctttattctaaaatatcttaaaggagttttcattatgttacccttaaaataaagacttttttatttattttttttttttgagacagagtctcgctctgtcagcaggctggagtgcagtggcgcaatctcagccgactgcaacctctgcctcctgggttcaagcgattctcctgcctcagcctcccaagtagctgggacaacaggcacccaccaccacacccagctaagttttgtatttttagtagagacagggtttcaccttgttggtcaggctggtctcgaactcctgacctcgtgatccgcctgccttggcctccaaaagtgctgggattataggcatgagccaccatgcccagcccttattattatttctttttgagatggagtctcactctgtcgcccaggctagagtgcagtggtgtgatctaggctcgctgcaacccctgcctccctagttcaagagattctcctgcctcagccttccaagtagctgggattacaggcacccgccaccatgctcggctaatatttgtatttttagtagacatggggtttcaccacgttggccaggctggtctcaaactcctgatatcaggtgatccgcctgcctcagcctctccaagtgctgggattacaggcgtgagccaccgcgccagccaaaaataaggacttattttagaagaaccacaaatgcagcagggagaaaaatggacaccccttcccaggactgtcatgaggccccattgaggtgtcggaactgcaggcactttgagagctgcaagtgctgcccgcttcccactgcctgctgtctgggccttctccccattgtgcaggcaggaacgctgaggctggaggggcctgtccataccacctcctgtgggcttgggacccctctgctcggctcccgtggagctgccccctgcagcggtgcccgggcccttctcagccctgttcccccccaggttcatcctcgatgactccgccttgtacctgtccgacaagtgtgaggtggagaccctggacctgcggcgaggtgggcagggccgggactgggctccctcccctctgagggaccaccgccccggccacacccagagcagccaggtgtctccccgcagctgctggccgggtccttagctcccacacgtagcccgcacagcagggactacacctggatcaaccggatccttcccccaggtgctggggccggggccgggtggaagggggccacaggacctttctctcgcctctgctgcagattatgtctgtgttttggatgttgacctcttggaacttgtgattaaaacctggaaagggagcaccgagggcaaactggtgagtgaggctgtcactctggctcctggagccacagcaggtgcaggggccaagggagtcttcaggggctgctgctccctcacgtgcctgggctccggacacagttcatgcctgcccttcctgggctgcagttagcgcccctcctgcaaag

SEQ ID NO: 7490 - DNA, 2300 bp, Homo sapien
cagtggcacaaacttggctcaccacaagctccgcctcccaggttcacaccattctcctgcctcagcctcccgagtagctgggactacaggcgcccgccatcacactctgctaattttttaaatattttttagtagagatggggtttcactgtgttagccagggtggtctcgatttcctgacctcatgatccacccgccttggcctcccaaagtgctgggattacaggcatgagccaccgtgcctggcccataagcactttctgaatggctgtcctatcagcctgcctccctgaatggagcctgctccttccaggtaatgaactatctccacttactaacccaaccccagttacataggataaaactgagggtcacaagaggagaagaaaccacccatgggtgggactggaatacaggtccctgcccggtgggccagggcggttgcccttgcttcaggctgagttttggcattagaatgtaagagtccagctcccaagtaagattaaaatagaaacacaggctaggtggggtagctcacacctgtaatcccagctactcaggaattccttgaacccaggagccagaggttgcgtgagaggagactgcaccactgcactccagcctgggcaacagagcaagactctgtctcaaaaaaaataaataaaatagaaacataggccgggcacggtggctcgtgcctgtaatcccaacactttgggaggccaaggcaggctgatcacctaaggtcaggagttcgagaccagcctgcccaacacggtaattagctgggtgcggtggtgcatgcctgtaatcccagctactctgggaggccaaggcagcagaatcatttgaacccaggaggcagaggttgcagtgagccaagattgtgccactgcactccagcctaggtgacagagagagtctgtctcaaaaagaaaagaaaagaaacataattacctatggctgttcctgaagtcgcccatgatgtaagaggttttgtgtggctgccccctacagagcagcggttggcaaactttttctgtgaagggccagaaaataaatattttaggctttgcaggcctctgtctcaagtactgaattctgctcttgtagcaagaaagcagcccggggcagaacttaagcaaatgagcaagactgtgtgacactaaaacgttatgtataaacactggaatgtgaatttcatatgatttttcacatgccatgaaaagttcattcttcttttgatttttcccctaaccatttaaaagacataaaaaccatacttagctcaaaggccgtacaaaaacaatgcccccctgcttaaaggaggcagaatccattctttgattttaggactagagatatgaaaagctattattatttcagagaggtgcctaaggcctgaccgacggcagagagaagggagggtcagttaatctccctctgagcattccggggtgaggaggggaaaaaagaccttccttggtgatggattcagagcccttatttatttttgtttgtttttgaggcagggtctttctcgtatcttaatctgttttcttacctgtaaagcggtggcaataatccctaccttgagcgattattaagagggctcaatgagataaaggatggtaaaagattttgcaaaatgcgaatgtttactcacttaattgtttccacagatgcgcgcttaagatcgcgcactgagtttactcctctggggaaggcttctacgaagtttgatgggacactgtccctttaaatcctccccaaccacttaaagtggttggacgaatcagcacatgcgcattcctttgaggggccggcacctggagcaacagccttcccagagcctgtagaggggaggttaaaggtcctcccacacagtactttacgcaagcgtaaatcatgattgagagccctatatcatgcagagagcccagtccctttttcgcgcccgaaggctccgccccgcgcagccaatcagtaggcctcgccctttgcaatagccaatgacagtgagcgtagggggcgtggctgggcgtccggaggcgcggcctggcgcctagagaagcggcggggcgagccgggggctctagtgaacagcggagccggacggggatcgccggcgggcggcaagcggaggcggcccaggcccggcggtctccgagatgtcacgatggctgtggccatggtcaaactgtgtgaaagagcgggtctgccgctacttgctgcaccactacttaggtcacttcttccaagagcacctcagcctggaccagctcagcctcgatctgtac

SEQ ID NO: 7491 - DNA, 2300 bp, Homo sapien
tttcagccgggcacagtggctcacgcctgtaatcccagcactttgggaggccgaggtgggcggatcacgaggtcaggagatcgagaccatcctggctaacacggtgaaaccccgtctctactaaaaatacaaaaaaactagctgggcttggtggtgggcgcctgaagtcccagctattcgggaggctgaggcaggagaatggtgtgaacccaggaggcggagcttgcagtgagccgagtttgtgccactgcactccagcctgggcaacagagcgagactccatctcaaaaaaaaaaaaaagttttttttttcttccaagagtcttatccctctcctctactcttcagtgccccatttctcaaatggaacatctctgttttttgttttgtttttgagacagggtctctgtcacccaggctggaatgcgacagcacaatcacagcttactgcagcctctaactcctgggcttatgtgatcttcccacctcagcctcccaaagtattgagattacaggtatgagccatcacacctggccttagcacttcctttatataaaacaccagtcctctgtggtcagtctagccttgagaccagggcactggtacccagggggcttgtggagatgggctgtagccagctgggaggtggaagcctggcccctggccccaacttttgatgacacgctgtgtgacactgggcaaggcgcttctcctctctaggccttggggtccttgcctggctgcagaggctctgtgggcctgccctccctcagcttgttcagggatgcagaagagcctgggaggtgggcaaggagggagatcatggattcccattggacagacagggacaccaagggccggatgggcaaggcctgccggaggttcctgagcaagcagagcacttgctgggtctccagtgccggagtcctggaccccagcctggtgaactgcggccctcggtgcaggcctctgccttctgttgctttggtaggcggacacctcttgcgcacccaggcttcctctgcaaccgggaggatggctgggtggttccgctggagcactgagtggtcaccaagacccaaagcaagatggggcagactctgaaaaggcccctagtcccctccccgacctcattatctggtctcatcaccctttcctactgctcaccatggaccagctgctcatccaggcaacatttcagggtggagatttcacagcagtgtagcgggatggagttcagggctataaagagtgttggggtccaggatcctaggacgggggcccaggactgcaggctgggaacttttggttagcatgccaaactcctggactcccacctgtgccttgcatgccagcagcaggattttgagcaagagacactgacccacccagcacatcttagggtccaggggggctgaaaggtccatccgggaaggccaggctgcctgggatgaggtggcagctcaaggagaaaacctcctcctctcgggctttgccactccaagactggccctttaaactggagaccatgatgtcaccatagacagcaagggacgggagggggactgcaggcctgaggatggactgcatctcccagcaggcttgggtgcaccacacccctcccagcaagcactgactcatcgcagacttttaactagtccagtgctggtttccaaggggtttctgaagtgtctggtggttctggggtaagggtgaggttcctggggggatggcctagggcatagaaggcccaggccaaatctgtgggcctagcgtagcttgctgcgactccttcctgtcagtgtcctggcatcaccctactttcctggtgcaaactcctaagccctcctctttccctatgcagcctcccttctagaatccaggcttcccgcccccggctagagcccatcccactctgctctctggcttcaaaagcttcggccttcacccccgagtctgccctcaggggtgtcccctttggtctggcagctcactttaaacggcgcggggactacatctcccagcggccccgggccttcctgacgcagccccccctttcagcccgcggggaggtgcgggccgggtggggggaggtgacttgatgtcatcctgagcagctgggcggcgggtgccggtgcgcacggagccgagccggggctcccgttgcgctgcaccgcgttgggtcggagtcccaggacttcagcggagatccgcgcgctgcgacggccggtgcagagcccgccgagcgcccagtcccggcccggggctgagttgggggcatgctctagccgcccccccgg

SEQ ID NO: 7492 - DNA, 2300 bp, Homo sapien
aaaatgtttcccacctctctatccctttaactgtttgacagtaatgcagattcgtttatcagattaactggaagtcaatccaggttggcacccctggagaaggcctggccacctgagctgccttcaactaaaggactgatctgtaatagacactttagcctcatgtggccgtggagaaccaaaatgatctatggaaatgtagggaaactcattttagctcacaacaaaggagtcactttttacctgttagagatgtccaatattagaatgggctacctcataaggtaatgagccttgtcacccaaatgctttaaacagaagccatcatctgtcacatgccagagggtgcccctcaagagtgggagagcaggggctgaactgctgagttcccgctgcgtcctgttgctatgctgcctgcacccttggtggggagaagagaagaggtggactgctgcggaggacctggcaaacaaggacccaggtcttgaggggatgggggctgatggggaaaccgtagggtgtgggaatttaaggattagtgacattagtaacatcacttcctctcaaattgcgtttacagcctttactcgactgtcccaaacatggcctgttttacaaagctgctaagaagcacagctccaaatctggagctgtgagtgcccgccctgactctgactagcttacagtgaagctttgggaagttgttttccgctgagctcttattttctcatccagaaaatgagggggtaggatttggtgagttataaagtgccttctagctctagcagtctgtgactggccctgctctttctgagcagatcagtgaggcaatgaccccaaagcggggctgcccagaatcaccacaggcttcctttggctctccaccttgccccaacccctctggccactgctgcctgggggtctttctccagcttgccacattcttgctcaagtgtagtttagcaccatggatggacagcagatttgaatttgaaatcagccctaacattaactagctgggtgacttttagtaactttctttctttgagccttagttgcctcatctataaaaccagagttggacaaatagatcagctttgctggggttgataacttcaggccctttcaggagtcaggtccctgttattccagggctaggggagcactccagctcagaacgttactctgtagcacaggatgcgaatcatccactgataccgtggccatgcaactctgaaacagacagcaacccccaaacccccggccctgccaccaagcacatctcaggagacctccactggtataatttcccttgtccctaagaatctccttccccaatccctttcctttgcagttagaaaaaggcaagcaggactgagtttagtggttttaaaattaggggtgtggccaggcacagtgtctcatgcctgtaattctagcactttgggaggcctaagcaggcggatcacttgagcttagcagttcaagaccaccatgggcaacatggcaaaatcctgtctctacaaaaaaatacaaaagttagctggtcatagtggtgtgcctgtggtcccagctactcaggaggctaagggggaggatggcttgagtctgggaggctgggaggtggaggttgcagtgagccgagataacaccaccacactccagcctaggtgacagagccagaccctctcaaaataatagtaataaataataataaagttaggggtgatcaggccctgaacagggaaatgttctgtccaaggtcacagagcaaagagaacccaggtgtccacaactcagccaagagtcttgacccctgtgtcgtcagctgcacacacgctgcacactccaccagctcctaggcttctctccacatctgacttatcgaggcctgggctgtgggtagctttttggacagaaagaagcagaaagcagcaggagctgctctccgaggaccgcacctcaaagagcaagatcccccaggtgggatcgctctgaggcttcaggcaggggaggctggtttgaaagccgatctccaagagggcgtggctccaaaatgctggcaaataaaagcctggagagccagcaccaagctggagaccagcaggaggcacaggaaaactgcaagccgctctgttcctgggcctcggaagtggtgagctcgctgaggcaggaggagctctggggagggtctgggaatgtggacgagggccctgcaggccaagatggggcagatggagggaggaagatgtttgcgctccagatggcgaagaaaattccagggaagggagaatcactgc

SEQ ID NO: 7493 - DNA, 2300 bp, Homo sapien
actgcaacctccaccccccgatttcaagtgattctcctgcctcagcctccaagtagctgggattaaggtgcatgccaccttgcctggctgattttgtggtgtgttttttgtttgttttagtagagacagggtctcaccatgttggccaggctggtctcaaactcctgacctcaggtgatctgcccgcctccgcctcccaaagtgctgggattacaggtgtgagccactgcacacggccacctgtttcttatagttaagtaacactgaacttcttggagacagacacacacacagcatgctattttttgttgccaggcttttgccatgtgctggctggcttgacagatctggtatatgtgctttgaattctgttgtcatctgcgagcgttgctgttgaaatgttccagtatggcaggctaagtctgaatccatacgagtctctttagcactgtaaattgtttctgagttagggtataggtttattaattctcaagaatcccaagggcccataaaaaggtgctcaacgttattagtcgttagggaaatgcaaattaaatctataactagataccactacacatctattaggatggcaaaaaatttttaactgaaaatatcaagtgctggcaaggatgcagagcaattctcacactctgctgacgggagtgcagaatggtacagccactctggaaaactgcttcgcagtttctttctttctttttttttttttgagatggagcctcactctgtagcccaggctggagtgcactggagtgatctcagctcactgcaacctctgcctcccaggttcaagcaattctcctgcctcagcctccagagtagctgggattacaggcacgtggccaccatgcccaactctaattttcgtatttttagtagagacgtagtttcaccatgttgcccaggctggtcttgaactcctgacctcgtgatttgcctgccttggcctcccaaagtgctgggattacagatgtgagccaccgcgcccaggcccccactccccccgatttttttttcttttttgagacggagttttgctcttgttgcccaggctggagtgcaatggtgtgatctcagctcactgcaagctctgcctcccgggttcaagagattcttgtgcttcagcctcccgagttgcagggattacaggtgtgccccaccgtgcctggctaatcttgtttttgctttgttttgtttgagacggagtcttgctctgtcgcccaggctagagtccagtggcgcaatctcgcaaactcggctcactgcaagctccgcctaccgagttcacgccattctcctgcctcagcctcctgagtagctgggactacaggcgcccgccaccacggctagttttttgtattttttgttatttttagtagagacggggtttcaccgtgttagccaggatggtctggatctcctgacctcgtgatctgccctcctcggcctcccaaagtgctgggattacaggagtgagccaccgcgcctggctaagcttgtatttttacaaaatagagatggggtttcaccacattggccaggttggtctcaaactcctgaccttaggttatccacccaccttggcctcccaaagtgctggaattacaggcatgagccaccgcgcccggccctgtctctacttttaaaaataagatttaaggaaaaaaagtgggagtgcgtgtgtgtgtgtgtatgtgtgtgtaacaggtctcgcttggtcgccccggctggagtgcagtggcgcgatctcggctcactgcagcctcggcctcctgagctcaagcgatcctaaatttggggcattaatgcctgccgcagagcatatcgccgaggaataaaggaaggtaccctgcataacgcctagcacacagtaaggactctgcagtcgctagttcccgacgacaccacgctaaagcaggcgcgaaataaacaatgggctggtaaatccaggagggacctgaaggcgccaaggcgtcctctcggtgtcgacaatgaaatgcgcacgcgcagaccgcggccaggccttggagctgcgcccgaaggggcggtgggaagcgcacttgcgcgtgcgcagaaggcctggtgggtgcgcggcacgagccccgaagttgcttaggagctggcgagccagtccctcaaaacgacttcgttcgaggttggcgcccgcctttttcagagagcacttcttagtgggtattccgtccggggccacttttctgaggccgaaggacccctagtcagtgtgtgagacatagcctggccgagcctgggaaccacct

SEQ ID NO: 7494 - DNA, 2300 bp, Homo sapien
cttctttggtcttctcccagggctgtggtgttctgggaagagctacacctgctgtctcacctctgccagaagccagggtctggagaagaaagactgggggtctggggcaggggctgggatctggagtgggacactcaggcctagcccctccacacacacacacacacacacaagcacacacgggtgtttcttcgtagtcacatcatgcacaaggtgcctgcagatcctcccaggggagctcatgggctggcttaatgagcccttcaggtgcctgcctcaggcaagacgccccagccttcctggtttccaggaaacaataattcagagaaacagggatggcctcactgcgtggggcatcccacttccgcctctgctcccaggcccctcagaagctaggagggcaaggcccagctcttatgcccaatctcacccacccaggcattttaaattaggagcctgcattaataatcttagaatccagaatatgacaccacaaatttcaggagggggaatccttgccacatagtactttacaatatcccaagagctttcttctcatctcattctttcccatcttcaaaacaactgtcaaataggtatcatttctttgtgatcaccagcatatctttgaagacactgaggctccaggtgataaactgggtgagtggagtgccaggatggagagtcaagtcttttgtctctgaaacccagacttgttttatgcctggttctagggatagcaggggactgcactctccacacctctgcccataacaggcatcactaatcgatcatggtgtggcagacattgctaatcaactgcagtactcttttttactaagctcagaggtgtccatgaactctttaaaacaacattccagccaccatcacctatcagaagatcatatctgtatttgccattcttgtgataccacatcatcagccatgagccctcaggtctcaggtacaactccaagatgctctagtcaccagaccataggactctacatactgcatgcatgctgttcttggacaggaattactggcccctctggcccccaaacagatgccccatccaagtgtccctcttagagatacaacaagcatgcaggtatgcccggggcttcagggtttgctaggtctttattttttaatttttaattaattaatttttttgaaacaaggtcttgctctattgcccaggctggagtgcagtggcaagattatagctcactgcagccttgaactcctgggctcaagtgatcctctcatctcagcctcctgagtaactgggaatacaggtgtgtgccaccatgcccagttattttttttatttttaatatagataaggtcttgctatgttgcccaggctggtctcaaactcctgagctcaagtaatcctcctgccttggcctcccagagtacttggattacaggcatgaaccactgcatctggcctaacaaaattgtttttatccccactttacagatttggaaacagaaacacagatgaaattacgaacccaagtcacatagcttggaagctgggctcctaaccactggacatcaatctttccactgcttcatggtctgttgtatgaaaacagtaatgtatccatctgttctatccaacagccattgcttaattttgcagacatgcttccatagtggtctcagaaggtttgggggtggttgtattatctggcttagttcctgcaatgagcctgggagtgggtagttgtaccatcctccagatgagaaaactagggctcagagaaggagagtcactttctgaaagttggacagctccaatgtgtgctgtgatccagagttcccccaattccagagctcaagggctctctctaccccacatgagcatcggtccccactggcttcttctctcatctcagtccctggccgcctgtcctccctcccctagaacaccctcctcatacctggcctttggtcttccctcctctccaccctccaccatcctctttccagagaaggggcccaaccggaaggccagttcatgttaggaaattctagccacgtgagcaagcctgagccagggattctgagcagctggtggctttaggagaaactgaaacttggccctctgggggcggagtggccactggggatttaaagagctgccacttccttaggcctccagagggcactgggaagtcacagctgctgagggaccactctgctcccccgcctaagccatgcacctctgtgggggcaatgggctgctgacccagacagtgagtacaggggattggggatcggggatg

SEQ ID NO: 7495 - DNA, 2300 bp, Homo sapien
cactgcagccttatcctccctggttcccaccttggcctcctaggtagctggaactaccgatgtgcaccactacacctaatttttttttttttttttgagacagacaatttcgcccaggctggagtgcagtggcacaatttcagctcactgcaaccttcgcctcctgggttgaagtgagcatgtctggctaatttttgtattttttatagagatgggagtctccctaagttggccaggctggtcttgaactcctgggctcaagcaatccactcacctctgccttccaaagtgctgggattagacatgagccactgcgcctggcccacttcactgttttaagggcttcatgaattcacatgcacctaccccggctcaggtaacctgccctcactggaggcacttaggttttttccaatttcttgctgttccaaaccatgccacagtgaacttcgttgttcctgtgcagtgccagaatgtctgtggtgcaggctcctagaagcaggatggcaggctcctacctctagacatttcttttttttttttttttttttttttgagacggagtctcactctgtcacccagtctggagtgcagtggcacaatctcggctcactgcaacctccgtctcctgggttcaagcaattctctgcctcagcctcccgaatagctgggattacaggtgccgccaccacgcccagctaattttttgtattcttagtagagacggggtttcaccatgttggccaggctggtcttgaactcctgacctcgtgatccacctgcctcggcctcccaaagtgctgggtttacaggcgtgagccatggcgcccggccagcatttcccattttgatcttagctgcatttcgaagcctctgggtaggcgatatgctcactttcttccttgtgtgtgtgtgatggagggtaaatggtgctgaccgaagggtcccactcaggcagcctatctgttcagccctcctctgaccacaagcccctttctgcaagatgggaagctccagcttcttccagacctctctctaggcaaacttcatggaggcatgaagacattgtgctttaccatttactagacctgagtttgaatctcacccatgctccttaaacactctggattccattatcatagctacgaaaagaatataaacctctcagggttgcagggaggatgaagctgaacacgtgaagtgcgttgcaaacagttacacaggagttagctattgtcctcagctggtgctgacagctctttcccaagcatgagagaggctcttccgtgctgcctatccacacttacctgcagcaataaggctgtctcctgagtttacaaaagggcttggtccttgacctatttcctcacttcttctggacttcttgagcgctaaagtaaagaatgaaactcttggacaaagccattcattcaacaacaaatatttattgagcacctactacatgccagccactgtgctaagcaccatctgggcctcagtttttccatctgcaaaagtaggaactgtgcttctgaacagggaaacgctgggcctctgggtgggggcagcctttggggcgggactgcaattccgtcattggaacccagggacgccccgcatgtttccgaacggcctccagggggcaccgccgccctgaactgagagccaccggagccgggtagggggaggcccaactttccgctctgtcagaggatgatgccgagggcccagatgagcaggatttggactgtgttgctgggaacgggggcctacactggccccaggatgagttcgtccgtacctgggggccctgggttctgactctcaggtcagacgcagccaagatgcaactcaggaacttcaaggtttccgctccggccaagagccccagtccggcaggggaaagggtgggggagtcgcccttgctcccccagcctcagccctcgggaggcgcagcgtcagggcgggcggcagcacagaaaccccccgcgccgctagagggaccctcgcagcagctgcgcgggcgacctcgcggtcacgtgcggcaagggcgggaccaaacgagcgtccggccaatcgactatgccgtcggcgagcgtgatagccaacaggaaccgggagcggggtcccgggactgggaagaaacggcggccgggagggggctccggggaccatggggctcctgaccattctgaagaagatgaagcagaaagagcgggagctgcgactgctcatgctgtatcctaccggacgccggaaccgcgagggtggcggggtccagccgggcaggcggtgccggg

SEQ ID NO: 7496 - DNA, 2300 bp, Homo sapien
caatgcttcctctgcagtaaatactatgtgttgtatgtaagcctaccaacttcatgctgcatttcaacagatttttgcttcaattctaacactgactggagcaaaggtctcaaaacccatgccaggtttgggaacaccagtctccacgtggcccacactgacagtaccaataccaccaattttgtggacgtctggaggggcagaaccaagagcttgtgagttggtggtaggatgtgatctagagcttccgagcagcgtggttccacagcatcgccatctttacaggtgactttccatcccttgagccaaggcatgtgagctcttggctcccgcctgttgtgaccactccaaccagatattggcacaaatactactatgtcagagttgtagccaatttcttaatgtaggtgctgatttccttaatgatttctcccatctctccttttttttttttttttttttttgagacggagtctcactctgtcctctgtctcccaggctggagtgcagtggcacgatctcagctcactgcaacctctgcctcctggtttcaggcaattctctgcctcagcctcccaagtagctgggattacaggcacccgccaccatgcccagctaatttttgtatttttagtagagacggggtttcaccatcttggtcaggctggtcttgaactcctgacttcctaatccacccacctctgcctcccaaactgctgggattacaggcgtgagccaccacgcccggcccccatctctcctctttagggtggctcattgggatccattttgttaacaccaacaattagtttcacacccagcgtgtaagacagaagggtgtgctcacgcgtctgcccattcttggaattaccagcttcaaattcatcaacaccagcagcaacaatcaggacagcacaattagcctgaggtcaggtttttgataaagtctctgcatcctgggccattgaggatggtcacatagtacttgctggtctcaattgccagcagggaggtatcagtggtgataccactctcacgttcaactttcagcttacccaagacccaggtatgcttgaaggagccctttcccatctcagcagcttcctcaaaattgtcgatggttcttttgtggatcccaccacacttgtagatcagatggccagtagtgctggacttgcccaaatcagatgatgatgttgagctgagtcttttccctcccctgctccctttcttttgagatggagtctcactctgttgcccaggctggagtgcagtggtgtgattgcagctcactgcagcctcaacctcctgggctgaagccatcagccagctcagcccctggagtagctggaattacaggcgtgcgccaccacgcccagctaatttttgtatttttagtagaaacggggtttcaccatgttggccaggctggtcttgaactcctgacctcaagtgatccacctgcctccactgcccaaaatgctgggattacaggcgtgaaccaccgcgccaaacccccattttggctttgatttaacggtggttttcacgacacctgtgttctggcagcaaacccatcgcaaaaaagctccactgccctacacagattctattataaacatctccattctacagatgagaaactgaggctgagtagttaagggaaactcctacagctagtaagagtcgtgactcagagcccatgacaccatcctgcttctccaaccttctttgcttcctctactttccagaaaacatgaattagggaatcctgtggagggagacagggaaataatttgacgttgtcctgtacatactggacacaataagagttgggtggatgaacgaaagcagggatttaggaagcggggagaagtcgtttggaagtctgtgacaagggtttacgcttggatagggtgggcttgatcacccggcagaaatgagacgagtgatcccagccttcccaaccaatctttccagtgacctgggtttacgcttcaccacagagaaggaacttttcagacgctcccttggccgcgcacccgggatcggaacagcgctgtcacttgcgacaaaatccctaggccagaggaagaagagcgcaggcctggcgaggcggcggcgggcggaggctgggccggaggggtggggacggcgaggaggtggaggccggcgctccgctccgctccagctcggtttcatgtcccgccaggcgaaggatgacttcctgcggcactacacagtgtcggaccccaggactcaccccaagggctacaccgagtacaaagtaaccgcgcagg

SEQ ID NO: 7497 - DNA, 2300 bp, Homo sapien
cgtgcacgtcttgcttcagggagtccccagtgagtagggactgagggtggagggtcaggcctgggtcccaggtggggcagtgatgaagggagcaaaaaaacaagcaaatcacggatcaggagcccttttactcctcactgaccagctgtgtaacctgggcagatttttgtttctgtttttttgttgttgttgtttttaacctcttgtggcctcagttttcttcttcctctttttttttttttttttttgagacagagtcttgctcttgttgcaggctggagtgcacaatctcggctcactgcaacctccgccccccaggttcaagtgattctactgcctcagcctcccgactagctgggattacaggcgcccaccaccatgcctggctaatttttgaatttttattttttatttatttttatttatttatttttattttttgagacagagtctcgctctgtcgcccaggctggagtgcagtggcacaatcttggctcactgcaacctccacctcccaggttcaagccattctcctgcctcagcctcctgagtagctgggattacaggcacgtgccaccacgcccagcgaatttttgtagttttagtagagatgggctttcaccatgttggtcaggctggtctcgaacccctgacctcgtgatccacccacctcggcctcccaaagtgctgggattacaggcgtgagccaccgcgcccagcatggcctcagttttcttatttgtagactgaggagaatggatgctgggccccagagaggagggaaaagcacatggtgatgctctgcgaattgtaaaggacccgaccaggggttctgaccaggccagtggtgcccaggtgcctcagctgagcattctctctccacaggtgacccgttgcctgcccgccaggaaggtgtgaagaagaaggcagctgagtacctgaagcgggcagaggagatcctgcgcctgcacctgtctcaactcccaccctaacagggagtgggccattccctgggactctcgctcctgcactgccagccccttctcctctccccagggcctggccctacctcctggtcttgtaattacaggagccatttctgtaggtaactggaccaagaatgagaaaaataatgaattcttagctccctgattacacctgccaccttggaatcaaggactcacacttctgaccctgcctgtctttttggggtttttttgagttggagtctcgctgtgtcgcccagactggagtgcagtggtgggatcgcggctcactgcaacctccacctcccaggttcaagcagttctcctgtctcagcctccccagtagctgagattgcaggcacatgccaccacgcccagctaatattttgtattttcagtagggacggggttacaccatgttggccaggctggtctcgaactcctgacctcaagtgatccacccgcctcagtctcccaaagtgctgagattacaggcatgagtcactacgcccggcccatgtctgtctgtcttgatgtgtgagcagcagctgtggtcattaaaccattagtttacccctctagaactggggtctgcaaactcccacctgcagccaaatctggcccacctcctttttaatgtaagggctgtgagagtggtttttactttttttaatgattaaaaaaatcaaaataatattctgtgacaatgacaggtgaaatttatatgtgacaagtgaaaattatatgaaatttaagagtccataaataaaatttgttggaacacaaccaggctaattcatttagtattgtgatagctgctttcgcgctacactggcagttgaaacagttgcagagttgagtctttgccgcctgcaaatcccaaaacatttacaacctggccctttgcagaaaacatttgctggcccctgagctagaaaatagggagcatagtctcagggaaatagaggacaagccgatggagccggtttattgggtggaagggacgaaggagaggaacccaaagcccgggtacttgtctcagaggccccaaagccaaatcctgattgctcagcgggctggaaggcgtggcctcagccccgccccgccccgcctcaccacaaagcggttggttgcggcagggactacaccggtgtatcatgggagcggcccgggctacacgttaaaaacactaaggggagcgcgcgaagctgaacttggcgctcgatgggggccgttagccgccctagagcgcgcggagccgcagaggcgtagctggactacaacgcagtgcatctcgggaggccaactcgactg

SEQ ID NO: 7498 - DNA, 2300 bp, Homo sapien
tccaacacaaaccacagtcccaggtgttatcactcagatgtcacacacttttgtccaggcgtcctgtttgtgacttcacatgattgaggggttaaatccttccaggagtgggtggggtaggaccatggggttgctgcctcagtccctcaacttatcagctgaccttggcatcccactccccacctggtggtgactgtcctgtgtcctcataaggaaggtgtatgctccctgcaccgatgggcttctgataagatccaaggtcatattctgggcgtcgataatcacgttgccaagaactgtggcttcctggtgcacctccctgaagtcactgatcacatgacatcccttcccagccacccctagtcctcccatgctgaacctcctcaccagcagcacaagagatggtggtgccagcaaaatggggttgtgagcaggaaggaggctgctctgagaggggtctgtgaaatcacacacacacacatgcacgtgcacacacacacacacacacacacacgctctgccctgatccagcccccaagctctgcaggcatctttgagcccatccatgggctgcaacctgcgaggcagagtcaaggcaggataggccatgggagggtgggagaagtcccagctcaagtccctagggacccccccagcccctcctggctctccgtgaggtctggaagaggctcagtatgtgtatggcatacttggggtctcacttccctctcagcccttgcaaatgctggaacaccttttcagccttggaggaccccctcagatgttccctcctagtcagaactcctcactctttcactgggagcatggtgatcctccctctacagggcacttaccacatggctgaacctaaagcctgtctgcctcgcctgctggattttgcttccccacagccttgcatggctctagtatagcacagaatgaacagtgcttgcatgtataaaggaaggaatgaataagtgaatggagggatgggtggatggataaataggagggtggatgacggagtccaggcagagccaggggatagaagaggaagtcacctcgccagggaggcatgggcttcccctgctgcctcctctgggacagcctcccttcccaggactcccattcctcgtatcgctgggctcccttcaggatagacacagagagttcttctgggtcctccttcttcctttagctctaggccttacattttccagagtcagatgagggatgagtagttaaaattgatgagctcccactacatgtcagacactgcactagctatttctacagatgccatattgtttaatgaaaatgacaccatagccggcacggtggctcactcctgtcatcccagcactttgggaggctgaggcgggtgatcacctgagatcaggagtttgagaccagcctggccaacatggtgaaaccccatctctactaaaaatacaaaaattagctggacatggtggtgcacacccgtaatcccagctactcgggaggccgatgcaggagaatcacttgagcccgggaggtggaggttgcagtgagccgagatcacaccactggactccagcctgggtgtcagtggaagacacagtctagaaaaaaaaaaaagaaaacaggtgtagagaagctgagtggattgcccaaggtcacacagcttacgtccagcaagaagggggatctcaactcaaaatctgctcaggcaggtagggctgggtatgctgtagatcggctgccttggagggaggcagaggcagtgagggtgggcagtgggcacggccctgctgtgaacacaggagctctgagttccagccctggcttggcctctgttttcctgggacaccctggatgagccccttccctctcggcttcagtgtccctgggtgaccttgctgcccttggagagccattccaggcaaatggtgcaggatgtggtggatgtggatggctcctggctctcactgcgggatgttccctcactctccctgccagctgggggtcaaagggcagtgccacccatggggtaatgtttaaccaggcacaacaccccctctatagggaataacctatagaccagtcctaccccagctggccaagagtccgcaggatgcagtggacgaaggtgttggggctggggctgggggctgctgccctcttggggctggggatcatcctcggccactttgccatccccaaaaaagccaactcactggccccccaggacctggacctggagatcctggagaccgtcatggggcagctggatgcccacaggatccgggagaacctca

SEQ ID NO: 7499 - DNA, 2300 bp, Homo sapien
gtagctgggactatagtcacatgccaccatgcctggctaattttttgatgttttctctaattttttttatagagatgagggttcactatgttgcccaggccggtcttgaactcctgggctcaagtgatcctcccaccttggcctcctaaagtgttgggattacaggcatgagccactgtgcctggtccttatcagttcttatagtgtattttcttgcatgtttgatgtctttctctcccccctctaagaacacaggcaccttgagggtagggacttctgcctttcctagtagccactcattcttgttgattgactgagattcatggtacatcgagcaggataaagttgccaggacctgggtgactgcttggctatagagaatgaggaagtcgtagtcagcagtgaccaccaatttgttcagcttccctgtgttttttttttttgagatggagtctcgcactgtcacccaggctggagtgcagtggcgcaatctcggctcactgcaacctccgcctcccaggttcaaccgattctcctgcctcagcctcccaagtagctgggcttacaggcacctgctaccacacctggctaattttttttgtattttcagtagagatggggtttcactatgttggccaggctggtctcaaactcctgacctcaggtgatccacccacctcagcctcccaaagtgctgggattataggtgtgaaccaccatatctggccacccattatctcttgaacttcatcttcagtttcttcctcttgccttcacttcagccacactggcctccttgttgtttgaccctgactagtacactgtggcctcagggttgttgcaccttctgttcccactgcctagaacttggccatgagtcactcccacacctccttcaagttgtagcttgaatgtcacctcagtgagggatgtattgacctttatctttttgcaattctaacctgccccaagcactctctcctgttctgttttcctgtagtgcttgatactgctaacataatactgaattttcttacctgtttttctcttagaatggggcaggggttttctctgttttattccctgctgtgttcccagtgcctggcacaggacaggtgactgataaatacttatggactgagtggacatttaggacaatcctcatcagctgtgtggcagatggaccacagcaggcaagggtggaaacagggagagaaatcagaaggtcgctgggaccagcctgggcaacaaagggagacctcccctactctacaaagaaactaaaaaaaaatcagccagacagagtgtcacatgcctgtagtcccggctactcagaggctgaggtaggaggattgcgtgagccctggaggctgaggcttcagtgagccatgatcgtgccactgcactccagcctgggcaacagagttgagaccgtttatctggaaacaaaacaaaaaacgttgctgagctggtctagaagacacctaatgagggcttgagttggtcagaggagaggctggatgctgggcacattttggaaacaagcgacagcaccagcagatgggggcaagtccatttgtgtcacaaaagcagactccttggaagcaatggtgggttgttttcttctctccatgtctctttcagggtctgatttgtcccttccttaaaaaaagtgtgtgttggccgggcatggtggctcacgcctgtaatcccagcactttgggaggccgaggcgggcggatcacgaggtcaggaaatcgagaccctcctggctaacacggtgaaaccccgtctctactaaaaatacaaaaaattagccgggcgaggtggcgggcgcctgtagtcccagctactcggaaggctgaggcaggagaatggcgtgaacccgggaggcggagcttgcagtgagccgagatcatgccactgcactccagcctgggcgagagagcaagactccgtctcaaaaaaaaaaaaaaaaagtgtgtgtcctgtgggtctttccaccctgaatcttctcgggcttttctggaagtaagcagtccagctaagtattgagggcatcccctcttctgtcctggtgcagatttcctttttcttggagaaagaaaacgagccccctggcagggagcttactaaggaggaccttttcaagacacacagcgtccctgccacccccaccagcactcctgtgccgaaccctgaggccgagtccagctccaaggaaggagagctggacgccagagacttggaaatgtctaagaaagtcaggcgttcctacagccggctggagaccctgggct

SEQ ID NO: 7500 - DNA, 2300 bp, Homo sapien
cacgtcattccactggtcttggagccccagggtagcccttctcaaaaccattctccccacagcccccagaggggtctttcttaaaacactcaaacttgactcggtcactaccttacccagaactctccaaaggctgcccacagacccaagaatgatgcccaagccatgagtgtggcttttgtgcctcatcaggatctgctctgccttagggtgcttcctcccctgctgaggtctgctgcagacactaaacaaattgctattccccgaaccttgatttttctttaaattcccaatctctgcaaacatggcttctttgacctggaacaaacctacttgtctttttttttttttttttttttgagatggagtctcgctttgtcacccaggctggagtgcaggggcgtgatctcggcccactgcaacctccgcctcctgggtttaagcgattctcctgcctcagcctcctgagtagctgggactataggcacgtgccaccatgcctggctaattttgtatttttagtagacacagggtttcaccacgttggccaggctggtcttaaactcttgaccacaagtgatctgcccgcctcagcctcccaaaatgctaggatcacaagcgtgagccactgcacccggcctctacttgtctttaaagactcagttcaaatgtttcttcttccacgaaacattccctgagccacatggtctgggttagctaccatcatagcatctagtattccttattgcagtcccagtacacaacgttgctatcacttgtcattggtctttctccccagttgactctaagccctatcagctcttcaaaggagttcacatttctcagtcagtatgtcttcagattgtctattaatgaaacatcctttgataataacttctgctaaaactgtaaaaatgtcatacacatgacttatctcagaacacccatacatgaaagctgaaggcataatggattagaaaggcagtacgtggagttaagacatagctcagcttttaaaggaagttccaggaaaatggtagaaatacacaaggcataaaaagttaagtgtattaagtcttcagggagtaatcaagactggcaatgcatgcaggtgcccacaggcaaactgtttttgcagtactgcaaaacagctccctgggcagatgtgaggagccaatgtgtgctgtccagctctagagtgacccagattctacttaattaagtagatgaaagtgaactcaccctagggctcctgcgaggtgattggacagctgggacctgcgggggacaataccaattgatcacatagctggtccccagttttgcccgcctaaccacccacaacactctccttagcctttacctctacagcatgggccacgatcctctttaagacgatgggctttctgactgcagccgcactgggtgtctggagaagagggatgaacgtgagctcaacattaggtgaggggccacaaggggaggaagtgagaaatctggggctcaccttcggccagatttcagggaggatgctcgggagttcagagcctgatttccgctgggacctccgcagaggcttagtaggagatggggcccttggccctggaaagagaaaaaagttaagtggtagaggaggactctagaccttagagtccagagaacaggttctagagacagcgagaagattcccaaacaagcccttttaagggcgcctcctccggcggcggcagcgggagggaagaggccatctttcaccggactgcgtcccccaaacggctcgacctcacgtctcccgcgcgccctccgctcaccggagcgctgagcggctcctccggaccgcgttcgcctcccagacataacttaggctccgtctcgagctcctccagcgccgccgccccgggcgcgcgccaaccgggaaggccactcgctgcaaaaaacgttcgaattacccgccctgcgggaaaggaagcggaagtgacgtagggctagcggtctgcggccctcggaaccccgagtcttttccacccgtcttcacctctagcggcagcggaggcgtggcccaggggcgcgatggcgtcatcagcgcgcgccgcacccggaagagacgtggcagcggagggataatcggggcggccggggctgaagggagaggcgcaggagccctggggagagtggtccctgcccttccgcgcctcgagccatcgctaccgcccttcggaaccagtgcagcggccgatcagtaaacacagagactggggtctgtagagaaggggcgggacttggagggggtggggctcagg

SEQ ID NO: 7501 - DNA, 2300 bp, Homo sapien
ccacctcccctttcagtcctttcaatgagtcctctctgggcctgcactcatcatattctttgggctaatggctaataatgaacagtttcagaaaaggttcctcgatacacacacaggcacacatatacatgtacacatccctgggcacaaatgtacatgtccttataagcacataatcaaacacaagtggcattccctatatctacactatgggtacaggagccctcacacatacacatctatacactcacaggtttgctaacaggcaccctcaaccatgcattctcttgcactcccacaacacacctgtgttcatatgttcacatacatacatttacccattcattcaccccaagtacagatcaacacactaacactcatttaaacacacaatgtacattaagtgcctgcaagtacacacatgcactcacaaggagaaacacatatggagctgactcttgcatgagctccttcaaaaactggagctaaggctcttaccccagattcaggtcaaagtcatgacacatatgtctgctgacttcttttagctaactttaatgtgggaaactcacttcctctctgtttagccttggaatcagtggtggatcctgaatatctgaaagcaacatgccggtctggctagctaatagtcacggccaccagcatacccgtaagcttgactggttctcgctgaaacctccagattggcagggcttaatttttaggaaagaggaactaggagctttaatttttaggaaagacagtgaggcctagaaaggaagaataacttgcctgaacttacacagcaggtaaggaactttaacaggactagaatctgggctctgagactcgggggactcactgtcctgctgcttgaggagggcctggaaaccagtcaccaagctggcccctgaggctggcctgatccccccgaggtgccaaggcctcaccatagcagacaaggcgggtcgtctctcggctggccaggggtatgttgcacaggcggcaattggggttgtagtcgctatcttggagccattgcaggtaggactggacgatgcactggagtgggagagagatgtcacaactggtgctggggctgctcggcctatcaccccaaggtccgactgtctctttttctctagccacagaggagactcatcctttcgtttgtttaatcaataaatatttattgagcacatactgtgcaccagactctctcttgggaacgggggatatatcagtgaacaaaataaatcaagtccttgcccttgtggggcttacattctagcgcggggcccctcatggatttggaggaagccaataccgccttgcccacccagtgccctgctcagtcgctcccctgaaggccccaccttggcgtgattggctaccaggcagtgctcgcagacgttgacccgatgttcgaagcagaacaggttggtcacctttctcttggggcacttacaaagccccatgatcgatcctgggaaaggggcatgagttggtaggaagtcaggttctggtggccaccactacgctctcaccagcccagtttccactcttaactcccccagacacctctcatattcgccccgatctcagattcctgcccactgtccctccttatgcggagaaacaccccctgcataaatcccgcctccggcgacccctcaatccttctggatcccgcccccggccaggcccctccatcagaggctccccgatactaccggccccgcccccaagacctctcctgagccccaccccctccaagtcccgccccttctctacagaccccagtctctgtgtttactgatcggccgctgcactggttccgaagggcggtagcgatggctcgaggcgcggaagggcagggaccactctccccagggctcctgcgcctctcccttcagccccggccgccccgattatccctccgctgccacgtctcttccgggtgcggcgcgcgctgatgacgccatcgcgcccctgggccacgcctccgctgccgctagaggtgaagacgggtggaaaagactcggggttccgagggccgcagaccgctagccctacgtcacttccgcttcctttcccgcagggcgggtaattcgaacgttttttgcagcgagtggccttcccggttggcgcgcgcccggggcggcggcgctggaggagctcgagacggagcctaagttatgtctgggaggcgaacgcggtccggaggagccgctcagcgctccggtgagcggagggcgcgcgggagacgtgaggtcgagccgtttgggggacgcagtccg

SEQ ID NO: 7502 - DNA, 2300 bp, Homo sapien
gcccgccaccaggcccggctaagtttttgtatttttagtagagatggggtttcaccatgttagccaggctggtctcgaactcctgacctcgggtaatctgcctgctttggcctcccaaagtgctgggattacaggcatgagccaccgtgcctagcctcaactaagcagccatagatcatatgttaaaaaatgggcgtgactgtgttccaataagagttacggaaaatgggatatgaattgcatatgattttcaggtgtcatgaaatgttatttttttcccaaccatttacaaatgagaaaaccattctagctcacagaccatatgaaaacaggtggtgagctgtgtttggcctgcaggatccctggcaaagaacaagtaaaccagtgagtttttccattccaaccttcctccaacagcccttcataagtaatgtttcaagggccactttgatgaagaaagtctttttctctttttcctccattccaactctgtgtcctaatctgaactccagatcgttccctgtcttcatgagctcttcacctttgtgcacagctgcacttttgtccaagtcagaaccctgggagagcagctcaggaggctgaggtgggaggggaggtcaaggttggagtgagccaaagatagcaccactgcactccagcctggatgaagagcaaaacccagtctcaaaaaaaaaggaaaagagaaccctgagagttatcctccacatttccacctaacccttcactcagcacattccatcagtcacttaagctctgctgagtctgtcctttttttttcaataatagggggcgggtctcactacgttgtccaggccagtattgacctcctgggctcaatcaattctcccacctctgccttccaaagtgctgggattacaggcgtgagccactgtgcccggccttaggggttcttaaatgtgagtgtgtatcagaactacttgggaactttctaaaaagaagctagatctgagagaatcccagagtctttttttttttttcttgctttgttgcccaggctggagtgcagtggcaccatcgcagctcaagcagttcccccacctcagcctcccgagtagctgggaccacaggcgtgcgccatcatcctggctaatttttgttttgttttttttgagacagagtctcgctctgtcatccaggctggagtgcagtggcgagatctaggctcactgcaacctctgcctaccgggttcaagcgattcttctgcctcagtctccgagtagctgggactacaggcgcgcgctaccacacccggctaatttttgtatttttagtagagacgggtgtttcaccatattggccaggctggtctccaactcctgaccttgtgatccgcgcccccacccccccggcctccctaagtgctgggattacaggcgtgtgccaccgcgcctggcctgtattttttttttatagagacggagtttcgccattttgcccaggctggtctcgaactcctgggctcaagcgatccacccgcctcgacctccccagtgctgggattacgggagtgcccggcgcagctcagcgcagagacttacaatgcgccacagatagtcctgaaggcaattctgatgcacgtcagaggaccaggccctaagaagaactgcgctagaggcgtggtacagaatagtgtacatgcatttaatcctcgtagcccccctgtgaagtatgtaccccaattttaggaatgggataaactgagccactgccagtggcaggatcccaggaacactctactctggcctcacgtcccgcatccgtccattgcatctgggcacatattccgtgggccccttgcctgcgagagtgcaggttggggagccactacccgtcccccttctgggacagcagcaaccccaggcagttccacaaaatgcttccacccaggaaactgggggaattcagggctctcccggaacctttgcacccggggaagacaggtgcgggggaactctagtctcgaaggacctagggctgcagggggacgtttcacctgaaggactgcctcgtttcaacaacaactttatggctcccggaagtgcctcctccccgtccccttcctttccagcctcacgcccgtgggctgcagttggaacgatggcggcggcagctgccgccgggcctagcccggggtctggacctggggactccccagaagggcccgagggggaggctccggagcgtcggcggaaggcgcacgggatgctgaagctttactacggcctctcggaaggggaggcggcgggacgccccgcgg

SEQ ID NO: 7503 - DNA, 2300 bp, Homo sapien
cctttttttttcaataatagggggcgggtctcactacgttgtccaggccagtattgacctcctgggctcaatcaattctcccacctctgccttccaaagtgctgggattacaggcgtgagccactgtgcccggccttaggggttcttaaatgtgagtgtgtatcagaactacttgggaactttctaaaaagaagctagatctgagagaatcccagagtctttttttttttttcttgctttgttgcccaggctggagtgcagtggcaccatcgcagctcaagcagttcccccacctcagcctcccgagtagctgggaccacaggcgtgcgccatcatcctggctaatttttgttttgttttttttgagacagagtctcgctctgtcatccaggctggagtgcagtggcgagatctaggctcactgcaacctctgcctaccgggttcaagcgattcttctgcctcagtctccgagtagctgggactacaggcgcgcgctaccacacccggctaatttttgtatttttagtagagacgggtgtttcaccatattggccaggctggtctccaactcctgaccttgtgatccgcgcccccacccccccggcctccctaagtgctgggattacaggcgtgtgccaccgcgcctggcctgtattttttttttatagagacggagtttcgccattttgcccaggctggtctcgaactcctgggctcaagcgatccacccgcctcgacctccccagtgctgggattacgggagtgcccggcgcagctcagcgcagagacttacaatgcgccacagatagtcctgaaggcaattctgatgcacgtcagaggaccaggccctaagaagaactgcgctagaggcgtggtacagaatagtgtacatgcatttaatcctcgtagcccccctgtgaagtatgtaccccaattttaggaatgggataaactgagccactgccagtggcaggatcccaggaacactctactctggcctcacgtcccgcatccgtccattgcatctgggcacatattccgtgggccccttgcctgcgagagtgcaggttggggagccactacccgtcccccttctgggacagcagcaaccccaggcagttccacaaaatgcttccacccaggaaactgggggaattcagggctctcccggaacctttgcacccggggaagacaggtgcgggggaactctagtctcgaaggacctagggctgcagggggacgtttcacctgaaggactgcctcgtttcaacaacaactttatggctcccggaagtgcctcctccccgtccccttcctttccagcctcacgcccgtgggctgcagttggaacgatggcggcggcagctgccgccgggcctagcccggggtctggacctggggactccccagaagggcccgagggggaggctccggagcgtcggcggaaggcgcacgggatgctgaagctttactacggcctctcggaaggggaggcggcgggacgccccgcggggcccgaccccctggacccgactgatctgaacggggcgcacttcgacccggaagtttacctagacaaggtgtgtgcgcacggggagtgggggggtgcggggaggggggaagggaaccaggcccctgctatattgctcccccagatcatgcctccgactttttgtgaggttcaggagagcaggtgttcataagaggacgaacctcggccagggagtacgagcagctgaggcgtctgaggggatgtgagtaggactggactggcctgaggtgatgcggcatctgaggtcttctgggctgatgtgataggcccggaattgggggcgtggcccaagcgttgacaggcgcggggctgggcttaggccgagccccaggatttcaaatgctgacaaacaccaaacacggttgaacctagtaacccctgagctaggccacttagggccccctgcctgggattcctgacagccggcgggggtttgcggggtgggtggggatcagagatttcttgccctgaaagcctatcagctgcaggcaaggctgggggacatgaatgcctcctgacccgaacactaaccacccaacttcttcagctgcgtagagagtgccctctggcccagttgatggacagtgagacggacatggtgcggcagatccgggctctagacagcgacatgcagaccctggtctatgagaactacaacaagttcatctcagccacaggtgatccccacggggacacaccctccaaagtctcacagcccccattctcccacctgtgttgggaaaacca

SEQ ID NO: 7504 - DNA, 2300 bp, Homo sapien
tgggtggatcacatgagcccaggagctggagattgcagtgagctataatctcaccattgcactctagcctgggtgacagagcaagacctagtctcaaaaaataaataaataaataaaaaggccaggtgcggtggcttatgcctataatcttagcactctgagaggccgagacgggtggatcatctgaggtcaggcatttgagaccaggctggccaatatggtgaaaccccatctctactaaaaatacaaaaattagtcaggcatggtggcaggcatctgtagtcccagctactcaggaggctgaggcaggagaatcgcttgaacccaggaggcggaggttgcagtgagtcgagatcgcgccactgcactccagcctgggcaacagagcgagactccgtctcaaaaataataataataataaataataataaaaggacagcccacagaatgggagaaaatatttgcaagttagttatctaataaaaatctagtgttcagaacataaaaagaacgttttttagctcagggctaaaaagacaaataaccctaatttaaaatgggcaaaggatttgaatagacacttctccagagaaaacatacaagtggccgaaaagcacatataaatatgctcagcatcattaggtcttagggaaatgcaaatccaaaccacaaaatgctgcacccagtgtggaagacagtttgaccattcttcaaaaccacacacaagattaccatatgatcggcaattttactcctaggaatataccaaagagaattgaaaacatgttcacataaaaacatgtacacaagtgttcatagcagtgtttttttttttttttttttttttgagatggagtctagctctgtcacccaggctagagtgcagtggtgccatcttggctcactgtaacctccgcctccccagttcaagcgattctcctgcctcagcctcctgagtagctgggattataggtgtgcaccatcacacccgcctaatttttttatttttattttttgtatatttactagagacgggattccaccttgttggccaggctggtcttgaactcctgacctcaagtgatccgcttgcctcggcttcccaaagtactgggattacaggcaagagccaccatgcctggccaatagcagcactttttataatagccacaaggtggaagcaatccaaatggccatcaattgaatgaatataaacaaatatccacacagtggaatattattcagccataaaaatagatataacatactgacacaggctacaacatagattaaccttggaaacatgctaatgtttcatatgcctatgattccatttctgttaaatgtattctgtagcgaatagacaaatccatagagacagaaactagattaatggttgccaagttctaggagtgggggaataaggaatgactgccaagggttacagggtttctttaggggatgatgaaatgttctggaattacgtagtgaggttggttgtacaaccttgtgaatatattaaacatattaaaaaccactgaattggtatgtcaattatatcccaattaaaaagaaaaccaggcattgagccagatttggcctgcaggctgtagtttgccaacctctcacctagacattgagtttcattatgtaataatgcatttacttgtgtcaaaattagaaagatctcaaacattatacagggaaaagcctctcctaattcttttctctaggcaaagacaaagcagtctttgacagtacatttcactgaaaattaacagagcccaggtgggattatggctcatacctataatcccaacactttgtgaggcagaggcaggcagattgcttgagctcaggagttcgagaccatcctggccaacaggttatacctgtctctacaaaaaatacaaaaattagctgggtgtggtgttgtgtccctgtagtccgagctgctcaggaagctgaggtggaaggcttgtacctgggaggcagaggttgcagtaagccaagattgtgtcactgcactccagcctgggtgacagagccagaccttgtctcaaaaaaaaaaaaaaaaaaaaaaaaaaaaagaaaattaacagacatacagaaaagtgcacataagtggacagctccatggatttcacaaagggagcacagtcacataatcagcatccaggtcgggaaacagcataaccagcaaagccccctgagcctcctaccagttaccacccagtcccctcccaaggtagccaacatcctcgcatccagatggctttcactctccctggttacaaact

SEQ ID NO: 7505 - DNA, 2300 bp, Homo sapien
ttgttggacaagagatgatagtggcttacaaagaaaatgttgcaggtagaccttccatgacttggtaatggattgattactaggtatattaatccaggttcatactgctgtaaagaactgcccgagactaggtaacttataaaggaaagaggtttaattgactcacagttcacagcatggctggggaggcctcaggaaacttacaatcatggcagaaggtgaaagagaagcaaggcatcttcttcacaaggcagcaggaaggagaagtgttaagcgaagcagggagagccccttataaaaccatcagacctcgtcgggtgcggtggctcatgcctgtaatcccagcactttgggaggccaaggtgggcggatcatgaggtcaggagatcaagaccatcctggctaacatggtgaaactccatctctactaaaaatacaaaaaattagctgggtgtggtggcaggcacctgtagtcccagctacttgggaggctgaggcaggagaatggtgtgaacctgggaattggagtttgcagtgagcagaggtcgtgccactgcactccagtctgggcgacagagcgagactcagtctcaaaaaaaaaaaaaaagaataggtggaattgaattgaggccgtcagtgaacagtcaggaacattggaaggctcatccatgtggatgtgcacaaggaggtgacaggaggaggagaagaggcagtgatggggaactgagaggagtgtcagaggacagtagagacagcaaagaggagggttgtggcttgatggcatggtcttcctagaagccggggttttgaagagaggagatctaggcatgatttagaagcatgaagggaccaggctcccaggcacctggtgtgtgaaaggaaaaacagcctccctaggcaggattctatcaggaccaaagggaaagggcccttcagagaagacagcccatgttccggaaagcatgtgaaaggctttgggaggtctggaaaggagatgagggtcaacaagaatgtattgcctcatccaggcagtgcgctggacacgcagatgcgcttgggagccagcggtccctgccttggctgcttgtggtctgatggagcagttgaggcacagtggtggcagctggctaagcacctgcggcctgcttcggatctggactaattctgagggccggctctcctgggcaccagggttagggggttacggggagtatgtgagtaacgcctgctttgggaacataaaccccctcccccgcccccatgtgcgctgtgacccacgccctcgcagtcctttctctggaatcatccatgcgcccctggagcaagctggggcgtctgtgaaggggtgggtgagaaggagctgaggttgcgcccgccctgcagtcacctgctctccccttttccccgcccctgccctcctagacaccatccggaagatgaagaacgatttccggaagatggaggatgagatggaccggctggccaccaacatggcagtgatcaccgacttcagcgctcgcatcagcgccacgctgcaggaccgccacgagcgcatcaccaagctggcaggtgggcgctgccgggcagggcctgcagtgggcctttcctggggctctggggctaacgtcaccctccgtcccccaggggtccacgcgctgctgcggaagctgcagttcctctttgagctgccctcgcgcctcaccaagtgcgtggaactgggcgcctatgggcaggcggtgcgctaccagggccgcgcgcaggccgtgctgcagcagtaccaacacctgccctcgttccgcgccatccaggacgactgccaggtcatcacggcccgcctggcccagcagctgcggcagcgctttaggtgtggcccctctgccctgaccccagcgctcccgccagccccgagccccatctgtgcccggctcctgggccctcctggagctgtccccctgccctgtgtgtgctttgctttcctgctcctgccccatccaccggcagccccggccctgcccttcactacctctccctcgtgcagggagggcggctcaggcgccccggagcaggcagagtgcgtggagctgctgctggccctgggcgagcctgcggaggagctgtgcgaggagttcctggcgcacgcccgcggccggctggagaaggagctgagaaacctggaggccgagctggggccctcacctccggctcccgacgtgttagagttcaccgaccatggaggcagtggcttcgtgggcggcctctgccaggtggcggcggcctaccaggagctgtttgcggcccag

SEQ ID NO: 7506 - DNA, 2300 bp, Homo sapien
acccactacgtgaaggtgcagggcctggtcatatcacagatgctgcgcaagagcgtggagactcgcgactggctcagcactctggagccccggaatgtgcgggccgtcatgaagcgggtggtggaggataccaccgccatcgacgtgcaggtgctgcccaggctggccggggtagccctgacgcaggctgggggtactgtcccttcaagaggggctggggcagcagaggatcactggcagtccctgcctggaggaggggacatgtgtatctgggcttctcacggggccagttctgtagccagggcgtccgtgagggaaccccaggggaacaagtctccaaggatgaagaccaaacgggctggggagtgcctatgtccacggtcttgttccttctcagcccaggattatgacatcttcgcccctattttacctgtggagaagcagaggctcagggttacccaggaagtcagggcagggttggtgctggtgctgaagattagacctcagaccaactcttgtatcctgcctttgccccactccactggttctataaatagcgaccatgtacctactaaatagcgggccccgcggtgattaccctgtgatccttgtgatgcttgagtagctgacttagggcatcctcagcaccgatgggctggtggtttcccctgactcgggcctccttgcagtacctctttttaccaccaggtggggctcctgtacgaagagggtgttcgcaaggcccagagcagcgactccagcaagaggactttctccgtgtacagcagctctcggcagcagggccgctacgcccccagctatacccccaggtctggctggtcaggggagccccagggggaagggacaaaagagggcgagggtgcagggcgggctctgattccttgtcttccccaatccagtgccccgatggacaccaacctcttgagcaatatccagaagctattctctgaacgtattgatgtgttcagccctgtggagttcaacaaggtccgacttccaacgtgactcagacttccagggatcccggggagggttggctggagcagccccacacctgcccaaggagccccaggactctgtgaccaactgggggtgaccctgaccctccagtctctgtctctagggctgtttttaggtagtacagagtgccctgcctccaaatcccacagcccttgtcccagtcttggtgtatgcccagcctgagtctgggtgctgacctgggattactgtttgcccttgtccttatccccacagtagtcttgggtcctccccagggttttctgttcacccatggtccctgccccgcctcactccaagctcagggatgcctctgattgctgggccctacctgtcccctgccctccagatgacggcgctaatattgtatccctcccttcttatctggccccggagactttctgcctcatcccagctacttccatcgtatgtctcccgggcccctgcttggaacttgggtgtcccccacacacacctgcagtccccaagctgcatccctgtgtccctgcctgcaggtgtcggtgctgaccggcatcatcaagatcagcctgaagacgctgctggagtgtgtgcggctgcgcacctttgggcgcttcgggctgcagcaggtgcaagtggactgccactttctgcagctctacctgtggcgttttgtggccgacgaagaactcgtgcacttgctgctggacgaagtggtggcctctgctgccctgcgctgcccagaccctgtgcccatggagcccagtgtggttgaggtcatctgcgagcgcggctaggcgcagccgctgccatgcaccggtctgtccctgcaccccatggcacccaggatctggtctcggtggtccttccccgcaggcaggtgtcaggaccggcctaataaacatgtgtggcctcctcctctcgcttgctgggcgggcctttccgggggcggggttttgaagctgaggcttctgaggcgcccgcgtcgggtccgcccccgagcgccgattggctggtgtgctgggcccagcatgggcagggggcggttccacttaaaaaccctgggacgagagcggtccttgtctgcgttccgtgtccaggcaggtgcaggcgccgcggggccggatcctccgcgcggccgagtccatctcctgggaaatggggcggacagtgtttccttgactgactattgtgagcgccctctctctccggcggagcggagaccatggcccccactcagggcccccgggccccgctggaattcggagggcccctgggtaatg

SEQ ID NO: 7507 - DNA, 2300 bp, Homo sapien
aaatcaacatctggcttacagtgagtgtgtgaatcttggctatttttgtctctgtggtgttaaagacatggtttctgccttccagcagtttagaaagggggaggatgtggacagatacaatagcatcccagagagggcctctttttttgtttttcttttttctttattttattttattgagacagagtctcgcactgtcgccaggctggagtgcagtggcacaatccgagctcactgcaacctcagcctcccgggttcacgccattctcctgcctcagccccctgagtagctgggactacaggcatgtgccaccacgcccagctaatttttgtatttttagtagacatggggtttccccatgttggccaggatggtctcgatctcttgacctcgtgatcgcccacctcggcctcccaaagtactgggattacagccatgagccacagtgcccggccttttcttttttgtttttgagacaaggtctctctcatccaggctggagtgcagttgcacaatcatggctcactgcagccgccaactcctgggcccaggtgatcctactcagcctccaaagtagctgaggactacaggcatgcaccgccacacctggctaattttttgtacttttttgtagagacagggttttgctatgttgcccaggctggtcttgaactgggctcaagtgatccgcccaccttggcctcccaaagtgctgagattacaggtgtcagccgctgtgcccagccgagaggtcctgtttaaatgacgtgagtgagacctgagatgaaccagtcaagtgatcaggtaggggaatatttcaagcctagaggactgtgtgaagatggggaagaggtgatgtctagggctgggggcgggcagatcctgcaaggccttgtcagccatagagaggagtttgggtttgagtccaagtgcaatggagggtcgcagaagggttttgagtaacagatggatctcatctgacttgtgatctaatttctctggcaggtttttctggagggctggcaagaaagttaggaaaaacacttaatgtgttgtcatccacatgaggggtcaggaagcttagaccaccagtagtagcagggatgcaaagaacactcacagtttggttcatcacaccccccactccaccacaagagtgagctctattagaacagggacccccggctccctttgatgtgcattgtgttcttggcacctagaatggggcctgcacttaataagatggatgaatagtggtatttaatgagaagatacttaatgaaaagaagaggcagttttggaggaaaaaaatcataggagctcagatatttcttaaatgctgctttctatttatctttttgaggtggagtttctctctgtggcccaggctcgcaggctggagagcggtggcgcgatctcggctaactgcagcctccacctcccgggttcaagcgattcccctgcctcagcctcaggagtagctgggactacaagcacccgtcccccacgcccggctaattttgtattcttagtagagacggggtttctccatgttggtcaggctggtctcaaactcctgacctcaggtcatctgcccgcctcggcctcccaaaatgctgggattaccggcgtgacccaccgtacctggccctaactgtccttttatttgtctgtgtcccctagtgcattttatttgtctgtgtccagcgcagggatgcatcgcctcccgtaggcttggcacaattagtggcccagagtaggtgcctagtaaagatggatttatgccacagcacattgtagtgctaaaaagagggttttctctttagatgatcgggccacgttttggtgtgaccactagggggagacgtggcaccggcgaagcgctcgccagacccattttttcgctccttgcgtcatcgcatagggcggggctcgtacctgacgcccggcttctgggcctgctctcgccctactagggaaaggggtggggcttggctttcgggcgtgggcggaaattgccgagaatcctcggaagctttgcgaaaacacagcgcgccgtcggccgcgctgcgaaccggaagtaatcgaagaagccccggaagtttcgaactaccaccggcgtgcgttcgcaggtagatcgcggtgccagttgccatggagccggccgggccctgtggcttctgcccggcgggggaggtccagccagcgcgttacacctgccctcgctgtaatgcgccctactgctcgctgcgctgctaccggacgcatggcacctgcgcagaaaacttctaccgtgacc

SEQ ID NO: 7508 - DNA, 2300 bp, Homo sapien
cacagaggtacaaacgaggccatgctcccaacataatatttacttctaaaaccaaggcagaccagattcctgccctggactctaaggccacagctggtaccaagttcagggaacggccaggttcaccttctatacaaacctcttcccccacccatcccttctattgctgcctccataacaaacctctcaccacagtgattcctgctaccttctctgtttagaagatgaaaaagaatgacctggggggactgatcaagttacttaggatagggaataaccccaattttacatctgaagccccccaggatctgtagctgtttcttcacaggaaatttctcttgtagtttaccatttcttccccccataccaaaggcttctgccttttctgcctcactgttctcctaggggacataccaccaacccgagaagcacacctctccctgaggccttgcaagtaaagatgaaacaatgcgatgactgaactaagtggcttttttattagagaaagccagaattacaaaagacttaagagttggcattggggcccttcttcttgccaaaggtgggcacaacgttgacaaagcgccggttgtactgcatccgccgcttagcccgacctgtcttcttcttcttcttctcctgtttggccacctggagaagggaaggttaatcaggccctggttcctgtcttccacacctagcatcccttccctcaggctcatctccagggagggagaaggcaaaccgagtaagagcccagggacttggtttagctgtgaaaggaaaaaaagtcctaacaccatgaccactaatactctcactcaccttaggagtctgacctctcacttttccagcacgggccagggaaccatggactttacctgtagtgggaaaggaaggcaccagcaggtaagagcaagaaggtgccacccagcagaacccctcttttctcaattcaagcctttaaagagaagctgcgcccaataggtaatgagaacaaagttgcagatatttgaccttgaaatcttaagtttcatttcaggatcttccagcttctaattttatagagcactttgggggccctggtctgacctaattttagtgtggaagctgataaccagactaggatctcgtgatgtgactgaaatacaactacactctggctcagtctcccatggacgtctgtgttcaacatgagggatgtaaacaggaagaatcactctgaactgaagacagtgagaagtactctattaccataggtgtgacactcagctgtcaggactatgcaccccacactcactagacgcttaccggtacttcaaagaacattcctctctcactcacctccaagcatgcggcctgctacttccagggtagtcagggcctccaccccgcactggcccagagtggcctcatcctccaggggcgcgcctgccaggagcacgacttgatcttccggggcaatgccctccagtgaggctacatgagcctacagggaaagataaggctcgtaagcgttccctcgggccgcgagagtgaagagcacaagaaaatggaacccagggcgcaccaagcagccttaccttgatctgggcgaccgtttcctggccggtcacctcgaaggtgtgtagctcctgggcgcggacaaagagctgcatattggcgactgagtaaagaaaagacggcttgtaagagaagccaagaaatgctctgggataaaggagatttgggagtggaaagcggtccagaaacgatcgcgacgggatggtggtcgcggcggctcacgtggggaaggccaggcctcccaaggagttcggatagggactggagcagggccacggagcaggccccgttcttcggttccccccgcgccttctgaccccgcagccaacctgctacaagcccttcggatccagccaaggccccattcttacctgaacggcggtcccagctaccgcgaagatggagtcgagaaagaggaagaagcgagggcgcgtcagtacagaccgtgggctgcgtgtcacgtcactgctgagcgaccgcgcggttccctgctatttgtaccgcccaaggcagtcctagctccgcccctttacgctcgcaccggcgaacctgcctgggcaggcagctcgcgcaggacggggcgggaccagacagttgcgcgcacagaaggctggcgtagcaggtaaagatggcagctaccatgttccgggctacgctgcggggatggagaaccggtgtccagcggggctgcgggctacggctgttggtgagagcgctgagcgaggagctgagggcat

SEQ ID NO: 7509 - DNA, 2300 bp, Homo sapien
cttgggcacaaatacttaataacaagaactaccacaaaagactgcaaaaaccacagccttgcacaaaggccacttcaaccttacacaaaaaaatatttctggctgggcaaggtggctcacgcctgtaatcccagcaccttggaggctgaggcaggaggatcatctaaggtcaggagttcaacaccagcctggccaacatggcgaaaccccatctctactgaaaatacaaaaattagccgggcatggtggtgcatgcctgtaatcccagctacttgggaggctgaggcaggagaattgcttgaacccaggaggtggaggttgcagtgagctaagatcgcaccattgcactccagcctcggtgacagagcgacgagactctctcaaacaaaacaaaagaaaacaaattcctgcatggccatctgtccaacaactgcctgtccaatcttgaactggcaccacccatgttattcatccttgtagccaaggataactgtctcaaaacaattatgtaatactcatttttcctttcctttatttatttttattatttttttagatagagtctcactctgtcacctaggctggagtgcagtggtgtgatctcggctcactgcaacctccgcctcccaagttcaagcaagtctcctacctcagcctcccaagtagctgggactacaggcacacgccatcacacccggctaatttttgtattttttctagagacgggtttcaccatgttggccaggcttgtctcaaactcctgactccaggtgatctacgcgccttggcctcccaaagtgctgggattacaggcgtgagccaccgtgcctggcccatttttctgttaaaaacctttgtcttcttttacctccctgataagcacatagtctatacccattcccgaataaatatccttttcttttagagtctgttatttaggttgacataagatagcaccagtctttggttttccatggtgcagggtacagatgggatggaaaggaggctcaggtactctgaatggtctgcctctcaggatttctgtgggatgcaaaagagtatatgtacacttctgaaaagtcaatcaagcctttagaaacttaaggcttaactttctgtctcggttttagaaatagatattattatattggcagcgtggccttgtttgtacctccatgattgcctggctggccttgctaacctaatcacatctgtgacgggatatagtgatgtttaatcttatgattgccttaagaattaaggcaatcagacgggttcggcggctcatgcctgtaatcccagcactttgggaggccgaggcgggcggatcacgaggtcagaagatccagtccatcctggctaacaaggtgaaaccccgtctctactaaaaatacaaaaaattagccgggcatggtggcgggagcctgtagtcccagctactcgggaggctgaggcaggaggatggcgtgaatctgggaggcggagcttgcagtgggccgagatcgcgccactgccctccagcctgggcgacagagcgagactccgtctcaaaaaaaaaaaaaaaaagaattaaggcaatcataattccccacgcacactcatatgctaggaccccgccccttacctgaaacgttgtggcttatatagacactgccaggcactgtgttaagtgctcccaaagagcaccccagtctaccattttccctctcgattctatatgtacactcgggacaagttctcctgatcgaaaacggcaaaactaaggccccaagtaggaatgccttagttttcggggttaacaatgattaacactgagcctcacacccacgcgatgccctcagctcctcgctcagcgctctcaccaacagccgtagcccgcagccccgctggacaccggttctccatccccgcagcgtagcccggaacatggtagctgccatctttacctgctacgccagccttctgtgcgcgcaactgtctggtcccgccccgtcctgcgcgagctgcctgcccaggcaggttcgccggtgcgagcgtaaaggggcggagctaggactgccttgggcggtacaaatagcagggaaccgcgcggtcgctcagcagtgacgtgacacgcagcccacggtctgtactgacgcgccctcgcttcttcctctttctcgactccatcttcgcggtagctgggaccgccgttcaggtaagaatggggccttggctggatccgaagggcttgtagcaggttggctgcggggtcagaaggcgcggggggaaccgaagaacggggcctgctccgtggccct

SEQ ID NO: 7510 - DNA, 2300 bp, Homo sapien
acccgattatcctcgctgatactgcaaccagcttcaagtaccccaccacatcctgatcccctttattctgttctacttttttcctatagcactgatcatcttccagcgtattagatttttcacttatgtctgtggtttgctgtcacatctactaggataagctccacaaaggtagagatctttattttgttcactgacatcctaagtccctagaacaggagacacttgatccatatttgtagactaactgaataaatgacttaattaccagtttggatgtgggggcagatagtgagcatgatgcccgtttccggagctggggtgcagacagtgtctagggacactgaactgttttaaaagcaggatagatcccggctggagaccacacaaggaaatcatcagcacctgggtcaggggctggactggagcagaggaaatcatgcaggaaaagtaaagagaaggacatcaggtaaagagaagaggacacatgcatagccagagagaaaagaggagcagaggcatgtggatcacagaagcttagggaggagactttcaagaaggggagagaggttgagtcaagcaagggctgaaagccaaccattggatgcagtcactagaaagttacagataggcaaggtgttgtggctcacgcctgtaatcccaacaccttgtggggctgaggtgggaggatcgcttgagcccgggaggtcgaggctgcaatgagccctgatggcgccaatgcactccagcctgggcgacagagcaagaccctgtcgcaaaaattaataaataaataaataaaaagaaaagggggaaaaaaagttatacgtggccttacggggaagccaactctgactggttataagctgaaactgtcaagtcaacaggtggcagggaagatggctgagaccaacagcacagagatttagaggcagacagacctggcgccaatcctaggacaggttttggtaagcctttgaatttcaattgccccacgtttcgggggagggggtagcaccccctagctcataaaccttagtgattgatgattaaatgagatgacggaggaaaacgcaaggcacaaagtggatgcattagctccattttgttaatcagcaggcttagttggctgcgacccagacacgaactaaaatacagtgcagcccaggaccagtgggggtcttgcttatggctcagagctgaacaacacatgggcagcaaaatcagacactgagatgcgggcaggcctgcgacgctgaagtcaattcctttgaacaaacagaacacttccgtcccaagattagcaggaattaatctcccagtctcgggtacacctggttgtccctccctgtcctggcgcggcaaacgttcccggaggccagccagggatcactcgcccaaggactgagctttccctactctcagccaactggagcgggaccagggcctaggcaacgcagctgtccgcccctaacaaccactcacctgctttcccctttctataggccagcaaaggtacattctttttcttattgggccgcgtaacttatcgcaaccaatcagtggcagccacgggacccaactcactcccacacaacttgtgggggtgatcatggagaagacaaatttttgttttccgcatccagttctctcagagagcaccgtatttgtcaaactgttgtgactctccctaaatgtttaagaaaacatttcattcccctcaggcttgtatagtctgtccctggcctactccccgctccaggtggtacagcccgcaagcggctccccttcccagctgctcgcggggccgagtcccccagtccgaggaggccactcagcgcaggagccataccatctgtgactaataaataatagggggacctccgactcccccctgttgccttattaccttccgaccacctctcggacctcttgcccagcccttccccgtagacatcaccccagatacggtggtgacaccattgctatgggcccacgtagggcgcagtgcgagccagggcaggacgcacttggtacgacccacgccgcgccccgcgccgccggaagtgaggtgtctgacccccgaagttccggttcgcagggggtggggagtgttgttaaccggaggggcagccgcagtcgcgcggattgagcgggctcgcggcgctgggttcctggtgagtggggcgaagtctggcccgagttgtggttggggtcgggacccgaaccttccccttgaggtctccggagtcggcacgcccctcagccccgccgcacgctttcggcctgtcagctggccg

SEQ ID NO: 7511 - DNA, 2300 bp, Homo sapien
tataaattttataaatagtatattagttagcatagaataaattttgctgtgataattgtagcaggcagaataatggactcccaaagatggctacatttcacttcccagacctgagaatatgttatctcacatggcaaaaaagactttgcagatggttaaggatctttttttgagaccaagtcttgctctgttgcccagactggagtgcaatggcatgatctcagctcactgcaacctccacccccagggctcaagcaattctcctgcctcagcctcccgagtagttaggattacaggcatgcaccaccatgccccgctaatttttgtatttttagtagaggaggggttttgccatgtttaccaggctggtcttgaactcctgacctcaggtgatctgctctcctctgcctcccacaatgctgggattacaggggtaagccacctctcccagccaagttaaggatcttgagatggggagattatctgggcagattgaagagcccagtgaatcatgggattctgaaaagtgaaagagaaaggctgggcatggtggctcatgcctgtaatcccagcattctgggaggccaaggcgggtggatcatgaggtcaggagaacaaaacaaaacaaaaaaattgccaggcatggcggcacatgcctgtagtcccagctactcgggaggctgaggcaggagaattgcttgagccctggaggtggaagttgcagggagccgggattgggccactgcactccggcctgggcaacacagcgagactccgtctcaaaaaaaaaaaaaaaaaaagtaaaaacaaatattctccccagtgtgggagatcggtgtcagatctccaggggtggcactgaaggaaatcagcctgaaggccctcccaaagttaaagtgactagcccactcccaggcttctttttggtacaccttcctgatctctaaccttaattactgggggaggaggagaacagttgaaaacacagctggtctaggagattcattcggtttcatggaacaccttctctgtgcaggcagcgtccaggaacagctgtagaccacacagccaggctacccagcgtgtgggcccagcagccaggctggaactctatctctacttaccagctgagtggctggcaggaagttactcagcctgtcggtcagcaacccaaactctgtgtgttagttgtttgttcgctgacaaaatgaggcttctcatcattctcatcaacttcacgggcttgctgtgaggaacacgtgagctgattccatcacagactcctcagtaggcagcagtaggtgtttagtgaacgggctatggatgctgccccactcactacttcctttctaggggaggccgacttcaaatgcgtgcacacacacaaacaggatggcctgatgcagaccagctggtctagaaaggccttcacggcctcagggagcctgggaggcggcctgggggagaccatgaaacagcagatacaccagagaccagagatcagagagaaaacaaaggacccagagatccacagacatccagacaccagaggcaacaagaaactgagagactcagaggcccactgagacccaggcagcttgttctgtgttacgaggggaaaaataaaataagaaacaaaagagagactcggggggcctcagtgaaacctagagactcaaggaggccaggagattcagagacacccatagagagccagagaccctgccctagcaaggcacaatcaatgaaaaaaaactcgcccaccaggccctcgcagtccgggtctcatatcccggctcagcaccttggcgctgcatttgtcaagaggggaacagggatcctagctccctgcctgtcctatggggccttaggccctggggtccagctggcctgccttcacccctcttgtagttgatgaagctttggagaggctttcaaaccctggggagccacagctgggtgccgactggactcactggcagagaggcaggcggtgaaggccaagcctcgccccccaggaaggccctgattggtggacgggctgctttgggcagggccgccctcaggctatataagcgcactcgcggcggcgttggtgttatgctctgggccattcctgagctcgggtaaggctcgctgcaggaggaggctgggttgcttgcgggcgcctagatggaggggcccagattggccctggggtggtcgaccgcacgttctcctcggccccgtggttggcttctctctctcagggatgagggtgggtttaggacgggagcttgaaatgtttgaagtggccccat

SEQ ID NO: 7512 - DNA, 2300 bp, Homo sapien
ttggctaacatggtgaaaccctgtctctactaaaaatacaaaaattagcctggtgtggtggcgggcgcctgtaatcccagctactggggaggctgaggcaggagaattgcttgaacccaggaggtggaggttgcagtgagccaggatcgcgccactgcattccaacctgggtgatggagcgggactccatctcaaaaacaaaaacaaacaccagaaaacaaacaaatgttttgtccatttttattggatttttattcaattgtaaaagttctttatacaagtcctacatcagatagaatttttacaaatattcgtcctagtctatggcttatcttttcatttttaatagtttcgtgcattttgagaaacaaaagcgttttattttgatgaagttcaatttattgatttcttctatcatttacactttttgtgtcatatttaagaaatctggccaggtgccaaagctcacacctgtaatcccagcactttgggaggctcaggcaggaggactgcttgagcccaggagttcatgaccagcctgagtaacacagcaggaccccatttctacaaaaaatttaaaaattagctgtgtgtcgtggcacgtgcctgtagtctcagctactcaggaggctgaggtgagaggatctcttgagcccaggagtttaaagttacagtgagctgtgatcagggcactgcactcctgcctggtcaatgaaagcaagaccctgcctttagaaaagaaaaaagaaatcttttcaaacccaatattgttaagattgtctccatttttaaaaaaaaaagttttatggtttggccatttatatttaggtgtgtaatccagtttgagttaaattttgatggtgtatcctaaatagttatcaaatccatctacttctgcctgccacctctctagtttaaaccacccttctctgtccctggacacctgcgcagaaagcctaggagctggttccacccatcactcaccaggttaggtatttcaggcaagtcacaccctctcaggcctcagttttcctcttttgttaactgagggtgaaagtggggttagattagatcagcggctcttaacttttgaggggtcgtgggccctagagtcctgggaacgctatgcagtttcctcagcaaaatgcttgcatccacaacatgcaagactgcagcagctgctgggctggggctgcgagaccagcgaaaagccctgacttgggggggtctcgggagtctctgcagtctccccacccacacccccggcctccgcgccgaatcctggccccccaacttcttgcagcccgtgaagcaggatctcagggtcctgggggtggggagagggggctgccgtcctgctcgcagcctctgccgccctctcctgggtaaggtgacacatgggcgcttccaggtgggtgggctgagagcctgggggagagaacagggatgtccacctctctaagtttccaggttcaagaaaccccagaacgttagagaaagatgggctcccacaattgcccaaccccatcccataggatgcacgcatgcggaaagtcgggccgaacggggcagggacttacccaaggtcacgcagcgagcccggtccccctgcgttccccggggagcgctgagccgggacgcggcggtggggtggggaaggggagtggcgcggccctgcggggtgaggctgccgtttgctgagtgtccggcaggggtctgctcgctgccagcccggcccctcctcagagcagctgccgcagcccgaggtaatctcggccccgcgccggggctggctgggaacggcgggagcagctgcggtcgcgcggagcgaggggagctggggaccgggcgggcccggggctgcgggaggcggcgccgccgcacaatcgccccggaatgcccgccagggcgcgcgtggggtgcggccgtccggccctgcaactcgagctgctgcccctggttaaaaataccccctgcccggccctccccctccgttccccgcggtgcccttccgccgcgccccagcccccccatccccccccgcgctggcccctccccggggactgctctgccttttactaatttgtcctctcgcggaattggcccccggcctgcggagggaggggcggggagacaccgtgagtaagagatagtcagagaccgtgccggagagataagggagagccgagaggaagcggggtaggagccccaggaggaggaggaggagaaggagagagggagggcggagggcggaggggcggcgggaggagggcggggaggagcgctcttcctggttgggc

SEQ ID NO: 7513 - DNA, 2300 bp, Homo sapien
aggttgcagtgagccaggatcgcgccactgcattccaacctgggtgatggagcgggactccatctcaaaaacaaaaacaaacaccagaaaacaaacaaatgttttgtccatttttattggatttttattcaattgtaaaagttctttatacaagtcctacatcagatagaatttttacaaatattcgtcctagtctatggcttatcttttcatttttaatagtttcgtgcattttgagaaacaaaagcgttttattttgatgaagttcaatttattgatttcttctatcatttacactttttgtgtcatatttaagaaatctggccaggtgccaaagctcacacctgtaatcccagcactttgggaggctcaggcaggaggactgcttgagcccaggagttcatgaccagcctgagtaacacagcaggaccccatttctacaaaaaatttaaaaattagctgtgtgtcgtggcacgtgcctgtagtctcagctactcaggaggctgaggtgagaggatctcttgagcccaggagtttaaagttacagtgagctgtgatcagggcactgcactcctgcctggtcaatgaaagcaagaccctgcctttagaaaagaaaaaagaaatcttttcaaacccaatattgttaagattgtctccatttttaaaaaaaaaagttttatggtttggccatttatatttaggtgtgtaatccagtttgagttaaattttgatggtgtatcctaaatagttatcaaatccatctacttctgcctgccacctctctagtttaaaccacccttctctgtccctggacacctgcgcagaaagcctaggagctggttccacccatcactcaccaggttaggtatttcaggcaagtcacaccctctcaggcctcagttttcctcttttgttaactgagggtgaaagtggggttagattagatcagcggctcttaacttttgaggggtcgtgggccctagagtcctgggaacgctatgcagtttcctcagcaaaatgcttgcatccacaacatgcaagactgcagcagctgctgggctggggctgcgagaccagcgaaaagccctgacttgggggggtctcgggagtctctgcagtctccccacccacacccccggcctccgcgccgaatcctggccccccaacttcttgcagcccgtgaagcaggatctcagggtcctgggggtggggagagggggctgccgtcctgctcgcagcctctgccgccctctcctgggtaaggtgacacatgggcgcttccaggtgggtgggctgagagcctgggggagagaacagggatgtccacctctctaagtttccaggttcaagaaaccccagaacgttagagaaagatgggctcccacaattgcccaaccccatcccataggatgcacgcatgcggaaagtcgggccgaacggggcagggacttacccaaggtcacgcagcgagcccggtccccctgcgttccccggggagcgctgagccgggacgcggcggtggggtggggaaggggagtggcgcggccctgcggggtgaggctgccgtttgctgagtgtccggcaggggtctgctcgctgccagcccggcccctcctcagagcagctgccgcagcccgaggtaatctcggccccgcgccggggctggctgggaacggcgggagcagctgcggtcgcgcggagcgaggggagctggggaccgggcgggcccggggctgcgggaggcggcgccgccgcacaatcgccccggaatgcccgccagggcgcgcgtggggtgcggccgtccggccctgcaactcgagctgctgcccctggttaaaaataccccctgcccggccctccccctccgttccccgcggtgcccttccgccgcgccccagcccccccatccccccccgcgctggcccctccccggggactgctctgccttttactaatttgtcctctcgcggaattggcccccggcctgcggagggaggggcggggagacaccgtgagtaagagatagtcagagaccgtgccggagagataagggagagccgagaggaagcggggtaggagccccaggaggaggaggaggagaaggagagagggagggcggagggcggaggggcggcgggaggagggcggggaggagcgctcttcctggttgggccctgccctgagctgccaccgggaagccagcctcagggactgcagcgacccccaaacacccctcccccaggtaagaagctgggtagccgagccgggattccttgaccctggccactgctcctgggctg

SEQ ID NO: 7514 - DNA, 2300 bp, Homo sapien
gatctgttttccccagcgaacactcctttctcagatggggcaactgagaccgacctccgggaggagtggaatttgtcccacaggatataacacaaaagtctttctgttctttcaagcactttccacctgatacatacaaccacctaggaaaactgccagccgaaatacctgcccagcccagtcacttcacacatgacagacccgagatggcactgagaggtcaaatacctgctagagggagggctggccccacagggtgtggccctaactgcaggtattgtgggtcatccttccgcatctcccccagtgcctgctgcccctcctccccaggggagccctcacctggaaatggaagatgccggcatagccattctggaagctctggccgtgcggaaccactcggtgcaggagggtgtcgttgagagtgagggaggcgatggccgccaagagccagcagtcccctggggcaggagggatgcacattagcctgctctaccaacctgccccggggggggaagcgggtgctagggagaatctggggttccttggccagggtgccacttaactcccctcagcttgcagaaaagacccaggaatctgggcaaaccagccccagcgctgatagccagatcctgcctgggcttgcaagagggaggggttggggcagagcctgaaggagcgggaatggggaactactgtggaaaaaatacccgggacccgacgccctgggggcctacccagtgctccctggcagatgtctgtgcgggtagctccatccacaatgaactgggggtttgacagcagttcctacgagagacccagagtcctgttcctcggccagcccctcccagaaattggcaccaggccaccccagaccccattccccaccagggacatggagtcccatccctactcctcatccaggatctggcttagccgagtcccacccaggatggcccctctcaccgtgggacgcttccacttgatgccataggtcttggaggaattgggacccaggtccttgtaacccaggctctggggtaccggggggaaggcctcatcacggaagagggtcccactctgcaggcatcgcacccgcagctgctcataatcctggcccaggtacttgatggcattctcatggcggcccaggcccagctccctggcccgctgcttctgcacttgggctgacaccccagtgcagtacaccggcgtgatgatctcctccgacatcctgccggacagatgggcctgctcagaacccaggccttcccaagactagaacctgggctcctgcctgcaagctctgctctcctgcccctgcttatccatccccaaacctagggtttccctgcctcactgctcccctcacagaagtagggttctcagccacctcccggtgctcccagtgaatccaggaaagggatttcccagttcccaggcgtgccggccacctctcctttcccggatcccattgtcaggggcttgcagctctgtagtgagccagcaggtcaggtggggcagggcggagcctccagacagcacaaggaactgggcaggtgggacacagcagggaaggcctctttgatcctgttcacaggcctgcaaccccctccccaaactaaccaagctcctggtgcaccggccccttgccgtgggctgaaaaccccagacggtcggggtccccctcctcaggcccccgcagcaggctcgatatcagagctggtgggccctagcccagcccctggggacagcggtgagccaggctgggacaggcgcctgggctgtgccgctccgccagcccccacccctgctccaggaacgcagaggcccccgagaagggaccgtgctggggcagcccctcagcccaggagcagtggccagggtcaaggaatcccggctcggctacccagcttcttacctgggggaggggtgtttgggggtcgctgcagtccctgaggctggcttcccggtggcagctcagggcagggcccaaccaggaagagcgctcctccccgccctcctcccgccgcccctccgccctccgccctccctctctccttctcctcctcctcctcctggggctcctaccccgcttcctctcggctctcccttatctctccggcacggtctctgactatctcttactcacggtgtctccccgcccctccctccgcaggccgggggccaattccgcgagaggacaaattagtaaaaggcagagcagtccccggggaggggccagcgcggggggggatgggggggctggggcgcggcggaagggcaccgcggggaacgga

SEQ ID NO: 7515 - DNA, 2300 bp, Homo sapien
aaagacttttgtgttatatcctgtgggacaaattccactcctcccggaggtcggtctcagttgccccatctgagaaaggagtgttcgctggggaaaacagatcagcacgtgtggccttctccacgtgtcaagcctcctatcccccaactcctcctgcgctttggcaaggtctgactgagcccagcagaaaagaaagactcgggattaagtctacgtaaaccagcttttcctgacggtgtgcccagggcccatttttcaagtcacaccaatcaattctcaatgagctgcctttgggagggacatgcccagcaaccctggatgagactctccagccttggaggccccagccctgcccgaaggactcttgggtgttccctccttctgcctggttagagagccccttaccctactctgtccttgcccgccttgcgcgggtggaggtggccctcggaacccagggtgcggaacccacagtgcggatccactttggcccagcgccacacccacctgctccagtctgcaggggcgcagtctcgcccccttccctcgctcctccaatccgctcctccctggcctccgattggccagttcagtacccgccacccacactctccgcaacctgggctcctagggccgcctccaccccgccccgccccccgttgtcctggccccgacccctcagatggtacctcgagtccttggtcgcttctgaccccagacgccttcggccccgaccctgccctgggaaacgtggcctttgtggcatctcagaaacaaagcccgtgattgtgagaaccagtcctgcccatcttgtggttgtaggatctggatgccacattttcactgctcatccaatgacacaggtgcccctaacccccttgaatagggagggaagagccagggggccatggcctaaaagggggctagttccggaaagcccaggccccagagcttttccacctctccgtgcctgaggaggaaccctgtttgttcagtgactccctaaaggctttgcctgtgctcttgtttaagtcttccgtgaagaaggcaccgctgctcctttttatggatagggaaactgaggctcagaggcgataacttttccaggatcatgtagctagtatgtctcgagcatacatgtacatatcaagtatacacatgtctatatgtggtatgcatgtattagtatacagcaaatatgcaggtatctagtatacattgtacaggcaaaggaaagcatccccttagccctctgaaggttcactgaaaaatcaactcacaaaaggaggttagtaggagaaatggcatacaaattgattagcctgcagcgtggggtcgggaaccacagagtgttcaccccagccccacaatgggtacagaagcctatataccatcctgaggttacaggaagaatgggggctcgaacatggccaaaaccagtttctggtggtaaatcaggttatagtggcaagacagactatggaagggggagaaaagggggcctgggtagcaaaggcagtcttgttatgtagatgaaacctcacaggtagcagccctcagagggaatagatggtaattgtttcgttcagacctttaaagggtgtcaggctctcagtctgacaagggaaggccttagagaaagcctggctacatcaatgcagattttctctacagatgcaaatctcccccacaaaagacagtattacagggctacttctgtttgcagaccctctgaacagctatctcaaaatatgttgaagaagtatatttcagggtgaaatactttgatttccttcaatacctagatacatgtatctagtatatctgtagcatacatgtatctagaggtacacatgcatctagtatgtatctagtatatgtgatttagtatacatgcatctactatgtatctggtatacctgacctagtatacatctagtatgtatctaatttacatgatttagtctatgtgtatctagtatgtatctgggatgtagaatcctgcatctaggaaggtaggggtaaggatggagctcaggtccgggggattccaaagcaggtactcaccgtgcccctcccccacagctgtggcaatttggggagtgggtggacgtggtcgtggatgacctgctgcccatcaaggacgggaagctagtgttcgtgcactctgccgaaggcaacgagttctggagcgccctgcttgagaaggcctatgccaagtgagtagcggctgagggggcaactccagcttccagctccccctaggggtgggggctcatgactgtcttctcagagggtcc

SEQ ID NO: 7516 - DNA, 2300 bp, Homo sapien
gagcctggagtctgggtctgggggtggcccctgagggtgggctgagtgggcagctgcagccctgctccctcctccctcccaccagctggtgggccagccggccgtacacttgaagcgtgacttcttcctggccaatgcgtctcgggcgcgctcagagcagttcatcaacctgcgagaggtcagcacccgcttccgcctgccacccggggagtatgtggtggtgccctccaccttcgagcccaacaaggagggcgacttcgtgctgcgcttcttctcagagaagagtgctgggactgtgtgagtcatggactggcccctgccactctcccctctcccagcctcccctctcaggccctctgctgtccccctctgactggctcctttcctccccactctctgcagggagctggatgaccagatccaggccaatctccccgatgaggtgcgtggtcccaccccaccaggccccgtcctcctctcttcctcacccctgggtgtgtgatggggacccaggtgtcctgtcccctgagttcctgctaacagggaagatcccctcctggtggaagccataggagtagtgctaatccctcatccgcccagcactttacagtttgcagaggacctgtgatactaatggcacaggccctgagctctcacccggtggcgggtttgtgctgagcacttcacctgtgttacctcatttcctccccacatcaaccctgtccgggtcttgttaccatacctcctctgaatgggaaattcaggttcacagaggttagggaacttgcctgaggccatacagtagggatccaaactcttgccttttttttttttttttttttgagagagtctcactctgtcacccaggctggagtgcaatggcgtgatctcggctcactgcaacctccgtctcctgggttcaggtgattctcctgcctcagcctcctgagtagctgggattacaggcgcacgttaccacacctggctaatttttgtatttttagtagagacggggttttgccattttggtcaggctggtttcaaactcctgacttcaagtgatccacccacctcggcctcacaaagtgctaggattacaggtgtgagccaccgcacctggcccaaactcttgccttttactcactgagctgaacagcatccccttcatttaggtcacatgagtgctggatatggggcggggcagggcagggcaggaacgagattcccttttcagattagaaaagtgagactcaagccgggctcagtggctcacgcctgtaatcctagcactttgggaggttgaggcgggcggataacctgaggtcgggagtttgagaccagcctggccaacatggcaaaaccccgtctctactaaaaatacaaaaattagccgggcatggtggtgggcacctttaatcccagctactcaggaggctgaggcagggagaatggcttgagcccgggaggcggaggttgcagtgagctgagatcacgccactgtactccagcctgggtgacagagtgaaactccatctcaaaaagaaaagaaaagaaaagtgaggctcagagaagcgaagtgacttgtagcagatatgtgacctcagccctccctccagctgcctccacacgggcagggccggggcctctcttacctgctttctccccttctcggtccagcaagtgctctcagaagaggagattgacgagaacttcaaggccctcttcaggcagctggcaggggaggtaggttggggcatggcaggttgggaggggcctgtgaggggcagccctctcctggggcaggtgccacctcctctctctccccaggacatggagatcagcgtgaaggagttgcggacaatcctcaataggatcatcagcaaacgtgagtccccgcggggctgtcccaccaccccaccatttcttccacatcagaatccaggctcctgctcacacattgagctgaacctcatcccttggtctgcatgagtcggggaatcctccagtttttctgagcccagttccctgccatttccatcccatactcctcctcctgacctgccatcctgataatccctgtgctcgggtgctgtgcctttgtgggattagcagcgcagcctggccaggcacagtggctcacacctgtagtcccaacactctgggaggccgaggcaggagtcgcttcagcccaggagttcaacaccagcctggacaatatggagagaccctgtctctgcaaaaaagtacaaaaattagctgggcgtggtggcatgcacctatagtcccagctactcaggagg

SEQ ID NO: 7517 - DNA, 2300 bp, Homo sapien
ggtttgtgctgagcacttcacctgtgttacctcatttcctccccacatcaaccctgtccgggtcttgttaccatacctcctctgaatgggaaattcaggttcacagaggttagggaacttgcctgaggccatacagtagggatccaaactcttgccttttttttttttttttttttgagagagtctcactctgtcacccaggctggagtgcaatggcgtgatctcggctcactgcaacctccgtctcctgggttcaggtgattctcctgcctcagcctcctgagtagctgggattacaggcgcacgttaccacacctggctaatttttgtatttttagtagagacggggttttgccattttggtcaggctggtttcaaactcctgacttcaagtgatccacccacctcggcctcacaaagtgctaggattacaggtgtgagccaccgcacctggcccaaactcttgccttttactcactgagctgaacagcatccccttcatttaggtcacatgagtgctggatatggggcggggcagggcagggcaggaacgagattcccttttcagattagaaaagtgagactcaagccgggctcagtggctcacgcctgtaatcctagcactttgggaggttgaggcgggcggataacctgaggtcgggagtttgagaccagcctggccaacatggcaaaaccccgtctctactaaaaatacaaaaattagccgggcatggtggtgggcacctttaatcccagctactcaggaggctgaggcagggagaatggcttgagcccgggaggcggaggttgcagtgagctgagatcacgccactgtactccagcctgggtgacagagtgaaactccatctcaaaaagaaaagaaaagaaaagtgaggctcagagaagcgaagtgacttgtagcagatatgtgacctcagccctccctccagctgcctccacacgggcagggccggggcctctcttacctgctttctccccttctcggtccagcaagtgctctcagaagaggagattgacgagaacttcaaggccctcttcaggcagctggcaggggaggtaggttggggcatggcaggttgggaggggcctgtgaggggcagccctctcctggggcaggtgccacctcctctctctccccaggacatggagatcagcgtgaaggagttgcggacaatcctcaataggatcatcagcaaacgtgagtccccgcggggctgtcccaccaccccaccatttcttccacatcagaatccaggctcctgctcacacattgagctgaacctcatcccttggtctgcatgagtcggggaatcctccagtttttctgagcccagttccctgccatttccatcccatactcctcctcctgacctgccatcctgataatccctgtgctcgggtgctgtgcctttgtgggattagcagcgcagcctggccaggcacagtggctcacacctgtagtcccaacactctgggaggccgaggcaggagtcgcttcagcccaggagttcaacaccagcctggacaatatggagagaccctgtctctgcaaaaaagtacaaaaattagctgggcgtggtggcatgcacctatagtcccagctactcaggaggctgagttgggaggatggcttgagaccagggaggttaaggctgcagtgagctgtgatcacatcagtgcactccagcctgggcaacagagcaagaccctgtctcaaaaaaaaaagcaggagcagcaccttagtgccaaagaaaagtctacctttcctcccagagcctcctgggccaggctgagtggcttggggaacaccacgtgactggcttcactccccagggcagacaactgctggcctctcatcccctcccctcccctttgctgccactgacctccatccacacggtttccttaagcagagcttttctcctcctcttctctgctagtgaagcactgcttaccctcctagcctacagcaagccctgccctgccccatctttctacccaatttctcgctcttctgtttcacactcatttctttttactttggactaattgtggctgttgggactttggcttgattgctaaaatactttacttgtacttcctgatgatacaaacaatcctgcccacttcctctgccagatattgcacccactcgtcaggatttgtgcgtccttgactctgccccacccagtgctcccagcaggggcaggtgcaggaagctcactaggtggagatgttggaattggtttttcttgcagacaaagacctgcggaccaagg

SEQ ID NO: 7518 - DNA, 2300 bp, Homo sapien
gctcacacattgagctgaacctcatcccttggtctgcatgagtcggggaatcctccagtttttctgagcccagttccctgccatttccatcccatactcctcctcctgacctgccatcctgataatccctgtgctcgggtgctgtgcctttgtgggattagcagcgcagcctggccaggcacagtggctcacacctgtagtcccaacactctgggaggccgaggcaggagtcgcttcagcccaggagttcaacaccagcctggacaatatggagagaccctgtctctgcaaaaaagtacaaaaattagctgggcgtggtggcatgcacctatagtcccagctactcaggaggctgagttgggaggatggcttgagaccagggaggttaaggctgcagtgagctgtgatcacatcagtgcactccagcctgggcaacagagcaagaccctgtctcaaaaaaaaaagcaggagcagcaccttagtgccaaagaaaagtctacctttcctcccagagcctcctgggccaggctgagtggcttggggaacaccacgtgactggcttcactccccagggcagacaactgctggcctctcatcccctcccctcccctttgctgccactgacctccatccacacggtttccttaagcagagcttttctcctcctcttctctgctagtgaagcactgcttaccctcctagcctacagcaagccctgccctgccccatctttctacccaatttctcgctcttctgtttcacactcatttctttttactttggactaattgtggctgttgggactttggcttgattgctaaaatactttacttgtacttcctgatgatacaaacaatcctgcccacttcctctgccagatattgcacccactcgtcaggatttgtgcgtccttgactctgccccacccagtgctcccagcaggggcaggtgcaggaagctcactaggtggagatgttggaattggtttttcttgcagacaaagacctgcggaccaagggcttcagcctagagtcgtgccgcagcatggtgaacctcatggatgtatccttccgtttgcttttgtctcctgagtggggttttgggtggaggtatcggtgctgggagaactgtcccaggacagcacagagaacaggacagagccatgcggagtgtggacacacagtgccccatgctcagatgtctccctggacgtcttcctgttggttgggagggagaaactgaggcacagacctgtgtcaagtgaaaggtggagcaagacctgggtccccattgaccctgaggctggtgctatttctgacccctccccagcccactccactgcagcccagctcagagaataaggcaagcccggctgtgggctgactgtacatggcttttgctgcttctcctcacccagccccaagtcgacttgccggctcggcggccatctccccttctgcacagttgcccactctcccatgactggtctaagtgatggaatttccttcttaacggccacccagcgtgatggcaatgggaagctgggcctggtggagttcaacatcctgtggaaccgcatccggaattacctggtaggttgtccccactcacctcagtcatgcaggtgcgggccgggcaggtgggaagggccgggtgactcagcctggccctcaccctctgccgccacctcagtccatcttccggaagtttgacctggacaagtcgggcagcatgagtgcctacgagatgcggatggccattgagtcggcaggtgagactccaaggctgacggcacctgtggggcccaggacaggtagccccactgctcctatgccccaggcccttgtccctggggtgctagtggtgacatggtaacagccatcttgtccttttccccacggttactagcaccctgcctagccccagccccctcctggggacccaacccctcccccatcctgttgggcaggggctgcgcctcactgaccttcactcactctcctggaccaggcttcaagctcaacaagaagctgtacgagctcatcatcacccgctactcggagcccgacctggcggtcgactttgacaatttcgtttgctgcctggtgcggctagagaccatgttccgtgagtgtccccaactgcctcccaccctccagctccgtcccaaacgcgtcccccaggagctggggggaatgacagatgggtgaattagcagatacaggccagtgctgtgggtgtgtgccagagaggcctgggtctgggtttggggggccctggctgagtgccaggagagtcgg

SEQ ID NO: 7519 - DNA, 2300 bp, Homo sapien
ggctgggaacgcctgtgccttcctgcgccgaagccaacgccccctctgtccttccctggccctgctgccgaccaggagctgcccagcctgtgggcggtcggccttccctccttcgctccttttttatattagtgattttaaaggggactcttcagggacttgtgtactggttatgggggtgccagaggcactaggcttggggtggggaggtcccgtgttccatatagaggaaccccaaataataaaaggccccacatctgtctgtgatgtgtttctccccagcctactgcctggagggcacctgcaggccccggcccatgggggcagctcgtggcctcagctcacccctcccctccaacccctccatctccttccccttgaccttgaagcttgaacccctactggagtactgggtatctgggcaagaccacccctggccctgggaggttgggaaggaggggccctagctgcagggacagggccacacagctgaggtcccacatggctctgctgatcctacatgccctccccgccgcccaggaggcctgacccctacctttcttgcacacttcggcccgttgaggtgaggctctggctgaaattcaaacctctacttagcacacacccggccccccagagagctcccccgagcacagagccgccttcaggtccctctgtggggagcccctgtgacccagacacctgcacttacataagccgctccagggcctgctgggatctgggattttcttaccagagataagagtggtttgggggaaggaagaggggatggggcgaagctgcaaatgcagagcagaggccgaggtgggggagggtgggagttggctgctgtcagctgctgtgggccccagcgttggggtggagatggaggtggaggcccctgtgtgccccatggggaaggctgcccgcacactgctatcttgagcttgcgttttgcccttgtcacctcctcactgggagtccaggtcctgttgggctcagagtcttcagcagtgagggcagtggctcagctcttcctgcagcttgggctggtgtgtgaggggctggagggcaggagggtctgcagggccctgccatcttgctcaaacccttacttgctctctggattgggttttatttgatgtggggatgggaacaccacgtctggatgacctgggaccctaacctctcataaactctgagtcactgaggtagaggtgggaagagcagggcttcttcctgactgccctatttgggctttcttgctttgtttctttccttcctttctttctttctgatggagtttctctcttgttgcccaggctggagtgcagtagcgtgatctcggctcactgtaacctccacctcccgggttcaagcgagtctcctgcctcagcctcccaagcagctgggattacaggtgcccgccaccatgcctggctaacttttgtatttttagtagagagagggtttcaccatgttggccaggctggtctagaactcctgacctcaggtgatcagcctgccttggcctcccaaagtgccaggattacaggcatgagccactgcacctggcctatttgggcattttaaaagggctttttcccacgtgtcacctgtgcagccaagtccctgctttctcgggaagtgggggaagggtaagcagctgtaaacactgcatcccattattctgaactctcagcacttaaggctccagctgtgatttggagcctagagacagggactgtgtcccatgtgccaaagccagaatcggggctcccgaacatgcctcggtgtcctctggaggaaagggaaggtgatggtgctccattcactgctggggtcctgtcggtgagggcagtgggcagggcggccagacctgcggatatgggtggtaggctgtgactcagccctcggggtgagagatggagagagctagagaaagggcatgggggaggggagccctgcagatgtggggacacctgaaccctcctatggggtgtaacctgagccctccgacacagggtgcacaggatgtctgcagtcctcacccctggcctgttcctccccctcccagggcccctcccggcctctctacataaagccgggggtactgggcctcaggtcaggcctatggccatggccttcacagacctgctggatgctctgggcagcatgggccgcttccagctcaaccacacagccctgctgctgctgccctgcggcctgctggcctgccacaacttcctgcagaacttcacggccgctgtccccccccaccactgccggggccctgccaa

SEQ ID NO: 7520 - DNA, 2300 bp, Homo sapien
tcttcacctgtaaaatggataaatgttattattggtgtcttgacctatttcattccaatcttttttcctatttatagatttgtattcagcatagttgagatattttatatgtttatacatacaaaaatataaataggatacatacatatatatgtatatatgtgcatgtgtacatatatatatatatatatatatatatatatagtgcccttatttcattatatgttgaaacatacacattcttttccatgttagcacaaatgtttcatggacctgatttttttttttttttttgagatgaagtctcatttgttgcccaggctggagtgctgtggtgctcactgcaacctctgcctcctaggttcaagtgattcccctgccttagcctgcagagtagctgggattagagatgcgtgccatcatgcccggctaatttttgtatttttagtacaggcggggtttcatcattttggccagggtggtctcaaactcgtgacctcaagtgatctgcccacctcggcctcctaaagtgctgggattacaggcatgagccactgtgcctggcctcatggacctgattttttattgctatgtgatccttccctccctccctccctcccttccttcctccctccctcccttcttcctttcctcccttctgcctttcctccctccctccttttctttcttcctttctttttctttcttttctttcttttttaagacagagtctcactctgtggctcaggctggagtacagtggcacaatcatggctcactgcagcctcgacctcccaggctcaagcaatcctcccaccttagcctcctgagtagctgggactaccggtgcattccaccacacctggctaattttttgtattttttgtgtagagacagggttttgccatgttgcctagtctggtctcaaactcctgggctcaagcgatctgcctgccttggtctcccaaagtgctggggttatagacgagagccactgcacccagcctagataatatttcatctagattgatgtttctaactctggcctcacaatagaatctcttggggacctttaaaaaatacccaaatttgagcccatccccagtaggtcttgctagagtggacattgagtaagacccaggtgtgagtgttttataaaatctccccacctgattccaatgtgcagccagggctgccacccagccagagaaggcaccatcatttccttgactgctgtcctaacgttggatgtttgaataggggttttgctacttataaacaacagcgggagaagcatattgaaaatgaggacaatgggccgggcgcggtggctcatgcctgtaatcccagtactttgggaagccaaggcaggtggatcacctgaggtcaggagttcgagaccagcctggacaacatggtgaaaccctgtctctactaaaaatacaaaaattagctgggcgcggtggtgcacacctataatcccagctactcaggaggctgaggcaggagaattgcttgaacctaggaggcagagattgcagtgagccaagattgtgccactgcactccagcctcagtgacagagagactctgtctcaaaaaaaaagaaagaaagaaagaaagaaaatgaaggcaatggcaaacatttaatgggcactttgcacacctggcattgtgtccagcttacgccaaccccatgaagcaggtgctgctattttccttattttacagatgaggacagggaggtgcagagtgggtaagaaacactgacctaggtcagccagcggggtgagagctgcaatttgaacccaggcctgactctaaagcacctgcctacccagcaggacttggtgacagatgcaaataaaggagcaaggagggagaagtcagagaagggcagtcaggggactcctgggtcctaggaacagttgggaaggggaggtggtggaaatcctggttctcctctgggttctgagtgggctctgcctcttccccccacctcgccctatcccctcctgaggctccacccttctccactacaccctgggcctccctctcctcccctcctcctcagctgcaccctactcccctgtctaggcacgcagatcctgtgcacagcccaggcagcgctgggcaaaggctgcctggccagctccttcatctgtgtgtacctgtttaccggcgagctgtaccccacggagatcaggtgggtgcatggggggagatgctgcaggttgagacctgttgggctcaccgaggcaggacccctggtccctcctgccctgtcctctgacactcagg

SEQ ID NO: 7521 - DNA, 2300 bp, Homo sapien
actgcaaacattttccgtaaagagccagagagtaaatatttgaggcttaagggtgtgaaccccaaaagaggttcatgatggatccggagtggctaactaggcctaaattcaaaatacagccaagcagccattggctgactagaggtcacacatacttcggtttttgtttgcttttttttttttttaggcggagtctcgctctgttgcccagactgtagtgcagtggcacaatctcgacttactgcaagctccgcctcccgggttcacgccgttctcctgcctcagcctcccaagtagctgggactacaggtgctcgccaccacgctaggctttcttttttttttcttttttttttttttagtagagacggggtttcaccgtgttagccaggatggtctcgatctcctgacctcgtgatcctcccgcctcgacctcccaaagtgctgggattacaggcgtgagccaccgcacccggcctttgtttgctttttgagacacgatcttgctctgtcgcccaggctggagtgcagtgaggcgatcatgactcacttcagcctcgacctcccgaactcaagcgctcctccagcctcagcccccagagtggctgagatcacaagaacccgccaccaccgcccgctaattttttgtagagaaggggtttcgccacgttgcccaggccgatcttgaactcctgggctcaagttaagggaggagaccacccctcatattgtcttacgcccaatttctgcctccaaagaaagaaaaagtaaaactaaaaggcagaaatgaaatccacaagcagacagcccggcctcacaccctaggcttggtaaagatggacccctgacctaatcagttatgttatctatagattacagacactgtatagaaaagcactgtgaaaatccctatcctgttttgttctgatctaattactggtgcatgcagcccccagtcacgtaccccctgcttgttcaattgatcacgaccctctcaggcgcacccccttagagttgtgagcccttaaaagggacaggaattgctcattcggggagctcggctggtgagacaggagtcttgccgatgaccccagccgaataaaccccttccttctttaactcgggtgtctgaggagttttgtctgtggctcgtcctgctacaaagtgatccgcctgcctcggcctcccaaatgctgggattacaggcgtgagtgaccgcacctggcctgggatggacattttaaaggttcctgatacatattgctaaattgttttctcgaaacgctctataccatcccaccagcattgtatgacgcctacggttgagatttttggctcaaagaattacggtgtatttcaaggggagaaccctcttctcatcttacccctaaactctatccttgagtgacctaccttcactcccaagcctccagtcacccactgggaatctctacctggaaatcccagaggcactcaaacttaacgtgtccaaaactaaattatccgtcaccttcccacctcatatccccccaaatgccccagattcagaaaacatacccatcactgtggctggcaccacggtgataagcacgataataaccatggcaaccagattccctactgaagccattcttttaggatgaaccaagggcacaacaggcagagatgacaaggggaatggagaagggggtacagtaagttttagatagtcgaaggcacgcgcacgacaacgcctgcgcaccacggaacagggcaaaagggtgacaaacatgcgccactgagttttatcgagcagccgatgcccagaaaacaggcatccgcacacagactcagtttccttgtaggcaactcccgggcgttgcgagtcacaaccggcattctcgcgccgtgagagagaactgcgcagctgctgactggcgggccgccaggcgcgtgcgtagagacgcccacacgcccgctgatgcgcacgcgccctgggccgcgcgtgcgcgcgtggggttccggaatgagccggggaaagcaaggggaaggtttggggttggctcccggtttcgcgcatgcgtgcactgcacaaaccatttggcgggtttttccggccactcagttctgccaccgtcactgagaagctcagcggtagcttttgggaagcaggacgttctcaccaggagagcgtcctctcgagatttctgctccctccattcagggcgtttgggagccaccccttcattttttaaaaaaagtatttctctgtgaccgacggccggggccttctgacggtctgaggtcttgcttgggccagtc

SEQ ID NO: 7522 - DNA, 2300 bp, Homo sapien
tttttagtctgtgtgtatcttaattctttgaggaatgttagatctttgattatattttgaataccttttattatctcaaggcttttgaaaacacctctgctattacttgactatgaagtactgtattcactatcttttctttttcagtttctgagcaaaagattatcgaaagccaggcatagtacctgcaaggacagtggccatgcaggagctagagacattgtttccattcaagagctgtatccttttctgctgaaggtctttgcaccaagctacatgttgtattttataatttgtctgtagtcgcatgtgtaatttaaaaacaaataataaggccgggcacggtggctcaggcctgtaatcccagcacttttggaggccgaggcaagcagatcacttgagcccaggaatttgtgaccaacctgggcaacatggtgaaaccctgtctctatcaaaagtacaaatttttttttttttttgagttggagtttcgctctttttgcccaggctgaagtgcaatggtgcaatctcagctcactgcaacctctgcctcccaatctcaagtgattctcctgcctcagcctcctgagtagctgggattacaggtgcacaccaccacacctggataattttgtattttttttggtagagacagggtttcaccatgttggccagctggtctcgaactcctgacctcaggtgatccgcctgcctaggcctcccaaagtcctgggattacaggcgtgagtcaccgtgcccggccaaagtacaaattaaaaaataataataataagctgggtgtggtgatgtacgcctgtagatccagctagttggtaggctgaggtgagaaaatctcttgaacctgggatgtggaagttgcagtaatctgagatcaggccactgcactccatcctggacgacgaggaaaccccatctcaataataataatagtaaaaattgcctaatattgagatttcttctagcaatcagcccttgccttatatgaaagtttattattattattattattttttttttttgagatggagtctcgctgtgtcgcccatgctggagtgcagtggtgtgatctcagctcactgcaagctccgtctcctgggttcatgccattctcctgcctcagcctcccgagtagctgggactacaggcgcccggctaattttttgtattttttttagtagagacggggtttcactgtgttagccaggatggtctctgtctcctgatctcgtgatccgcccatctcggcctcccaaagtgctgggattacaggcatgagctaccgtgcccagccattattgtttttcttaaccagtgttcttagaattgaagtggaagaagaagaggaaatcctcttgaactcttacaccacaccttcaaaggtaagtaaacagtgtttggacattgcattttacaagtaacattttaaaatagtttcacaacatttgaagatctgagggaaaaaatcaaccactctcatgcatttcctactatatttccacttatacatcttcctttctgatcatatgtctaaatgttttacataatggcagtccttataaacatatagttatcctgcttttctcagcacaacataaaacatttctataaacataatttctccataattgccctttttgaatagtttcatagttttatactataattgaataattcagttctgtgttggatcccagtgtgaaaggtcaagtagggtagtggaaaagcattgccttcaaagtctgagtcagaagacctaggtgacctggagtgagttgttttatctctctgagacagtttccttatccataatatcaggattcattcattcagttatccagcaacaactatgtggccaggcgcagtggctcatgcctgtaatcccagcactttgggaggctgaggcaggcggatcacgaggtcaggagatcgagaccatcctggttaacatggtgaaactctgtctctaccataaatacaaaaaaagaaattagccgggcgtggtggtgggcgcctgtagtcccagctacttgggaggctgaggcaggagaatggcgggaacctgggaggcagagcttgcagtgagccgagatcgcgctactgcactccagcctgggcgacagagcgagactccgtctcaaaaaaaaaaaaaaaaacaacaacaacaactatgtactgcactagacattgagtaaacaatggtgaatgaaacagacatggatgggctctgccctcaagaagctgacagccagtgcacaatatcccccatcttggagggcttg

SEQ ID NO: 7523 - DNA, 2300 bp, Homo sapien
aaaaattcatgagaagaaaaaaatgggacttaaagtttgccttttaatcaattcagaatctggggatctttttgccttgcttagttttaatgccaagagaacgacaactttttaaaatacgtttctgtctctaaacttctctaaaaatgtttggtattcctcagcctggtattcctcagcccttcattcctgaaattccttaaaggtctgggtatgtccaaccccattaaactgattcaatttataaactatgaggccaccttccttttctccagtccccatttccaaaggtaacctcattttattcttctctccctttagatatgaacacagtaatattaacctgttttgcttccaattagtgctactccctcccagaaatacaactcacgaagtaaccgaggagaagtggttacctccttcggcttagcacagggagtatcttggtctgggagaggaggagctggaaacatcagcctgaaggtcttgggatgtccagaggcactaactgggagctacaaatccatgtttcagaagctcccagacattcgagaaggtgattgtttttccctttgaaattctggtggatataaaaccacctagaagggtgtagagtaacaaagcttcagctaggctggtagaacaagttccaaggttgcctttcaatgtatgagttggtagatgtcctcatggaagccctagtaatggagggacacgggcaatactatcagtgattgccccaagtcacttcactttgctaaaacgcacataaccattcccagcagcaaaaacttgaacgatgtaaaggaattcaacttaaagatattcatggttccttcgttagaagccttcttcaggttggccttgacttgcctaaaacctcagtgaggacttgagtaaagggcagacttggagatggggtggggttcatgctgattccctggaattgtgctatggggtctcctgtggccagatggaaggccagattcagcaaccaaatatcggaaaattggcaaaggttttagaaggtttaaactggccagatgtccaggcacccttcctgcttctgtaaaatgactgactttaatattttacaatgtgctgtattttctcttcttggcaagtgaaatgtcttaaacataatacttttttccacttctgggattgtagttctgacctgtaagatagaagaacttggcagcgaactcaaggaacattacaagattgaagctttcactcctttgctagccccagcacaggtaagagttgttctaatagttctcactaattaatattacgtttttaaatcgatgaccaagaggcatccttcttgcttcctttttcacttcttgtctgtgttctagtttgaacatctgtcttggttgaatttgggaaaatgggcccttctgaagaaagatttgtaagtgctgtctggttttgtggccagagagtgattttcttcccacttggattagagtcttgcacataagcagagactcaaggccttgtttcccttggtggtgagtcaggtagctccccggggatttcccacaaatagaagcattcacgtatcgagataaaaggacagcagcgacggtggggttttcagaatcttgttctctggacaatgactcacagtctctcccctggtttggtctcttgttatagacaaactgctgccaatagtatctttatatcatagtttaatctggcatatataccagtgctttctctctagaatgttttctaatctaaggggaaatatattctagaagtttctttaaagtacctttgtcaatgtttacattcaaagaatgatcagttggggaagtgatgcagaactgtgtcatagaaggaagtgttagaggacttggaaggaagtaattgagggaaggcagggaggcacaatcactgggaaagatgagacttcctctgttttctcccaagagtgggaacagaacagaggaagccatggagacagagattttagctcaattaataaagaacttcctgttaagaggttgtatggtatgtggctaaggatatggctctagagccaaatttctggtttcaaacccaagcttcacccacagtttgaccttgactaaattatctaacctttctgttgcttgttttcctcatctgtaaaatggatacagtaatatccacccgatggttgttgcaaggattaaatgagttaatacatataaaatgcctaagaatacattttagaacagtgcatggtatttagtaagctcaagaaatgttagctattattaagtagttatagctgcccaaag

SEQ ID NO: 7524 - DNA, 2300 bp, Homo sapien
cttttttttcttttttttttttttgagacggagtctcgctctgtcgcccaggctggagtgcagtggtgcgatctcggctcactacaagctccgcctcccaggttcatgccattctcctgcctcagcctcctgagtagctgggactacaggcgcccgagtagctgggactgcaggtgcctgccaccatgctcggctaatttttttttttttttgtatttttagtagagacgggatttcaccatattagccaggatggtctcgatctcctgacctcgtgatccacctgccttgacctcccaaagtgctgggattacaggcatgagccacggcgcccagccctcattggcaattttcatttccatttctcatgtaacaaaacatattcatagattacacaggttcggatgtgggctttttttcttttctttttttttttttacatgggtttttgctctattgcccaggctggagtgcagtggcgtgatcacagctcactgcagccttaacctcccaggttcaagcaattctcctacctaagcctccagagtacctgggactacaggcttgagccaccatgtccggctaatttatttgttgtagaaacagggtctcactatgttgctcaggctggtgtcagtgtcaaactcctggacccaagcaatcctcccaccttggcctcccaaagtgctgggattataggcatgagccacagcacctggctagatgtgaacatatttaggggggctgttattttacctaccatgatccccttcttcccatccggacctcccagcttgtctggcatcttcccccacccccagcatcctgcctcccccactgaggtcttcccggctctgcctccctaaaagcccttcccacactgacagcattgaagccaaccatcctggtcacactgagctggcatagctgtcatcctctagaaagtgaggtctgtccaccccgtcactacccaccacttcctctgccccactcttcttagcacttacccacctggaagggtatcatgatgtacctgggaacttggatttcccccatttcccttctctgggctgcaggtcccaatccagaggctgaatccccagggacaagaacagcgctaggcacttggtagatactcaacaaatctctcttgagtcactgagaggtgcagtttccttcagtctgtctccagcaccctgtgcggtgcctgcccttcaaaacatgtttctgggccgggcgcggtggctcacgcctgtaattgcagcacttcgggaggccgaggcgggcagatcacttgaggtcgggaattcgagaccagcctggccaacatggagaaactccgtctctactaagaatacaaaaattagccaggtgtgctggcacatgcctgtaatcccagctactcgggaggctgaggcaggagaatctcttgaacccaggagacggaggttgcggtgagcagtctgggcaacaagagcgaaactctgtctcaaaaaaaaaaaaagtttctggccctgtaggaatgactgactgactgactgaaagaatgaatggaccaggaactagtctgaatatgagccccaccttcactctggaagcctgacagcaaagacgggggtccaggccacgcggcctctgccttcccatactgtcttttctagtgggaggtaaactgatcaactagcttgtaagtttgtagtattctaacgtaggcgcttccaaggaagtcgctgaatatacttgtgccggcgcttccccgacgcagccctgcagggaaggatccggtccaaggtctctctgcgatttctgaagaattcggtcttcccggagcctctcccccggctcttctagaaccgaaggttttagttcccatgggcacagccggaggccgcctgcgccacccggccctcagccgccagaaccaggacaggactccagggcgcgcgcgaccgctggacccgggagcggcacctcccacgccgggagccccgggcggtgcccggagtggggcggggcctgggcggggatggggaggggcttggctggcgcggccccggcattggctccgcgggccggggcggggctgcggggtccgcggtgcactctgtaagttcaccgccggtcgggtccggccgccgcgctgtccagctcctgagaccttgctgtccgccggtctgccgtctgcgcgcctcacggtgagttcgggctgggattttcgcagcttcgcgggggtcccccgagaggcccatctctgtggcgccccgccccagctcgcgccctggctctgcctctcacctcac

SEQ ID NO: 7525 - DNA, 2300 bp, Homo sapien
gcagcctcgcccgtgcccgccacggtccgtgggggcgcaacgcatcccgaccccgaattccccgttctgccctccattttgtgtccgggcccccgcccccctcccgagacccaggggtgccccgccgcccagcatccccaccggggctgggggccgtatttttagccgatagtgagttgttctcctatctttagctgcggccgcgaatgtcctgaaacggatccgggctgggctgggctccgcccgggtaggagtggggaggggtcggcgcaggaacccgagccggagctaaggagccggacccgtgggaggggcgggggcccgcacgcccgagctctggccctgtgccgagcggacactaggacatcgcccaggccggaaagcacaggggggaggctcctcccagagcttggagactagggcagggtccccaatcgccccctttttccccgattgtgggaccagaaaccccgaagcaaaaagatctcgcaggtaatccccatctggtacttgaacgcgcagctccttggggaccgcctgcctggagcccgggggaggggcgctggagaccccggtgcgctctcggagtcctccgggacacgaggcgatcaagggagcacgcgcgccacctggcggccgcggagccgggcacctctccggaggcaccgggaccccgggagacccagcggccgctagagggtctctgcatcctcgaggtctaggagggcgggaggaggtggacgcctggggtcaggagcccttcgtttttgctattgttcaaagcactggccccggagaatcgaagtgcttgaggaaggaaggccttgtagatatttgctgaatgaatgataaaacctacagtgacccgctgaaccccgctattgtacattggcgctctcacctgcaatattgcagtgggatctccagtggccctttagtggtggcttcgttgtcagcccattttatagatgggaaaggtgagacccagagaggagaggcgtcttgctgaaggttactgaggaagtcccaggtggagctggatttaaggacagtctcctgatttaggagaagagggggtgtgaggtggcctaatattcttcatgataggaggatccctgcctgccggaagtcattttctcattgggaggtccagggctcctgtccagggcaatcacagagagctaggatgctcctatctgctccccgactgctgcagggagctcccctcccagctccccacagccctgtcctgatggagacctcattctcatatctctggacacatgaaagttgggcagacgggggcagccaaaggtcaggatgtagatggaggagatctggggacccactgttcccagcctagctgtgagcccctttctctcccgctccccaaacatattatggaagtaggcgtggcccactgcatgggaaccacgtggaccaggctgggtacccactcttccacttcctaactggatgacgtcgccaatgttacttaacatctctgaggttcagcttcgacttctgtaaagggccgtaatgaccccaccatgccgtgactgggagctttaagatgagaaactgtgcgtggcaagctggatcctagggtcttgcagttgccaaatctaaattcctggggcgtgagggttgtaattcccagctctcccctgggccgctgatgctggcctcaccctcgattctccccacatctggaattgggtgtgtacatctggctgtgagtgagacagctgtcagggacgcccaatttgttgtggaaacactcaggctgtcttggcgctgccgtgtgatggggttgggggtgcggggaggacctggcccaggctctgggtacatcccaccagtcagccccacgctccatgagtgaaaaggaagacaagccccccccaggacttctctcctgacgagcgacaaattgcatgtttgtcagcatggcccccaggcctggcatggttgacacaggatgaatgcgtgacgggattccaagacctcagggtgcccatgcgtccccacccttcccccagctccttgcaagctgagctggatttccgccacgggagagtcattcctttgtttcctgttaagctccaggtgctctgggaggggtaagatgtccggcctctgtggctcagtacgactgacccgggtgtccggtcctggggtggggtttcctgagcaagggcctcagctggtggggggaggggggcagttggactctgcttctcctgcatcctccttcctccttcctgctcccgcctcccaaccccctcacccccaccctc

SEQ ID NO: 7526 - DNA, 2300 bp, Homo sapien
tggtatacctgcatcaaaccatctcgtgtacccataaatatatacacctacgatgtacccacaaaaattaaaaaattgaaaaaaattagtcaagctatgaacccggaaggcggaggttgcagtgagccgagatcacgccattgcactccagcctgggcaacaagagggaaactccgtctcaaaaaaaaaaaaaaaaaaattagtcaagctacataagatctatgtgcttctctttatgtatatttcaattaaaagtttgaatttaaaaatagtactaataataaataggctagctgcatataattggaaaggcagcttatgaacccagcatcaatagctttcagttcttttaggattgtttaagaaaaggttacatcagctggccaggcgtggtagctcatgcctgtaatcccagcacttgaaagcctaggcgggcggaacacatgaggtcaggagttcgagaccaacctggccaacgtggtaaaactctgtctctacaaaaaatacaaaaattagctgggggcacctgtaatcccagctactcggaaagctgaggcaggagaatcacttgaacccaggaggtggaggttgcagtgagctgagatagtgccactgcactctagcctgggctggaaggaagaatttgttaaggagcgacaagagcaaaactccgtctcaaaataaataaataaataaatataaacaaataatgttgttacgaacattcttgtacagctttatttttttttttttgagacggagtctcgctctgtcacccaggctggagtgcagtggcgcgatcttggctcactgcaaactccgcctcccaggttcacgccattctcccacctcagcctctccagtagctgggattacaggcgtccgccaccatgcccggctaattttgtttttgtatttttagtagagatggggtttcaccatgttagccaggacggtctcgatctcctgacctcgtgatccgcccaccgtggcctcccaaagtgctggtattacaagcgtgaaccaatgctcctggcctgtttttttttgttttttttttttaagagacaggatcttgctatgttgcccaggctggtcttgaacccctgggctcaagtgattctcccacctcaccctctcaagtagctgggattacaggcatgaggcattgcactcagcttcttgtacagctttcttgtgtgtatatccaggagtggactttgctgggtcatagggtatgtgtattttcagctttagtgattatatttatatatatatatatatatatacatatgtatatatatacatatgtatatatatgtgtatatatatatatgtatatatgtgtatatatatatgtgtatatatatatgtatatatattttttttcctttttttttttttttttcttgagatggagcctcgctctgttgcccaggctggagtgcagtgatgtggctccagtggctcactggagcctcaaactcctgggctcaagtgatcctcccacctcagcctccctagtagctgggattacaggcatgcaccaccatgcccagctaatcttttttctttttctttttttcctttatttatttatttatttattgagaaggagtctcgctctgtcgcccaggctggagtgcagtggcgcgatctcggctcactgcaaactccgcctcccgggttcacgccattctcctgcctcagcctcccgagtagctgggactacaggcgctcgccaccacacccggctaattttttgtatttttagtagagacggggtttcaccgtgttagccaggatggtctccatgtcctgacctcgtgatccgcccgcctcggcctcccaaagtgctgggattacaggcgtgagccaccgcgcccggccccggctcctgctcctctaaatattagaggcaagcctcgaaccggagctccgggatgcatgccaatctccggttgcgcctgcgcgtcgggctcccgtggggtccacgcatttcctacccggcccccgcgaacaggcgtaaagctctttcttcagtgctcgctctagtgcgcgcgcccggacggcgcctgcgcagagggcaaggaacctggtaccccggtgcggtcccggcgcctgcgcgctgcggactgtggggcttctcggcccgaggcagaggaacagggaagatggcggctgtggtggagaatgtagtgaagctgtgagtggtcgtttctttctctcctagggcggcaggttttgtaaagggcctgggagtagggggcggtgggggaagggactaggcggagagaggg

SEQ ID NO: 7527 - DNA, 2300 bp, Homo sapien
tttacctagatttatcaattccacattttgccacatttgccttatctgtctttgctaaactatttgagaggaaacttcaaaaacttttcagtctaggcaacatagcaggaccttgtctctactaaaaataaaaataaaaaattagctgggcatggtggcacacgcctgcagtcccagctactcaggaggctgaggtgggaggattgcttgagcccaggagattgaagctgtagctctgcttatgcctctgcactccagcctgggtaacagagggagaccctgtctgggaagggagggaaacaaacttttatccctaagtgctttactcttttatcacaaaagtttgtgtcacagttttttggtccctgaggttacacagtgaagcacacttagtctctgccaacagagaagataagaatacatgtaaaaataacagctataaatatgccagcattgggttaagtgccttttcatgccctttctcctttagtctgtacaaccttatggggtaggtcctgtgttccccatttcacacagaggctgaaacaaagcagtttaaaaacttcccatgggtcgggcacggtagctcacgcctgtaatcccagcactttgggaggccgaggcaggcggatcttgaggtcaggagatcgagaccatcctggctaacatggtgaaaccccgtctctactaaaaatacaaaaaaaattagccaggcgtggtggtgggcacctgcagtcccagctactcaggcgcaaacccgggaggcagagcttgcagtgagccgagattgcgccactgcactccagcctaggtgacagaacgagactccatctcaaaaaaaaaaaaaaaacttcccatggccggccacggtggctgacgcctgtaatcccagcactttgggaggccgaggcagttggatcacctgaggtcgggagttcgagaccagcctgaccaagatgaagaaaccccgtctctactaaaaatccaaaattaatcaggtgtggtggcgcatgcctgtaattccacctacttgggaggctgaggcaggaggatcgcttgaacccaggagacggaggttgcggtaagccagtattgcgccattgcactccagcctgggcaacaagagcgaaactctgtctcaaaaaaaaaaaaaaaaaaaaaaagcttcccacaaggtcacacaaataagcaacaacattttaatttaaactaggaggcgagtgtcaggacagaaccaccaataatgtgctcccagggtggccaatcagaggcaggagagggcatggctgcttgtggcatcagggcaaccttttggaagcatgctatttgatttggccatgtggcatggtggggaaagcatttcaggctaaggaaataacgtgaagcacaggggaaagatatcccaaagtatggaagggagcaggagcaggattatagcatgcttgaaaggcgttggtgaggaatgaggctggtgtgggtgggaccacgtcacagaggaggttctgggtggccttggccagtctcatcataggggagcttttggatgcacatatttctacccatgctaaccctcctgtccactcagcggatcctagaaccagatgacttcctggatgacctcgatgatgaagactatgaagaagatactcccaagcgtcggggaaaggggaaatccaaggtgaggggccagcgtgctgcctgcatcttgggacagggtggcctagggaattccttattttatttcaagtgagattagcggccacttccaaaagagtctaactcctcaggcccagctaccaaaataagggtgtctctttgctcttcttggcagggtaagggtgtgggcagtgcccgtaagaagctggatgcttccatcctggaggaccgggataagccctatgcctgtgacagtgagtgcctcacaagtgggtgggtagaccttgccttggacccagctcctgctctggatatgagaggagggagggttgtgtttttgcccagagtattaaaacaaacctgggctcttgtcctgcctgctgactgcttccgtctgagacccctgggaggcctgggtccctgctatatgacgggtgggacctgcatgctctgggaaagatttctgccatcctctggggtagggttgcttgtgggggccacagcaggcagggttggcctctcaacagatggcctgcaggtctcctggcctcagttaagccagggccccaggggtctgacactgagtttttcaacgtctgttctctttttctttctgtctgccttgccccacttctgtccctcca

SEQ ID NO: 7528 - DNA, 2300 bp, Homo sapien
gggaagccacatagacatccctttcttcccttgcacgctcgctagcagctggtaaggtcttcacaccctgattcctcaagttttctgcttagtggcactgacattaagtagtggggggacagtccatgccaggacaccctggagtagccttcccccttggccgtgggcaggccctaactcactgtcgctttggagttgaggtgtcttttttttttctttctttagttcctgtattctaaacattagtaaaaataaatgtttttacacagagccctctgctggatggtttatctcctgcctttctccattaagaaggccatttcatcctaagatttccatgatggtggtttttttttttaatgttttgaaatacagcttttttccccccaaattaaaatttttttgtggaaccccaatatgtaaagcgaatataaaattggttattttgttttgttacataaattcaagtttataacaattctttgttataaagaacaatgaagctgttttgatcaatacaaaatttgggttaaaatcaactttaacatctatttttatgtttcagttgatttggagaattctcctagtcttggatacatagatggaagtgatgacaggtttataacagttgaccttgcaatctcagacatttaaaacaggaccagaagtttatataaatataattaataagcaaactaatgacatcaccatgggacacacacaaaagttcttgcaggagcagggtctgtgtggcttcagttgcctgcagcgctcccaggccagagcaagtgctctaggatctgaactgcccgcagtgcagccctgcagcctttcccagggcacgttgatgtgcacacagtttccctgaaggcaaagtgaacatgtggagagcttacgtggcagcgcgtatgtcttcagtgtgtgttttagaagtccaactgttgtttttatgtttttaaaggaaagatttgaatcaagcagttatgggccccctgaagtatccttttttctagaacattctgaaagtcatccttgcctatgggaagcctaggccggcctgcactgttatgttcaataaataagcagggtgctctgggctggggattgtgtgaggagcagagcgcagcccgtcctcatgcttttccactgaagtaggccaggcagagagggagtacagcaatggatgcgctttggcagctgagtagtccgagagccagaaaagaaatgtggaaaataagaacgctgtagcaggcctaggtgaggaaatttaggaagggtttgcgggaggtaggatttgagatgggtcttggagagttggacagtgtcagccggtaggacgggggtgcggacggaagcctgtgaggaaggcagaggatgcggagctgtgagcggagggagcagcgaggctggagagcagctgggctgcgggtcaagacgtctgcgtttaattcgggactgaaggttagcagggaagggaacgatgccagatcttgagtttaagaacttgaatcttgtaaagtaccaaatctaataaaatactcgtcctaaatcattactggcccaagcatgcagtgtttccgtggccgacagactcgagccagcgctgtccatggtaaccagcttttgtgtggcttaaagcttgcatccattttctcctttcatcgttttcccaaaacaattccgtgagggctgttagccctgcttggtagacgaagaagccgatgcggtctagggtcacggccagggaggctttgggacgccaagtcagctcggcggtcaccacaccacctacagggctcgtcgggccctcggggtcggcggctgctggaggcgcccaggggagtcctgctggttcctggctccgcctcccgcccctccgcgctagaagccccgcccccagaggggctcgacgaaccgccacttccgcaacgtccaatgaaacttagccgggggagggacggggcgccactgaggaccaatctgcttgggccggggcggggctgcggcgggtgggtgcagaggggccgcaccgcggacttcgcagccgggagagagcccggcgcgggcggcgcgcacgggactctgctgtgcgcgcgcccgcccgcccgccgtccgcgcaggccctcggtccgctctgccctcggggtcgtggcgcccatccctcccctgttctgctgtcgccgcccggacaggggctcgggagccgggctgggggcaggggctggagccgcgggaccagcgcctgaggtgggtgcggagcgggaggccgggcgggcgggcgcctggggccgccccgccga

SEQ ID NO: 7529 - DNA, 2300 bp, Homo sapien
ttaggagagctgccagaggaatgaaagatctcacctgacccaaatgtcagggtgccctgagatcaggcctggctaatcttgcctttcctgcctctcctgctggttggcatcccgcttgagggggcagagggaaaggttggcccacctgcccatcccgccaccctacctgctctgtcctcccacccaggtgaggctgcagacccagaccacctaccggggcatcgttgattgcatggtcaagatttaccgccatgagtccgtgagtggcccactcctttggggtccttcccctttcggggaggcatctggggctgttggtaccagcttccctctccagcagggttctgctcctggaggagagaagaccaagtctgggatccttggggggcctgggtggtagcttagcaccccagaggcgcagcctcagcccatccctgcctgtccccacttccctgtggcaggacttgggagcagtttccagccagaggctgccttgccaggggtggagaggacaaaggggaggccccacggtgcctactccgctgccactgtgtctctctgcagctcctgggcttcttcaagggaatgagcttccccattgccagcatagctgtggtcaactctgtcctgtttggggtctatagcaacaccctgctggtgctcacggccacctcccaccaggagcggcgggcccagccgcccagctacatgcacatcttcctagcgggctgcaccggggggttcctgcaggtgagggggcagtgagtgggcacacacaggtgtcatagggatggtcatctcgatctgtcctctcccaccctgccctggcgacccacagctgtggaggcataggcctcttggaggggaacaagaggcctgtgctatggccttccaggctgcaggcctctgggggagggctgtggggaacagagggggcaaaaggcagagacagctggtgggcagtgccaagagggtgctgggagaagcagcctgggccactcgctccagctgacggggcttgcccccctccagaggggtctgccagcctcagagctgtggggagcccactccccaaggagacctttgaccctggagaaccaccagcaccccgcagagctgtgagcccagcccctctggccgggtcctgatgaggtcctgacactcccctggccctgcctggctctacactttgcctgcagtgcttgggtgcccatgacctgggagcctcacctgaggcccagcccagcagggcattaaccattcaggcactgccgtcatctgggctttgggctttagaggggtggatggagggaagagggaccagctgccgccagtgggaaccggtgctgaatgggtcctgtgagcataagcagggagagggtgcgcccggcacccactgacaccccagccgcaagccagggtcgccctctcctgggcagctgcccccagttccttgtcacacttcatggggcagagagcaaggacaaaggacaaagtcaggctgctccttcaaatgaattaatgattaatgagacccccggaggccccggcttttcttctgccccttcttgtgcgaggtgccacctataggtttcctgagccccgcgagccacatcccacaaacacaaggaagagaaccgaagccctaagctaagtggccaggcccggcttctaagtcaccctgcccccccagctctttggaaagcagaagtggggactgtgagggccgctgatggagcctgggtttacagtgaaacctgtggctttagtttaacagagtcttaaaggaaaaatgtgttttagtgtggagtgggaagaagaggcagggactgacagcctctgacgggcacagacgttgccctggtcttcgccgaagctgaccttctgaaatggcatctgacactccaccacccctgtgggggtgtctgtcacctggtgtcagcctagccctgtcctcagcccccaggagctcagggctcagaacacctcctgaagccctgagctcagccctgccagcacgctctagagggtggcacaaggccccatctcccaagggatggtacctaacctacgacccttactcctgggaccaaagtaaacaagcgaagacttggcctgccacaccctaagtaccaccacccaccaccagaggcgaccgccagcccccgtcgccatcagccatctccagggctgaggaactgagcccatgtacctgtcacaaaacaaacaagcaaaaaacagataaatccctcagagacaggctagccttgacatggaccccgattctcacctggactcca

SEQ ID NO: 7530 - DNA, 2300 bp, Homo sapien
tgagaccagtctgggcaacatagggaggcccctgtctctacaaaaaaatcaaaataattagctgggcatggtggctcacacctgtagtcccagctacttaggaggattgcttgagctcaggagttcaaggctgcagtgagctatgactgcaccactgcactccagcctgggtgacagaatgagaccctgccacaaaaaaaaaaaaaaaaaaaaaaaaagaatcagggcatggtggctcacacctgtaatcccagcactttgcgaggctgaggtaggaggatcacttggggccaggagtttgagaccagcctgggcaacataggaagaccctgtctttataagaaatgagaggctgggcgcggtggctcatgcctgtaagcccagcactttgggaggctgaggtaggtggatcatgaggtcaagatttcgagaccaggctggccaacatggtgaaaccccgtctctactaaaaatacaaaaattagccaggcgcggtggcgcacgcctgtggtcccaactactccagaggctgaggtggaaggagcccttaagctcaggaggttgaagctgcaatgagccatgatcatgccactgcactccagcctggacaacaccagcaagaccctgtgtcaaaaaaaaaaagtctgggttccgtggagcaccccagagccagctgtccccagtcctctggggagtggccgatgggaagaagagaggaaggcacaggtgggagggtgctgcctctgccttccaaggccactctgcctgacacctgcagagggcgggagagccaggtgagcaccctataccttgagccctgctctccaggcccaccctgttgggcttacaaaggaagttcacctttgacctcacctgctgtcctgagtcccctctgggcctctgccccacctggctgtgggccgcagtcccgggccctgaggcctgttgtgctgtggtcccagcccagcttctgggtggcattcctcttaggagaaagagagggacgttctgaacctgcctcctgggggtgcgacctcccccaaactccagaaccagcctctgctgtggagggcagggctaggcagtgggcaggtggaggggaggggagaagctcctctgcaggtgcccaggcatgacccccatcagggccctgcagttctgcgtggccagctggcagcagggcctgctctggatcccggcgacgacattatgagttgaagaaagaagagtaaagctctcggagaggtgggaacctgggtgattctcccagagtcccgcggctcataggcggtgggatacccgggtatgggctccagcgaggacacgtacgtctttggctggctcttccctcttgggtgtgcatcctcaggtggggcctggggtcttagtcccttgtcccagtgccttcctggcccagtgcctgtgtggagggggtggcaggggcagctggagtctctagagcttggcaggaaggtggctgcatgtgtctgagatggccctgctctccttcctcctgcctgaacccctctttcctcttggcacagacttgcttcctgggcctggcacgagggccctcactcatagcaccctcttgtcaccacaggcgctctgggcttggtcctgggacacccgtttgacactgtaaaggtgagtttaggagagctgccagaggaatgaaagatctcacctgacccaaatgtcagggtgccctgagatcaggcctggctaatcttgcctttcctgcctctcctgctggttggcatcccgcttgagggggcagagggaaaggttggcccacctgcccatcccgccaccctacctgctctgtcctcccacccaggtgaggctgcagacccagaccacctaccggggcatcgttgattgcatggtcaagatttaccgccatgagtccgtgagtggcccactcctttggggtccttcccctttcggggaggcatctggggctgttggtaccagcttccctctccagcagggttctgctcctggaggagagaagaccaagtctgggatccttggggggcctgggtggtagcttagcaccccagaggcgcagcctcagcccatccctgcctgtccccacttccctgtggcaggacttgggagcagtttccagccagaggctgccttgccaggggtggagaggacaaaggggaggccccacggtgcctactccgctgccactgtgtctctctgcagctcctgggcttcttcaagggaatgagcttccccattgccagcatagctgtggtcaactctgtcctgtttggggtctatagcaa

SEQ ID NO: 7531 - DNA, 2300 bp, Homo sapien
gagactctgtctccaaaaaaataaataaaaccacagaagatgacagcattgccttaagaactatgaaatgctacaggcaggaaaagtctctgctcacttgctgtgtgtggggcactgggccaggccctttcccctgtttcctgtgtcattctcatgcgtcctgagagtggaaataagtattagcagttgccatttacgtgccagccactttttaaagtgctttaatccttagaactcactaagaggtgagtatcacatctctgttttatgtcaaagactgacacctgggagtgtctgcggtggtggtggggaggctagaacccgggtctagtcaaggaggggcactgggagagagtccgggaggctgatggtggggaaggaaaggcattccaggtagtgggaactgcacgagcatggttaggaccccaggaaagacccccgctgtgtgagagcatagcaggtgggtggcaccatgggggaggccttgaaccccaggatgacagatatggggcaggcgtgttagacagtaagaacattttggaggttgtgagctagagattcacaagatgacgccatgcttaggtgggcttcccttcagcaaggctgtagggaagtgggaatgagggtctttctcaaactggggtgaggcggtgagattggaaaagagaatgagacccattctgaagtgagggaggaggcggcctccagcctttagagctgagaggcttagacatcaattagcccgactgctgtcctactttggcaaacaataatagaccccaaggcccacagaagaggttgctcaacatcactgagagagataatgtaaccgcccattgggttcaccttaccctctgcctagacagagccaatttgtcaagacaggggaattgcaataaggagagtttaattcatgcagagctggctgtacgagagacaggagggttttttttttgtttgtttgtttgttttttttttttgagacggagtctcgctctgttgcccaggctggagtatagtggcatgatcttggctcactgcaacagctgcctctcgggttcaagcgattctcctgcctcagcatcccaagtagctgggactacaggcgcccgtcatcacacccggctaatttttgtatttttggtagagatggggtttcactatgttggtcaggctggtctcgaactcctgacctcaggtggtccttccgcctcggcctcccaaagtgctgggattacaggcgtgagccactgcgcctggcctgtatcagttatagtttttgcaaaggcagtttcaggaataagaagcagaaccaggactgcagcccaagccaccacgagaggccagtctttggggatggtcttttaggatgatctttgggggtggcccaaggagccccaggcagctccagaggcaggaggtaggaggtcctgtttcccgaatctgtccacccgggagaaagcagcaggggtgggtgggttctgccttggccacagtgagaggagaagggagagaaggactgggccttgggcgtcccccatgggagactaggagctgcggggagatctggaggggagggtgcaggtgtcactgggccttgatgtttcccagggccgtttggtgatgggaagagggaactggagccccaggctgccgctgatgctgctggctgacatttccgttcattcagtcactcaggatttattgagagcccaccctgtgccacccgctgtgcacagaacacccagagatccctgtccagacagacaagttcttcccatcgtatgttggcgtgataactgtgatggagaaagagaggaagagccagcagtgcctccggctggggaggcggggcagacctcacccaggtggtgacatttgagccccagctggaggggtgccagggcaagagtgcccaggaagagggaagagccagtccacaggcctggagacagaaggctgactgaagaagagtctggaggctcgggtggctgcagcagagaaagcaagggggtgggtggcaggacgtgaggtcagaggagaatgggcggcaccctgtggctcacagatccttgaaagggttttggttttgactgagcagaatggtgccattgcagatcaacacgcactttaaataatcaaaacccctatctttcccctgggaaggaggaagccgaggaaggctgtgtttctgactcacacgggggagtcgggggagtcgtaaacaaccctgaagagaacagccaggcctggtgagtcactcctgggagtggctcctccccaccctgccacgcagcggc

SEQ ID NO: 7532 - DNA, 2300 bp, Homo sapien
atttatatatatatgtctaaatcagaaaaccaggacagacactctgtttttccagggagcagtgacatgagcccttactatcttacacaacagcctgggagaccttgaggttttcccaggctgggaggagacttggggccccaaagaggcaggtgtgaaaccacctaccctcagggccatgtcactgacatgtcctggtaatgcaacatgtgtgcatctgagatgtggaactcagggagaaaaataagtccatggggcaccttctggggccagaggaaccagaagttgtcccaagtgacagcagtgggcttggtgatcaggaacagagggcagtgggttcactttgccctggttccctgggattggaaagcagctctagctcctgacccagtccagccttctttggtatgtgaaccagctctgcctgccctcctatgatccacactgccccacagctgagcccatgacatcacatttgccttgccaatgtgacttaaggacttgaggaagctcagatgtgggctgcagggaagggtgtccagtgggggcaggcatctccttcctggttctcagctctgggaccctcagaccaggacacactgtatctccatggcctcttgacccagctggagtgaagcaggagcagaagagttcagtgttgttttgaatgcttactggatgcggggcttgtgctaggtcaggggatggagactgaggggagacgtggccctgccctcagaaagtgtctgttgtggtttaattggtgagttaaggaagaggggaaagagaaagaagcccaggagaacagcacatttaaaaccacagcactttgggaggccgaggcaggaggatcgcctgaggccaggagttcaagaccagcctggggaacatagtgagacgccatctgtaaaaaacccaaaaattagccaggtgtggtggcacacatctgtggtcctagccattcaggagcctgaggtgggaggatcgctggagcccaggagtgtgagctcacagtgagctctgatagcgccatcctgccactgtattccagcctggacaacagtgagactctgtctccaaaaaaataaataaaaccacagaagatgacagcattgccttaagaactatgaaatgctacaggcaggaaaagtctctgctcacttgctgtgtgtggggcactgggccaggccctttcccctgtttcctgtgtcattctcatgcgtcctgagagtggaaataagtattagcagttgccatttacgtgccagccactttttaaagtgctttaatccttagaactcactaagaggtgagtatcacatctctgttttatgtcaaagactgacacctgggagtgtctgcggtggtggtggggaggctagaacccgggtctagtcaaggaggggcactgggagagagtccgggaggctgatggtggggaaggaaaggcattccaggtagtgggaactgcacgagcatggttaggaccccaggaaagacccccgctgtgtgagagcatagcaggtgggtggcaccatgggggaggccttgaaccccaggatgacagatatggggcaggcgtgttagacagtaagaacattttggaggttgtgagctagagattcacaagatgacgccatgcttaggtgggcttcccttcagcaaggctgtagggaagtgggaatgagggtctttctcaaactggggtgaggcggtgagattggaaaagagaatgagacccattctgaagtgagggaggaggcggcctccagcctttagagctgagaggcttagacatcaattagcccgactgctgtcctactttggcaaacaataatagaccccaaggcccacagaagaggttgctcaacatcactgagagagataatgtaaccgcccattgggttcaccttaccctctgcctagacagagccaatttgtcaagacaggggaattgcaataaggagagtttaattcatgcagagctggctgtacgagagacaggagggttttttttttgtttgtttgtttgttttttttttttgagacggagtctcgctctgttgcccaggctggagtatagtggcatgatcttggctcactgcaacagctgcctctcgggttcaagcgattctcctgcctcagcatcccaagtagctgggactacaggcgcccgtcatcacacccggctaatttttgtatttttggtagagatggggtttcactatgttggtcaggctggtctcgaactcctgacctcaggtggtccttccgcctcggcctcccaaagtgctgggatt

SEQ ID NO: 7533 - DNA, 2300 bp, Homo sapien
gcacgtaaatggcaactgctaatacttatttccactctcaggacgcatgagaatgacacaggaaacaggggaaagggcctggcccagtgccccacacacagcaagtgagcagagacttttcctgcctgtagcatttcatagttcttaaggcaatgctgtcatcttctgtggttttatttatttttttggagacagagtctcactgttgtccaggctggaatacagtggcaggatggcgctatcagagctcactgtgagctcacactcctgggctccagcgatcctcccacctcaggctcctgaatggctaggaccacagatgtgtgccaccacacctggctaatttttgggttttttacagatggcgtctcactatgttccccaggctggtcttgaactcctggcctcaggcgatcctcctgcctcggcctcccaaagtgctgtggttttaaatgtgctgttctcctgggcttctttctctttcccctcttccttaactcaccaattaaaccacaacagacactttctgagggcagggccacgtctcccctcagtctccatcccctgacctagcacaagccccgcatccagtaagcattcaaaacaacactgaactcttctgctcctgcttcactccagctgggtcaagaggccatggagatacagtgtgtcctggtctgagggtcccagagctgagaaccaggaaggagatgcctgcccccactggacacccttccctgcagcccacatctgagcttcctcaagtccttaagtcacattggcaaggcaaatgtgatgtcatgggctcagctgtggggcagtgtggatcataggagggcaggcagagctggttcacataccaaagaaggctggactgggtcaggagctagagctgctttccaatcccagggaaccagggcaaagtgaacccactgccctctgttcctgatcaccaagcccactgctgtcacttgggacaacttctggttcctctggccccagaaggtgccccatggacttatttttctccctgagttccacatctcagatgcacacatgttgcattaccaggacatgtcagtgacatggccctgagggtaggtggtttcacacctgcctctttggggccccaagtctcctcccagcctgggaaaacctcaaggtctcccaggctgttgtgtaagatagtaagggctcatgtcactgctccctggaaaaacagagtgtctgtcctggttttctgatttagacatatatatataaattttttttttttttcagacggagtctcgccgtcgcccaggctagagtgcagtggtgtgatctcggctcactgcaggctccgccccctggggttcacaccattctcctgcctcagccttcccgcgtagctgggactacaggcgcccgccacctcgcccggctaattttttgtatttttagtagagacggggtttcatcgtgttagccaggatggtctggatctcctgacctcgtgatccgcccgcctcggcctcccaaagtgctgggattacaggcgtgagccaccgcgcccggccgacatagacatatattaataatcatttagagagtagggatagtccttgggggtcattcagttcaaccacctcattttacagatgaggaaaactgaggcccagaggagaagggacttgtccaggatgagtctgggccaggactcattctcctgaccactgccgagagcgccacggtacaggccgctgccagcgccgcatggatccctggcacgtgccaggaagtgtccatttcacaggcagggaactagcccgaagacccagcgtgggcaggccaacgcccctagcctgattctcgaatcttcgccaaaccctcttacaggccaacagtcggggcctttgtgaagggaaactcgctctgggtcactctggtggtggcggggctggtacgtgacgcggccaccccacgggcgtgatgagacacgcgaggctggcgtccgggcatgcgcgggccgcgcggggcggccctgggctcccattggctcccccgggtcgaagggggcggggcctcgggcgccgcgcttcctcccgccgtggcttccgcgtcgcttcccggtcagctgcgtccttagcgggagcccgagtgcgggcggtggcgggcttggcggcggggcaggattccaggcaggagccttgcctctcaggtggcgggctctgcgaccctgcgaggtgagagcacagcgacgtctggcccgggcctccgtccccggctgggcgtgcgccttgccctgcctgggcatccag

SEQ ID NO: 7534 - DNA, 2300 bp, Homo sapien
cagcctcaaaatcctaggctcaagggatcctgctgcctcagtctccccagtagctgagactacaggcagtcatgtgcacctggcttttttttttttttttctttcattttttgtagagacagggtcttgctgtgtttcccaggctggtctcgaactcctggcctctaggcaatcctcccaccatggccttcaaaagcgaatggatcccactcttttttgaaaaataaaatctaccatagtttgtttctgggatttgggaatgatgtgtgtgaattagagagatttcgagacctgaaatagagaaaagcaagttaagacatcaactggggcccagaaacagcactacagcggggacgacccacctctcagatgcctggtgagataaagaaaggtctggctgactccactgcccagtactgtgaagcagcagtgaagactcctccattggtttcataagctgcccagctttctagaacattttgacagacaattccctctttccacacggttctttcaggccaaatcaccccaccccaacccacccctggagatacagtcaggaagagactgatggggcagatcctggaggaggccgcactgccggaatcttcccctggcagagaaacagggctaagcaggcgccagggagcaagcctgggcttgccacatcaccaccttctgtgctgaaggtcagatgacacacagtcaccagttttccgagaagcacagggaggggtgcatgtcaggcccagccctgcctgctgataccacctcacagacgcaggcgaaatgtcttcaccagcttcttctcggttgccaagggggcctgctttcaaggggttgttttgtatggggtgtgggtgttaaccagggagaggttcctggcaggagttcctgtcagatgccattttccattctggttacttgaaccggggtcctttttcatcctctacctcaggggccagagcttcctcatcaccctgcaccccctagcaagggaggtgcccgctacacggtccaaagtcctctccagacattcgggccctgcccgccttgctggagggctcaggagttcaccaggtttgcttccagaagagccaggctggggatgcctgcttgcaaatgcagcaaataaaaaataaataaataaataaaaatcacctttctccccacccccacccaaatgtaaaatgagccgacagcctgtccctcggctatgtcagatactgctttccgcacaatatcttggttttacattattttgcaacggcctcttcccacttaatccatcctgaacacacttcttgaatgttctaccccggcagggatgcgcattctcaggaaacacgtcccctcgccaggcccctgggaagagtcaaaaccacgatgcctgcccctgaagcgcccgcgcggctccacggggctccatgttgtcacccactagctcctggacgctatcagcccgcagcagggtttcctggccagagaaaccgcctgttggggtgcggagcgttccacgtcccctcgcagcaccccgctggccttctgggccgccccgcccccaacccgcgcccgggcgctgacgtcatcggccgagcccgactcggaaccaccgcccgaaagtcacgcgcgcctcccggcgggacgtgccctctgcagagatccctccgccgccgcctggaattttccagatgtcctgccggcccttctttcgggcctcggctgggcgtggtgacctcaagcgaccccggcggctcccgtcgcccactcaagagggcgcccccgcccgccacgcccccagcccctctcggggaagcgcgtcccccgcccgacctcaacaacatccgggaagaaaaggggtcttcttcctcatggcattcgcctcccaaatgtcaccttgagcgctgtccgcgatcccaaaaagcactgttaaagagaagcggggatacactggggtccttgcgtgggggccgcctgggagaccatgcaccgcccgggagtctctccgggcagggtcggggagggacttttttgccggtggccgtggaggaatcgtcccgttgagcaatgaccccggtgacgcggctgagggctataaaagcaaaagttgtggcaagtccagccggagttagcgacagggagggatgcgcgcctgggtgtagttgtgggggaggaagtggctagctcagggcttcaggggacagacagggagagatgactgagttagatgagacgagggggcgggctgggggtgcgagaaggaagcttggcaaggagactaggtctagggggaccacagt

SEQ ID NO: 7535 - DNA, 2300 bp, Homo sapien
acttcaaaatagcgaagggaagccctacctcattattctacttttccagaattctcctggctattccaggctgcatgtttaccttaaccttccctgtgatgtcttcatgccgttgtcttcttatgcaagaataaggtacgtctttccatccactcacgtctatttaatttgactttgcattacacagaaagctggtcttggtctgtctacctcggcatctagttgtcctcactgccccctagccgaccccaccccatctgactgactaccccatcacagagtacttttatttacgttttgctctgcctaatggttacttgatactgtcacgccgacagtgtccagttcagtggtctttgcagttgaaatgctcccgtacacactgtcttgttaaaaatgccagtaagttcatacaaacccagcttgcacccaaggtcacattcagagagcgtagggctgggatgggttgttttccaagcttctgccactgtgtggctagctcttcccactgggaagttctgtgtacccggaatgtcggagtggagtcctgttctagtgtccagcacctgaccctgtgcccaacccctcaacagcctattcctgctgtccacagcctgctggaactttttacaaaatatgttgccatgctggaccctgggcactggacataagccccctggcagcctttttcatgtcacccaaaggggtaattgtcctactggtggtctgtaagatgagttagggtgacttgctaatagacattgtaaatcttaatatttatgtatgtattttattattaccggttttccatttatgatggtaatattgtttcttctaagaatatttatttttccttctaaatattgagataaaattcatgcttttgaaatgttctattcagtggcttttagtatatttgctatgttgtgcaaccatcgacactatccatttctagaactttttcgtcatcccaaacagacgctctgtattcataaaaaaataacttcctacctgtctctccccctagtctttggtaacctttgttatactggtaaactttgttgtgctctctgtctgtgtgaatttgcctattctaggggcctcatataagtgtaatcatacagtatttgtctttttgggtctgtctgatttcacttagcgggttttcagggttcattcatgttgcagcatataacagtactgcgttcctttttctggctgaataatattccactgtatggatagaccccattttgtttattcacacatcatttggacatttggattatttctggtttttggctattatgaacaatggtgctatgaacagttgcgtacaagtttttgtgtgaacatatgttttcaattctctcattatatacctaggagtagaattactgggtcatatggtaactgtatatttttgaggaactgccaaactattttcccacgtccatgcaccatttcacattcccaccagtaagtaagagggttccaatttctgcgcattcttgccaacactagttattatctgactttctggttataatcattctaatgagtgtgaagtagcctctggtgtcatttggatttgcatttctctgatgagtgatgctatcaagcacctttgctggtgctgttggccatatgtgtatgttccctggagaagtgtctgtgctgagccttggcccactttttaattaggcgtttgtctttttattactgagttgtaagagttctttatatattctggattctagacccttatcagatacatggtttgcaaatattttctcccattctgtgggttgtgttttcactttatcgataatgtccttagacatataataaatttgtattttaaaagtgacttgatttggctgtgcaaggtggctcacgcttgtaatcccagcactttgggagactgaggtgggtggatcatatgaggaggctaggagttcgaggtcagcctggccagcatagcgaaaacttgtctctactaaaaatacaaaaattagtcaggcatggtggtgcacgtctgtaataccagcttctcaggaggctgaggcacgaggatcacttgaacccaggaggaggaggttgcagtgagctgagatcatgccagggcaacagaatgagactttgtttaaaaaaaaaaaaaagtgacttgatttaagggaaaaaatgactggctatattcagtcagatatggcaaaaagtctcaaggtgttaatgtgaatgattaaggtcttggggggggtgtcccctatcagactacaggtgtttagaggcacagaaaa

SEQ ID NO: 7536 - DNA, 2300 bp, Homo sapien
aacctatacagcgtcactaatctctcccctcggagttgactgcctaaaaacaagccatggatacaggttccaaagacccgggggtgagggagcggagagggtgggtgtcaccaccccgtccagctccaagctttgtgtgccctggaactctccattttaggtcattgcttcagtttcttttctaaaaaattaggctgctgcaaggtcagcctgagaccacttctgccccgagaattctagactagtaagacctggtgacatacaaacgacgaagatattttacaataatgccatggcccttgatagctacacgaggtttgtgttctgattttaaattaatggatgacgtcgagactatatggaggaaatgacaaaggacaggagagaggtgggaaaggaagacctagactgaaaatggaagttgggcagcagctccacgaaagaaagaccagcccccaagtgcagtgacagcgcagagtagcgaccgagaagttcccaggccagctgccaccccgcccccatgccattccccagaacaggcacaggcgttagggcggggcgcgcgtgcgcagtcacgcgctgcgccaaccgccacagctccgggaaggcggccaggaccggctagagccggttagaaccagtggcgcccgcccacgagccagcgcctcacaaagggagggcggctcacggccctcgcgtatccctgcgcggcgctcgcgagccgcccctcccccggcgtttgtccctgacgcagccccaccggttgcgcagtccctccccgcccccgctctcccctccgcagcctgcagcccgagacttctgtaaaggactggggccccgcaactggcctctcctgccctcttaagcgcagcgccattttagcaacgcagaagcccggcgccgggaagcctcagctcgcctgaaggcaggtcccctctgacgcctccgggagcccaggtttcccagagtccttgggacgcagcgacgagttgtgctgctatcttagctgtccttataggctggccattccaggtggtggtatttagataaaaccactcaaactctgcagtttggtcttggggtttggaggaaagcttttatttttcttcctgctccggttcagaaggtctgaagctcatacctaaccaggcataacacagaatctgcaaaacaaaaacccctaaaaaagcagacccagagcagtgtaaacacttctgggtgtgtccctgactggctgcccaaggtctctgtgtcttcggagacaaagccattcgcttagttggtctactttaaaaggccacttgaactcgctttccatggcgatttgccttgtgagcactttcaggagagcctggaagctgaaaaacggtagaaaaatttccgtgcgggccgtggggggctggcggcaactggggggccgcagatcagagtgggccactggcagccaacggcccccggggctcaggcggggagcagctctgtggtgtgggattgaggcgttttccaagagtgggttttcacgtttctaagatttcccaagcagacagcccgtgctgctccgatttctcgaacaaaaaagcaaaacgtgtggctgtcttgggagcaagtcgcaggactgcaagcagttgggggagaaagtccgccattttgccacttctcaaccgtccctgcaaggctggggctcagttgcgtaatggaaagtaaagccctgaactatcacactttaatcttccttcaaaaggtggtaaactatacctactgtccctcaagagaacacaagaagtgctttaagaggtattttaaaagttccgggggttttgtgaggtgtttgatgacccgtttaaaatatgatttccatgtttcttttgtctaaagtttgcagctcaaatctttccacacgctagtaatttaagtatttctgcatgtgtagtttgcattcaagttccataagctgttaagaaaaatctagaaaagtaaaactagaacctatttttaaccgaagaactactttttgcctccctcacaaaggcggcggaaggtgatcgaattccggtgatgcgagttgttctccgtctataaatacgcctcgcccgagctgtgcggtaggcattgaggcagccagcgcaggggcttctgctgagggggcaggcggagcttgaggaaaccgcagataagtttttttctctttgaaagatagagattaatacaactacttaaaaaatatagtcaataggttactaagatattgcttagcgttaagtttttaacgtaattttaatagcttaagattttaagagaaa

SEQ ID NO: 7537 - DNA, 2300 bp, Homo sapien
gtagtgtgtggttctcttttggaatttttttcaggtgatttaataataatttaaaactactatagaaactgcagagcaaaggaagtggcttaatgatcctgaagggatttcttctgatggtagcttttgtattatcaagtaagattctattttcagttgtgtgtaagcaagtttttttttagtgtaggagaaatacttttccattgtttaactgcaaaacaagatgttaaggtatgcttcaaaaattttgtaaattgtttattttaaacttatctgtttgtaaattgtaactgattaagaattgtgatagttcagcttgaatgtctcttagagggtgggcttttgttgatgagggaggggaaactttttttttttctatagacttttttcagataacatcttctgagtcataaccagcctggcagtatgatggcctagatgcagagaaaacagctccttggtgaattgataagtaaaggcagaaaagattatatgtcatacctccattggggaataagcataaccctgagattcttactactgatgagaacattatctgcatatgccaaaaaattttaagcaaatgaaagctaccaatttaaagttacggaatctaccattttaaagttaattgcttgtcaagctataaccacaaaaataatgaattgatgagaaatacaatgaagaggcaatgtccatctcaaaatactgcttttacaaaagcagaataaaagcgaaaagaaatgaaaatgttacactacattaatcctggaataaaagaagccgaaataaatgagagatgagttgggatcaagtggattgaggaggctgtgctgtgtgccaatgtttcgtttgcctcagacaggtatctcttcgttatcagaagagttgcttcatttcatctgggagcagaaaacagcaggcagctgttaacagataagtttaacttgcatctgcagtattgcatgttagggataagtgcttatttttaagagctgtggagttcttaaatatcaaccatggcactttctcctgaccccttccctaggggatttcaggattgagaaatttttccatcgagcctttttaaaattgtaggacttgttcctgtgggcttcagtgatgggatagtacacttcactcagaggcatttgcatctttaaataatttcttaaaagcctctaaagtgatcagtgccttgatgccaactaaggaaatttgtttagcattgaatctctgaaggctctatgaaaggaatagcatgatgtgctgttagaatcagatgttactgctaaaatttacatgttgtgatgtaaattgtgtagaaaaccattaaatcattcaaaataataaactatttttattagagaatgtatacttttagaaagctgtctccttatttaaataaaatagtgtttgtctgtagttcagtgttggggcaatcttgggggggattcttctctaatctttcagaaactttgtctgcgaacactctttaatggaccagatcaggatttgagcggaagaacgaatgtaactttaaggcaggaaagacaaattttattcttcataaagtgatgagcatataataattccaggcacatggcaatagaggccctctaaataaggaataaataacctcttagacaggtgggagattatgatcagagtaaaaggtaattacacattttatttccagaaagtcaggggtctataaattgacagtgattagagtaatactttttcacatttccaaagtttgcatgttaactttaaatgcttacaatcttagagtggtaggcaatgttttacactattgaccttatatagggaagggagggggtgcctgtggggttttaaagaattttcctttgcagaggcatttcatccttcatgaagccattcaggattttgaattgcatatgagtgcttggctcttccttctgttctagtgagtgtatgagaccttgcagtgagtttatcagcatactcaaaatttttttcctggaatttggagggatgggaggagggggtggggcttacttgttgtagctttttttttttttacagacttcacagagaatgcagttgtcttgacttcaggtctgtctgttctgttggcaagtaaatgcagtactgttctgatcccgctgctattagaatgcattgtgaaacgactggagtatgattaaaagttgtgttccccaatgcttggagtagtgattgttgaaggaaaaaatccagctgagtgataaaggctgagtgttgaggaaatttctgcagttttaagcagtcgtatt

SEQ ID NO: 7538 - DNA, 2300 bp, Homo sapien
tggccaagtctgttatgttcacctgaaaaagtcttagcagagaatttttgcattcccacccaaaagccctctcagccactcaaatgcctatcttctccagtctacaagttacatgttcccacccagcattacagttcttgaacatgttatttctccacttactggtttaagttggttttagtcactggataagtattataatagagctacttagctgtggttttaatacccttctgttaacaatttgcaggcaaattaatggccttttctaacatagttcaacccaccaaagacctcgacaccatcgttaccttgaaaccgattatggatcatgcccacaaggatccaagctactggctgcatcgaggtgaggggtgaagggtctgtgctagatcaaaaggcacggggtggcgatgtggcagagaagttgcttgtggggagaccttgcttttaacaggcttctggaaaagctagggaaaagtggttgcccgctttccccctttccctccccttcaagcaccgcttgagatttgggctttattattaagagctgctataaaaacagcttgcttaaatgttaagagaagcccaggggtacttcaagcattccttcggatgcttcactccagaaagagggagttgaggcaagtcctcattactaataaaaatcaggtgaggctgacacttctcttgaccttaggataatagcgctttgttgtctctcctgccacaggaaggctccatggttgtcctactttaagccttcggtgcctttagtgaggggtacctgaaaaatcttaaaaaaaggcttagcgcccacctcacccctccacccccacgccaacacagtttgctcacatgccagttactccagcataaagctgaaatctattcaatactattgtcccataactgatctgactttgtatgtaaatacagaaaaagcttgttcacctgttttcctcattttgtccactggtgaattcaactggaagctccttctatagtctgaagaataccatctgaaagaactagtggttcccaatccccacatttaaaatggaatgtttggtttatttaaagtaaataggctattttttcttactgggtctggcttctctggcccttcgcatacgtgtgtctgctgagtgttcctgcatgtaagaattaagaccaagggaggggagagagaaacccacacataaacaatgcactaaagatcactgaactgtttaaacatttccacttgccagtttaatttcttgaagactgttgcttgtttggaatgtttcttgtcactgattttaaggttgcatctggaaaagactaaaggcttcagtcccctcccaccaccagaaatgaacaaaaagcattttacctaaaaatacaccagcaaaatgtactcagcttcaatcacaaatacgactgcttaaaactgcagaaatttcctcaacactcagcctttatcactcagctggattttttccttcaacaatcactactccaagcattggggaacacaacttttaatcatactccagtcgtttcacaatgcattctaatagcagcgggatcagaacagtactgcatttacttgccaacagaacagacagacctgaagtcaagacaactgcattctctgtgaagtctgtaaaaaaaaaaaaagctacaacaagtaagccccaccccctcctcccatccctccaaattccaggaaaaaaattttgagtatgctgataaactcactgcaaggtctcatacactcactagaacagaaggaagagccaagcactcatatgcaattcaaaatcctgaatggcttcatgaaggatgaaatgcctctgcaaaggaaaattctttaaaaccccacaggcaccccctcccttccctatataaggtcaatagtgtaaaacattgcctaccactctaagattgtaagcatttaaagttaacatgcaaactttggaaatgtgaaaaagtattactctaatcactgtcaatttatagacccctgactttctggaaataaaatgtgtaattaccttttactctgatcataatctcccacctgtctaagaggttatttattccttatttagagggcctctattgccatgtgcctggaattattatatgctcatcactttatgaagaataaaatttgtctttcctgccttaaagttacattcgttcttccgctcaaatcctgatctggtccattaaagagtgttcgcagacaaagtttctgaaagattagagaagaatcccccccaagattgccccaacactgaactacagac

SEQ ID NO: 7539 - DNA, 2300 bp, Homo sapien
aaaaacttaaaaggatcggccaggcttggtggctcacacctgtaatcccagcactttcagaggcccaggcgggtggatcacacgaggtcaggagtttgagaccagcctggccaatatggtaaaaccacgtctctaactgaaaatacaaaaattagccaggcgtggtggtgtgcacctgtagtcccagctacagggagggtgaagcaggacaaccacttggaccccagaagtggaggttgcagtttgcagagatcatgccactacactccagcctgggggacaaagtgagactgtctcaaaaaaacaaaaaagagagctttccaatgacacacacaccccgccccatttctcccccagcccagctcacagccaattactaaatagtggaaaggaggctacttaaaaagaagttccctattttcctgtgggggttactgggctttttagtaggccactcacccactaccctcgcaccaatcccccaaagtccgtaccctacttgaagattatgctgtaattatgggtgctgtgtttatagaccacagatttaacagaacaagcccacagaacacccatcttttttccccaatcaagatttttttattcacaaaagaaccacaacaatttagagcttctccatttttattacacaaaattgttaagttttcagcagtagggcttctcaaaacaccagctgcaggctattacctgaaaaagacaaggcagttatattaggttctcgtgtaaatatgaatatacaatcaagtcaagctcctgacaaattatacatcaaggatgtatatagttcaaagatattgtgctgttacctcccacctccccaaaactccaagaactagcacctgcagagaaaaggagaaatacagaaagagtcctgaagacagattagtagtcaaagcaaagacgccgcagggatttgaaccccgtcctggaaaccaggagtgccaaccaccagcatcttttgctttttttttttttaagctagaaaaaggccaaaaagcaaaacctgagaaaacaatacgtgttgttttctcaggaaaagaaaaaccttcatgaccctactgaagagcattggagatcagcttccgctaagatgctagcttggccaagtctgttatgttcacctgaaaaagtcttagcagagaatttttgcattcccacccaaaagccctctcagccactcaaatgcctatcttctccagtctacaagttacatgttcccacccagcattacagttcttgaacatgttatttctccacttactggtttaagttggttttagtcactggataagtattataatagagctacttagctgtggttttaatacccttctgttaacaatttgcaggcaaattaatggccttttctaacatagttcaacccaccaaagacctcgacaccatcgttaccttgaaaccgattatggatcatgcccacaaggatccaagctactggctgcatcgaggtgaggggtgaagggtctgtgctagatcaaaaggcacggggtggcgatgtggcagagaagttgcttgtggggagaccttgcttttaacaggcttctggaaaagctagggaaaagtggttgcccgctttccccctttccctccccttcaagcaccgcttgagatttgggctttattattaagagctgctataaaaacagcttgcttaaatgttaagagaagcccaggggtacttcaagcattccttcggatgcttcactccagaaagagggagttgaggcaagtcctcattactaataaaaatcaggtgaggctgacacttctcttgaccttaggataatagcgctttgttgtctctcctgccacaggaaggctccatggttgtcctactttaagccttcggtgcctttagtgaggggtacctgaaaaatcttaaaaaaaggcttagcgcccacctcacccctccacccccacgccaacacagtttgctcacatgccagttactccagcataaagctgaaatctattcaatactattgtcccataactgatctgactttgtatgtaaatacagaaaaagcttgttcacctgttttcctcattttgtccactggtgaattcaactggaagctccttctatagtctgaagaataccatctgaaagaactagtggttcccaatccccacatttaaaatggaatgtttggtttatttaaagtaaataggctattttttcttactgggtctggcttctctggcccttcgcatacgtgtgtctgctgagtgttcctgcatgtaagaattaagaccaaggg

SEQ ID NO: 7540 - DNA, 2300 bp, Homo sapien
tttgcaagcagtatgcttggtaaaagtcatcgccattctccattctctattaaccagggacatgatgcactgtgcaaagccacagggacctctgcccgagaaagcctgggtattgtctccccgactgagacagcctgatatggccttgtgggaagggaaagaccttaccatcccccagcccgacacccgtaaagggtctgtgctgagaattagtaaaagaggaagatctctttgcggttgagataagaggaaggcctctgtttcccgtatgtccctgggaatggaatgtcttggtgtaaagcccaccagtcattctattctgagataggagaaaactgccctatggctggaggtgagatatgctagcggtgatactgctctgttactctttgctacactgagatgtttgggtaaagagaaacataaatccagcctacgtgcacatccgggcacagtaccttcccttgaacttatttatgatgcagattcctttactcacatgttttcctgctgaccttcttcccaccatcaccctgttctgccgcagtccccttgcagagatagtgaaaatagtaatcagtaaatactgagggaactgagagaccagcgccggtgcaggtcctcgtatactgagtgtgccggtcccctgggcccactgttctttctctatactttgtgtcttatttcttttctcagtctcttgtctccacctgacgagaaatacccacaggtgtggaggggcaggcccccttcaaacatgttggtcaggctgacctggaactcctgacctcaggtgatcctccagcctcggcctcccaaagtgctgagattacaagcgtgaaccactgtgcctggccctcaccccagtttatagatgggggacctaacgcacccaaagggaactgtgtgagttctcacatccaatgaggggctgaaccgtgattgaaacccagcaccgtctcactgtggcatctctgcccttgagttatctcccaaaggcatcccaaccagacttttcataaccagtcccagaatctcaccagtgctccatagctgtggttgaggcactgtccccaagcctgggtcctgagaccctaccagcagaagaaccactgcctgtccagcccctcctacacagctcaggggctggatccccaccagtgtgatgtgctgattgagctaacaccactccatggctgtctacacaggcactgagagatgcaatccgttggcttgagagccgggcagctgagcccaggagagcagggtcccctcccagccctttggcctcttccagacctgcccagttgctccttctccctccctcctttcctggggtcacttcttcttccctcctcagtctctccttcctccattccctgggtgcccgcccctgccccggggttctggacctccttggaaccttggattcactctctgcctctcacccacgctctttctctggggcgtctcctcgtgcttctctcatggtcacttcaccaggaccgactcctccccggagcctggaggcacccacttgctggtgggagagagtgtctggcgtggggccagtctccctctctgggtctctgcctcactcctcactgcaccctctcatgcctgtcagtctttctacctctccccctttttgcctcggtttccccatccctctgtcccttcttaagctctcatccttacagtacgctagaaggcaggctctattatcctttaggatttaggcctctttagataaaagggctcacaggcttggagggttttaagtgacttacccggcggcggagtactgatcttagtaccgcccgccgccccggactgccccgcccctccctagcccccccatccccgcccctccctagcccccccatccccgcccctccctagcccccccatccccgcccctctcccgcccctcccttgtccccgccccttcccgccccaactcaggttctgccccaccccgccccaattcacgtcctgctccgccccgacgtaggccccgccctggcccccgggccccgcccccgtctgacgcaggccccgccccctctccgccccgccccggctcgggcggccggaggacccggagctaaggcgcccgaacccgcggcggcggtggggacgatgtggttctttgcccgggacccggtccgggactttccgttcgagctcatcccggagcccccagagggcggcctgcccgggccctgggccctgcaccgcggccgcaagaaggtgagtgcggccgagctccgtaggccgcggtcgacctgggccttgcc

SEQ ID NO: 7541 - DNA, 2300 bp, Homo sapien
aaaaaactagccaggcatggtggcgcatacctgtaatcccagctactccagaggctgaggcgggagaatagcttgaacctgggaggcaggaggttgcagtgagccgagatcgcaccattgcactccagcctgggcaacaagagcaaaactcagtcttaaaaaaaaagaaaagaaaaatccagtgcaggaaggaaagtactggagtgggtattcagggatgggctctctgaagtgtgacattggagctggggcctgaaggacatgactgtgggagccagagggatggtacctggagtaagagttccaggcagaggcgacagcacgtggagagatactgaggagggagccctctgctttgcctctgaaccttggtttccacatgtgtatagtgaggagcatctgggtgcactggcctgcagggttgctgtagggaggagggaggaaggctctgctctatgcaatgcccggccccagccgtgtgtggggaagacagcgggggctgagaatcagaatcaggagcaggggaggagagtggcagacactccacagaccctgacccagcagaggtcatggaatcttgactcagatgctgtggggcggggagggcctttggagggtggaaacctggaaggagaagctgctggaaacgctgagaccccgttgcctcctgggcagtgtcggggcagcaggaactttgttacgtggagttctcctcgtacggctggctctgccaagctacccttctccttaaagtgtaccccataggaaatagggtttcgggagcctccaggagaacatgggagggcagtgcccaggggcccctcttcccattgttaggtggagtggtggggagaacccagctgctactctcttgatgtatgaccttggatgtgatttagcctctctgggccttggccccgctgaaccatgtgatcagagcaccaagccggcctcccacgctggtctgagctgctcaagggccatctaggtcctctttgtcccaagccagaggtcgcctctccccggccaagccgcggctatgggggtggtggtacaacagagagcacagggactttggaacacaacactgggtcatgacccctgcctggccactcttggctgctgaccttgaccctctgtctcctcctttgtgaatggggggagtgacagcatcttttgaagggtacagcacaggagaggtgccaaaccagtgagtcagaccctcctctgaccgcttcttagctgtgtgactttggacaagctccttgccctctctgtgcctcagcttccttgttggtaaaatgtggattacattagcacctacctggtaaagttgtgaagaggactgagataatctgtgtaaaggttttagcacataatctgtgctccagaaatatgaattgggggtattatggcctcaaaggggggttaggaggactaaaggagaccgttgagcttacaggctggtccattttggctcagtgggaggatgaggtctgggagtaaagtgtacctaatccttgccttcccacggcctaccaggaacttcctgcccaatccagccagggcagggaaaccaagtaagccccttcacctctttgatcttcagtttcctcctctgtgctcacatcctgggtggcgagcagtagaggcaacactgataaagggcctgatgcccttagtgatgcctctgctgtccctagtggctgctctcccagcaacaggtcaggtagccgcaatggcagcaacagtccctaacccaccgagcatctgccgtgtgccagcctgttctgcagcttttatgtgcattttctggttgaatcccagaactatcccgtagatggtagagctgttatcccattttacatggcaggtaagtgggacagttgggctttgaacccaggcagccaggctccagagcccataaggcccataagcatcacttctccttgtcctcacccatggctgggtttgggctgcaaccaggctgatctcttccccgggtcccgtcctcactcccccagatcaaagagccagccgagaagcaaaaattcttccaggagctgagcaagagcctggacgcattccctgaggatttctgtcggcacaaggtgctgccccagctgctgaccgccttcgagttcggcaatgctggggccgttgtcctcacgcccctcttcaaggtgagtggaactgtggggtccagaaggctggctgggtgcacaggaactgccaaagagaaggccctggggtagggcaggctgtttagggcagacccaagcccatatgagcaggagctt

SEQ ID NO: 7542 - DNA, 2300 bp, Homo sapien
tccacaggccacagctctgaccagagactgggcattgccagacagtgaggaggaaggagaggtgtttatggatcagggacgggagtcctagggatgataagccctgggctccagctgggaactatcagagtctgggggtgtcaggcaagctcggaggactgagagggaggccaccaagccctgtgagagagaaggtggaggtgaggacttgagaacagtggaaagaaggcagcctctgagggccccagggtggagcagatctgagtgatgaaaatccccttgggaccctgagagtgaggggaaggtcacggaagccgagagatccaggaatgtgaggtcagaggctgacctggttgtccacgcggatgttcgaaactcccaggatggagagaaaaacagagcaggaggaatgaggaaggtgggtgctgacagccacaggaggactgaggctgcaggaggccggcggcacctcagaggccgagctcaggcttggaggggtctgggatgtgggcaacaactggctccatcagagaggcctcaggaaagtgtgtcccgggggagggtcaagttcctttactgcatgagcagaagaaagtgggaagaacaaggatagggagtttatccccagaggaaaaagggagccatggcaggtgagggaagggtgggagcagcagtgaaagcggctggggcagggagagagggcgggggaggctggggaggctctttagcatcagacctggcctagggaccctggcagcacctgacctggtcgtcagggcactgtgtgccacccagaagcagggtgaggcctgtgcttctgagtgctgctggcctcagctctggtgctccaggccatgcgcagaagtgagaaaacagtagtagaaacccaagaccacccagcctggtcctctgacaccccctatgccctgcagatgtggacgagtgtgaggctggggacgtgtgtgacaatggcatctgcagcaacacgccaggatctttccagtgtcagtgcctctctggctaccatctgtccagggaccggagccactgcgagggtgagggatcttagagctggggtgctgacctgtccctccctaccccaggacccccaccccccagggtccagtcctaatccagatctcagttggggcataggggcgtgggactgacccagggctctgggagaaagctttggctgcctcaggctggggttggtgatcagcccctgagattctccaccccttccatcccctacagacattgatgagtgtgacttccctgcagcctgcattgggggtgactgcatcaataccaatggctcctacagatgtctttgcccccaggggcatcggctggtgggtggcaggaaatgccaaggtatgggggactggctgagggttcctgagggatgtggcagggagcagtaattccctagacacactgtggcctttctccatccatccatccacccatccaaccatccttcatccatccatccatccatctatccatccatccatccatccatccatccatccatccatccatccttctatccatccatccttccattcatccttccactcacccacccatccatctgctcagccttccagtctttcacctagaataacaatgatcacagtaaacatgacagttagtgctatcgtggtgcttactatgtgccaggcactctgttaagctctttacagatattaatgtattggtcttccccatcaactcacccatacacatgcattcatccaacaaaagtttaggctgagtgcagtggctcaggctgggggcggtggctcatgcctgtaatcccagcactttgggaggctgaggcgggcggatcatgaggttaggagttcaagaccagcctggccaatatggtgaaaccccatctctactaaaaatacaaaaattagccgggcgtgatggcgcacgcctgtagtcccagctactcgggaggctgaggcagaagaatcgtttgaagatgggaagcggaggttgcagtgagccgagatcacgccactgtactccagcctgggcagagagtgagattccatctcaaaaaaaaaaaaaaaaaaaaaaaaagtttattgagcacctactattttccaggttctgtgctttgtactaggtaatcaacaatcacccagggctcccagctaggggaggccaacatgtaaactgattctgacagttcagggtcctgggtgccaagaaaggtatagactaatgattaattgcaatggggaggtgaatgttgaactggactgaaacgtaagtaggag

SEQ ID NO: 7543 - DNA, 2300 bp, Homo sapien
ggggcggggcggggtagcggtggtgattggcgtctgggggcggggccttccgggagtagaggctgccctctcaaccccgcgttccagggaagagacccacacccccgcgaggtgcgcggtccgccttccggtggggcagagtccgaggctaggtctttccgccgcagacgtgaacgagtgcgccgagggcagcccctgctcgcctggctggtgcgagaacctcccgggctccttccgctgcacctgtgcccagggctacgcgcccgcgcccgacggccgcagttgcttgggtgagcgccagcacccccgccccgggcctccgccgccccctacgcgctgaagccggggagcgggtcacgctgtctgtaaacagtgggtggaaggtggctcattcatccccaggtgactctgctcactcattttctcaacgaactttgccaaggaaggcaccactagaatttccacgtaggaagggtctcggggtagagctcgaagctgcgtttgcaaagcatgttacttaaatttgaaggaaaaaagatatcaaagaatgagggcagacgatagtactcccccctgcactcctgtttattatacgccaagaggcggggctgggggctgggactcattgaaaactggagaaggaaagacagactgtagcatgcagtgctgggcctggatggagctgggctgcttcctggagacacagcgggatgggaggaaggaggcctgggtcatcttaaagaatcactaggaattgggcaagaaaggaggagaggaacagcatggcaggcacaggggttggcactggcagatcagaggtgagacagagggtggggtgttggggaactgtaaggaatgatcaggctatgggggctgaggctggccggggagggacaggtccccatcccttggagggccccctaagtcctgcctgggaggttgtgcttcacccagaaggtgttagagggcacctgcagcattttaagtgtaagagtgacaagatttgccatttgttttagaacgttccctgctgctgattgtggagggaggtctgttgcagagacttagggcggagacagtggtggacaggatgagtggtgggctcaggatggccatgagacgatgatattggagaaatattagacctcctgggttttttaactggatgtcaagtgaaagcgagggtgataacgacccctccccgtttccagtttgggtgagtgagggggtagtgctgctcactgggaatgggtcctcatgcgtgggcatgtttgggagggaaaatgctgagctccacattggacaaattgaatggattgtgcctgtgagcctctcagcaggagatgccagcatacccacctggaatgatggaccatggaccgggggagctatggagtcttgggtgggcctgcttagccaacccaaggtgggttgggtaagcagagcatctagcagagccttgtggacactgacagttcaggggcaggctgcggaaggcgttggaggagatggtgggggagggatggcaggggcgcctgaggggcaccatctgggaagctggggaggacatatttccagggaaggaggaggatgagccaagtgcagtagagaggttcttgtaaaataataactggtgagacaataagtcttaggacaagacttaggggtctgccccctaatcctacatggaaatcctagtgatgccttccttggcaagaaggtccctggtagccttggcagggtagcttttgggatatgatagggacagaggccagagatatgtgggcagaaagtgaagaagaacaagacctggggactcttgctcttccaaagtggggctttggtataggctgaggaggtgatgccaggagagtggaccaggagacgagggcagcagggtcaggagaggagggaggagagccagcggaagggacatctcttgctgtaacaggagcaggaggggaatggatgtagataacgatgttcagtgggttaagggggattacctttaattctctcaatacacagtgaagggcctgggttgagtaggggactcaggagaacagtggcggtttggaagtatcccagggcatggggctgcctaggggctttatggaagtcaaagctttagaggagtcagagagggaggtgccagccacacgaggctctgttggactgaggctgaagcctgtgggtatgttccagcatgctcagcttggtggctgctccagtcccactccgcacccaggatccacaggccacagctctgaccagagactgggcattgccagacagtgagg

SEQ ID NO: 7544 - DNA, 2300 bp, Homo sapien
agataacgacgcttcctttgacttttcttggcctacccgttcttctcagatgtgaacgagtgcgaggcagagccctgtggcccggggaggggcatctgcatgaacaccggcggctcctacaattgccactgcaaccgcggctaccgcctgcacgtgggcgccggggggcgctcgtgcgtgggtgagcgccgccagggcggaggcggccctgggtgggacgggctctcctccagaccgccgtgtaatccctccccttgcccgccgcctcctacacccccttcgtggccccttcctcccgcacagacctgaacgaatgcgccaagccccacctgtgcggcgacggcggcttctgcatcaactttcccggtcactacaagtgcaactgctaccccggctaccggctcaaagcctcccggcctcctgtgtgcgaaggtgaggggaccccattcagaccaaagaaggagctccttagctgtctctccacctggggtggggctggggtgcctgcatttttttttttttcccccgagacggagtctcactctgtcgcccaggctggagtgcggtggtgagatcttggctcactgcaacctccgcctcccgggttcaagcgattctcctgcctcagcctcccgagtagctgggattacgggcgcctgccaccacgcctaatttttgtatttttagtagagacggggtttcgccatgttggccaggctggtctcgaactcctgacctcaggtgatccacccgcctcggcctcccaaagtgctgggattacagccgtgtgccaccgcacccggcctgtatgctcggctctgggcctctcagaggttggggtccgggagcctcgttgatctgtgtgggaggaagtccctgctgtggacgctgggagccgggccacccgcgttgtccccagatgggtcctcttccttctccctcccgtgcagacatcgacgagtgccgggacccaagctcttgcccggatggcaaatgcgagaacaagcccgggagcttcaagtgcatcgcctgtcagcctggctaccgcagccaggggggcggggcctgtcgcggtgagggcggggcccggagccgagtgggtggggccgtcaggtgcctcccccagtctggctccgctgggggcggggcggggtagcggtggtgattggcgtctgggggcggggccttccgggagtagaggctgccctctcaaccccgcgttccagggaagagacccacacccccgcgaggtgcgcggtccgccttccggtggggcagagtccgaggctaggtctttccgccgcagacgtgaacgagtgcgccgagggcagcccctgctcgcctggctggtgcgagaacctcccgggctccttccgctgcacctgtgcccagggctacgcgcccgcgcccgacggccgcagttgcttgggtgagcgccagcacccccgccccgggcctccgccgccccctacgcgctgaagccggggagcgggtcacgctgtctgtaaacagtgggtggaaggtggctcattcatccccaggtgactctgctcactcattttctcaacgaactttgccaaggaaggcaccactagaatttccacgtaggaagggtctcggggtagagctcgaagctgcgtttgcaaagcatgttacttaaatttgaaggaaaaaagatatcaaagaatgagggcagacgatagtactcccccctgcactcctgtttattatacgccaagaggcggggctgggggctgggactcattgaaaactggagaaggaaagacagactgtagcatgcagtgctgggcctggatggagctgggctgcttcctggagacacagcgggatgggaggaaggaggcctgggtcatcttaaagaatcactaggaattgggcaagaaaggaggagaggaacagcatggcaggcacaggggttggcactggcagatcagaggtgagacagagggtggggtgttggggaactgtaaggaatgatcaggctatgggggctgaggctggccggggagggacaggtccccatcccttggagggccccctaagtcctgcctgggaggttgtgcttcacccagaaggtgttagagggcacctgcagcattttaagtgtaagagtgacaagatttgccatttgttttagaacgttccctgctgctgattgtggagggaggtctgttgcagagacttagggcggagacagtggtggacaggatgagtggtgggctcaggatggccatgagacgatgatattggagaaatattagacctcctgggttttttaa

SEQ ID NO: 7545 - DNA, 2300 bp, Homo sapien
agagaacagcctgcaaagcccactggccaggtgagtttggggcagagcagagttcactgttatggcccaggctgcatggcaggagtgagggggaaggggtgtgggaaatgaaactggtgagcagtgaggatccaaaggaggggagaggctggaggcagggagtcctgggcttggtgacaaagagagtgaggggggtggttcctggatctgactgcctgtgcacagctttggcactagttaggattcccaggaaaccagctcctgctagtcttgggagggggtaatcaacccttctggaatagggggtcgggtccctggggcaagggcttatggagtcactgggctagaggacactggtgtgaccgaggctatagagtttaaggtattgaggcgactggggagaaaggagttttagtcccttgggtgggagtactgggacgactgaggggccctgaggggatgtggtttggtttgaggtgagtggggtcagggtcttggagtgaaccgggaatggaagtatccgggcctgggtgtggggtgatacggctgtcaggggcctggagtcctagtttggagctttctggggtcttgatattggggttatctaaaagagagaaataggacatcctggagttggagtatgggcgtacaggaacctgaggtcatggtgtgactggggtgttgaggtctgccctggggatatggcagaaggtgagcgctccctgctctgccgcttgacctggccatgcccgcagagactgatgagtgccgactgaaccagaacatctgtggccacggagagtgcgtgccgggcccccctgactactcctgccactgcaaccccggctaccggtcacatccccagcaccgctactgcgtgggtgagcgcagggcaggcggcgggcatgcaggtgggtggggggggaccccagataacgacgcttcctttgacttttcttggcctacccgttcttctcagatgtgaacgagtgcgaggcagagccctgtggcccggggaggggcatctgcatgaacaccggcggctcctacaattgccactgcaaccgcggctaccgcctgcacgtgggcgccggggggcgctcgtgcgtgggtgagcgccgccagggcggaggcggccctgggtgggacgggctctcctccagaccgccgtgtaatccctccccttgcccgccgcctcctacacccccttcgtggccccttcctcccgcacagacctgaacgaatgcgccaagccccacctgtgcggcgacggcggcttctgcatcaactttcccggtcactacaagtgcaactgctaccccggctaccggctcaaagcctcccggcctcctgtgtgcgaaggtgaggggaccccattcagaccaaagaaggagctccttagctgtctctccacctggggtggggctggggtgcctgcatttttttttttttcccccgagacggagtctcactctgtcgcccaggctggagtgcggtggtgagatcttggctcactgcaacctccgcctcccgggttcaagcgattctcctgcctcagcctcccgagtagctgggattacgggcgcctgccaccacgcctaatttttgtatttttagtagagacggggtttcgccatgttggccaggctggtctcgaactcctgacctcaggtgatccacccgcctcggcctcccaaagtgctgggattacagccgtgtgccaccgcacccggcctgtatgctcggctctgggcctctcagaggttggggtccgggagcctcgttgatctgtgtgggaggaagtccctgctgtggacgctgggagccgggccacccgcgttgtccccagatgggtcctcttccttctccctcccgtgcagacatcgacgagtgccgggacccaagctcttgcccggatggcaaatgcgagaacaagcccgggagcttcaagtgcatcgcctgtcagcctggctaccgcagccaggggggcggggcctgtcgcggtgagggcggggcccggagccgagtgggtggggccgtcaggtgcctcccccagtctggctccgctgggggcggggcggggtagcggtggtgattggcgtctgggggcggggccttccgggagtagaggctgccctctcaaccccgcgttccagggaagagacccacacccccgcgaggtgcgcggtccgccttccggtggggcagagtccgaggctaggtctttccgccgcagacgtgaacgagtgcgccgagggcagcccctgctcgcctggctggtgcgagaacctcccgggctc

SEQ ID NO: 7546 - DNA, 2300 bp, Homo sapien
accatgcgctggttcctgccggacttgcctccttcccgcagcgccgtagagatcgctcccactcaggtcacaggtaaggcccgcccagcaaagccacccctgcctaggccacgcccccactttagttttctctcctccctcccgcccccaggcattccctagcgctaataggctagcgtgtatccagggctgggcactggggaagcctggtgagcaccagagatcccactgccctaaacgatccaggtagcatggtggttagcccattctgagggatttcattcattcaacaaatacttattagtgttacaggtcttttagaatttgtctagcaggtttcccagtttttttttgttttttgttttttgttttttttgagacggagtcttgctctgtcgccaggcgggagtgcagtggcgcaatctcggctcaccgcagcctccgcctcccgggttcaagcgattctcctgcctcagcctcccgagtagctgggattacaggcatgcgccaccacgtccagctaatttttttttttttagtagagacggggtttcaccatgttggccagggtggtctcgatctcttgacctcgtgatgcgcccgtgtcggccttccaaagtgctgggattacaggcatgaaccactgttcccagcccataaccatctttcaaaatctgttcagaaagccttctatcattgccaccctacttattatcacaaccctcagaactccttccttctactctgatttttttatttttatttttattttttattttttgagattgagacggagtctcgctctgtcgcccaggctggagtgcagtggcgcgatctcggctcactgcaagctccacctcccgggttcacgccattctcctgcctcagcctcctgagtagctgggactacaggcgcccaccaccacacccggctaatttttttgtgtatttttagtagacatggggtttcaccatgttaatcaggatggtcttgatctcctgaccttgtgatccgcccgacttggcctcccaaagtgctgggattacaggtgtgagccaccacgcctggccctgatttagtttttcatagcatttataagacataggagattctgcttattgatcggcttgttgcctgtctgctctgcgaggacaggaaatttttgtctgtttttgttcatgcaatatccctagcacctcaacagtgcctggcacatagtaggtgctcaagaaatatttgggttcctttctttctttttatttgtttagtttgttttttgagacagggtctcaccttgtgacctaggctggagtcagtggcaggatcatggctcactacagccttgacctcctgggctcaagtgatcttccagccttggcctcccaaagtgccaggattacaggtgtgcgccaccatgctcttttttttttttttttttttcccggcctggggagttttcctgtgaaaactgggaaactgtggcagggtgcagtggctcacggctgtaatctcagcactttgggaggctgaggtgggtggatcacgaggtcaagagattgagaccatcctggccaacatagtgaaacccagtctctactaaaaatccaaaaaaaaaaaaaaaaaaaaaaaagattagctgggcgtggtggtgcatgcctgtagtcccagctactcaggagaatcacttgaacctgggagatagaggttgcagtgagccaagatcgtgccactgcactccggcctggggacagagtgagactccatctcaaaaaaaaagaaagatggttagaaatgccagagacatgaggaagggaggggcattcaggttgggaaaaggatatcacaagggaagttaagttgggcaaaggcatggaagcatgaaacactggtggaggagggagaacccacacacaggccagtgtctctgaaccaggggaagtccagtgcactgagccttgtcaaggaggcttgagtttaatgccagaggctatgggcagtgtctgcaggattttgagcatcataattgctagctcagactgagcagtccctctgtgccaggtactgtctgaagagttttacgttctaaataccatttaaccttctcatactctgcaaagtgagcgttgttagcctcgttttccagatgagaaagctgagcctcaaagaggttcagtaacctgccccaggtcacacagctgagccgtgttcaagcccatgcctgtgtgggcttcaaaagcacaagggaactgccaacccagctgaaaccctgatcctccatgagctcctagggttagggctc

SEQ ID NO: 7547 - DNA, 2300 bp, Homo sapien
gttgctctgccccaactcactcggatagcagaaaactgaggggcgggggaagaggaaaaggcccaaccctaacaggcggcaccggggcggggtgctctgtgaccccacctccccctccttcccctagtgtggcagcaaccccctccccggcctcaccaagcaggaagactgctgcggtagcatcggcactgcctggggccagagcaagtgccacaagtgtccccagctgcagtgtgagtgcttgggctcagggggcgttccctatctggtggcccctccccacccaccccacccatccctgcagtgggagtccccaggtcaccagattcctctctacatctgctgtgcccctccccagttccctcctcaccctcccctgccaagctatcctctctctgcagacacaggagtgcagaagccagggcctgtacgtggggaagtgggcgctgactgtccccagggctacaagaggcttaacagcacccactgccagggtatggccagctaggagattctgtgggctggaggggcaggccagccatcactgggggtggggagggtcccaaggtgggcgagagaggaggtggggctggggcaagaccctgaggttcttggagcagcctgctgtcaccccatggccccagaccagaggggccaaacttccacttaccacagacatcaacgagtgcgcaatgccgggcgtgtgtcgccatggtgactgcctcaacaaccctggctcctatcgctgtgtctgcccacctggccatagtttaggcccctcccgtacacagtgcattggtgagacctggggctcaggttcctgggaggtcacaaggcatgggtgggagcaaggatcagagatcgcaagagatcagagtggggttaagggttgactgcaggaggaacaaggcccagagccaataggatcagggatcagcagggtccggggtcacatgagatctgccattagcagtcacatggggtcagggattacatagagtcagagtcatgcagaacataggcttgatgagtaggagtggtgaagtccaggatagctagaatcgggagtcaatggggtcagtggtcacataagtttcaggggtcacatgagttcagggtcatatggggtcagagaccacatgggggatcaagggttgtctgggccggagaggcaaggtctgcagcagctgggcagagggacgtgggcaatgtgcaggctcagatgcccatgccccccactggcccctgcagcagacaaaccggaggagaagagcctgtgtttccgcctggtgagccctgagcaccagtgccagcacccactgaccacccgcctgacccgccagctctgctgctgcagtgtcggcaaggcctggggcgcgcggtgtcagcgctgcccaacagatggcaccggtgagtcagggttacccggggataggggttcataggtccatgcacctgtccaggaaatgctcacttttgtgtctgctgtcttgactgcagctgcgttcaaggagatctgcccagctgggaagggataccacattctcacctcccaccagacgctcaccattcagggcgagagtgacttttcccttttcctgcaccctgacgggccacccaagccccagcagcttccggagagccctagccaggctccaccacctgaggacacagaggaagagagaggtctagcctgaccccttctgatccctgacccatgccaagcccctaggcctgaccccttgacccgtgatccacagatctgacctcacagtctaacccccaattccttatccctgacccatccactgacctcccacctgaccctctgacccctgacccagatatttgaccctgagctataacctcctaagccttctacagcctgacctgtaacccaaggccattcaacctgatcatgtgactactatgcaaacacaccctaaccccagaatctaacccctgacccttgacctggagacatgattgttgaactcccagagaccctaactgcaaatactcagctgctgatcccagatctgactcccttctcccgccccaacacttcatggccccatcttcttcccttttaggggtgaccacggactcagtgagtatgagaacccagatgggaggggtgggcaggcgagggacaggagggctcatgctgctgtcacccgcagccggtgagtgaggagaggtcagtgcagcagagccacccaactgccaccacgactcctgcccggccctaccccggtgagctgggcactgtagggatgagtcctcaagggctaaatcac

SEQ ID NO: 7548 - DNA, 2300 bp, Homo sapien
ccactacaccttcggctctccctctccaccacaccctgttgttccactggccttccctcagttctctggatagcctccccctgcagcctcccctgaggtcagatgcccacaggtgtgactcactcctactcatcttccagcttccgatggaagactctctttgtctcccaggtcccagccctctcctgtcctgcttccctgcccttctctgtcacggtaccagcctctgttgtagccacagttctgtgtgaattgatctggcacatatccagctctcctagtacagcagctccaggaaggcaggactggttctatttgtggccaagagcttaggatgtggtggagtctcagtttgttgagtgaattttttacatttattttttaattttttgttttttattaccagtagttgaacatagatgttgagtgaatagatacccatctcacaagcaaggaaactggggcttagagacagtaagaatccaaccctggactgtttgactgtgctgtgctccatggtgagccacagccagctctaggcagagtcaggacaggttcagatgagtgttaggaaaaaatgagtatacaatgctcagccctgtgcctggcaggtggtcggcacctagcattattccctgcctccgtgtggaccagggccccaagaagcaggggcttgcccctcacaccccatcctggattccggcagcagggatccctggggacatgtgattgtccctcccagccctgcaccgcttagtaagggggacttactaagcgtccccctaaagctacccacatcaacttacgctcaaagtaaaaacagagttccttggacaggtgtgcctgaaagtgagtccctgaacctcctctccccaattagactgctgccccgggtgctgtccgggagagggtctggtgccgccctgacttggcagcgcttttcctggatgtgccctagccgtccccacctcctgctgagttctgtgagtcagagacggaaccctggggtctcctggcaggccccacagtaaggcctgggcccccgcacgttgcagcctttccttccagaccagcggacaagcctggtctggaactatgctcctctccagccatggccaacctgaagacccccacccccagccgctgccagcccctgccctggggctctgctgtgcccctctccagcccctgggccctcggacagcgcccccgtcctcccggctgttagcctgggaagggggccaggccctgagctcagaccttggcgattccagagtgtctgaggcccagagccagccccgccagcacggccagacgaaaggaaaggggggaggtggcagggtgggcaccaggaagccattccgagggggctggcagggaagctgggttctagctttgttctttctgctcctcttctggaccccacagacttcctcctgggacctccgtgagccctggccaaaggctgtccccaccctttagccctttcctcagaggggattggaccagcactaacgagaagttactttggggccctgagacccccacgtttgcaagggaggctgggaaagagctggaaggcctgggctccggctccacccggcctccatcgtcagtgtgacccggcagggccacctctctccctcagcctcggtatctcgctctacgcaggcctccccgccccgccccgcccggaggaatccgcggccggccagacggtcccaggtgagggccctctggaaagggcccagcgcggccgcgggttccggcgggggcgggcatctggggtggggactgtccccgcgccaccccccagcctccgccagcctgcacaccctcgcttctccaggcggcagaggcgacgctttaaacaacaaaaaaaaaaaaactgtgtccctggcccggggccagcgtcccagcccccctcgccgccgccgcgccgcgctccagccagggaaaacaactgctcacttctccctgagccctccccgcgcgctccctgcctccccgcggccgcgggagaggagcccggccagggggaggcgcggagcgggccggccgcccggccttcctctccctcgctcctcctctccgcctcaacttgctccggcctcctcgctcctgcctgagttcggggcctggtctgggcttcgtcctggggctgggaagtttctgcgctccccgctgtccagtctgcatctccgcgcctcccgccgggcccccgcggtcccctcccgcccgcttcccccgctgccctccctcgctgccccctaccctctcccggggctcccggccctcta

SEQ ID NO: 7549 - DNA, 2300 bp, Homo sapien
tggatttggggggtcaaggaccagatttataggaccttggagaccataacaaggactttggatttttgtctaagtgtgatgggagatgccaaatggctttttttttttttagatagagtctcactctgttgcccaggctggagtgcagtggtgtgatctcggctcactgcaacttctgcctcccggttcaagcaattctcctggttcagcctcccgagtagctgggattacgggcgcccgccaccacacctggctaatttttgtatttttagtagagaaggggtttcactatgttggccaggctggtcttgaactcctgatctcaagacatctgcccgcctcggcctcccaatgtgctggggttacaggcgtgagccacagtatcgggcagccagatggtttttagtacaagaacgacactgtattttaaaataattattcagtttcctgcttatgtggggatatgtaaggttgtcatgaggagtaaattggagagattaagtgagaggactcatgtaaggctctttgtaggtgcgaggcagaatagacagttgagtggatattggccatgatggtgacatagtcggcgcactgaggaattcagggtagggctgggagctggagacggtaataacctgggggtctgtgcatacaggctggagtccaagagatggttcagagacagttcctctagtcagcctcaggctaggtgctgtggctcttcgctgtaatcccagcactttgggaggctgaggtgtgaggatcacttgagtccaggagttggagaccagcctgggcaacatgacgaaaccccatctctacaaaaaatacaaaccaaaccaaacaaacacacaaaaaacggtggctctattcagcctgatagaaacgacttgtggtacaggccctaagtcaggtacgctgctgcccaagagcctgactggtagatggagatgtgaaagggacacagggctctccacgtaagcaggaggcagcaagaatgacagttccaggggttctacgtggaaggaagagggggccaggaggaagggacttcaggtcagattgagggggcatgtgccatccggaagaggagaatgtcgatgtaactgtgaaagtccaagtcctagctgcttttccactgccctggtgtacaacctcaggccctgcagactgcacatctgaggacccctgcctgccctgtctggcttctctgaatctaataagggagaagatgcgtttgaaaaagaacacggaagagggagagagaaaaaaagcaccaaggtccatgttcagagagccctggtaattttaacttgcaactcacccaagaagagcctaatggtcgcaagagtatgtaggaaggccccaacccgacccggcccagcacgcagcacccaagggcggctggaagcgcaatgcgcgtgcccagtacagcgctattcagtctgcaggctttttgaggatttcaacttcaaagaacggtcggcttcggggcgaactttgcttcagttccaggcctcgggaggcagcgaggagacagactgggacaccgagcatgcagaaggggagtggtcttgaaatacgcggaaagggagaatgcacccctcctggccagccttgccgggcgaagtgagaagtactgaggcctgagaaggctccacgcgtgcgcaaagggccgctcgctgtgattactggggtggcgatggttgtgatgacgccgctgccccgcctgcgccgaaagggaaaccccaggggaggcggaggccagcggggatttctgaagccaagtggtccccttcatccacgacggacaggaagggcgaccccctgaggccacttccaggtcttgcgaccggaggagagttaccaaggagacgctcctcccgaggcctcgcgcgtcggaagcttctgtcccctggattccggttgacggacgcgtcccccgagcaggttctcggtagcagccgacacgccccaccccgggcacagcgaggtctgaggaccacgctaaggcgtcacgtccgccctgatccgcggcagctatggaacgggcggagccgcagcggagggcgctccgctttgacgtcacttcctgtgagcccggcggtgacaacggcaacatggccctgaacggagctggtgaggacctgggcggcaggggtttgtggctgtgaggtacgggaggcagcccactccggcaagacccccagtccctatgcctctcttccccagaagtcgacgacttctcctgggagcccccgactgaggcggagacgaaggtgctgcaggcgcgacgggag

SEQ ID NO: 7550 - DNA, 2300 bp, Homo sapien
cagcacccaagggcggctggaagcgcaatgcgcgtgcccagtacagcgctattcagtctgcaggctttttgaggatttcaacttcaaagaacggtcggcttcggggcgaactttgcttcagttccaggcctcgggaggcagcgaggagacagactgggacaccgagcatgcagaaggggagtggtcttgaaatacgcggaaagggagaatgcacccctcctggccagccttgccgggcgaagtgagaagtactgaggcctgagaaggctccacgcgtgcgcaaagggccgctcgctgtgattactggggtggcgatggttgtgatgacgccgctgccccgcctgcgccgaaagggaaaccccaggggaggcggaggccagcggggatttctgaagccaagtggtccccttcatccacgacggacaggaagggcgaccccctgaggccacttccaggtcttgcgaccggaggagagttaccaaggagacgctcctcccgaggcctcgcgcgtcggaagcttctgtcccctggattccggttgacggacgcgtcccccgagcaggttctcggtagcagccgacacgccccaccccgggcacagcgaggtctgaggaccacgctaaggcgtcacgtccgccctgatccgcggcagctatggaacgggcggagccgcagcggagggcgctccgctttgacgtcacttcctgtgagcccggcggtgacaacggcaacatggccctgaacggagctggtgaggacctgggcggcaggggtttgtggctgtgaggtacgggaggcagcccactccggcaagacccccagtccctatgcctctcttccccagaagtcgacgacttctcctgggagcccccgactgaggcggagacgaaggtgctgcaggcgcgacgggagcggcaagatcgcatctcccggctcatgggcgactatctgctgcgcggttaccgcatgctgggcgagacgtgtgcggactgcggggtgaggcgagactcgggcgagtgaccggggatgggtccgcgggccaggccactcagcccttccccggccctcccctctggaccccattgccggcgtctcattccggccccgtgtgctttttggtccgtagacgatcctcctccaagacaaacagcggaaaatctactgcgtggcttgtcaggaactcgactcagacgtggataaagataatcccggtaagagtaaaaaataatccgggagaggggccggatatgcttaggggggaagcgtggttaagtggtgatagaggcccgagaacagtagggctgagaggtgacagtggagtctctgggtggggtagaagtaaaattatttctcctttaggctctaaagaggacccttaactcaataagagcaccaagcacctcctgtgtgccagccactgcgcgagagtctgagctcaaccaggcccagtactgatggagaattgaagctagggcataaatgtgatacaaagtagaaagtggatgagttgccttatagagggacagggaaaacacctcaagcacagaaagagcagagcagaaaaggagatggctcagggctgaggtgggccaggcatcctgaccattccacccactttctcctctttttagctctgaatgcccaggctgccctctcccaagctcgggagcaccagctggcctcagcctcagagctccccctgggctctcgacctgcgccccagcccccagtacctcgtccggagcactgtgagggagctgcagcaggactcaaggcagcccaggggccacctgctcctgctgtgcctccaaatacagatgtcatggcctgcacacagacagccctcttgcagaagctgacctgggcctctgctgaactgggctctagcacctccctggagactagcatccagctgtgtggccttatccgcgcatgtgcggaggccctgcgcagcctgcagcagctacagcactaagagaagcccctgagaaaaaccctctagaaaaacagctgttcctctgtgtggtttgtttttttcctggttccaagtgtgcatgccagccccagctccactcacctttttccagcttttggcctcttcacctctccactctgctctccttgacgccctgagatgagttgagcttgtttcttctcagtttccccagtcaggatgagggagtaggtagaggactatgtgatgccccttttctaaggaagaagccatagccttttcaaaggtagcagccagaggggtggaccctagccttgtctctggcagcacctctgcagcctcttcc

SEQ ID NO: 7551 - DNA, 2300 bp, Homo sapien
ctctggatgggccgggcctctcttaaaaaggcaacggttgtgggaccacgtcgcgcaaagctgagaaaaggcaacgggacatccactcactcaaggggagatggaaaaatgcggcggaggggggaaaaggctgaagggggcaggcgtggtttcttcacggttctttttgctaccccgtctccccgccgcgccccgccccgcccccacacccaaggaaaatgatctaacagtggagtcaggagactggcaagtccacacttggtgcctaacgtgccacctgacgctggggtcaccacaaactcctgtcggtgtctgagtacctggggtgggcatgagatgggataggctgatagggtcaggatgctcaggggaaggaggggaatctatcaaggggatcggaacacaaaacctcacttccaggtggggaatggacaccagatggcggaagaggctgcagaggtgctgccagagacaaggctagggtccacccctctggctgctacctttgaaaaggctatggcttcttccttagaaaaggggcatcacatagtcctctacctactccctcatcctgactggggaaactgagaagaaacaagctcaactcatctcagggcgtcaaggagagcagagtggagaggtgaagaggccaaaagctggaaaaaggtgagtggagctggggctggcatgcacacttggaaccaggaaaaaaacaaaccacacagaggaacagctgtttttctagagggtttttctcaggggcttctcttagtgctgtagctgctgcaggctgcgcagggcctccgcacatgcgcggataaggccacacagctggatgctagtctccagggaggtgctagagcccagttcagcagaggcccaggtcagcttctgcaagagggctgtctgtgtgcaggccatgacatctgtatttggaggcacagcaggagcaggtggcccctgggctgccttgagtcctgctgcagctccctcacagtgctccggacgaggtactgggggctggggcgcaggtcgagagcccagggggagctctgaggctgaggccagctggtgctcccgagcttgggagagggcagcctgggcattcagagctaaaaagaggagaaagtgggtggaatggtcaggatgcctggcccacctcagccctgagccatctccttttctgctctgctctttctgtgcttgaggtgttttccctgtccctctataaggcaactcatccactttctactttgtatcacatttatgccctagcttcaattctccatcagtactgggcctggttgagctcagactctcgcgcagtggctggcacacaggaggtgcttggtgctcttattgagttaagggtcctctttagagcctaaaggagaaataattttacttctaccccacccagagactccactgtcacctctcagccctactgttctcgggcctctatcaccacttaaccacgcttcccccctaagcatatccggcccctctcccggattattttttactcttaccgggattatctttatccacgtctgagtcgagttcctgacaagccacgcagtagattttccgctgtttgtcttggaggaggatcgtctacggaccaaaaagcacacggggccggaatgagacgccggcaatggggtccagaggggagggccggggaagggctgagtggcctggcccgcggacccatccccggtcactcgcccgagtctcgcctcaccccgcagtccgcacacgtctcgcccagcatgcggtaaccgcgcagcagatagtcgcccatgagccgggagatgcgatcttgccgctcccgtcgcgcctgcagcaccttcgtctccgcctcagtcgggggctcccaggagaagtcgtcgacttctggggaagagaggcatagggactgggggtcttgccggagtgggctgcctcccgtacctcacagccacaaacccctgccgcccaggtcctcaccagctccgttcagggccatgttgccgttgtcaccgccgggctcacaggaagtgacgtcaaagcggagcgccctccgctgcggctccgcccgttccatagctgccgcggatcagggcggacgtgacgccttagcgtggtcctcagacctcgctgtgcccggggtggggcgtgtcggctgctaccgagaacctgctcgggggacgcgtccgtcaaccggaatccaggggacagaagcttccgacgcgcgaggcctcgggaggagcgtctccttggtaactctcctccggtcgcaagacctggaagtggcc

SEQ ID NO: 7552 - DNA, 2300 bp, Homo sapien
gcaggtgcggccccgcgctctgccagcaggtggcgcccgagaccccctccccccccgccccgcgccgagtgaaggccctgccgtcccgccggggcggggctgggggcgctgcctgctggccgagcctggctcagccgccgggtgactgcggtcgagtcacttcccctctctcgcccgcgacctccgagtcccccgctccctcctcccagttcgcttcgggctttccctgcctgccgggaaggaaggagaaggagccgcccaccttgaggagggaaactttccaccccgcgcggggcggggttgaggcggcgcaggaaatgggtggccggagtcgccggagcaaggggccccggcgggggcgggggaggcgcctccgggaacggcctgggacctcacgccccgcgggtgggagggaggggtggcagaggccgaggggagtgaagtcgcggcacctcgggccttcccggaggccaagcatgagactccgcggcggtgaagtttgattggggttccagggacccgtattccccgctcagtctgtgaagaccgccggctctccccacagcactagcggtctttacagttatctgtggaaggtttcttaggaaaccggggacccacaccgctgggactgagaaccaaacccagttgtcaagcccaccggaagaagccagcacgttcggagacagtgggtactcagccccctacacgcgcacacgacacctcacaacctcctgaaaagaggtgaagccgcacaccgaggtgtgcggacgaacagcacatccccgcgccctgctgcagccatttgcctcctggagatgcagcccagatggcagtcctggcactcagacatcccgttaaaccaagtagcagtcacgcaccgggctcctgtccatttacacaccttgcagagcagcgggaaggaacaaactgacctattgccccagggcagctgacacctgcagaggctcattaccatgcagggcgggtgggtaggcgataagggctctaatctaggggttcacagctgctaacgctccaggcaggctttcctggggagggagagtaaacatacacaaaaatgacacgttttccccatccattatagcgcatcccatttaataaggaggcatggcaaaatcagccaggctttctgctaaatgccttctgaggttcatcctctcagggattccctaaaaggcggaactacaattatccccatttaatagacgttgaaactgaggctcagagtgttagcgctttgcccaaagtcacacttggttggaggtcagttatgattctccagctacttgtcggggtttgggattatcttcccccttgacagcagagtcaggttctgaggttgggccaccgaggttactgacgccttcctgctctggttaagacgtgggtggctgcaccttggagttgagagctggtcctcgtccacattcacagtatgactctgagcaagtcccttcccctttctgggtctcagttttcccagccgttgaaagggggccagtagtacgtacctcccagggctgcgggcaggaaggaaggcggcccgggcagcgctctctagggtggcaccaagttgctggttgccctctctccacgcagcctctgcgcgcaccgagcgggcactgcggtcgggcgacaccccttccacgcccccctcccccgcccccgctcccgctcccgggtcgcggcgcgaggccccggaagccgggtcgccccgcccccgcgctcctgccccggcccccgccccgcgccggagccccgcccgccttccgacgggggtgcggctccaggaaacggcgcgctcccagctccgcgctcgccacccgacgcgccccaggcgaccccgcagactcagccagaccaccctgcgggccccagcggcggcagcggagagcgcggtcccgggtcggagcctgggacacctccgcacggacggggcgggcggcgcggacaggccatggggacccgggccgggccagcggtggcgggccagcgggagccccgggcctgagaagtgggcggcggggtggcgggggccatgacctcggtgtggaagcgcctgcagcgcgtgggcaagcgggcggccaagttccagttcgtggcctgttaccacgagctagtgttggagtgcaccaagaaatggtgagtgggagggaggcgggggggctcccccgaacttgctgggacctcatccggccctttgagcctgagaggactctgcccccccagcccaatgaccaaatgggcccccaccccagcttgggccctggttccgt

SEQ ID NO: 7553 - DNA, 2300 bp, Homo sapien
aagcatcacccctcctgggcagcagttgaacatctaaccccaaggggccctctgcccccaggcccagccatgagtccactcagtgcctgggaatgggccctgcgcagccatctctgtcctctggctttgcctctgcctctcctccatgtctgacctggcatatgctgttcagcttagatgtcaccccctggaagtcttttctgattgccctccaggctccactgtcatcatcttgccgaaagctgatcctccttgggacccctgcgcccagcaaagggctggacatggtgggcgagggatggcggtgttggttaatgacaggctgaccctctgctgcttctccggcctcacccccaactctctgcccctctctctgatgtcaccctccagccgcagacccttggacttgccattccctctttctccagatcctcacacagcccatccccctgccactcatctctgcccagacacccaacctcaaggagacccccaggggttccctcacatcaccctggagttcgcttgttaatttattttccttcttgactggtagtctgcccccacctccattgtcctcaccggaaaggtcttgtctctcttttgccctcctctgtccccaaaactgggctgggtttatggtgggcgctccacaaacatctttgtgcgaagggacttcttttatccctcgtctttgtctctccctgtgttggagtctgcgtgtgtgcacgatgctcacatgtgcatctgtgtctggcatctcttgccaggtccttgtgtttctgtgtgtcttggtctctgtatgtgcctgtccctttctcacttgctgtctttcctcatagtccctgcctgcccacactgtctgggcctttgcccttctgctctggccccaccctaccttagcagctccaccctgcaccctgtggccccagataaggggctgcccaggccctcttctggaggagggggaggtgggcagaaggaagaccctgagggagctgggggaggaggaagaggagatggggaggcaggtgagcctgaccaagcagcctgctccctttctccctccccttccccctcccccaggcagccagataagctggtggtggtatggacccgtcggaaccgacgcatctgctccaaggtggggaaggatggcaactggggatccaggttagggatgggggccggtgggaggctgatgggggctgatgggggagtggagtgaggttcaagcacagatcagaatccacagaggggaggggaagatggtgtcaaggttggtgatagggggtgcaggtgggagggaagagttaagatggggggaggactcagattgtcccttgtaggcccacagctggcagccgggcatccagaacccataccggggcaccgtggtgtggatggtacctgagaatgtggacatctctgtgaccctctacagggtgagtctctagccctccagcatggatggcaattgcaacacaggcagttgcaacaattgcaacacaggtctcctggtaggttgttcatccagatagaagaggatgcggggggtgaggccaagaattaggggggcctgctcagcatcactggcccaggaggtctccttggaggaggcagcatttacccaacacatgcagcatgagaggcagctgggaccagaacttggggtgcatcccaggaggaggtagcaaccaccgcgtgcacctgtaatcccagctacttgggaggctgaggcacgagaattgcttgaacctgggaggcagaggttgcagtgagccgagatcgcacccctgcactccagcctcgacgacagaggaagactccgtctcaaaaaaaaaaaaaaagccaccactaccaagcacctcctgagccagacaagctctgctccctttgctgctgccccaacagtcctgtactcaccagcacccttcttcccaggacccccacgtggaccagtatgaggccaaagagtggacatttattattgaaaatgtgagtgtctggagtgggctcaggtctggaatcttggggaccctgggacagcactgatgccccttctcctggtctctcccctggcccacaggagtctaaggggcagcggaaggtgctggccacggccgaggtggacctggcccgccatgcagggcccgtgcctgtccaagtcccagtgaggctgcggctgaagccaaagtcagtgaaggtggtgcaggctgagctgagcctcactctttccggggtgctgctgcgggagggccgtgccacgtgagtgcctacctgccctccttgatcctggc

SEQ ID NO: 7554 - DNA, 2300 bp, Homo sapien
ccaagagttttaggatcccaggaagcaaaagcagagatttcaggagtacaagggtcagagactcaagttctgagagtccaggaggcagaggctggggtttgggggatgtcagagggcaaatctggggcttggggggcccaggaagcagagatgaaggttttagagtctccagagaacaaatctggtacttttaaggcccaggaagcggaggctggggtcttgggaaatgagaaggggaaagaagctgagggaagcctcacagaggccagcctgcctgaagcacaggtggccagtggggcaggggctggggcgcccagggcctcttccccagagaaggctgaagaggacaggaggctgccgggcagccaggtagggatgggggccgccgagggcccagtctgctgcttcccactaacctggggctgagcgaacggcggctctgcatggacccacctggtggaatgggatcgggtggggtggggggctcagcttgaaggagccccctcatcccctcctctctcaggatgccctggctctcttaccccatcttccctgggccgcatggagctggacacctctaagctgattttctgggctgactttgaggtgtggctgctggtgacctctgatcttgtctgggggccactgaccttttaggtgaccttggcagataaccctggatctagaaacccttttacctggccccaaggctctagccagtggtctctggtgacccctgcaagctcagagatggggctgttgtgtgccaggcatgagcttccccaagaggcagagggcatacatcccatttatacattccctaagcccacccctgtgtcctcaggcaccacctgccctggtcagctccagccagtccctgctggagtggtgccaggaagtcaccactggctaccgtggcgtccgcatcaccaacttcaccacatcctggcgcaacggcttggccttctgtgccatcctgcaccgattctacccagacaagatgtgagctgccagaggggtgggaacgaatgggggagccatcagggagggcagtgtggacccagcctctgaccagcacactctctgcagtgactatgcctcgctagacccactcaacatcaagcagaacaacaagcaggtgagatggggtgggggactgcctggagggaaggagggtctggagagccaggctctcagtgtcagatttggagaaagtggactgccgggcccagcagtggcttctggaagttctgccactttttacccctttggtcattaaattgtttgttttccttattttcgtttgtttgttttaaagcgtttttcctcccttagatggtttttccaaaaccaccctttggtaacggggtggacggtgtgccgttgctaagcaacgcgagggcgggccttgttgctggatttccctcgctaggagggggcggtgttgctaggcaaaacccggggtgccaatcccggggaccccctccgtggggcggcactgcagcgttgccgggtggcgcgggccaccgccgccgctgaccccgagtgcacccttcccctaggccttcgatggcttcgcggctctgggcgtgtcgcggctgctggagcccgcggacatggtgctactgtcggtgcccgacaagctcatcgtcatgacgtacctgtgccagatccgcgccttctgcaccgggcaggagctgcagctggtacaactggagggcggcggcggcgccggcacgtaccgcgtgggcagcgcccagcccagcccgcccgacgacctggacgccggaggcctggcgcagcggctgcgcggtcacggggccgaggggccccaggagcccaaggaggccgcagaccgcgcagacggggcggccccgggggtggcctccaggaacgcggtcgcgggccgcgcctccaaggacggcggggccgaggccccccgagagtcgcgacccgcggaggtcccggccgaggggctggtgaacggggcgggggcaccgggcggcggcggcgtgaggctgcgacggccctcggtcaacggggagcccgggtcggtgcccccgccccgcgcgcacggctccttctcccacgtgcgcgacgcggacctgctcaagaagaggcgctcgcggctgcggaacagcagctcgttctcgatggacgatccggacgcgggagccatgggagctgcggctgcagtgagtgtcaaggtccttctttcttcccccgccgcagcgcggggtcccgggaagatgggcagagaacgggcgagcccccaaggggccccaaggacagagctggcg

SEQ ID NO: 7555 - DNA, 2300 bp, Homo sapien
agtctttctggaagaagccaccatttgagctaggttgataagatggccaggtttttcccaggtgaaaaatgagtggggttctcaaatggtgggaactgcattagcaaaaatgtggcagcaggaaagtttaggcctcgtttagggaactgccagccatctcccggaaggtccataagtggcaatgaggccaggctgagagcaggagtcctgggtgtagggtcagaggcacaagcattgagcctgtgagtgagagacagagggcatgggtgacacccacctgtggaagatgtgatacgcaggagtcaagaggacaaggccagctttggcccatctgttggcctcattaatgtgtgtcagtggctctttaaatcttaaaggggaggtgccccctctgggcccaagttccagcatctggtgtttccaagtcaggccttcccccagctcttgtctcacaggagatatctgacccatagggctggaggggactcctcattggccacccccctcccccatgcccattgtgtgcagtgggaggtggtctggcctggcccggcccttgggagctcccaaagtcctggtcttcctggaggaggggccaggcatgagggtattgaaagaggaatttgaggccgggcaccgtggctcatacttgtaatcccagcactttgggaggcagaggtgggcagatcacgaggtcaggagatcaagaccatcctggccaacatggtgaaaccccgtctctaataaaatacaaaaaattagccgggcatggtggtacaggcctgtagtcccagctactcaggaggctgaggcaggggaattgtttgaaccccggaggcggaggtctcagtgagccgagattgtgccactgcactccagcctggcaacagagcaagactccgtctcaaaaaaaaaaaaaaaagaggaatttgagttagacatgaggaagcactggaattcccacgaggcctggcatgcggaagctctgcgctgctgaggctggatttctccactctcctgcttctgcctgtcccgtcagctcagcactctttatgtgcctggcctgcccatggactcttagggtgtgtatgaaagcattttgcaaggtggcattgaggccccctgcaagttgctgtcaaaaaaggggagatgtgtgtttccctagattcctttctagaagccctgcagctcccaggtcacacagggctgggctttctcccattttacatacaaggacacaaacagaggccccaagggtgtgactggccccaaggcacacagcaagttggtggccaagcttgggaacaaactgctgggttagacaaccctgggccctagaccagaccctttaggagcctcatctctgaccctcagtttcctcatctgtaaagtggggagggtcgtggtccctgcctcacagggctgttgggaggattcagtgagtcagtgcacataaagtgctttaagtgcccggcacagaaacacttggtagatattagctgctgttattagtcagtgtaccttgactgtattttttgggcccagctctgtataagggggagacatgggaaaccagcagctgtgacggggtgagtgggggttggagctgtgatgggggaggccatgggagcagcatctgcccagcctggggatcagaggaggcttctggagacatggaagtcagggagggaggcgggaagagtgtgggggccccggcaggggggtctctggaggaagtagggctgggctgggtcgtggaggtcacgttggtaccaggcagcccaagatggaagctgactccaggctgagaaagctattttgggaactgaaagtcggccactgtggccagggggcggtgtctaggcgtggctcagggtggtaggaacattgaggctggggccgcctgaggctttggcatgaggctggggggctgaggagagatgtgaaacagttacaccgggggtgaaggtgtcagagaggcctctcagtttcagcttgagtcagcaggcaggccatggtggtggctggtggggaagtcaccactgccccaggccagagaggattgcctctgagccagggatgtccagggctgcctctgagagaggtacaggtgggagtggacacgggcaggtcaaccactgtccctgccccatgaccccgacacaggtcagatgacccagatgtggggggccagggcaggagcagttgaggggccaggctatcagctgagtcgaaagttggggacccccagggctgacagtcccaacaagtcactaggggcgggcaggtacatggggtca

SEQ ID NO: 7556 - DNA, 2300 bp, Homo sapien
aacttcttttggaaaatcaggaaacccactcacactgagccagaatccctgcaaggcaacatcctgactggagcagaatggggcctgccctttggatacagctcacactttccagtgtacccctgtccccaccactcctgtttgtctcccatctggctccggtaggcatgtgcgtttgcagctctgtattagctgatcctgttctcccagcacaccccgcactcccacccctccccgcctggcacatgccctctctcgcccatgctgcctctttgcagcccttcatgatttgcctgcccgactcccccaccagaaggggcagggcctgggctgattcagatcccagtacaaagcctggcacacaggacatgacacacatttggggaaagagtggatgatattccaccagctgtggaatcgggagtatctgttaagggcagcgcagttctcagaattgtcccagctacaaaaggcctgaggaactgtcttctttcatcctttcattttccaaaaaagaaaagaatggcctagagagggtaagggatcccctgacgaagaggagcagagccagctagaacctgggcctggccagttcaaggccaccagagggcagccttctgcggaaggcagtattggggtaggcagggaccccagcagacatggcactcagagctctcactgtccactgactctctcttctccaggttatggccacatggccccactatcgccaggcggaaaggccttctgcatggtctatgcagccctggggctgccagcctccttagctctcgtggccaccctgcgccattgcctgctgcctgtgctcagccgcccacgtgcctgggtagcggtccactggcagctgtcaccggccagggctgcgctgctgcaggcagttgcactgggactgctggtggccagcagctttgtgctgctgccagcgctggtgctgtggggccttcagggcgactgcagcctgctgggggccgtctacttctgcttcagctcgctcagcaccattggcctggaggacttgctgcccggccgcggccgcagcctgcaccccgtgatttaccacctgggccagctcgcacttcttggtaagtccagccacctaacagcgtgtgggggaagggggaagaggagcctggactaggactcccataaatcactggggggctgggccttgcaggtggagggacctcactccagggcacggcgtgggaggggtagtcgaagagctctggtggcagcgttgagaagggggtgagtggtgccagttgccagggcaagtcactgcgctgggaggtgggcggggagcatcaccagaacccaggcgctgccccagcaccttctcctccccaggttacttgcttctaggactcttggccatgctgctggcagtggagaccttctctgagctgccgcaggtccgtgccatggggaagttcttcagacccagtggtcctgtgactgctgaggaccaaggtggcatcctagggcaggatgaactggctctgagcaccctgccgcccgcggccccagcttcaggacaagcccctgcttgctgaagcgtcaggtgaccgagttcagctccgtaaggtggcggcacctgaggaggaagcagccaggagtggctggggaagaatctggagatggagccgcggtgagggtgggcgggaggcctcagaggatactgttaatcataaaatgagcaacgacttcggctattttcaactatttcgaatgggacttccctgagccaccggccaccatcccgggaaggccgaggtccagcctccgctggccctgggaacctcgaaaccgcaccttccggcttaggatggcagagccgcccgcctcagcctcggcgcactcccctccgcctattgagagcccaggtggagcggagaaaaggccggcgctggggtagtctcgtccaactttattgctctggagaacaggagggcaagccagcgcggggcggtagtgcccaggcatccctctccccgaggccgccggcccggccgtgccgtcggggaggaccccgcacccgccgcgagcgcgcacacaccctcggtgacaaataaatacggcggccgccccgcccgtggggtcggggatccgccctgccctgtacggggaagggcgccggcggcccctagcggacacgcgcgcggcctccgggacggccgggtcgtccgcagcgcaggcccggggcggcggcggacgccggggacgcgagaagttatgggccacccgggccggcggcctcagctcagcacgcagcgctcccg

SEQ ID NO: 7557 - DNA, 2300 bp, Homo sapien
ctgtaggtccccccagctcacctgccctactggggcccaacactgtacccagctggttgggaggaccagagcctgtctcagggaattgcctgctggggtgatgcagggaggaggggaggtgcagggaagaggggccggcctcagctgtcaccagcacttttgaccaagtcctgctactgcggcccctgccctagggcttagagcatggacctcctgccctgggggtcatctggggccagggctctctggatgccttcctgctgccccagccagggttggagtcttagcctcgggatccagtgaagccagaagccaaataaactcaaaagctgtctccccacatgtagcctgtcacctttcttggaggtaaccaggtgacccaacctatcatacaaccctggtgtcctgatgccccaacaataggcagttggatgccttgtactgcatgcctctcctgggaccaaatccaccagccttggtcagtcattcaaggctcttctcggccaggtgcagtggctcactcctgtcatcacagcagtttgggaggccgaggccggcggatcacatgaggtcaggagttcaacctggccacatggtgaaaccccatctctactaaaaatacaaaaattagccaggtgtggtggtgcatgcctgtagtcccagctactctggaggctgaggcaggagaattgcttgaacctggaaggtggaggttgcagtgagccaaaatcacgccactgcactccagcctgggcaacagagcaagactccgtctcaaaaaaaaaaaaaacaaaaaaccataggccgggcatggtggctcacgcctgtaatcccagcactttgggaggccgagacggacagatcacaaggtcaggattttgagaccagcctggccaatatggtgaaaccccgtctctactgaaaaaaatatatatatatacaaaaattaaccaggcgtggtggcaggtgcctgtagccccagctacttgggaggctgaggcaggagaatagcttgaacccgggcggcgaaggttgagtgagccgagattgcaccactgcactccagcctgggcgacagagcgagactccatctcaaaaaaaagagtagtaagttccacccacctcccagtatggtgacttgccatggcatctggcacccctgacagttctcttcacactgccatgggggctctggcactcccacaccataccctagggcagggtccctccctcggcctctgtccattctcttcacactgccatgggggctctggcactcccacaccataccctagggctgggtcccttccttggcctctgtcctcagcccctctgacgttagaggagttggaacccaggctcccccttcccctctcccaggtgccccatggcagcccagactctgtgtctgcagttcaggggcagggagtcaggagggcaggcacaaagcgttctcaggaagaactggcaatcgggcgcaagggtatcatctgcccgggtgctctgggcaccctggagtcctctccccacctcccacccccacctgatccttcccagctgccaccattcctctcccaccacaccacccaggccaaaatcactccatccatgacgcctacagtagcccagcgtaggtctccctggaccacatttatcctcaagggcctgtgtccttatccccccttcacccccaactctcccctgccacagccagccctctgttcctctcacaccccaagctcattcctaccttcactggcctcttactccccagctgaaatatcacctccttagcagagctttcccagtgagataacccccccgctccccgcagagctctcccatcacccagggtgtttccttcatggaactcatgacaatgtgaggttgccatgtttctttgctaagaggtttcttgtgtaaacaccaggaaggaaaggacctgtgcctgtcctcttccctaagcacttgaatgaatgaatgaatgaatgaatgtggtatgggtgcctgagtgagcaggaccttgaataagtgtgaggtcctctctaggcttcagcttcctccgcctcctcccctcaccgcagccgccttcctccacccatccccaccatcccagctgctgtgaaatgggcaaatgtcttgcctccaggacctgggaagggtgatgcagctcacctccctcctgttcacaccccagccaccccagccatcccagccgggtcccagccacccacacagcacctcctcctggccccgccctgcccagcccctcccaggtgcctgaggtggagccgccagtt

SEQ ID NO: 7558 - DNA, 2300 bp, Homo sapien
accttgccagttttgcttcagtgtaatattagggaaaagctagaacactggtttcagagccacacagaccaggttgtaatctctgctgtatttgttgtatgacctctgccaagtcatttccctgcttggtttcctcatctgtgaaacatgaaaaatattatttagctcataaatggttttgagtgctggggttgagtgtgaaatgtttggcctcggccaggtgcagtggcctgtaatcccagcactttgggaggccgaggcgggcagatcacctgaggttgggagttcgagaccagcctgaccaacatggagaaaccctgtctctactaaaaatgcaaaattagtcgggcgtggtggcacatgcccataatcccactactcgggaggctggggcaggacaatcgcttgaacccaggaggtggaggttgcagtgagccaagatcacgccattgcactccagcctgggcaacaagagcaaaactctatcttaagaaaaaaaaaaaaggaaaagaaaagaaatgtctgacctcaagtaggtcctcaagatctagaccaagtcacctctgtgcccccaggacccagccaggatgtccgtcagatgagtttgctcccagctcttaccctgtccccaccacctgatcctggagcatccacaatctggcccctcttctctagttttgctgctgcagcccattgagagtgacgacatggagcacaagaccctgaagatcaccgactttggcctggcccgagagtggcacaaaaccacacaaatgagtgccgcgggcacctacgcctggatggctcctgaggttatcaaggcctccaccttctctaagggcagtgacgtctggaggtgcggcccttggtggggctggacgggctgctacggggctgcagagggcagaggtggctgcctaaatctagggctgggccaagtccagggacagggacccaaaccacttggctcctagttgcttttgggtgaagtggcagtaagggggtgggggttgggagagaaaagggaacacagacctgttgtctcgcccacagttttggggtgctgctgtgggaactgctgaccggggaggtgccataccgtggcattgactgccttgctgtggcctatggcgtagctgttaacaagctcacactgcccatcccatccacctgccccgagcccttcgcacagcttatggccggtaagaggacggggagggcaggtgaggtacagagctccctggcccaggacacatccacccacggaccccttcttattctgtccccgctgcacgccgtgcccctagactgctgggcgcaggacccccaccgcaggcccgacttcgcctccatcctgcagcagttggaggcgctggaggcacaggtcctacgggaaatgccgcgggactccttccattccatgcaggaaggctggaagcgcgagatccagggtctcttcgacgagctgcgagccaaggaaaaggtgcgaggaatcaagggacccagcgttggaacgagtgtctccccgatctccctggggcagagtcggggcgggcgctgccgggattggtgccaggctgacctctccaccatcgctgtctcgggcgcaggaactactgagccgcgaggaggagctgacgcgagcggcgcgcgagcagcggtcacaggcggagcagctgcggcggcgcgagcacctgctggcccagtgggagctagaggtgttcgagcgcgagctgacgctgctgctgcagcaggtggaccgcgagcgaccgcacgtgcgccgccgccgcgggacattcaagcgcagcaagctccgggcgcgcgacggcggcgagcgtatcagcatgccactcggtgagggccgggccccggggcgtcccccgccattggctgcgggggtgggggtggagccaggcctgtgtgctcaccgcgctgggattggtttagggtgttgtgggtgggcccgtgagatgaaggctgggaggggtggagccaggagtgttttttttctgtctgtgggcgggttctggcggaagtatttgcatgtcggtctgggagtgggaaggggtggggttcacgaaagttctgggaaggtctagtgggcggggccggccggcgccagggcatctccgactcagacgagtagctttccttatccagacccaggggctcaagaaagcagtgaggctggtcacagtctcacagccatcgtgccgctccctatgtggcctgggagctggccttgggcccctgcaggttggggtcctggctctacttcatcacaaacctgaaccctgctc

SEQ ID NO: 7559 - DNA, 2300 bp, Homo sapien
cagaccagaggctgttttgaagttggcagtaaggagtgacagaggagggagaggagggcggagatacgataagtgctttaggacaactggcctttaggatgcttctgccaggtggcagcccccatgcaaaaactttaaaagtgtggtcttgtttcatgctcgtgacagccatctgaggagggttttgttgtcatcctcagcttgatgaagtgttcaggactcagctccaaggtctggctcagaggagtgggtagattttgagaccattctctggattaggaaaaattgcaggaaaatctactgggcatgccgggatagtaaaggtggtcatggagggcacctggacatcaggtagagctgctgaaccaatttgtctggcctggagttgcaaatgtggaagatgccagtggggagagggagctggtacctggaagaggctgagtcagccaggggcagtgggcagaggttgaggagaggtcatgctctgagaagcaccagcgccgaaatggctgaaggtggaggacacagaaacagagccaagcagccaggggctgtgggggctgaggacggtggggcagcggggacagctggcagcagtgccagatgcctcctcaaggcccaggtggcctggccagcagcaggatcagggcttgttgctttaagccctgaaaaatgagcaccctggttctgccacctcctctgggaagtcttccctgactcaccaggctgtattaggtgcccttcccatctgccccaccccctgtgccctatgctgcccccatgacagccgtgtcacacagggcaggagagctgagaggtgtgccctgacatgggtccagaaacatggttgacttgatattgcttctcttccacagtgcagttggctgtaacctgaaaagtagaggggcccttcagacccttcatgactctatgactttgtcctctttctattcctcgaaaacttctctcatttgagccattcctgtcctggtgagagatatgcaagttgctgcttctcctctttgtaccaagtacggtggccccatttgggttaaagccatgagcccctgccaagtctgaccatccacgcctacatttaccccaagctcctcctttgtggccaagaaccatcactttcttggaccccaccctttctcttcccttccagctgcattggtaggtatcttttggagtctttgctttgggagtggctgcacttgccacagtgtgatgtgggcactaggggcctgtggtacctgctgggcttcttttctcaccaagagcttccctcttgctccccactctaaggggggttctgattcacgctcctgcctcaacaaaatgacaggagactcacagatctctcttgaaatcaaagccataaatgtccagagctgccaccttgccagttttgcttcagtgtaatattagggaaaagctagaacactggtttcagagccacacagaccaggttgtaatctctgctgtatttgttgtatgacctctgccaagtcatttccctgcttggtttcctcatctgtgaaacatgaaaaatattatttagctcataaatggttttgagtgctggggttgagtgtgaaatgtttggcctcggccaggtgcagtggcctgtaatcccagcactttgggaggccgaggcgggcagatcacctgaggttgggagttcgagaccagcctgaccaacatggagaaaccctgtctctactaaaaatgcaaaattagtcgggcgtggtggcacatgcccataatcccactactcgggaggctggggcaggacaatcgcttgaacccaggaggtggaggttgcagtgagccaagatcacgccattgcactccagcctgggcaacaagagcaaaactctatcttaagaaaaaaaaaaaaggaaaagaaaagaaatgtctgacctcaagtaggtcctcaagatctagaccaagtcacctctgtgcccccaggacccagccaggatgtccgtcagatgagtttgctcccagctcttaccctgtccccaccacctgatcctggagcatccacaatctggcccctcttctctagttttgctgctgcagcccattgagagtgacgacatggagcacaagaccctgaagatcaccgactttggcctggcccgagagtggcacaaaaccacacaaatgagtgccgcgggcacctacgcctggatggctcctgaggttatcaaggcctccaccttctctaagggcagtgacgtctggaggtgcggcccttggtggggctggacgggctgctacggggctgcaga

SEQ ID NO: 7560 - DNA, 2300 bp, Homo sapien
accccctggcgcaggatctgcaacacctgcgaccccatggccccgccgctgctgcccgcgccccccctcccgggaccctcatgggggcggcccccggcccatgccccgtctggcgcctgagggccccggggcccggcctcacgctcacgccatggcctcccccagcgggggaggggggctcggccgcgcgagggtgcgagcagggggcggggccggccgggacagtcagtggtgcaaggcccggacgcgggggtggggctgcatcaggggcggggtccgggtccccactcctggcccagaattgctccgaggggccgagccggcaggcaggcgcggggcacgggccgggtacccgtcggcggcatccagaggtggtcgtggggtgggtgctcccggggtgcaggcgacagctccctagtctccggaccagggagaaccccaggatctggggtccactttcggggtcgcaggtcacttgcttggggctccgcgctcgcccggcttctgctggtgccggcctaaggaggaggccggaagaaggagccgcgaaccgccagcctgcagtggcgcatgcgcccaacgattccaattgggacccggaaaaggaaaacttgacggcatgaatgcgcaagcgcagaaaggtgatggcgcggtaggacgcgaggggtgccctttgggcgtgcgcagactccaggactaaagcaagttcgagcgtaaaagcgtttgggcgcatgcgtagacccaggcgttgccaacccagggtagacgactgggcggaaccaaagagacagttgagtagccattgggtaacggcaaagtaattggcgcacagctcttccaatgagttacaggaggcggggaaaaggtggaggcgtggactcccctagtagcagcgagagttctgcactaccgaagcacgcccctctcggcccgccccctttaatgctggacctcgtacgtcacgaccgatttcgctcccagcggcgtctacttccgggtcagagctcagacctagggtgtagagaacaaccttccgtaacaggcaggaatagtcgaaataggatagcgtcgtctttcttaaagtgacaggctcaaagcaattggggcagccctatccagaagttgtgagggcgactcagctattctgaatccaatcctgggcaaagttctggacaagtctcaggtttctgccaatggggaagggatatgaagaagcggattgtttcccaggtgaggagaagaagagagccttaggcaatccactccaagagcttgaggtgcagccagttccgtctgtcctccagtcttccccaccccatccaactagctctacgaggcagagctttctcgtcctcatatcatatatgaaaagaatggccgggcgcggtggctcacgcctgtaatcccaacactttgggaggccgaggcgggaggatcacgaggtcaggggtttgagaccagcatggccaacatggtgaaacccgtctccactaaaaatacaaaaattagccggccgtggtgccacgcgccggtagtcccagctactcgggaggctgaggcaggagaatctcttgaacccgggaggcggaggttgcagtgagcttagactgcgccattgcataccagcctgggcgacagagcaagactccgtctcaaaagaagaaaaaagaaagaaaataatgaggctcagaatcgatggatcgcacagtcccacaacttcgcagccaagaccagactcgggttcacccccttcccaagtgtggttctgtaaccccgttttgctgccgccgatgcggatgcagagggcagagatggcccatccttagcagagaccaacctccaccctaggcagcagagcacgcagctgggggcttttctttctagatctcaaaagcctgctgtgatgggggatctggttctgccctttccctctctgcctctcctggcccgcctacccgggaactccccgcctggagcctctgggaggggagcggtgcaggccgcccgcgtcatctgatgctgtttcctgcaggagggagaagagcggaaaaaagtgaaactccaccctccacctctgcctcccgcccccggggccaaagtacaaagggaggaggaagaagggagcggggtcggagccgtcggggccaaaggagacggggccaggaacaggcagtctcggcccaactgcggacgctccctccaccccctgcgcaaaaagacccaaccggagttgaggcgctgcccctgaaggccccaccttacacttggcgggggccggagccaggctcccaggactgctc

SEQ ID NO: 7561 - DNA, 2300 bp, Homo sapien
gctggtctcaaacccctgacctcgtgatcctcccgcctcggcctcccaaagtgttgggattacaggcgtgagccaccgcgcccggccattcttttcatatatgatatgaggacgagaaagctctgcctcgtagagctagttggatggggtggggaagactggaggacagacggaactggctgcacctcaagctcttggagtggattgcctaaggctctcttcttctcctcacctgggaaacaatccgcttcttcatatcccttccccattggcagaaacctgagacttgtccagaactttgcccaggattggattcagaatagctgagtcgccctcacaacttctggatagggctgccccaattgctttgagcctgtcactttaagaaagacgacgctatcctatttcgactattcctgcctgttacggaaggttgttctctacaccctaggtctgagctctgacccggaagtagacgccgctgggagcgaaatcggtcgtgacgtacgaggtccagcattaaagggggcgggccgagaggggcgtgcttcggtagtgcagaactctcgctgctactaggggagtccacgcctccaccttttccccgcctcctgtaactcattggaagagctgtgcgccaattactttgccgttacccaatggctactcaactgtctctttggttccgcccagtcgtctaccctgggttggcaacgcctgggtctacgcatgcgcccaaacgcttttacgctcgaacttgctttagtcctggagtctgcgcacgcccaaagggcacccctcgcgtcctaccgcgccatcacctttctgcgcttgcgcattcatgccgtcaagttttccttttccgggtcccaattggaatcgttgggcgcatgcgccactgcaggctggcggttcgcggctccttcttccggcctcctccttaggccggcaccagcagaagccgggcgagcgcggagccccaagcaagtgacctgcgaccccgaaagtggaccccagatcctggggttctccctggtccggagactagggagctgtcgcctgcaccccgggagcacccaccccacgaccacctctggatgccgccgacgggtacccggcccgtgccccgcgcctgcctgccggctcggcccctcggagcaattctgggccaggagtggggacccggaccccgcccctgatgcagccccacccccgcgtccgggccttgcaccactgactgtcccggccggccccgccccctgctcgcaccctcgcgcggccgagcccccctcccccgctgggggaggccatggcgtgagcgtgaggccgggccccggggccctcaggcgccagacggggcatgggccgggggccgcccccatgagggtcccgggagggggggcgcgggcagcagcggcggggccatggggtcgcaggtgttgcagatcctgcgccagggggtgtgggcctcgctcaccggcggttggttcttcgacccgcaccagagcaccttctccaactgcttccacctctatgtgtggatcttcctgctcatctttcccttcttactgtacatggtgagacgccacggccacctgtaactccagccgggagagggagggcagcctggcagggattcagggcagtgccctgggctctgggacgtggagagagaggaatcactgcagagtttgggtctgtgtggaagaggggccaaagtcttcctttcttggatcgagtgaccttgaaccctacacttaatctcatccagctaagcagaatacagagccctttgtcgaggtctgtgtactggttgtgtggagaggtgatgaaattttcttgtgagtctgtgaatcccagctatgatgttgatggcaggtacatcctgtgggggcgaggctttgtgaaaagggacctggcttactttcatcttcaggtcctgcctcccagcttgatggtggccggcgtgtactgcctcgtggtggctgtcatctttgctactatcaagactgtcaattatcggcttcatgccatgtttgaccagggcgagatcgtggagaagcgcagctctaccatgggggagctggaggaagagcctgcccagggggacagcaatccacccaggtgggtggggtaggggctgtgctggggattgagggtttttggtgcctgggccggaaccttgcagggtggagtaggggcttagggaacattggctctctgagtgattgtgaacacttgtcctgtgttagccctggaattgtaaagtgacttctgaaaaagaagcagtgacaaagatg

SEQ ID NO: 7562 - DNA, 2300 bp, Homo sapien
ggggcagcagctcctgagtagacagagagccatgaaggaacaaacaaggcaagaagtaggctcaggatgcacccacagtagggactggctcgcagagggacaggaggacaagctgaggtccaggcccactcaccgagacctggttgaagccaaacacagagtgctgggagctgcagcgcaccgggggtgtggaactgactttccggaacactgtcatctccactccggggtccctggcggtgaaaaagagcagcagctttgagctaacctctcctctgtgtatgctacttcctcccatctttgtcactgcttctttttcagaagtcactttacaattccagggctaacacaggacaagtgttcacaatcactcagagagccaatgttccctaagcccctactccaccctgcaaggttccggcccaggcaccaaaaaccctcaatccccagcacagcccctaccccacccacctgggtggattgctgtccccctgggcaggctcttcctccagctcccccatggtagagctgcgcttctccacgatctcgccctggtcaaacatggcatgaagccgataattgacagtcttgatagtagcaaagatgacagccaccacgaggcagtacacgccggccaccatcaagctgggaggcaggacctgaagatgaaagtaagccaggtcccttttcacaaagcctcgcccccacaggatgtacctgccatcaacatcatagctgggattcacagactcacaagaaaatttcatcacctctccacacaaccagtacacagacctcgacaaagggctctgtattctgcttagctggatgagattaagtgtagggttcaaggtcactcgatccaagaaaggaagactttggcccctcttccacacagacccaaactctgcagtgattcctctctctccacgtcccagagcccagggcactgccctgaatccctgccaggctgccctccctctcccggctggagttacaggtggccgtggcgtctcaccatgtacagtaagaagggaaagatgagcaggaagatccacacatagaggtggaagcagttggagaaggtgctctggtgcgggtcgaagaaccaaccgccggtgagcgaggcccacaccccctggcgcaggatctgcaacacctgcgaccccatggccccgccgctgctgcccgcgccccccctcccgggaccctcatgggggcggcccccggcccatgccccgtctggcgcctgagggccccggggcccggcctcacgctcacgccatggcctcccccagcgggggaggggggctcggccgcgcgagggtgcgagcagggggcggggccggccgggacagtcagtggtgcaaggcccggacgcgggggtggggctgcatcaggggcggggtccgggtccccactcctggcccagaattgctccgaggggccgagccggcaggcaggcgcggggcacgggccgggtacccgtcggcggcatccagaggtggtcgtggggtgggtgctcccggggtgcaggcgacagctccctagtctccggaccagggagaaccccaggatctggggtccactttcggggtcgcaggtcacttgcttggggctccgcgctcgcccggcttctgctggtgccggcctaaggaggaggccggaagaaggagccgcgaaccgccagcctgcagtggcgcatgcgcccaacgattccaattgggacccggaaaaggaaaacttgacggcatgaatgcgcaagcgcagaaaggtgatggcgcggtaggacgcgaggggtgccctttgggcgtgcgcagactccaggactaaagcaagttcgagcgtaaaagcgtttgggcgcatgcgtagacccaggcgttgccaacccagggtagacgactgggcggaaccaaagagacagttgagtagccattgggtaacggcaaagtaattggcgcacagctcttccaatgagttacaggaggcggggaaaaggtggaggcgtggactcccctagtagcagcgagagttctgcactaccgaagcacgcccctctcggcccgccccctttaatgctggacctcgtacgtcacgaccgatttcgctcccagcggcgtctacttccgggtcagagctcagacctagggtgtagagaacaaccttccgtaacaggcaggaatagtcgaaataggatagcgtcgtctttcttaaagtgacaggctcaaagcaattggggcagccctatccagaagttgtgagggcgactcagctattctgaatccaatcctgggcaaagt

SEQ ID NO: 7563 - DNA, 2300 bp, Homo sapien
tgagaatcttggaagctctaaaggccgcttggggcttggggcagcagagaacaatgggctgggggtgcctttccagggaggccagcctctgggagttgaggggaagcgcggctagggttgaggtggggtacctgcaagtgagagctgggctgtacttctcccttccacacagctgccaccagcccgctcacggcagtcttcagcctctcccgcagcctgctggctgctgccctgctctacggtttctgccttggggccatcaaggtaggggtggcttgcgaggtgggggcatgctgcagtgcgtaagggtggttggggcggggctgtgaactgggctcagcagtggcttctcacacgggggcagcccgggccccatgcttacctcacctcccctgaccagcatggattctctccgcagactccgtggccagagcagcacgtccctgtcctcttctcagtcttctgtggcctcctggtggcactgtcctaccacctgagccggcagagcagcgaccccaccgtgctctggtgggtgtgctccgggtcgtgtgtttgtgtctgcccagtaggggtttgtggtctgtgcatgtgcccgtgactggggccggggggaaggaggggcggcctcctcctgactcttcctcacccccaggtctctgatccggagcaagctgttccctgagctggaggagcgcagcttggagacagcccgggccgagcccccggaccccttgccggacaagatgcgccagtcggtggtgagggggcggggggtgggggtctgtggggaggtggtgacaggtcctggggttcctgggaggggcatgtccagcttgggctgctgggcagctgagtgtctctcctggccgggcagctgaatgtctctcctggccctgcagcgtgaggtcttgcactccgacctggtgatgtgtgtggtgatcgccgtgctcaccttcgccatcagcgccagcaccgtctttattgccctgaaggtttgtgtggcatgggccgctgctgcctctcgctgtcttggcgggagcctgctcaatctgagtgccgtgggcagcccctccccggcctgtgccaggtggccctctgtggtcccttggcctgctcccatcagctgagtctctggcctctccctcctgcagtcggtgctgggtttcgtgttgtacgcactggctggggccgtgggcttcttcacacattacctgctgccacaactccgcaaacagctgccctggttctgcctgtcacagcccgtgctgaagccgctggagtacagccagtatgaagtgcgcggtgagtgcccacccctgatggccaggcctgggcagtggctcgggctgcagcctggctggtgggagctgtggtcctctcggctcaggagtgccagcagggggcactcgctgcccacactaccctttctgctccctccctgccctctgtgtccgtgttgcccggctgcgctctccaccgactcttctcctcgtgccctgctgtgcccttcccttgcctgtgttgccctggtcctgccctccttcctgtctgtgagaagacggaagaattagaaccccagggccctgaagggatctcttgtccagaattaaacactgatcaccagtggaccagagctgcctggagcacatcttcactgggctgcataatggtttttaaaaaatcctggagcctctattttagcatctcgatttgagatatgaagatccatgtttcttgagtttttcttaaacgacagaagattttgcttcccagactagcatccctctgtggctacaaccagcctgaaccgaggggtctgccctttagaagggcccagctcacgggctcactgtgcactcaggccctagccagcctgctgtacgtaggtgtttgcgatttcatcattggccttgttttaacagacagcagagcagagcacctgccataaagcaagcctcgatgtgctaagtgccatgtggagcccttgccctgctggggctcgctgctcccatttgagctgccacagatcagcccctccccccagggtctccgaggagtcaggaccgcacagcctgccctcctagggaaggacttcctcagggaaggcaggcatgtggaagccaggtgcagagtcctggcctctccacacaggtgccgcccaggtgatgtggtttgagaagctgtatgctggcctgcagtgcgtagagaagtacctcatctaccccgccgtggtgctcaacgccctcacggtggacgcccacacagtcgtcagccacccggacaagtactgcttctagtga

SEQ ID NO: 7564 - DNA, 2300 bp, Homo sapien
tctgcaaagtaggtggcagcttcttagaggggaggatcctggggctcagaggtgttagatgacttgtcctggggctgaggactcatgcttgtgaggcctctggcctcagccgtgtccctcctgatcccttttctacctctccacccccaggcttcacaagggctgtggcgccggctgcaatagtggcgggaacgtggatgattcagactgtagtgggggcggtggcctgacctccctcagcaataacccccccgtggcacaccccacacctgagaacacggcaggtgagcaggcgaggctgggctgaacccgtgggtgaggagtgcagcccagctgaggcctctgctgtcttatctgtctcctacaggcaatggtgaccaacccctcccaccaggccctggctgggggccgcggtcctccctgagtggctctggtgatgggcggcccccacctctgctgcagtggcctccccctcggctccctggaccaccccctgcatcgcctatccccacagagggtccccggacctcacggccccctggcccgggtctcctcagttctgagggccccagtggaaagtggagcctggggggccggaaggggctgggaggatctgacggggagccagcctcagggagccccaaaggaggtacccccaaatctcaggtaaggcacctgtgggagggttgggtcccagaaggctaaggcctgctcacccgccaacctctcccccctcccccaggcgcctctagacctcagcctcagcctcagcctcagcctcagccccgatgtcagcactgaggcctcaccccccagagcttcccaggacattccttgcttggacagcagtgcccctgagagtggcacacctatgggtgccctgggcgactggcctgcccctattgaggagcgtgagagcccggcagcccagcccctgctggaacaccagtactgagctacctggcgcccactggaccacctcctaggattcagtaacggacctgctctgctgcctctctgctggaccacagaactgagtggctttggcctacatgtctgaaccctgacctttggctgccttggccagagtaccaaaactgagtgacccagacctctgaccttgacccctgatctctctcatccccagtccagggcctgggctccccagatggaggcagtcagcctcccagccaggccctaagagccaaaccatgggctggtcccacttggagcctgtggccaggaccacctcagcccctgggcctgcactgcctgcaggtgtggcccccttggcctggacctggggcctgaattgtgggaagggtggtttctttctttccttttttttcttttcttttttttttttttttttgtgcttcggagacatcagaattaataacactatttttgattttggttggcagtttctttttctacctgggaatgggtacatgatagtacaggcggctaagttgggatggacaagcacgcagaggggtgaaggatgtggggctgaagtctagtagagatcaagggcagaccaaggtggggttcaggtagaaccgggtcctcttcaccgcatggctgctcccttttcaagcctttatctgaagggtattgtctgccatttcccaccatatggtcagacttccaggtctggtggctcctacatttatcaggcttgttcttggccaaagcctttctctgcacctcagctgctccagggcgtaaagagatgacacctatctaaggtgtttttagaataaatgagagcgcgctagtggaatggttgcccagggcccagtgcttagcaagtgctccataaaatagtggcagactcttgagcacctgctggccgggagctggacgctaggtggcctccgctagccctcccggttggtctggaaggcaggcacaagtttctcaggagaggaaatggccttagaatgagcactgctcggtgctgacctccgccaggcctggaatccccgctgctgcgcttcccgccgcagacagctcccggccggccccgcctcccggcatggccccgcctcccagcatggccccgcccccaggcggagccggcgccgggagcggtagcgggagagcggcagcgggaccccagcgcgggcggcggcggctgggcgggagccccagaggtactggcgggagcaggggacgggaggcactactgtcgggcccgacaggggagaggtggcctagccgtgggcccgggtgatgtgtatgggagtggggtcctcgccacgttcgccgccagcaccctcccaacttccctccgg

SEQ ID NO: 7565 - DNA, 2300 bp, Homo sapien
cgcttcccgccgcagacagctcccggccggccccgcctcccggcatggccccgcctcccagcatggccccgcccccaggcggagccggcgccgggagcggtagcgggagagcggcagcgggaccccagcgcgggcggcggcggctgggcgggagccccagaggtactggcgggagcaggggacgggaggcactactgtcgggcccgacaggggagaggtggcctagccgtgggcccgggtgatgtgtatgggagtggggtcctcgccacgttcgccgccagcaccctcccaacttccctccgggctccagctcagtcccgagtcaatatgtccagccccctgtctctgaccagccgttcctactctctctgtgtgacggcttagcctggccagccagccggtgagtggaagcggcggctcctgactcctggtggcggcactgtgaccccctccccctcaacactgcaagtgtgtgcggggctcccccttattctgaggctcctcttcttcttaggcggcctccaccccagtccctggcctggcctgggaggaaacatctgtcgcgccccctggcagccgaaatggggtcatgacctccagatgtgctgggaagtggccagctcctcctcctggggcagccaggccttccggatctgtgggggcggggccggccctttccccccacccctagtgacacaggcccggaggaatgtcctagcctcaatggaccctgtgtgaagcttcagggtggggggcagagcccgagaacacccctcaaggcagcgccagagcctggcactgggccacagcaagaggcagcgcacaggctgggtgcacacatgcacagatctcacttccaagcgtgcagagctcagcccacaaggagcggggcttgcacagaccccctccctcatgccctcctactccttcacacactatagcccaggcccgagcgctgaatgtgcccagagcttggctcatggagccaggggctacacccgtcacacacacacatagctagcgacactcacctcattcttctcagtctctcagcagccttgggaggggacagaaataattaaacccaatttttttctttgtttttttggagacagtctcactctgtcccgcaggctggagttcagtggcgcgatctcggctcactgcaacctctgcctcccaggtttaagcgattctcctgcctcagcctcctgagtggctgggactacaggtgcgcaccaccacacccggctaatttttatgtttttagtagagacagggtttcaccatgttagctaggctggtcttgaactcctgacctcaggtgatccccccgccttggcctcccaaagtgctgggattacaggccacagccaccgcacccggccagttaaccccattttagagatgagaaaacagaggctcaaggtcagcatgggagtttattcaggagaaatcaaggtagaagcacctgggctggggagccgactcttgcttggttctggaggccccagacgaagggtgtgtggagcccctcctccacccccctccggcccagccccgcatgatgttgctggatgctgcatgaagacccaccattagatgcctgtacccccagtggaggttccccagctccctgtcctcactgcctactccatccagggcttgcctgggtgtggcttccctcaagttctcacaccaccatttgcacctgcctctggcgtcacgtttccgcacttagcaggtccctggggctttgggtgtctcaatcttgcatcctgtgagaccttgaacctcagcccaacacccaccccccaaaacctacgcacacagacagcagtgggcaggtgcagccctgcttagggcctggagatgggcagacccaggctcacatcctagctctgacacggaattgcttcaggcaagagcatctcctctggacctcatctgaccatctgtcacatggggttcagacctccctgtctgcatcagtgagaccaggtaggcagaggtccctatgggtccctgtcattgtgactcctcttgcccccaagcctgggcacagtagcctgcaagaaggtgagttggcctgtccttcagggcagggtgactggggtcccatgacagctgctgtgaccccagcaccttcctcaggatgtgggggcctggcagagggctgggcccacagttggggctacttcctgtgctgaaggaagtcctcttgccattcctgctgccctgccgctgcctccctgggaacccatgtgtccttgtggtattgaggccttgaggtccagggc

SEQ ID NO: 7566 - DNA, 2300 bp, Homo sapien
ggcagaggctggcgaatcacctgaggtcaggagttcgagaccagcctggccaacatggtgaaaccccgtctctactaaaaaaatacaaaaattagctgggcgtggtggttggcccctttaatcccagctactcaggaggctgaggcaggagaatcgcttgaacctaggaggcagaggttgcagtaagcagaatgccactgcattccagcctgcgcgacagagtgagactttgtctcaaaaaaaaaaaaaaaaaagttcaaaactaaggaaaaccaaaagatatattgtgtaggcatgcagatataactttttttttctttaaaatacagaattctgggccaggtgtggtggctcatgcctgtaatcccactttgggaggctgaggtgggaggatcgcttgagcccaggagtttgagaccagcctgggcaacacagtgagacccatctctatttacaataaattaattaattaattaatttaaaaaatacagaattctggcccagcgtggtggctcacgcctgtaatcccagcactttgtgaggccaagcggggaggaaagttgagctcaggagttcaagactagcctggacaacaaggttaaaccacttctttacaaaaaatacaaaaacttagccgggcatggtggtgtgctcccgtagtcccagctatgcaagaggctgaagtgggaggattgcttgagcccaggaggtagaggctgcagtgagcagagattgtgccactgcactccagcctgggcgacagagacagaccgtgtctcaaaaaataaataaataaataaatacaatacaatacaatacaatacaatacaatacaatacaatacaatacagaattctggatggtggtggccccttgagttttgcaatgggtacatgggtgtttatcgtattaatttaaaagttataaatatacatgaattttaagaagaggatccatgcaaggttcaatgataattgtatatcattaaccaaagattttaattaatccattctgtcacctgaagtcggcctcccccgccccctgccaaaagtaaacacttttctaatcagggccagccactggagaaactgaaatgagtgggcggggtgctaactctattttcacttttctcttcctgtttcttcagagcctgggaaacaagtcagaatttccaatcttttccaattcccacatgatttcctaatttaagacgaattcagagaaaataaaaaagtctttctccatctggagaagactccgccccctgcagtggagcatcctcctttggggatgaggcctggggtgggggtgcgtcagccccagcctccacacggacgcgccttgggcttggtcttgggggagctacctgcactgtggggtcacatgacagaattagtggtcagccctagctggaggtccagggcaaacacaggcgggggcaggggggtggggggtcgtgagcctgctgattcaagtgtccctgtgggtcccgcaccttctgagacacaagcgccaggcttcagagacgaggctccgggatttacccctgggggcctcctgctcccacagccgatgagagccggcagtttggctgtatcgtaagctggcgctttagctggagagggacgagccctcggccagctcgccagcgggagggcctcagtcgtcccatccgggctgtaggctccgcaaagctcttgatgcactgtcaggctgggaggtccggccgctcccattcccccacagccgcatctagattggggtgggtaggacattttaacgtgcttctgagacagccaccaccgaaaggcacctttagcggttaggaaacccgcgcggagttcaaccacccggcctctgcggagcagaaggcccggtcgggcttttccctgcgcggggcgggcggccgcagcccagtagccctggctttgctccagacccggcccagagtgacatcaccaaactccgccgatcggcgggagggggccctgaaatcccctaaaaacaaagtgagtaatcggcggacccaccctccaggcggggccgggacccgggagctagccgagccaccgggcacgccagcctcttcgtcctcggcgaggcgcgcacttggccccgacccccggcagcggctgtgcgtgcagcctcttcgtcctccgcgcggcgtgcacttgctcccggcccctgcgccgggcggcggcggggcagcgcgcaggcgcggccggattccgggcagtgacgcgacggcgggccgcgcggcgcatttccgcctctggcgaatggctcgtctgtagtgcacg

SEQ ID NO: 7567 - DNA, 2300 bp, Homo sapien
agtgccatggcaacggcaggaagttaccgaatatggtctaaaaaggggaggcatgaataatccgccccttgcttagcagatcatcaagaaataaccagaaaaatgggcaaccagcattgagttcctttactttcctaacaaacttgctttcactttatggcctcgccctcaattctttttttttttttttgagacggagtcttgttctgttcccaggctggagtgcagtggcctgatcttggctcactgcaacctccgcctcctgggttcaagcaattctccagcctcagcctcccgagtagctgggattacaggcgcgcaccaccacgcctgcctaatttttgtatttttagtagagatggggtttcatcatgttggtcaggctggtctcgaactcctgacctcaggttatccacctgcctggcctcccaaagtgctggactcgccctgaattctttattgcacgagatccaagaaccctctcttggggtctggatggggacccctttcctgtaacactgggattataggcgtaagccaccatgttcagccacctttgaggcaggaaaatagggtctggaggcagggaacatataaggctgattcacacttcagttatgacaggaaatatcctctccttagggagtacaccctaaatgactttgtaactttacttcatcctcttcatttacatatggcatatcccaaataaccaatggaatcctccaaagggtatttaaactccaacaaattctgtaactgggcccttgagcacctatgctcagccggccccaacactggagtgtactttcattttcaataaatcgttcattccttccttgctttgtgcattttgtccaattctttttttttttctttttctttgagacagagtcttgctctgtctggagtgcagtggcgcaatctcggctcactgcaagctctgcctcccgggttcacgccactctcctgcctctgcctcccgagtagctgggactacaggcgcctgccaccacgcccagctaattttttgtatttatttttagtagagacagggtttcaccgtgttggccaggatggtctcaatctcctgacctcgtgatccgcccgcctcggcctcccaaagtgctgggattataggcgtgagccaccgcgcccagccgttttgtcccattattttagatgccaagaacctgtacaccctccaccggtgacaccttcacagttttgaggagtattcatggggtattttgtaaaatgtttctcaattgggatttgtctgatgtttttctcatgattagactggaggcagctgggattacaggtgtgagccaccatgcccagtctccaaaccctgtttacacaaaaattttaaaaaactagccaggcttggtggtgcgcgcctgtagtcccagctactagagagcctgaggtggatcacttgatcccgggagggggaggctgcagtgagcggagattgtgcctcgctggctgcactccagcccgggcgagagagccagaccttgtctcaaaaaaaaaaaaaaaaaaaaaaaaagcctaatatggctgagggcggtggctcacgcctgtaatcccagtactttgtgaggccgaggcgggcggatcacgaggtcaagagctctagaccatcctggccaacatggtgaaaccccgcccgtactaaaaatacaaaaattagttgggtactcgggaggctgaggcaggagaatcgcttgaacccgggaggcgggggttacagggagctgagatcgcgccactgcactccagcctggcgacagagcgagactccgtctcaaaaataaatatatacaaattaaaaaagcctaatatacaaaataaagctaggaatcttccctgagtcctcttgcctacggaatgaagtccacagacttgggggagcgttcgaacccttctaaggccacttcctttctccagcctctcgcgcccagttgactcccggcaacacctcccgccgccacaaggagacgcccgaggacttccctccgacaaagccaaaaacggtattgccacgtgacccgctccgcatacacgtgaccagcttcgcacccggtgggcgtcacgtgacggactcagtagaccgccactggctgtgcacgttatggggtttccacctagggctcggcctgaggcttgtaacactccgttttcccccgagtcacaggggcagtcttgcccctcgcagctgggtcgcggtgtctctcaaaggtccccctctacaggggcttcgtgaggcccgggcccacagggcgctcggtccc

SEQ ID NO: 7568 - DNA, 2300 bp, Homo sapien
gcctcaaactccttggcttaagtgatcttcccaccttagcttcttgagtagctgggactacaggcacatgccactgtgccccactcatgtttaaaaaaatttttttctttgtaggaacggagtcttgctatgtttcccaggccggtctcaaactcctggcttcaagcaatcctcccccatcttggcctcctaaagcactggaattacaggtgtgaatcatcatgcccagcccctcagttcttaatagaaacaattattaatataagctaagaagaaataaactttacaatatgtattaatagctattatatatgaacaaaacctcacaactgtacagatatccaaggagatgtgaataaattgaattatgtctttcctgatagaaaactaaagcaagcctttttctaaattaatctgccactctagtgaaagagcaccaggaatacatctgcagttgaacaaattgggtatattactcctgcactctggggaatttcaataagagggtgctagaaaggacttataggaggatttgtgcccatgttcagtgatttcagtcagggtttagggaagccaggcttctctctggcttggatgctgtcagaggtgggggtatgtctatgacggactatcttaatgagtcttgcccagaaggagagaagattagttggaggctaatgctgtaattggtaaggaaacaacagtcactctcttatgggagaaagagggatgtttcatgccttttgtggtttggacagtgttcacctttgccagcattcagatgtgacgatggagtggttctgtttctgtcttgctccctcacggtcacagagtgaccttgtccgatgctgatgttctctgaaattgtttatattcaacagaataccaaggccagctcccagatgtgcagggatgtataaattaaacgcaatttaaatctaaatttccagttttgtgtttgttttatgtgagaacttgaaaaaatatatctaagttgggtgtctgaacaaataaacattagagaagagctgagaaaccaaagagagaaaattgtgaaatctaaaagactgaaaagtgttgataaatttgactacaaaaaattagtctttgtcctgggtgcagtggctcacgcctgtaattccagcgtgatttgggaggccaaggtgggcagatcacttgagtccaggagttcaagaccagcctgggcaacatggcaaaactccacctctaccaaaaatacaaaaattagctgcgtggtggcgcaggcctgtggttccagctacacaggaagctgaggatgggggatggattaagcctgggaggtcgaggctgcagtgagccaatcaaaccactgcactccagcctaggcgagtgagaccttgtctaaaagaccaaacaaccacaaaaataagtccttgtccagcaaaaatcacctttacacaggtttgcaagacagaccacagataaaacattttcaatgcatttaagaaaagggttgatgtccctaataaactaaaaatgaataacctacctactaatcaatataaaaagagtacttttcagaatcgttttagatttttacaacgacatgtgccattaaaaacaataaaagaaaaaaacccggctgggggcggtgtctcacgcctgtaatccaagtacttcagaaggccgaggctggaggatcgcctgaggtcaggagttcgagaccagcctggccaacatggcgaaacccagtctctactaaaaatacaaaaattaggtgggcatggtggtgtgcgcctgtaatcccagctactccggaggctgaggcaggagaatcgcttgaacccgggaggcggaggttgcagtgagctgagaccgtgcctggcactccagcctgggcgacaaaacgagactctgtcaaaaaaaaataataataaataagaaaaagaaagaaagagggaaggacgggaaggaagggaagggaaggggggaaggaagggaggcagggaggagggggaggggggagggggaaggaggggggagggggaaggagagggggagaggggagggaggaaagaggggaggggggaaggaaggaaggaaaaaaacaaaacacaactggaaaaccctaggacttgaacccagggaaagcgttagggggtaaggggactacacttcccgtgaagctccgcggcggcttcccgtgaggccccgcggaggcttcctgagaggtcctgcgcgctttccgcgccagcttcagtgtcagctcgcgagccctggcgtcgcgtaggagggaggatggagagcggcgacgaagc

SEQ ID NO: 7569 - DNA, 2300 bp, Homo sapien
ccgggaccgggccttctggctggacctgtccctccgagtgggtctctatctctccatccccaagggcacccagacagcctcctttttggcactctccacccctcaactctccaccacctcccatctggagcaggatggggtagggagaggccagctggcactggcttgcatgggggctcaggcctgtttcatcttcaaagcggctaattggagccagaggggtggtgaggtttgggcgccggcggttctgtgccctggaaaccggtggtctgtggggcacctgcaacctgggcctctggcctgggagagaccgccgcccagacccccgaatgcccccaaacagccagaatccagcccactgaagtctggagtgctgggttccggcccggcttggccccagatctcggttggcaaggccgccctcctcctgggcctgttttccccatcgctaggcatgcctcgagccccgtgaccggccaggccctgacagcccgcacttcccgagtatggatcccgttgttttcgacttagggccctgccccgccctcgccgtcacgacccctgcgggccgccagcgcggcctcgggcaaacaaaggtcagaagctcctggctggccgcaaccgcggcgccggctcctcgcccccaagccgagcgggctgggggcccgggcaggcgtcagggaagcgaagccaagccctgcggcgcccgccggaccggttcagctggggcgcttttcctgcgggcgccctgcgaccgcaccttggtcacccccaggggccactccgggagccccaggacccgcacccacgccccccggggccgcgcgtctggcgcagggtgcggtgtgcccgggcgccggcggggggcgcgctggctgccgccctgcgcggcttggcgggcgctggtgggaccgggccgctgtccgccgagggccgcgggatcgcagccctgcgccgcggtacccggcatctggggcccaggcccaccccgctccgccacccctacccactcccctccgcctttcctgccccggcctgcggcggtttcggggaagggggcctgcgcggcgggacagttagtcagcccccgcgaaacctgcgagtcgacacctgcgggaggcggtggccccgttacgccccgcccctccccgcccggactcggccgcccccgcgccgcgccccgccccgcgccgccagcccggaaggagccggccggcctgagtgcccgcggcggctgagtcaggcggcgagcgcggcccgttaccgccggcgccgggggccggggtggcgctgtggtttcggtgcgggccgcgggcgggagggaggcggcctaacgagctctcggcacgcaccctcccccgccctgctcctgtcctgtcccgcgagggccccggcgcccagctctggcgtcggccccgagagccctggtctcaccgtgggagccgggcgcgggtcccgccggcatctgcgcggcgtctgggggtgaccgcagcccctcggggtcggcagcgggccccgcgctcccggtggctgcggcctgagggtccctcttccctgcgcaggggcccgcgcgcctcaccatggggcccctgagccgggacgcctgggcccagcgcttgggggccttccgggccagcccgtctgccttcatggcaggtcccgagggggaggatttgggtcgcgacctgctgagcgacctgagaagtgagaagctgagcgaacagaccaaggtaggcccccacgcgtcccctgcgccgttccgcagggtcaccccagcccgccgcgtcatgaacctcatcttcgtgattccctcctaatcccccatccaggtttccctgctggccctgagcatggagtaccctgcgcagctgtggcccgacgcctctgcggccgaagtggccgccacctccctgttggacaccttggtcctcctacccccgcggccctcagctctccgtcggccactgctgctggcggccaccactgccctggcggcgggcggcgcgctgggccccacctcgggcgcctcctgccggctcctgcccctactgctcggcctggccgcgggtagcgatctggggcgaggctttgtccccgcctcggaacagcgccccttgcaggccacggcctgcgagtgcctgcgagagctagagagctgcaagcccgggctgctggggggctccctggggttgctgcggggcctgctggggcaggaaggccctgtccagccactcagcctgttgctggccctcgctttgcgcaacaccttggtgctccagtcccgggttggggctggcctg

SEQ ID NO: 7570 - DNA, 2300 bp, Homo sapien
caaacacctgtagtcccagctactcaggaggctgaggcaggaggatcacttgagcccagtaattcgagattgcaccactgtgctccagccaggcgacctggtgagaccccaactcttaaaattattttaaaaataaaaaaattgagctaacatttaaaaattagttgatttcacttacaaatctggacttctggcttctcttggaaaatggaaagctgtggccacgtggggtttgtgcatctgaatgacaggattgtgactgccgtttagatagggacattctctcccgtccccccaactctgttctccccaacggccagggccagttgtgttttctcactgaatttgtagtattgtcttcccatatctatgtctccaccaaaagttggactgtgaaaggtgaatgggtcacaggagtcaagaaaagaggatattcattcattcaacaaacatttattgataacccactttgtgccaggcacagctgtagatgctggagatatagcagtagacaacaccgcctcccacctggggccccattccacatcctgtaactcacttgtgcagggaggggttcccctggctggcttcactttatctacccagtgtcctgtccctctggacattggagttgctcccttgatggggaagactgccccttgtgtctagggacatctgtgaagacttcaccgtagtatccaccgagcacccactgtgtaccagcccatcagggcttggcacaacaaaactgctcaaccaatatttgttgaatgaatgaactaactgcacctctgtcctagacagattgtgtttaaggttgtttctcctggattcacctcaaaagataggcacataccaggtgttcacttaatgtcagttgaactcaaaggtctggctgggatcagagtggaggtcacagcccttagaaaggcaggggaagaggcaaacacgaacgccccatccctgcccttaagtaggtcagcgagtgaaggaagcccagccagcgcccaagtgtcacgatgagagtgtgggcttcatggaggcctctgaggagcgggggcatccctccacgtgggcctggggcctgaggagagtatgaagagtggctgggggcgcgggtcccaggctgaacctcagccctgggcaggccgtgggtaggaagctctccgcggtggccgcagcagggcaaaggcggctgagcctttcccggtctgaggtccccagccctccgcgctccaccagcctggctgcacctgaaatccacccatttgggacaaggaggagtttttttgaggatgcataagtcccactggccaagacacgggggtctgtcgggctctcggcgcactccgcgcagttgaagccacttcctccgtgaagccctccgggcagaaggcgggttctccgacgggtactcggtcgcgcggtccgtgcctccccacacaccggccggggccgctcctgcggccctgcgtgccttttcgcacaaagccggcgcccagcaaacacctccccggctgagccacgagttgcttagccaagcctttgggatcccgcgccgcctgggcccaggcccggttcaacaagtgcggaccgggccgcccgttcccgcccggcggcttcgcgcctccccaggagcctcgggcgcgccgggttgggccggccccagtggggcgagtttcgtgtcatcacccgcggagcgtgccagcgccggtgcaaataacgttgccccctccctcccggctccgctcgctccgaaactcctgtttgcaaacgccagtacgcctggctaggaggtcccgcgggggccgggccggctgggcagccaggggctgagtgcccgaagctcgccccccgaccccgccccgcccggccgccccgcccgggccgcgaggccacctcacccgcagcggaatggaaaccggttcgacaggtaacaaataggtgggttgtcaccgttatttcccaacgcatgcgccgtcgctccccgggccaccccaagctaattagatcagatcaccgccccccacccccacccccccccgccccagccaccaacacacaccgccgcgagccaataaagcgtgaacccgtccgtccggctcgcactttaagacttcccgagcggcggcggggacgccagtcgagccgggagacgcttacctgccgcttccccgcgccgcccggtgcacctggccgcaagggacctcgttctcagggaagacggcgacattccgcggaggtggaaccgccgcgcgccgtccgggctcggaccttccccggaacgtgggggcgcctta

SEQ ID NO: 7571 - DNA, 2300 bp, Homo sapien
tgtctgcctctttccttctttggtgtcaatccttcatctgcctcattcactggtaccttcacctataatatcttttttttccatagaaacagattcatcagtgatatctttcacttcactcaagatgcccccctcaactcccactcctttctcagtcccttgtagttcctcactccctttgacactttcaaaaggaatttccatctcatcatgagtaaatgccatcactctttcatcgccagtaacttctaccactttttcaatgttcttctcatttatgctccccattcttgaaccctccaatttctccccgctggtccctaacttctcctcactagatctcagcttctccgcacttgaccccagcttctctccactcaacctcagcttctctctgcttgatctcagcttctctccactggttcccagcttctctctgcttgatctcagcttctctccactcaacctcagcttctcatcacttgttcccagcttctctccactcaatctcagcttctctctgcttgatcttagcttctctccactcaacctcagcttctctctgcttgatcttagcttctctccactcaacctcagcttctcatcactggttcccagcttctctccactcaacctcagcttctctctgcttgatctcagcttctctccactcaacctcagcttctctccactcaacctcagcttctcatcactggttcccagcttctctccactcaacctcagcttctctctgattgatctcagcatctctccactcaacctcagcttctcatcactggttcccagcttctctccactagttcccagcttctctccactccatctcagcttctctctacttgatctcaaattctctccacttgatctcagctttctgccactggacctcagcttcactccactggacccctgcttctctcccctgcacaccagcttctcactagtagacctcagcttctctacacttgatctcatcttgtctacactagacctcaaccccttctcatcctgtcccagtttatatccattggatctcaagtcctctccactggtccctaccttctccccagcagacctcaacctctcttcaaacccagaccccttcataggccctgctgtcatccctgcactcttagatttagcctttatttcgtgtttgacctcttgctttccccaaataccccttgggctgtctttccccaaatctgctgaagcttgtgatgcacttgctccacggtatagcagcttcacatccatcctttcctgactcgggcctgacttccctttcaagaccgtcttttccacatcttccagtctccagtactcagactccagcttcggctttcgagtgtttctagtcaggagctccactctcttcccaattaccatgagcccgttccaaggtccccaggttttctctcgcagcatcggcacccccttgcagccccgctccagtggcgaccgttcgcggaccccggcctcgcttggggcgccctggccgcgggacttgtggagctccctagtcctcctaggctgcttaccccgccgctccctcccgtccaagagcggaaacctaaacagaccccccttctccacagacattgtcccctgccctcgcccctggtccaccacccacatccccaccactgcttcccattccctgtccccaccctgccaccctcaccctcttccccttccccttccccttccccactgcctggtgggcgccaaactgggcgagtgcgcacgcgcaggccgcacgtggccgttggaaggaggggcccggaacggcggcacggggttgttgtgggggtcagtcccccggggactggagggagacgcggcacgcggcctctgcgaccctatgaactctgaccccagctcccacactgtcgcctatcaccggcccactctccgtgccgcgtgtcccttaaaagctggggcctgggacaggaacgacagacaatgcagccaatggcgtcacgcgcggtgccccgctacccaatcgaaaggcgtggctgagggaaacgcggtgggaaccgcccccgactccaggcgactccttggccgggcgggggagagcgtccccgtcagctgagagcatcctcactcggtcagttcctcgggcgagttacggggacgacctgcgggagcacgcgggcagtggccggacgctgaagcccaggagagcgatggagacgtatgcggaggttgggaaggagggcaaggtagagaaaggatgaagacccccaccccagcctcccctcactccatgaaag

SEQ ID NO: 7572 - DNA, 2300 bp, Homo sapien
ttcgtttccggaaacatggtgagcggcaggccacggcgcctgagggaggcggctgcgggtcggtcgcctgcgcgcgggaagcgactggggagcgacgtccgcaccccctcccccagcgccccgggcgggatgagggtctcgcacgaaggggcgggcggtgccggaatgcgcgtgcgcgcccgtgggcgccggggagggccggtctggacgtcgctcgcgctccgcctgggctcccctcccccacccgctggtgcgcccgcgcggacaccggccgcggggggaggggttcggggcgcgcgctggggcgcccctcgcggaacggccggcgtcgcgcctttcttcttaggggcgcgctctcgactggagcatgcggcgtccaaacccggcccgggggcggcgaggaaaaagcgcgcgagaggtctcggcgcgcgcgccccacccaaggctgttcctgtctgcgcgtcaccctccctcggcagccgggtccgtctcgggagcaggtggcagggatgcctgcgcccgggaggggcgggtgctggcgcggcgaggggtgatgctgggaagacggggtcccggttggggcgtgggtgcctgcgattaaggccttgcaccgcaaggcttggagggggcatcgcagagaccgcggcccgttcgggagcgcatctaacgagctgcgttctcacccgtgcatcgggcgagggctggaacggcgctgtctgtcggcgcgtgcgcgcacgctcaggcccggccgccggtgccgaagccctgggccagcgaggccttcccggatgggcctgagtgagggtggagccgagtttagggaagtgacccaggcgggcaccgcccggaaaccaccccgccccctgtatacggcccgagggctgagaaaaccgaaggttatgtagcttgcccaggctcctgcctgcaggagatgggtctgatacacccgttgttttagggcgattccacagggttagggacctggagatgctgctgcctctcggatacgcgtttctgcattggtgagggggccgggcccagccgatctcctgtccccgcccactccggatgcggccgagtcacgtggccggcttcttctgcagttccggggagtttgggggaccagatttaccttggattgcccctccctctcctggctcgggcaccccgaagcacgacgcagagtaggaagagtttaaagacctcgaggcctctgggcacttgagtttggcatgttaatttttatcagcgacttctggggcctagcaccattcccggaagaagggagttgtcgggcagggtccttaatgggggttgcaattcttgtcttggttgggaaagagcctagctgggaacaggggtcgtttgtgtagtaactgtattaagcagttctggtgggtttgttgtaactgttcggtgtccttggggtcccatctagcattgtggggtcttggctctttctgaagaggagtcttggctcaggtgtttgggtcctccatatccgaagttctaaatcaccagttttatccaaaggctgagagcaagtactgtgagtagcaaatgagtcagtagccggtggatcttttaattctgggttcacattttggtcaaggttctgcttttcacgagttttgcatttctatcctgtaaaatgagggaaggggttgttgaactaggtgatcagaggccatggctgccattctgaggttgtgtcccatctggttctttgacagtgacttgggtgggaaaactagtgacttgccttgggaagggcactagtgaccactcgggacgtggactgagatcttctgaaaaaacaaggggcagttccctagaatccttttcttgacgtatacgtggcatgtctcctaggcctccggtgtggctgtctctgatggtgtcatcaaggtgttcaacgacatgaaggtgcgtaagtcttcaacgccagaggaggtgaagaagcgcaagaaggcggtgctcttctgcctgagtgaggacaagaagaacatcatcctggaggagggcaaggagatcctggtgggcgatgtgggccagactgtcgacgacccctacgccacctttgtcaagatgctgccagataaggactgccgctatgccctctatgatgcaacctatgagaccaaggagagcaagaaggaggatctggtgtttatcttctggtgagctcattctggcacttcttcctgtcacctgccccctttctcatgatgggaacttctgtggctcctggtcaacccagatgtgtgggtttggagggggagggggttgtaacaaaagac

SEQ ID NO: 7573 - DNA, 2300 bp, Homo sapien
caccccagattcgagagcggggtctttgtgtaggcgagaggaaggcggacagcgccccctgtgacggggaggactggctgggcggcgcttaacggactaacctgagcttggcggctctaaggtctcttaagattgtcagcttcagcctcaagcttgaaggaggctggagatggagactggtcttgaaaagagtccaggagaggcgggggctaggagacaaacgggtgcaaacgtattggtgggagggacacccagaaatgggtgccggggatgaggacacaaaggtaaggcaggaggagctgcaggacccttggaggaaatggtgatcctcatccccgggatacagggcaaagagtgtgtggtggagaggaagtcggggacgtgccgagaaggcccaaaatagaactcggaatgtcgggggtcagaggcctagaggaaggaggactgtaagtaagaggtgcttgggcatcctggcagttggggaggcctgagatgggcacgcggttgggtttgggagcggaggagcaggctgcgggttaagaagcccagacacaggtagaggggagaacacttcgtcatttttgtggctaatcggaagtgggagaccctcagggaggttgaagatggaaaccctacaaagggcttcaacctgagaagcctgaaagacacgtatagctgagttggacacaggcgacccgccagggtttgaagcagcacccggcctctagctgctatgccggaagtcgcaacacgcaggtctccagcctgcgaggaagggagaggtgggcgccagagctccagtcccgcccctcaggactgtgcctagcccacggcgcagtagccccagccaagctaaattggaccaatgggctccggctcccgcctcccgcccgccgcggccttataaggagcctcaagccggctgtcgggctggccccgccccctcgagtctcttgtcctaataaggacatctagggcatcccgcggctgggggcgggcgagagcgcgtctccagggtaactgcgaagcccccctctctctccccgttgctcttggaaactctaaggctcagaaaagggggcgctagcctcatattcatgtagggtcgctcgcgggaggcggggtcaagctgctgtctccacctggagcgccgggagtccgggcgggggcggtgctgtggaatgtccccgactacaacccccggtatgctctgcaaggtaccccactcccaggcatcgctctccgtttacacccttaattccgtttataggattagggcccccagttccctttctgggtttgcctctgacttgtttgcgacccagtcttttcctgcagagtgtgaggctgtggtcactgttctagaacaacaaaatcatcccggagtcccccgctcgtttctttttttttttaaggcatatactaccacagaacttgtctcagttttgcggatgttagaataaccatgtacctggctatcaactcgagagctgggttcaagtctggtttaatatctatttcttctcattggcacgtaaaggcatgtaaagaagccttgaattgaatgcacaaaccctcgtctttaccctttaacgcctcatgactttgccaaacatctttaaacaagaacaaagctctcagagatttccttgtacctttcccctgtgccttttcctcctattcttgttttactgacgttggacatggccttttttcaggagacgagagtggctttacacatgcagagtactagtgtttatccgactgacgacgccttcatacttgtgatttcctttgctttaggtcgggattccaggctaatcaatagttgcttcgattcagaaatgcaaaaccctaacctcactcaaaaatttcaggccaagggatccagataataccagatgggtcttaagaaagccgttttgctgtgggataaagagccgcttagtcggggatcgttttcgggtcattttactgagcgccgcctcgccgggctcagagcggttcctgggaaattggaccaatgggctcgcgctgcgcgctgcggtgccgcccaggacctgggcctacatttccctacatgcactgcagctcggagccggccggcgggaagactccgttacccagcgagcgaggcggcggcgcagggccagcggactccatttcccgtcggctcgcggtgggagcgccggaagcccgccccacccctcattgtgcggctcctactaaacggaaggggccgggagaggccgcgttcagtcgggtcccggcagcggctgcagcgctctcgtcttctgcgg

SEQ ID NO: 7574 - DNA, 2300 bp, Homo sapien
ctgggtaacggagtcttcccgccggccggctccgagctgcagtgcatgtagggaaatgtaggcccaggtcctgggcggcaccgcagcgcgcagcgcgagcccattggtccaatttcccaggaaccgctctgagcccggcgaggcggcgctcagtaaaatgacccgaaaacgatccccgactaagcggctctttatcccacagcaaaacggctttcttaagacccatctggtattatctggatcccttggcctgaaatttttgagtgaggttagggttttgcatttctgaatcgaagcaactattgattagcctggaatcccgacctaaagcaaaggaaatcacaagtatgaaggcgtcgtcagtcggataaacactagtactctgcatgtgtaaagccactctcgtctcctgaaaaaaggccatgtccaacgtcagtaaaacaagaataggaggaaaaggcacaggggaaaggtacaaggaaatctctgagagctttgttcttgtttaaagatgtttggcaaagtcatgaggcgttaaagggtaaagacgagggtttgtgcattcaattcaaggcttctttacatgcctttacgtgccaatgagaagaaatagatattaaaccagacttgaacccagctctcgagttgatagccaggtacatggttattctaacatccgcaaaactgagacaagttctgtggtagtatatgccttaaaaaaaaaaagaaacgagcgggggactccgggatgattttgttgttctagaacagtgaccacagcctcacactctgcaggaaaagactgggtcgcaaacaagtcagaggcaaacccagaaagggaactgggggccctaatcctataaacggaattaagggtgtaaacggagagcgatgcctgggagtggggtaccttgcagagcataccgggggttgtagtcggggacattccacagcaccgcccccgcccggactcccggcgctccaggtggagacagcagcttgaccccgcctcccgcgagcgaccctacatgaatatgaggctagcgcccccttttctgagccttagagtttccaagagcaacggggagagagaggggggcttcgcagttaccctggagacgcgctctcgcccgcccccagccgcgggatgccctagatgtccttattaggacaagagactcgagggggcggggccagcccgacagccggcttgaggctccttataaggccgcggcgggcgggaggcgggagccggagcccattggtccaatttagcttggctggggctactgcgccgtgggctaggcacagtcctgaggggcgggactggagctctggcgcccacctctcccttcctcgcaggctggagacctgcgtgttgcgacttccggcatagcagctagaggccgggtgctgcttcaaaccctggcgggtcgcctgtgtccaactcagctatacgtgtctttcaggcttctcaggttgaagccctttgtagggtttccatcttcaacctccctgagggtctcccacttccgattagccacaaaaatgacgaagtgttctcccctctacctgtgtctgggcttcttaacccgcagcctgctcctccgctcccaaacccaaccgcgtgcccatctcaggcctccccaactgccaggatgcccaagcacctcttacttacagtcctccttcctctaggcctctgacccccgacattccgagttctattttgggccttctcggcacgtccccgacttcctctccaccacacactctttgccctgtatcccggggatgaggatcaccatttcctccaagggtcctgcagctcctcctgccttacctttgtgtcctcatccccggcacccatttctgggtgtccctcccaccaatacgtttgcacccgtttgtctcctagcccccgcctctcctggactcttttcaagaccagtctccatctccagcctccttcaagcttgaggctgaagctgacaatcttaagagaccttagagccgccaagctcaggttagtccgttaagcgccgcccagccagtcctccccgtcacagggggcgctgtccgccttcctctcgcctacacaaagaccccgctctcgaatctggggtgacaggaaggagccggtccaggctccgggggctgggaaagggcgcgtctcaaaggctggctggagtggagccaagggaaaagatcgttagagacagcgcccctgaccaaccacttagagcagcgcaggggtgggagggcggccgcaggctctcctctcgttagtgccccctgtg

SEQ ID NO: 7575 - DNA, 2300 bp, Homo sapien
ggcttgccaaatcccccaagccagaaaatcatactcccgcactcccactttgccttccactccccttgccccttcctcactggcatggaagagtcctggacttccgcaagtcgcccctgcggggctggactgttctctccagatggtgagtccggggcatggtcacctgcgggagagaaaagagttaactccacactccacgaatccggcagctgcgaggatctgggatgcaacctactcagatggttacgtgagaccggtgagggaggctcagggagcgccagccactagccctaggccgaacggcaactgggacaggagtggggagcttaaaagccaagggctcccaggagagtacggaggctccacctgggggaggtgggggatcaccgacccctttccgaggcgctcaccgcccgatgttcggtgccgctgcagccgctcgtccagcatccggcagagcccgtctccgaagtgctgtaggatcttagcttccttcccgctgcgcagcggcagtgggtaccgtcggagggaacgcagcgcctggccgggcaggggtagggtacctggtcagggcaggcctgacctggccagcagcttttcccatcgggccacgccaggacccaccttctgaaatacgaagcgcgtgcggcgcctgctgcgggtcgcctcgtcccgccactcggtcagccagcgaacgaagagcgggttgggacaggcaggcagcgggcgcttccggcccaggcggaccggggccgccatgagcccgagggcgggtcctccggcgctccacgcccgcgggactgggacgccgccagttctggagtcgggattcgaacacctggcccagggcggggcgggggaagagggagaccgagggcaggaccgttgagatcacggggccccaaacacagggggcactaacgagaggagagcctgcggccgccctcccacccctgcgctgctctaagtggttggtcaggggcgctgtctctaacgatcttttcccttggctccactccagccagcctttgagacgcgccctttcccagcccccggagcctggaccggctccttcctgtcaccccagattcgagagcggggtctttgtgtaggcgagaggaaggcggacagcgccccctgtgacggggaggactggctgggcggcgcttaacggactaacctgagcttggcggctctaaggtctcttaagattgtcagcttcagcctcaagcttgaaggaggctggagatggagactggtcttgaaaagagtccaggagaggcgggggctaggagacaaacgggtgcaaacgtattggtgggagggacacccagaaatgggtgccggggatgaggacacaaaggtaaggcaggaggagctgcaggacccttggaggaaatggtgatcctcatccccgggatacagggcaaagagtgtgtggtggagaggaagtcggggacgtgccgagaaggcccaaaatagaactcggaatgtcgggggtcagaggcctagaggaaggaggactgtaagtaagaggtgcttgggcatcctggcagttggggaggcctgagatgggcacgcggttgggtttgggagcggaggagcaggctgcgggttaagaagcccagacacaggtagaggggagaacacttcgtcatttttgtggctaatcggaagtgggagaccctcagggaggttgaagatggaaaccctacaaagggcttcaacctgagaagcctgaaagacacgtatagctgagttggacacaggcgacccgccagggtttgaagcagcacccggcctctagctgctatgccggaagtcgcaacacgcaggtctccagcctgcgaggaagggagaggtgggcgccagagctccagtcccgcccctcaggactgtgcctagcccacggcgcagtagccccagccaagctaaattggaccaatgggctccggctcccgcctcccgcccgccgcggccttataaggagcctcaagccggctgtcgggctggccccgccccctcgagtctcttgtcctaataaggacatctagggcatcccgcggctgggggcgggcgagagcgcgtctccagggtaactgcgaagcccccctctctctccccgttgctcttggaaactctaaggctcagaaaagggggcgctagcctcatattcatgtagggtcgctcgcgggaggcggggtcaagctgctgtctccacctggagcgccgggagtccgggcgggggcggtgctgtggaatgtccccgactacaacccccggtatgctctgcaagg

SEQ ID NO: 7576 - DNA, 2300 bp, Homo sapien
ccaggaatgcacagatggctatgagtgggacccagacagccagcactgccggggtgtgtgtgcctgggggaccaaacacccccaggaacccggaaagggattgatagctgctttccaagggacagccccacctccaagaactgccgtgggagcccagcagcccgttctatgcccagctctgctacacagaggccagctctggctctctggaggccagttgagctaggggtggcctcatcctctcccagaaacccaggaaaccttgtccctacccctcagaggagctggatcctgtacgccttctctgaaccactctcctgtcccagctctttgtctcatcacaacctgggagggtagcgtccccaggggtgggtaaggaggccccccatcttgggctgagctagggctagggccgtggggagggatagagacccacttgcaggccgagaatgagggcaacagtgggaacagctgccccatctccagccttggccaaccctggggaggggtcctgagcaggcagacttagcttgttgagcagagtgggaaggctttgctggggccacacatctcagagaaggccgagctgggttcctgcctccgctccctccagggccagcccaggagactggctgtgcccagcaggcccctctctgcagatgtcaacgagtgtctgaccatccctgaggcctgcaagggggaaatgaagtgcatcaaccactacgggggctacttgtgcctgccccgctccgctgccgtcatcaacgacctacacggcgagggacccccgccaccagtgcctcccgctcaacaccccaacccctgcccaccaggctatgagcccgacgatcaggacagctgtgtgggtgagtggggactgctctggtgcctggcttccagtcctctcaccaggcgtcttaaactcagacctcatgttcctccccagctcaaaagggccactggtgatgtccacaccctcatccagacactcatgttgtttaggacctgccgcaggtggccccagcttgtgtgccactgctccagccagctccgggcccctcccctcggttgctgcagagacactgcaggaagtctgccttccagtgtctgtcccctgggagccacaggccttggaggaaggacagtccaggaatcagtgttgctggggatgtttggacaggaccttatttcctgtgcaacccccaacatgtggttttagaggttaggggtgcctttcctgatggctccaggctggtgaactcttacgcgtgctgttgagagaaccgaatacaagtgttggaactatctgtcatgttgggtggtgtgcgggatcccaggcaggggctgagtggtgtctctcgcagatgtggacgagtgtgcccaggccctgcacgactgtcgccccagccaggactgccataacttgcctggctcctatcagtgcacctgccctgatggttaccgcaagatcgggcccgagtgtgtgggtgagtccaggaagcagcttctgtagtcccggctttgtgtccctggtctggcccttgccctagcacctgacccccattcaagccaggcttcacccccggcccctgccacctcaccctccgtcatcagacacagaggactgtagcggggagtgtttgggaggtgtcctggctgaccctgcctaattcagctcctcggacacaggattatgggtggtgaagccttgagtcccagccggctcgagcccacctgccctctgccctctgccctccgccctccttctcctgcctctatccctagacatagacgagtgccgctaccgctactgccagcaccgctgcgtgaacctgcctggctccttccgctgccagtgcgagccgggcttccagctggggcctaacaaccgctcctgtgttggtgaggctgggctgggccaggctcctgggtcctgggcagggaggtgtgaggtgggggcgctcccttcttgaccagcccaggtagagtggaggctctgggctcctcctccgctttcatccctcctgtttttcctggcacccccagatgtgaacgagtgtgacatgggggccccatgcgagcagcgctgcttcaactcctatgggaccttcctgtgtcgctgccaccagggctatgagctgcatcgggatggcttctcctgcagtggtgagagctccatccctgctgtgtactcctctgtggacccccaggccctagctatgccgtgcctcctgccacacagttctccatttgaggcctccgcctcctgtcactgtgcacccagctgcctcctgggtact

SEQ ID NO: 7577 - DNA, 2300 bp, Homo sapien
gcgccaccacgcctggctaatttttatatttttagtagagacggggtttcaccatgttgtccagactggtctcgaactcctgacctcaggtgatccacctgcctcggcctctcaaagtgctgggattacaggcttgagccaccgcgtccggcccctaaagagctattatttaaccttctgccccagcagctgggagggatggtggtggcagagtggcgaggagcgggcactgcgcagttcacctgagccccaggcgctcgccgcgggacccaccagcacgtcccctcctcggcagactccctccccggggtcacgtggagggcgactgcggggataagcagggatggcaaggggaaaggaagggcgggccccaggcgggggatccccggacacgcagtgctttcccgcctggccccgcccaaagacgtgggcaaacagaggccacgcccttcctgggagccagccccgcccatactccgccccaaggacacgcccccacttcgggcggaggcggaaaccgggcgggggacgctggtgcgaggaggtcgaggaggcgccttggcacccgactctggcatcccgcacgtccgacatcagccctgccctccttctcaggggcttccattcattttgtgccaaaagggaactgccgccctcgcccccaaacttgtagctttgtggatggagggtgtgggggaggccgtgtgtagtgaaaggaccacccggctgaagacggtcctgggggtggagggcaggagggagcgagaaggacagttctgctcctgggagcctctcgttcctgggcgagggtctggggaccctggatgaagttttaggatcttttacaatgacggtctggggcagagaataaaattttgcagggagcagattgagggtctggaggactgggttaggtgggctctaggtacccaggacgatctcgggaggcgcacaatgagaatctgggggctccaggattacggtgtgggtgcacaggatgaaattctgggggcgcagattaggtaggacctaggtgagcaggatgacatttttggtgagcgtctgggggcccccgggtgagtctgggggcctggcatcaaggtcggggccccaggatcgagcactgggggaccctggtccggcgccgggaggcggctcctggcggcgccgcgggggaccgggtaggggcctgtggctggccgggggcggagaagcggggggtcggggtccctccccctggcgctggctcaggaatccgccgaagggcgggcggaggcgccggggtgggccgcgccgcggcaggcgggcgggcggggggcgcttcctggggccgcgcgtccagggagctgtgccgtccgcccgtccgtctgcccgcaggcattgcccgagccagccgagccgccagagccgcgggccgcgggggtgtcgcgggcccaagtgagtggctgtgaccgtccgtgggggagggcgtgggccggagtctcggccgagtccgcggcagcgtagcgcccacagaggcccgcgctcctcggccttcgccgcaggggcgcggggcgggggcggggtggccggggcgggtgggcctgggacccgggcctgggacctgggcctgtgaggagtcggcccccagccctgggaggccccgaggcccaagcacggtcctgagcgggcagtggcgggggctgggctcgggctcccggtacagggagttgaggtgccgcgggcagaggcccctgacccgtgtccaccatctcgcagccccaggatgctcccctgcgcctcctgcctacccgggtctctactgctctgggcgctgctactgttgctcttgggatcagcttctcctcaggattctgaagagcccgacagctacacggtggggacagtgagggccgctggcctgggacaggaagggtagggaggaagagaccgggacccagggtgactgctgccggggaagtcttcctcccctggctggtggagagctgggggccattgtttggagcaggccggagggtggccaggctcaggccctagtcttggcctggccagttggaggagatcttagggtgaccactggccacttctggttcccttccaggaatgcacagatggctatgagtgggacccagacagccagcactgccggggtgtgtgtgcctgggggaccaaacacccccaggaacccggaaagggattgatagctgctttccaagggacagccccacctccaagaactgccgtgggagcccagcagcccgttctatgcccagctctgctacacagaggccagctctggc

SEQ ID NO: 7578 - DNA, 2300 bp, Homo sapien
acctatattgtggcatgcatcagtacttcattagtttttatggctgaataatgttcgactgtgtggatgtactgcatcttgttattcatcagttgacggcttttgtgttgtttctgcatttggctcttatatatagtgcagctataaacgctgcgtacagatttgtgtgtgtgtacatatcttttcaattatcctaggtatgtatacctaggagtgaaattgtcaggtcatgtgataacattttgaggaactgccagaccattgtccaccaacagtgcatgagggctccagtttctccgtatctttgccaacacttgttactgtctttctcgttttaaagagctattattattattactatttttgagatggagtctcgctctgtcgcccaggctggagtgcaatggcacaatctcggctcattgcaacaactgcctcccgggtttaagagattattctgcctcagactcccgagtagctgggattagaggcacgtgccactacaccagctaatttctttgtgtttttgtaaagacagggtttcaccatgttggccaggctggtcttgaactcctgaccttgtgatctgcccaccttggcctcccaaagtgttggggttacaggcgtgagccaccgcgtcgggcctattattattattattattttaagatggagtctccctctgtcacccatggagtgcagcagtgtgatctgggctctctgcaacctccacctcccgagttcaggtgattctcctgcctcaggctcctgagtagctgcgactacaggcacgcgccaccacgcctggctaatttttatatttttagtagagacggggtttcaccatgttgtccagactggtctcgaactcctgacctcaggtgatccacctgcctcggcctctcaaagtgctgggattacaggcttgagccaccgcgtccggcccctaaagagctattatttaaccttctgccccagcagctgggagggatggtggtggcagagtggcgaggagcgggcactgcgcagttcacctgagccccaggcgctcgccgcgggacccaccagcacgtcccctcctcggcagactccctccccggggtcacgtggagggcgactgcggggataagcagggatggcaaggggaaaggaagggcgggccccaggcgggggatccccggacacgcagtgctttcccgcctggccccgcccaaagacgtgggcaaacagaggccacgcccttcctgggagccagccccgcccatactccgccccaaggacacgcccccacttcgggcggaggcggaaaccgggcgggggacgctggtgcgaggaggtcgaggaggcgccttggcacccgactctggcatcccgcacgtccgacatcagccctgccctccttctcaggggcttccattcattttgtgccaaaagggaactgccgccctcgcccccaaacttgtagctttgtggatggagggtgtgggggaggccgtgtgtagtgaaaggaccacccggctgaagacggtcctgggggtggagggcaggagggagcgagaaggacagttctgctcctgggagcctctcgttcctgggcgagggtctggggaccctggatgaagttttaggatcttttacaatgacggtctggggcagagaataaaattttgcagggagcagattgagggtctggaggactgggttaggtgggctctaggtacccaggacgatctcgggaggcgcacaatgagaatctgggggctccaggattacggtgtgggtgcacaggatgaaattctgggggcgcagattaggtaggacctaggtgagcaggatgacatttttggtgagcgtctgggggcccccgggtgagtctgggggcctggcatcaaggtcggggccccaggatcgagcactgggggaccctggtccggcgccgggaggcggctcctggcggcgccgcgggggaccgggtaggggcctgtggctggccgggggcggagaagcggggggtcggggtccctccccctggcgctggctcaggaatccgccgaagggcgggcggaggcgccggggtgggccgcgccgcggcaggcgggcgggcggggggcgcttcctggggccgcgcgtccagggagctgtgccgtccgcccgtccgtctgcccgcaggcattgcccgagccagccgagccgccagagccgcgggccgcgggggtgtcgcgggcccaagtgagtggctgtgaccgtccgtgggggagggcgtgggccggagtctcggccgagtccgcggcagcgtagcg

SEQ ID NO: 7579 - DNA, 2300 bp, Homo sapien
acccagaccccattagcagacactccccattccccaccttcctctggcaaccattaatctactttctgtttttctgggtttgcctattctggttatttcatataaatggaatacgtgggccaggcacggtggctcacgcctgtaatccaagcactttgggaggccagggtgggtggatcacctgaggtcgggagttcgagaccagcctgaccaatatggtgaaaccccatctcggctaaaaatacaaaattagccaggtgtggtggcaggcacctgtaatcccagccattccggagcctgaggtaggagaattgcttgaacccaggaggcagagattgtggtgagctgagatcatgccattgcactccagcctgggcaacaagagcgaaactccatctaaaaaaaataaaaaataaatggaatatgtggctttttgtgtctggcttctttcacttcacatagtagtttcaagaattcacctatattggccgggcgcggtggctcacgcctgtaatcccagcactttgggaggccaaggtaggcggatcacaaggtcaggagattgagaccatcctggctaacacggtgaaaccccatctctactaaaaatacaaaaaattagccgggcctggtggcgggtgcctgtagtcccagctactcaggaggctgaggcaggagaatggcgtgaacccaggaagcggagctggcagtgagccgagatggcgccactgcactccagcctgggcgacagagcaagactccgtctcaattaaaaaaaaaaaaaaaaaaaagaattcacctatattgtggcatgcatcagtacttcattagtttttatggctgaataatgttcgactgtgtggatgtactgcatcttgttattcatcagttgacggcttttgtgttgtttctgcatttggctcttatatatagtgcagctataaacgctgcgtacagatttgtgtgtgtgtacatatcttttcaattatcctaggtatgtatacctaggagtgaaattgtcaggtcatgtgataacattttgaggaactgccagaccattgtccaccaacagtgcatgagggctccagtttctccgtatctttgccaacacttgttactgtctttctcgttttaaagagctattattattattactatttttgagatggagtctcgctctgtcgcccaggctggagtgcaatggcacaatctcggctcattgcaacaactgcctcccgggtttaagagattattctgcctcagactcccgagtagctgggattagaggcacgtgccactacaccagctaatttctttgtgtttttgtaaagacagggtttcaccatgttggccaggctggtcttgaactcctgaccttgtgatctgcccaccttggcctcccaaagtgttggggttacaggcgtgagccaccgcgtcgggcctattattattattattattttaagatggagtctccctctgtcacccatggagtgcagcagtgtgatctgggctctctgcaacctccacctcccgagttcaggtgattctcctgcctcaggctcctgagtagctgcgactacaggcacgcgccaccacgcctggctaatttttatatttttagtagagacggggtttcaccatgttgtccagactggtctcgaactcctgacctcaggtgatccacctgcctcggcctctcaaagtgctgggattacaggcttgagccaccgcgtccggcccctaaagagctattatttaaccttctgccccagcagctgggagggatggtggtggcagagtggcgaggagcgggcactgcgcagttcacctgagccccaggcgctcgccgcgggacccaccagcacgtcccctcctcggcagactccctccccggggtcacgtggagggcgactgcggggataagcagggatggcaaggggaaaggaagggcgggccccaggcgggggatccccggacacgcagtgctttcccgcctggccccgcccaaagacgtgggcaaacagaggccacgcccttcctgggagccagccccgcccatactccgccccaaggacacgcccccacttcgggcggaggcggaaaccgggcgggggacgctggtgcgaggaggtcgaggaggcgccttggcacccgactctggcatcccgcacgtccgacatcagccctgccctccttctcaggggcttccattcattttgtgccaaaagggaactgccgccctcgcccccaaacttgtagctttgtggatggagggtgtgggggaggccgtgtgtagt

SEQ ID NO: 7580 - DNA, 2300 bp, Homo sapien
tgcttttcagatagagaagccccttggtttactctctgggcagggtgacaaagtgtggcctcacgactctgggaggaatcctaataaagaaacatggtaggccgggcgtggtggctcacgcctgtaatcccagcactttgggaggccgaggcgagcggatcacgaggtcaagagatcaagaccatcctggctaacatggtgaaaccctgtctctactaaaaaatacaaaaaattagccgggcgtggtggcgggtgcctgtagtcccagctactcgggaggccgaggcaggagaatggcgtgaacccaggaggtggaggttccagtgagccgagatcgcaccactgcactccagcctgggcgacagagcgagactccgtctcaaaaaaacaaacaaaaaaaagaaacgcagtagtgagcatgtaagtgaataaatcccaggattatagctgtcctgtctcccaccccatggaaccctagaaagccagctcttcacacccttctctggtcttggtcaccagttctcagcctgaactcctataggggaggtccccagcccaaggacccacttagaacaaaggcagcagtaacgggtgttaatgctgctgcccagcccttgacctcacaagtcaggctttggcctccctccgtctgtgatgctcaccctgttatccttctggctcttcagccccctcatcctcatccctagaccgtgggagggatgaggaacgggaggcactggctgcagttgctgctcccggactctgactctgcgctttcctgttttgttttgttttttgagatggagtttcacttttgttgcccaggctggagtgtaatggtgcgatctcggctcactgcaacctccacctctcaggttcaagtgattcttgtgcctcagcctcccgagtaactgggattataggcgcccgccaccatgcccagctgcttttttgtatttttagtagagacagggtttcaccatgttggccaggctggtctccaactcctgacctcaggtgatccacccgcctcggcctcccaaagtgctgggattacaagcgtgagccaccgtgcctggcctggttttgtttttttgacacaggatcttggacccacgctggagtgcagaggcatgatcatagctcactgcagccttaatcttccaggctcaagcaatcccactggcctcagcctccccagtagctgggactacaggagagcaccaccatgcttggctaacttttttttttttaagtagagatgaagccttgctcagttgtccaagtttgtctccaactcctgagctcaaatgattctcctaccttggcctcccaaagtgatgagattacaggcatgagccattatgcccggcctgctttcctgtttaaaactcatgatgatcaattgttcagtcaacaaacacctagcgagcctgactcatgcctagccctatcctgggaaccgaggacaccgaggacacaagcgaactgaacacttctggtgtggttggaggcagatgcccaatgggcacaggtgcagctgggctgaaggggctgcaaagcttctaccagaggttggggaagcagggaaggcttcttgaaagaggcggccattgagctgactgagcttcataggatgagcaagagtggttcccttggctgggcgcagtggctcatgcctgttatcccagcactttgggaggctgaggcaggtggatcacctgaggtcaggagttggagaccagcctgaccaacatggtgaaatgctgtctctactgaaaatacaaaaaattcgctgggcatggtggtgcatgcctgtagtcccagctagtcgggaggctgaggcaggagaattgcttgaacccgggaggtggaggttgcagtgagccgagatcatgccactgcactccaacctgggtggaaaaaaaaaagaaagaaagaaagaaagaaaaaggggtgggatggggagcagacaggcagggactgaaagcctgaaggcctgagcaacttgtgggttctaggggtccaccctccacccaccaagcctgtcttccccttcgtggtttctccagccccaccctcacaccgtcctcctcgatctgcgcggcttcctgcctccatgccactccagactgcaccggcatggcactgactgcccacccctcctgcctcctggccctgttggtggcaggcctagcccaaggcatcagaggcccccttagggcccaggtaagtgctcccaaacccttacctatgccagtcccacgcctggggtcaccccttcagaaacagctggcctg

SEQ ID NO: 7581 - DNA, 2300 bp, Homo sapien
gactggcttccccacacgcccctcacggacccgagtaaccatcgagccagaggcgatacacgtcctcgtcgataagggtcgtgttccccacgaagatgtccagctcactggtcatggcgacgcccggggccgcagcgccccgagcaggagcgagcactgctcgggactggcgcgccgccttcaggccacttccgggagcgccgagattccgctcgcggcatcgggacccagcttatgaccacttccgggacacagccagtcggggaggggacggggcgggagcggcgagggaagagagggggaggcctgcgcggaggagcaccgcttcctcccgccgggagggggagtcccgggctcctgcgtcctgtctccctccccggccgtctgcaggagcacgaagggagtgcctcctcttcgtctcctcggtccccgtaacttctcccctcacttcctcctggcttttctcccaccttctctgccctcttcgggacctcctaagtttgacctgtatcctaaacttaggggtttcacagggctctatcctaaatctccgcaaaaatggggtatgacccgacttcctcgggctcttgctggagactggtttgtccatcctgcgcatgagcacctctcctgggtttggggcacctgctcccaccttggttttaatcccacccccagccccacgagctactgacgtctctaattctgcccctccgagctctgcctggaagtccacatccggaggggccgcctatcggccaagtctatccacactcttcccgtaagcccctcaaaagctcaacatattctagacagacctctgcctctccccatttgtttctttcctgcgtccctatctcagtgacagccctaacatccaccagttctcatacgagaaacctgggcgttcttccagactcctctctccccacattcagttcggctgatttgcctcccgaatatttctagtatctgtttgtcctctccacccccactgatgctgccccagccgtctttctgcttagctctccttgctcttgctctttgacaccgttactaatctccctgtttatgtcccctccccgcagggtccggcccacacagatcagcccaatctttttaaatacattttttttttcgagacagcgtctcgctctgtcgcccaggctggagtgcagtggcgcgatctcggctcactgcaacctccgcctcccgggttcaagcagttctctgcctcagcctcccgagtagctgagattacaggctcctcccaccacgcccggctaatttttgtatttttagtagaaacggggtttcaccatcttggccagttaaaggcatattttaaaatgttactcccttgcttaacatccttacaaatgttactctcttgcttaacatccttagtggcctttggaaatgctccaacctggtactggaagttcttaagaatctggcttttacctacctttgaagcctcgctctctctctcttagcattttctcgacacatctgcttttcaaaaaccaagctatcctcattgttcctaaagcagctaggctctttcgggcaccagtgtctttcactatgttattctctctccctgaaatagctctttacttggcaaagtcctatggatctaccagagcctcttggatagcatctcttttgggaaccctcttaaggaccctcagaccatactcctcccggatttatttcttgcttaacacagcttgacttcccggacagactgcgacctccttgaggatggaatcggtattttggttaaatttatttctgcatgggccttgcacataaaaaacgtttattgaacaaacgaatcctgtatgttcctccccccaggcaggaaacgctccctgggagggagggtagtctattggtgagctaggacgtttggactcagggttccgaggaaccaggagcgatccttagtgggccgagacttccgaatttgatcaaaggtaaagagggactggagagcggtccatctgacttctgtgggggatgggcaggagtcaggggcggacgcctgaatcttgtttctcagaagagccgagaggcctaggctcaagcttggggcgatccggtacttggaggttcgaagctcctagtttcgggttgagaccgatgtggagggcgatgacgcgcgggttccttgacatcgaggatcagtaacacccggagtgggtggggaacgaggggggcggcccctgagctcaggccccgcccctttccggggacgtttcaccggattggctgtccttccataacgacatgcg

SEQ ID NO: 7582 - DNA, 2300 bp, Homo sapien
gctgggcacgcggcggggcgcgcgccggggcggggccgcatgtcgttatggaaggacagccaatccggtgaaacgtccccggaaaggggcggggcctgagctcaggggccgcccccctcgttccccacccactccgggtgttactgatcctcgatgtcaaggaacccgcgcgtcatcgccctccacatcggtctcaacccgaaactaggagcttcgaacctccaagtaccggatcgccccaagcttgagcctaggcctctcggctcttctgagaaacaagattcaggcgtccgcccctgactcctgcccatcccccacagaagtcagatggaccgctctccagtccctctttacctttgatcaaattcggaagtctcggcccactaaggatcgctcctggttcctcggaaccctgagtccaaacgtcctagctcaccaatagactaccctccctcccagggagcgtttcctgcctggggggaggaacatacaggattcgtttgttcaataaacgttttttatgtgcaaggcccatgcagaaataaatttaaccaaaataccgattccatcctcaaggaggtcgcagtctgtccgggaagtcaagctgtgttaagcaagaaataaatccgggaggagtatggtctgagggtccttaagagggttcccaaaagagatgctatccaagaggctctggtagatccataggactttgccaagtaaagagctatttcagggagagagaataacatagtgaaagacactggtgcccgaaagagcctagctgctttaggaacaatgaggatagcttggtttttgaaaagcagatgtgtcgagaaaatgctaagagagagagagcgaggcttcaaaggtaggtaaaagccagattcttaagaacttccagtaccaggttggagcatttccaaaggccactaaggatgttaagcaagagagtaacatttgtaaggatgttaagcaagggagtaacattttaaaatatgcctttaactggccaagatggtgaaaccccgtttctactaaaaatacaaaaattagccgggcgtggtgggaggagcctgtaatctcagctactcgggaggctgaggcagagaactgcttgaacccgggaggcggaggttgcagtgagccgagatcgcgccactgcactccagcctgggcgacagagcgagacgctgtctcgaaaaaaaaaatgtatttaaaaagattgggctgatctgtgtgggccggaccctgcggggaggggacataaacagggagattagtaacggtgtcaaagagcaagagcaaggagagctaagcagaaagacggctggggcagcatcagtgggggtggagaggacaaacagatactagaaatattcgggaggcaaatcagccgaactgaatgtggggagagaggagtctggaagaacgcccaggtttctcgtatgagaactggtggatgttagggctgtcactgagatagggacgcaggaaagaaacaaatggggagaggcagaggtctgtctagaatatgttgagcttttgaggggcttacgggaagagtgtggatagacttggccgataggcggcccctccggatgtggacttccaggcagagctcggaggggcagaattagagacgtcagtagctcgtggggctgggggtgggattaaaaccaaggtgggagcaggtgccccaaacccaggagaggtgctcatgcgcaggatggacaaaccagtctccagcaagagcccgaggaagtcgggtcataccccatttttgcggagatttaggatagagccctgtgaaacccctaagtttaggatacaggtcaaacttaggaggtcccgaagagggcagagaaggtgggagaaaagccaggaggaagtgaggggagaagttacggggaccgaggagacgaagaggaggcactcccttcgtgctcctgcagacggccggggagggagacaggacgcaggagcccgggactccccctcccggcgggaggaagcggtgctcctccgcgcaggcctccccctctcttccctcgccgctcccgccccgtcccctccccgactggctgtgtcccggaagtggtcataagctgggtcccgatgccgcgagcggaatctcggcgctcccggaagtggcctgaaggcggcgcgccagtcccgagcagtgctcgctcctgctcggggcgctgcggccccgggcgtcgccatgaccagtgagctggacatcttcgtggggaacacgacccttatcgacgaggacgtgtatcgcctctggctcgatggtt

SEQ ID NO: 7583 - DNA, 2300 bp, Homo sapien
tgctaagcatgtgacattacttgtgtcctccaacaacccttgagatagttatcattatgtctccatttcacagataatgaaagaggctctgagagattgtgtgcctcacctaggtcacacaactggtgagcagcctaaccacattcaaacccagaccccagagctgtctgaccccagcacgggtgttctgtccacggatcatactgcctcaaaaacactctcctctcctttctctctctctttctctctctctctctctctctctcacacacacacacacacacacacacagagatgatgatgacaagagggtgacaagcattgggtcgctcaaaggcaaaggagaggcaccaggctggtaaccactttctgagtgcataacactttatagcttacaaagcattttcacatctgtgatctcacttgatcccacaacagctctgtgagatcagcagggaggcccagttgaaggaaggtgacctgcccagtgtcacacagacagaaaatggtagctctgggactagaaccccaggggcaatctggacttcctggctctaagtcctgagtgcacccacaggcttctggcctgtgttcccaaggaaagtagcccagagggcaaagctagagctgatgaaatggaaggaccgatggagaagcaggagagcccagccctctcttgatctatttactttgagtcttgctctgtcccccaggctggactgcagtggcgcagtcacagctcaccgcagcctcaacctccctggcttaagccatcctcccgcctcagcctccagaacagctgggaccacaaggcaggcgtaccaccatgtccagaaaattttataattttttgtagagatggggtctcaaatggttctttctgccttggccttccaaagtgctaggattacaagcatgagccaccacacctggccccagccctctttctgtagtcgtgtgacaactgacagctcagtactccatctgggcctcagtttcctcatctatgatggaagtaatcagagagaagctttgggatggtgcccagcactaacattctggatgtgcgacaaggtgtctgtgaaggtgtaagggctttgaaaatcttggctgagcctgggcttggagtgcccacggctgtgacttggcaacctgtgccagctactcacttagcgacttcaagcaattcatttcagcatctcccagcctcagtttccccatctgtaaaacagagatgaggatgatacctgcctcacattcactcacctttgacatactctccaaacaagtctggtggccacaagcctccgaaaggcactgaccgtaatgaagatggcgtttatcagacctcaggacacctgtagtggccctgaattaaaactcgttatagctcctgaaattatcctgagtaatactattatattgcattttatgtggggttagttcaaagcattaccttatcgcaaacatttaaaatataccacccagcctgggcaatacggcgagacccaatccctacaaaaaacacaaaaattacctgggtgtggtgacgcgcgcctgtagtcccacttacttggagggggcgctgaggcaggagaatccctttagctcaggaagttgagcctgcagtgcgccgagatcgagccactgcactccagcctgggtgacagagacccggtctcaaaaatataaagtaaaataaaatatgccaccatttttgtaaccctggtttgtcatttattcacttttcatatactcgaagccttaaaacaaggccagtggaaagacctcactccacgaagctttgggtggcggttggcgtggctcctagagatgtgattctttcgtgctattttgtgggagcagaaacggaggttagcccaggcctcgagagggctggggcggggcgcgggctctggcaggtgcgtcagtccgcaggggaacccggggctccacctgggcgcggcgaggaagttacaccatgtatgggcagctacgtcaggggggcgggcccgcagcctccggggaacgccgagccgggcccatcccggtgaaaaggctgcagccggacttggggaggcgtcgccaagttcgggaccgacgggccaaggcggcgcgtctcgggggtggagcctggaggtgaccgcgccgctgcaacgcccccaccccccgcggtcgcagtggttcagcccgagaacttttcattcataaaaagaaaagactccgcacggcgcgggtgagtcagaacccagcagccgtgtaccccgcagagccgccagccccgggcatgttccgagact

SEQ ID NO: 7584 - DNA, 2300 bp, Homo sapien
agaagtctctccttctaggtgtctgcacccaactcatggtgctgggcagtggagaggagcagcattacaaagggaggctgaaggctcatccctcagggaaccggagccccccagcctgtggggcttgtgtcagccctgaacagagggcagaagttcaaggggactgaagatgcaggtagttcccaagtgacctaggagtccccagagctggggggtgtggccttcataggacaaggaggaagacaggaggatccaaccccagcatggaggggggagtgggcagtctccccaatttggcccccctaggtcagttccacgttgttggcacggtcaagcactcgggagccacgggcactacccccaagctggaaacggctctcatagagagtggggcagaggtgccagcgattggcccggtagatgcccaggtaggtgtagacatcaggcttgtaggtgagcaggcacttaatgcccgctgcacggatggctgaatccgcctccagtacacccaagcggtccgtgaagtcgtccgtgtaaacacagatgacctggcgcccaccctccttggcacgtgggctcaccttggccacctgaagctggccttcaaccacggcccgggcaatgccagcccaggcgtggtccagcttgaagcccggtgccagatgcataagccacttgcccgagagcacgtggtgggtgatggcgagctggcgcagggtacccggtgtgatgggccgcccactggtctgcagagcttcccaggctgcctgcaggccctgcacgtccccggagttggggctgtagccctgcccatacactgcaatccagcccacaggctctgagttgggtgaaccggggtccccatagcgggtaacttgggatggtgggtacttggccagccaggcatccagctcagtggcaggcgttgtgcgggcatcaaacactagccaggggtccatgtcagctgccatggcctctgcagccaggtgctcggcggtgaagccatcctcacggccacctggagagccctcctcttccagctcctcacctggttccatcctgctgtgagggaaccgagtcagggcagggtctgagacaataactacagatgccaggcactggattaaactgtggccttgagtaagagttactgtcgatgcgcctcagttgcctcatctttacaatgggataacaactgttcctgtcccgtagatctgctatgaaaattagatgcctgaggagtcagcgctccagaagggttgctgcagttattactattctccttgacttacagaaaaggaaactgaggctgagaaaaaggacttgcccaaggtcacacctgcagtgcgtggcagggccgaagggtgaatccaggcgtgggagcaaccagccccagctacacctcccggccctgccaaggcccccttttcctggcaggtatccggtgcgctggcatttaatagaggaacgcaaagaagcgcacgttcgcgcagctcccgaggccggctctgtaaggccaggcctcccaggcaggcgttatcgggcccacttacagacgaggacgctgaagtccagagaggttacaggccgttccgaggccaatggggcggttcccagactcgaaccagggcttgttagagcctgcaggagagccaggctccggccgtgccgcgcccgccgccattaacgcccacgggcccgagctgtgctcccgccccggccctgccctgcccctcccgccgcccgcagtcacctccggccttcgctgcgttcgacgccggcccagccccgggcccggctccgctcctgccgtggctccgcgccaccgccaccgcgccccacccccgccacggccgccgccgccgccgccgccatcttagcgccgcgccacctcaacaacaactttatagacaggcgcagccacagggcggagccgcgggcctcagcggccgcagcggccgcgctgtggggcggggccggcaggggaaggggcggggccgacggggaggtgctgactcgggggcggggccatcgcgggaaccccgggaggggcgggccgcggggggcggggccaacgttcgctcttctggccttgggggcgggcgggagcggcggtccagactggggagggacgcgcaccggccaggaggcttcaagaggagggcactagggccctgcgagcggcgtcttaaccggcggcgctaggactccgcgggaaacggcgggggcggagcgggcggcaccaggacccaggggaaccgcgacgggcgggcggcgagcaggcccgggagccgggaggc

SEQ ID NO: 7585 - DNA, 2300 bp, Homo sapien
gggccctggcagggtggagcaggatctttcgggagaacagtctcctgccttcaagccctcctcagttattctccttccaccccacaaatctgccacaatcaacaagaccaaggggccagggagaacaagaggggtaagttggctctggggagtctgccagcaccctcccatgcctctgggctgctcacctctgaaagtgggcagaggggtggctggcctggggtgggggttgtgatgtctcctcttccccatcagtatctgtgtcctcagattcatcctgtgagcaccgcagaggtcagagttgacaagaaaagacacgaacccatcactgggagtggcagggacagcagtagaccctcatagccccaatttacaaataaaccagtgagcaaacaggttgcagaaaaggatgagagctggcctcctgccagttcagcctggggcgaggctgcctgtcccatcaccaagggcagggcgaagggctggggcctcactcacctcctgctccgagtctgtcccggacagcttcttgtccttgcttttcgttcccatcccaccgttcttccggccgccgctgcctggcttccggcccctttgggaaggtacagtccatctgcccggagtgctccctactccttggccacccccaagccctgtggccttggccttccccactgtatgccaggccctggccccacctgcgggcgcccttgtccccatccatgtggttgtcttccccgtccccctgcatgtcgggaacagatgccaccaggtccttcaagaagtcaaactgctgctccagctcgatgcactgcttcctggaagaggtgaggaggggctggcactcaagaggggcccagacacccaaacccgcagtgggtggcagcaaggggccccagatgtcaggctggagcccgggccgatctccgctcccgggcctgccctgctttactcaggtggctccctctgcctggaagcccagcctctcctctgccagtctgtggccttgctggtgtcccggctgccgcccacctccctcgccacccaggctctgccttcctcagtgtgtgaactccccgcgccaaacccgccggcccctcccggctcctcgccgctcacaggtgggatgtggtcatggtcttcgcgttccgcgactgggtcacctggcaggccttcttcaacagcgactctaggaagagctcgagcgcccgggctgaggagcgtcaaggagaactccggggcaggagagggcgacccgctgcctccctcccccacgcccctcgacccggtccgcccccggcaggatacagatgatgacaggcaccgccgccgccaccttcccaatctcttcgtccgtctgcatgatcttcttgatccgcgcctgcgggtgggggagcagagttcagaccccgtcgccaccgtcccctaagggggtgctgggggaggaaggggcatccccggagaaagggggcgggggacacggacgcggggagggcatggagggggcggggcgtccaggcccccgaacaccgcggcgcgcccgcctgcccagcgggaactgggcccaagccacccgggagccgggcccactcctgccgggctctgccacgtgctcaccggcgggaaccgcgcgttgtacttcttcttcttgctcggcatctcggggcctctctcgccgcgtcgggtccagcgccgccgcccgcagcctcccggctcccgggcctgctcgccgcccgcccgtcgcggttcccctgggtcctggtgccgcccgctccgcccccgccgtttcccgcggagtcctagcgccgccggttaagacgccgctcgcagggccctagtgccctcctcttgaagcctcctggccggtgcgcgtccctccccagtctggaccgccgctcccgcccgcccccaaggccagaagagcgaacgttggccccgccccccgcggcccgcccctcccggggttcccgcgatggccccgcccccgagtcagcacctccccgtcggccccgccccttcccctgccggccccgccccacagcgcggccgctgcggccgctgaggcccgcggctccgccctgtggctgcgcctgtctataaagttgttgttgaggtggcgcggcgctaagatggcggcggcggcggcggcggccgtggcgggggtggggcgcggtggcggtggcgcggagccacggcaggagcggagccgggcccggggctgggccggcgtcgaacgcagcgaaggccggaggtgactgcgggcggcgggaggggcagggcagggccggggcgggagcaca

SEQ ID NO: 7586 - DNA, 2300 bp, Homo sapien
cagaagaggagccacagggccacagtctgagaaaaatcctgcctctatggcatcttccaggatagtctgcttccctggggccacatcattgattaattaataacagcaacacggcccggtgcagtggctcacacctgtaatcccagcactttgggaggccaaggtgggtggatcacttgaggtcaggagttcaagaccagcctggccaacatggtgaaaccctctctctactaaaaatacaaaaaattagccgggcatggtggcacatgcctgtaatcctagttacccgggaggctgaggtgggagaatcgcttgaacccaggaggcagaggttgcagtgagccgagatcacatcactgcactccagcctgggcaacagagcaagactccatcacaaaaagaaaaaaaaaagataataagaataacagcaatgctaacatagcagttcccatgagccatgaggatgttctgtttgtatctgcatagtgatttaatccttaccactaccctgggagtagatccgattataaccatcccctccccattgcctatgagaaaacaggcaccgagagggtacgggacaagtggaggagctgggatttgcacccaagcgcttcctctatgctcttagccatgatgctctgctgcctcaaaagaacggccagctagtgttagtaataataacatttaccgatgtcatcgtttggggtttcatgtagtccttgcaacaaacctatgagctgggcccgtgattccagttttgcagagtggggagttggtcacagagctagtgagaccaggcctccagcccagttggtccgtctccagggcctcagctcagcaccacatccctgtactgcaagcctcagtggtcagcaccaggcgtcccatggggacttaagattccaaggcttttgagcactgctagaagtttggggtaagatcttttactttttttatattaaaaaaatatatttttttgagatggagtctcactctttcgcccaggctggagtacactggtgtggcctcggctcactgcaacctccacctcccgggttcaagagaacccggagagggagagcctcagcctcccgagtagctgggattacaggtgcccaccaccatgcccggctaatttttgtatttttagtagagatagagtttcaatccaggtgggagatggggtttcaccatgttggccaggctggtctccaactcctgacctcaggcaatccgcccacctcggcctcccaaagtgctggaattacagccactgcccggcctggggtaagctttcaatgttgtaactccctccagaacctcatggcctatgaagatggccaggtgggcctgggcccaggctctgaatggcctgctgcctctctcctggacacagcattcaacttcctggctggggctgggagtgcaaagatttgtttatttgtttcttttttattgagacagagtctcactctgtcgccctggctggagtgcagtggtgcaatctggggtcgatgcagcctctgcctcccgggttcaagtgattctcgtgcctcagcctgagtagctgggattacaggcatgcgccaccaggcctggctaatcttttttgcatttttggtagagatggggttttgccattttggccaggctggtcttgaactcttgacctccagtgatccacctgcctcagccccccaaagtgctgggattacaggtgtgagccaccactcccagcctgggagtgcaaggatttaaataaaatcttgtgaaagttcagtttggctccttcagggactcggccaggccggggggcagcacaggagacaggctgactcccctgtacagatggatggggaaacacaggcagagtagggacaggggacttacaccaggtcacacggggagcctgtggatgaggcagaggcaggacttgggcctgggtctctgcgctaaatgactcctgggcatcctgctgaactctctcccagaaggagattggcctcacataccccactgaccccttcctagcatgctttttgccagacccattgagactggctgaggactggttgccatagagatggcctgttaggcagttctacggtgcggatgggggatggggcaggatggggcaggacaccgatatgctaaatacctaccaacagttggttaggaccccgtcggtgtgaccagggcaggacgtgcggctccaggctccaggaaccagaacggggctgctcaagctgctgtcgaccgtctctcaggacaagcaggtgagggaggcccagtgagga

SEQ ID NO: 7587 - DNA, 2300 bp, Homo sapien
acctggtacagagcagcgattatgaagcccacttgacaataaggaaagtgagactcgagaagagtcactttgcccaggatcacacagcaagccggcactgaagcagggtttgaagccacattgtcagtggtttccttgggcatgggggtgggagctgcagagtcaggggcctctatctgtgtcttgaaggagccacaggtcaatgggggtgagaatggagcactctcctcagaggcccccaaggacagaacccaccggcagccagcctgacaggcactacaaccccagcctggacccggagtgcagtccctgagataaaattaaaggctttatggcaaacacagtatgagatttctggtggtgggggtggtggaagctacgggttggaagttggaggtggcaggtgggtgggcagcaggcttagctctgtccccgcaccccctccccaccaggagctttggctcttttggttccccccacccagtacacacagccccttctctgctcctgaggagtggggacatctcaaagagcaagagctgtgacttctccaccccatctccaatgtatatgttgggtcctataaattcaagcatgaataagatgaaatgactcctgcctctgaggacgcccagtgagtgggagagggggtggatccttaaaggggcgcatacaacatagcctaacacatgctgagttgtgccacacagggagccacagactgagcaaccactgggtgaggggaggggtttcaggagagattgggattgtgtgcactgcgctttttttttttttttttaagacagagtctcgctctgtcaccaggccggagtgcaatggtgtgatctcaactcactgcaacctctgcctcccaggttcaagcgattctcctgcctcagcctcctgagtagctgggactacaggtgtgcgccaccacacccagctaatttttgtatttttagtagagacggggttttaccatgtaggccaggatggtctcgatctcttgacctcgtgattcgcctgccttggcctcccaaagtgctgggattacaggcgtgagccaccgcgcccggcctgcactggggttttaagtcccaatagttttaagttagggctggtctcctcaagaaaaaaactcatacacacagatgtgccacattttgcattcaatttcaggggttccagggatacactgacgcccatgtggagctcctaaacaatcttaacagttcacggggccaggttttaaaaatccaatccagggccaggcgcagtggcgcatgcctgtaatctcagcactttgggaggccaaggcgggtgtatagcctgagctcaggagttcgagaccagcctggccaacatagtgaccccaccccctacccccgctccccaccaaccatctacaaaaaaatacaaaaattaaaggggcgtggtagcgtactctcgtagtcccagctactgggaaggctgaggtgggaggatcacttgagcccaggaggtcgaggctgcagtgcgctgtgatcacgccactgcactccagcctgagcaacagagtgagatcctatctcaagggaaaaaacaaaacaaaacaaaacagggaacgtgggaaggaagcgttccctgacgatactggttatagcgggtctgaagctgggctgtggaattggagatctcgggaaaacaacacccgttggagccacgaccctaggagtccactaagcgagcgcccattgtaggagggaggtgtctacggaaagaccgtgaggtagtgaacaccccgttgccggtgaagtgcaagcgcagggaggccggggaggaacttaaagccacgaagacactgacttaatgggctctaagtccttccagttctgggatcccacctccgggttaattccgcttcccttgaggagcgcatgcgcaatgggaccactcgctcaaagaacccacccgacccgagacggcgcgaatgtgcagtcgagcgctgatcccggccttcccatgagcctctggggcaggctccaaggcgagcgacggaagcagccgctcttagtttccggcaacacgacagcggctgccgagcgacccggaagtattcccattttgcgttgtctgggctcggcggcagccgggctcggagtggacgtgccactatggggtcgtccaagaagcatcgcggagagaaggaggcggccgggacgacggcggcggccggcaccgggggtgccaccgagcagccgccgcggcaccgggaacacaaaaaacacaagcaccggagtggcggcagtggcggtagcggt

SEQ ID NO: 7588 - DNA, 2300 bp, Homo sapien
tgtttcctgctttggaggccagggcccttcccagtgtcctaggctgcctggggcagactttgtgtttgggaccactcactcccaccctgtttctcctcttgtctgtctggaaatgcacatggcaccctgtgtctttaatagcccctaacacttgtatctcttgttgtcagcaaactccgggcaaagttggggctgaaacccttggaggttaatgccatcaagaagggtgagtatggggctgaggatagggtttgggggaaagaggccatctgaaggggtctttgaagaaggtggggttagagggcaggttcagcactgtttagtggtcttacacatgcatatttgccggaaggcatgaggtccctccttgctggtataatggggatctggggctccgcctgctctctgagttggagctgtggccgtcgcatactcactctggctgtgagttgttagatggactggaagatgtgcacacttgctgcagactgcgctgtgcgggggtgggtttcttgtttttctttaaagcacgatttgaggggctttggaagccacagagggtcctgttgtgctgcatgggttggccaggagtgtggggacgaagtgggagcagggaggtgaaggattgttccttcctgtcctgaccccttctggccccctgagctggaagggggcagggtgagtggctccctcctctccccaccagccatgggcgggcatagcctcacgtctgggccccccttccagaggcgggcaccaaggaggagcccgtgacagctgatgtcatcaaccctatggccttgcgacagcgagaggagctgcgggagaagctggcggctgccaaggagaagcgcctgctgaaccaaaagctggggtgaggggtcctggccagggcaggcaagggaagggctggggaggccaccatccttggctgcctcttgagtggggtggggagcaggagctgggctccttgagcatcactttttcccctcttcaggaagataaagaccctaggagaggatgacccctggctggacgacactgcagcctggatcgagaggagccggcagctgcagaaggagaaggacctggcagagaagagggtgagcacctgggcagcatggggtggtcgcctagtgcttctggtggcctgacggcactgaggcgggggccaaccccagagaggtgagacggggcttggagaagggaagggccgtggtcggtagcatctactttggattctcagcagctttcctgcaaggcctgccctttttgcactccgcttggtagagccctgagtgttttctggtgatgctgagtggcctgaagtcctaggtcacccctccctgtcccgtaggccaagttactggaggagatggaccaagagtttggtgtcagcactctggtggaggaggagttcgggcagaggcggcaggtgaggctgcagcaggggtggtacaggggacactggtggccttgctaccggaatcccgaggttgggtgcgtggagggaggttcctgactcgccgattcttcccttaggacctgtacagtgcccgggacctgcagggcctcaccgtggagcatgccattgattccttccgagaaggggagacaatgattcttaccctcaaggacaaaggtaatgcgagctgggtgccctgggtgggggcacagcctctgctgagttgcggacaagtgtgaatggccactgctctgtgctgcccccaggcgtgctgcaggaggaggaggacgtgctggtgaacgtgaacctggtggataaggagcgggcagagaaaaatgtggagctgcggaagaagaagcctgactacctgccctatgccgaggacgagagcgtggacgacctggcgcaggcacggcctgggcaggctgggtggcgggggctgaggtggagaatgtcgggaatgggggctctgaggaggtggtggctcagtggcttttcaggagccagcctgggtcccaacctgtacctcttgccttgcagcaaaaacctcgctctatcctgtccaagtatgacgaagagcttgaaggggagcggccacattccttccgcttggagcagggcggcacggctgatggcctgcgggagcgggagctggaggagatccgggccaagctgcggctgcaggctcagtccctgagcacagtggggccccggctggcctccgaatacctcacgcctgaggagatggtgagccctcccgtgccttatactcggggtcaagattctccctccctctggggctcctgccctgcccgcaggcactgagaagacaggg

SEQ ID NO: 7589 - DNA, 2300 bp, Homo sapien
gcccaggctggtctcaagcgatcctcccatctcagcctctcaaagtgccaggattacaggagtaatcctctcacctctcttgatccagatgttcttgcggtatttggagggcatgctcaccaggaagcgctgcccttgggctgtctccacctcatgcagattgttccctggggtcctgagtacctggttcaggagagaccaagaatcagtctcatcagtcagatcaaacaccctctcagacacgctgcaccctacccccaccccaggggccctccagggctgcaggggtggggagcagaacagcttgtgccccacgccactcaccctgacaatctgctgctggtcggagggcactatgtgctcccctagcacctccttcaccacatgcttcctcttggtggcctgagacatgctgaagtcgtcccacactggttaggaacgaagagactgtcaactcctcctcctgagttccttggatggcaggctcagaacccaggactgttctgaagatggggaggggccttttactgaggggtgacacggtgtcttggttaagaacatgggttctgaagtctaactgcctggattcaaatcctaccttggtttatttcctaactattcaacttctctaggtcccagaaaaataacagctaactcagcactgttacagtatggtatgaggccaccacttctcctgttggccttcttagtttctctccaacctccccttttccctagtttataagacaggagaaaagggagaaagcaaaaagttggaaagaaacagaagtaagataaatagctagacgaccttggcaccaccacctggccctggtggctaaaataataataatattattaacccctgaccaaaactactggtgttatctgtaaattctagacattgtatgagaaagcactgtaaaactttttgttctgttagctgatgtatgtagcccccagtcacgtttctcacgcttacttgatctattatgactttttcacgtagaccccttagagttgtaagcccttaaaagggctaggaatttctttttcggggagctcggctcttaagacacgagtctgccgacgctcccggccgaataaaaaaacctcttccttctttaatctggtgtctgaggagttctgtctgcgactcgtcctgctacaacagaatgggacaatacaatgcatgtcatgtaaaagtaactccggccgggcgcggtggctcacgcctgtaatcccagcactttgggaggccgaggtgggcggatcacgatgtcaggagatcgagaccatcctggctaatacggtgaaaccctctctctacaaaaatacaaaaaattagccgggcgtgatgacgagcgcctgtagtcccagctacccgggaggctgaggcaggagaatggcgtgaacccgggaggcggagcttgcagtgagccgagatcgcgccactgcactccagcctgggcgacagagcaagactccgtctcaaaaaaaaaaaaaaaaaaaaagtaactcctataatcttaagtactagtgtaatataaaactatacgcatgctccagagaagtcatcctggcaacctctctggaaggagtttgaaataaaccgtatctttctcaacacgcttgtacaccccaagtctagcatagtcacacaacagagaagttcagtctggcaacacactacagccggagacaaactaggtggccaccgtgatggttcaagccaggaactagttaattaaaggttgaggtgagcaggcttgtctgcgacatttgcatatttctgacttgcgtacttagaagacgaaggccagtacccttaagactgatggtttccgaaagaaacactgtcgtctctagttgctgtcctccttcctcctccctgtctatcccggagaaaagaccctcagagaaacacccacacttagtctctggccctcggctcccaggaacgctgccggagcaacaccgccgtctaggctggacgctgagagaggatcgtccacgactcacttcaaggctgaaccaagaaaacacagtaaaggaacttgccggcggccgcgacggtagcgtcagttagaaatcaggtctccagtgttcccagttcccaccagtccaactgcgaggagtgcgacgtgagtctgagtctgatccctccgaaaaccgtacttccggcgctgtctcggaggcctcccgtcccctcccttgtccgtcttctaactcttccccacgccaggtccgtcaagcctaagtccttgagttccgggtccgggcagcagagaaaggaagtc

SEQ ID NO: 7590 - DNA, 2300 bp, Homo sapien
gaaacatggtcagtccctgaaggagaggcaactcccagcccacttgcttttcagtgcacaaagcccagtcatgaaagccactgactttattgatctaaaaaactttacaaggacagtgactgttctgccaaaaaaggagccaaatggtatcaaacggattgaaagtgagggtgggggtgagggatggggccgggaatccattcaggaaagctggtaactgtcaccagggaactggcaagggaaaaaggacgggggaggcatgcaagagcgagaatccaaaaaaaagttgaaatggttaggggagaaaactcccaaaagaccccggagtacgtcggaggtgagtacgacaatagcaatcttttccttcgtagaggacaggggaggagtccctactcggctgcaaactctggatgagggctggggattgagagcttcccagagagcatcacaagaaggcgtcgcaccactctcgaaggcatccgaagcagtcccgggactgcttggcgttggcgccacaagtgtctttcagccattcccggaagaggtcttcatctttctttagcaccagaaactggccaaggacaacataggcctgcaaaacagggaaaaggaaggagcgtgctgctcagtgctcagtgagagataagagcaagacagccattcctgtgccattcagagcacacaagcccaggaagcagcgcgggttttgcccccctctcctctccaccaggtgcccaggctctggcagcctcttcagattataccttactgtccatcccccagcagatggaatcacttcccttccaccccccgcttgcactaggtacacgcagccaccccacaccttgtcaaaacccctttcctccagcttcttgcccaggacttcaccaatcccagccaggctccccactggcttctcccccatgggctctgccacgaagtctcggtgcttttgggaggttgtcatcttgatcaggcttaatctaggaatcccaaaaaaaaggcagattagggctgaagacctggaacttctaagggcccacgagcaatctcatagtaagaggaagccaagccaggggttacagtggcttgctcgatccccctcatcctgaaaggagaaaacagttccagggagactcttccctactatttttaagaggagtttcttcctgcaggacctggattttgatcttgccccagaggaaaaacgatcctgcctaacaggtggcgcaagcggggcagtggaaagatgcccagagtccgtagccagggctgcgcggaagctatcactccctctgtgaccttggctgaaccaagacgacactgcctgcctggaacggccacttggcgtggaaagctaaccaaagggtctctctacctacagggcgaagcgcacacctagcgctgcgcacacccgctccccgcccgcggggttcacgccgcgccccagctccgcccccaccgcgcgccgctgcggcccgccccttcccgcggcccggctcccacgcgctgcaccccgccccctccccgcagcgcggccaagctctcccccagggcccgccacagcgcctgcgacccctctcctccccttctccccgcaacccctctggcctccaatcagggccctgctccgcggctggcgctcacccgcaacttcagttcccgtaacggttcctcccgccacccggccgctcctgcggatacctcaagccactagaactttcttccacttccgcttccgggtcgcttcaagagccgcctttaaaaaagaaacattccacgttgggcacttctagccagttagagctatagagttgaggcgccccggacctcgacggcgtccttagtaggcgctcctttccggtccttcgcgggaagccctgccttctaaggtctcgcttctcgcgcagttctgagggagataggcctccagggagaggacttcctttctctgctgcccggacccggaactcaaggacttaggcttgacggacctggcgtggggaagagttagaagacggacaagggaggggacgggaggcctccgagacagcgccggaagtacggttttcggagggatcagactcagactcacgtcgcactcctcgcagttggactggtgggaactgggaacactggagacctgatttctaactgacgctaccgtcgcggccgccggcaagttcctttactgtgttttcttggttcagccttgaagtgagtcgtggacgatcctctctcagcgtccagcctagacggcggtgttgctccggcagcgttcctgggagccgagggccaga

SEQ ID NO: 7591 - DNA, 2300 bp, Homo sapien
gatagcgccactgcactctagcctggctgacagagcgctgtcacaaaaaaaaaaaaaaattcaacaaaatccagacttttcttgcgttgactacttcaacactgcttttcatctgttcctttttttttttgagacagagtcttgctctgtcacccaggtggagtgcagtggcaccatcactgctcactgcagcctcgacctcccagactctagtaatcctcccacctcagcctcccgagtagctgggaccacaggcgtgcaccaccatgcacagctaatttattttagattttttggtagagacggctcactatgttgcccaggctggtctcaaactcctggcctcaagtgatcctcctgcttccgactcccaaagtcctgggattacaggtgtgagctaccgtgtgattaatagatcaccacctattaataataatcaattaattattggagtcttttttttttgagatagagtcttgctctgtcacccaggctggagtgcagtgggtgccgtctcagctcactgcaacctctgcctcccaggttcaagtgattcacccacctcagcctcccaagtagctgagactacaggtgtgcaccaccacacccagctaatttttgtatttttagtagagatggggtgttgggagccgaaagggccaaagggattgtgaccaactcagcattccactgaaggctatatgatcaaacagccacctgtttatcacgaatgcaggatgtgggcaaactcccactgccctgccaccaaaaggtttgctgagggccttactccttggcactggggtccctgaagttatctactgagaaaattagcacctattgttcaaaggatgcagtctcacaagcctgctgtgaaccaaagtgctgaccgacaattacctgacatacccgacaatcaccctccccctttctcgctatctcttttgcctactacatacagagggctgtgtaaagctcagggcccttgtccactagaggcaaggtgccccctgaccccttcttccaaatatactcttttgtctcttgtcttttattcccacgtttgcccggctttgttcagtccccctaggtccgtgcgggctatgatggggtttcaccatgttggccaggctggtctcgaactcctggcctcaagtgatctgcccacctcggcctcccaaagtgctgggattacaggcgtgagccaccacacctggcaattattggagtctttaaaaacacagtcatgggccttgtttgctggtacctccagcacatgctcactgtatccacgggacagccagattcgaaacatcaatatcagaacaaacttaggagataaggtgtctttcagacgagggcacggaggctctgtgtgggaggttgagggacttgcccaaagccatgccgtcagtaagatggcagagctgacatgactgacaccccctccttctgggcagtttgtgtcctgtgggctcagtctggtttaagaccacagatttgacttagactgtcagcacacacaagccagtgtcaccatttatttcctgccggtgtctttgggcaaatccattttcccttctctgtaaagtggaaactattttttttcttttttcttttttttttttgtgagacagagtctctctctgtcacccaggctagagcgcagtggtgccattttggctcactgcaacctctgcctcccaggttcaagcaattcccctgcctcagccttctgagtagctgggaattcaggtgtgtgccaccacgcctggctaatttttgtatttttggtagagacggggtttcaccatgttggccaggctggtcttgaactcctgacctcaagtgatctgcctgcctcggcctcccaaagtgctgggattacaagtgtgagccctcatgcccggccttcttttttttttttttttttttttttttttttgagtcagcgtctagctctgtcgcccaggctggaatgctgcagtggtgagatcacgattcactgacttgaactccttggctcaagtggtcctcccaccttggcctctcaaagtgctggaattacaagcatgcctaggtgcctggccaggtagaaacattagtcactcgcgctccaggaaggttgtcaggcagcgctgagcagtaatgtgtcctactcacctgctgtttatccagcaccagacctcttctaagaactttacctgtttcagctcactgaatcctcacaacacccattgtacagaagaggaaactgaggcagcgagtggttaagtgacttctccgaggttacacagcta

SEQ ID NO: 7592 - DNA, 2300 bp, Homo sapien
gtgccgtctcagctcactgcaacctctgcctcccaggttcaagtgattcacccacctcagcctcccaagtagctgagactacaggtgtgcaccaccacacccagctaatttttgtatttttagtagagatggggtgttgggagccgaaagggccaaagggattgtgaccaactcagcattccactgaaggctatatgatcaaacagccacctgtttatcacgaatgcaggatgtgggcaaactcccactgccctgccaccaaaaggtttgctgagggccttactccttggcactggggtccctgaagttatctactgagaaaattagcacctattgttcaaaggatgcagtctcacaagcctgctgtgaaccaaagtgctgaccgacaattacctgacatacccgacaatcaccctccccctttctcgctatctcttttgcctactacatacagagggctgtgtaaagctcagggcccttgtccactagaggcaaggtgccccctgaccccttcttccaaatatactcttttgtctcttgtcttttattcccacgtttgcccggctttgttcagtccccctaggtccgtgcgggctatgatggggtttcaccatgttggccaggctggtctcgaactcctggcctcaagtgatctgcccacctcggcctcccaaagtgctgggattacaggcgtgagccaccacacctggcaattattggagtctttaaaaacacagtcatgggccttgtttgctggtacctccagcacatgctcactgtatccacgggacagccagattcgaaacatcaatatcagaacaaacttaggagataaggtgtctttcagacgagggcacggaggctctgtgtgggaggttgagggacttgcccaaagccatgccgtcagtaagatggcagagctgacatgactgacaccccctccttctgggcagtttgtgtcctgtgggctcagtctggtttaagaccacagatttgacttagactgtcagcacacacaagccagtgtcaccatttatttcctgccggtgtctttgggcaaatccattttcccttctctgtaaagtggaaactattttttttcttttttcttttttttttttgtgagacagagtctctctctgtcacccaggctagagcgcagtggtgccattttggctcactgcaacctctgcctcccaggttcaagcaattcccctgcctcagccttctgagtagctgggaattcaggtgtgtgccaccacgcctggctaatttttgtatttttggtagagacggggtttcaccatgttggccaggctggtcttgaactcctgacctcaagtgatctgcctgcctcggcctcccaaagtgctgggattacaagtgtgagccctcatgcccggccttcttttttttttttttttttttttttttttttgagtcagcgtctagctctgtcgcccaggctggaatgctgcagtggtgagatcacgattcactgacttgaactccttggctcaagtggtcctcccaccttggcctctcaaagtgctggaattacaagcatgcctaggtgcctggccaggtagaaacattagtcactcgcgctccaggaaggttgtcaggcagcgctgagcagtaatgtgtcctactcacctgctgtttatccagcaccagacctcttctaagaactttacctgtttcagctcactgaatcctcacaacacccattgtacagaagaggaaactgaggcagcgagtggttaagtgacttctccgaggttacacagctaggaaatggtggcaacagtaagagcccacgaagagctgcggttggtagttcattctggacagccctcccgtgaaccgtccctgtactggcacttgttgctggggactgtcgctgtcctctccctccccgggccaggtgtgtcctggagggcagggaagcgtcttggcacgcgggtgcgcgccgccccctcggcctcctgggctccctgaacctcgcaggaccccggcaacttcgagccccgccccagctccaggccgcgggggcgcatcgcgggcgtcgggcggggcggcccagcgggtaaaagctgcgcggccgcaagctcggcactcacggctctgagggctccgacggcactgacggccatggcgcgttcgaacctcccgctggcgctgggcctggccctggtcgcattctgcctcctggcgctgccacgcgacgcccgggcccggccgcaggagcgcatggtcggagaactccgggacctgtcgcccgacgacccgcaggtgca

SEQ ID NO: 7593 - DNA, 2300 bp, Homo sapien
atgcccagcccacacaaattgtttctttgtctgctgctggcaacagatagtgagctccttaaaacaggagccgtgtctctttcatcactgggaacccagcagccactatggacatggctctgaccaagcactcaagaagctgagacccataagcttccagaagagctgcgctgtgcacatatgaattcagcatacagggcaagctctgcagtggattccaggaggaagacaggacagcatgaaggttacagatacagacttggagtgagatagcactgacggtaagttttcattcatcaagcaactcatttatattctctgagccatagcacctttgtctgtcaaatggggataaacaatatctaccatgtggggctattgtgaggattaaatttaatgtgtatgggccgggcacggtggcgcatgcctgtaatcccagcactttgggttgtcgaggcgggcagatcgtttgagatcaggagttcgagaccagcctgaccaacagggtgaaaccccatctctactaaaatacaaaagaagttagctgggcgtagtggtgcacgcctgtactttcagctacttgggagactgaggcaggagaattgcttgaattcaggaggtggaggttgctgtgagctgagaccatgccactgcactccaccctaggtgacagagcaagactgtgtctcaaaaaaaaaaaaagaaagaaagaaaacaaaatgtgtatgaagcaatcctcaataaatgatggctgatagtttaattttggtaataaccctaaaggggggttccaagatcaagaagagaataataatgccaattaacatgtattggccaggcatggtggctcacacctgaaatcccagcacttagggagtgcgaggtgggtggatcatttgaggtcaggagttcaagagcagcctcgtcaacatggtgaaaccccgtctctactaaaaatacaaaaattagctgggtgtggtgtgcacctgtagtcgcagctactaggaaagctgaggcaggagaattgcctgaacccaggaggcagagattgcagtgagccaagattgcaccccggcactccagcctagtgacagagtaagactctgtctcaaaaaaaaaaaaaaaaaaattagccggggtggggtatggtggtgggtggctgtaatcccagctactcagggggctaaggcaggaggctcacttgaacctgggaggcagagattgccatgagtggagatcatgccgctgcactccagcctgggtgacagtgagactgtctcaaaaaacaaaaacaaaaacaaaaaaacatgggctgggcgcagtggctcacacctgtaatcccaacactttggaagggcaaggcaggcggatcacgaggtcaggagatcaagaccattctggctaacatggtgaaaccccgtctctactaaaaatagaaaaagttagccgggcgtggtggtgggcgcctgtagtcccagctacttgggaggctgaggcaggaaaatggcatgaagctgggaggtggaggttgcagtgagtcaagatcgtgccactgcactccagcctgggcgacagagcgagactccatctcaaaaacaaacaaagaaacaaacaacaacaacaacaacaaaaaccatgtattatgctgttaatataaggcttacatatcttaacttttttgatcctgtgggctaggtattattattcccattttacagaggaagaaactgaggcacgggaaagttcagcaacaagcccaaggtcacacacctacttatgagggagtcaggcagtcttcaccccagagccagctgatctctagatgggactgaagactggaccacttggaccattttctttccaacaacagggctaaagtagctgatgaagccatggcgcccccatggacttctttgtccagctttgccagtgacctgtgaggtcaccttggtctagtccttcccttttcttgacctcggtttcctcatttacaatgaaggagtttgacacaataattcttgattccgaactatagcccaggaagaggcatttgggaatgaggccctggcctgctggtgacatcatagaggggagagttccacgagaatagtcaggcctttctggaagcccagtgccacagtctgcattgagcttggctcaggaaagaagggaaatccaggcggggcctgttgggcccaggtcttgagctcttttggctccagagttcccagcacagtcatggatcaaaactcagtgcctgaaaaggctcagaatgaggcagacaccaataacgcagatag

SEQ ID NO: 7594 - DNA, 2300 bp, Homo sapien
tcaggaatttgagaccagcctggccaacatggtgaaaccccatctctactaaaatacaaaattagctgggtgtggttgtgcatgcctgtaatcccagctactcaggaggctaaggcaggagaatgccttgaacccaggaagcagaggttgcagacagccgagattgtgccactgcactccagcctgggtgacagagagagactccatccaaaaataaaagctgcaaatgccactgagagaaggcacgttaataagaacaatgctactaacttttactgagcacttactctattaggctgtttttgcattgctatgaagaaatacgtgagtctgggtaattaaagaaaacaggtttgattggggctgggcacagtggctcatgcctgtaatcccagcactttgggaggctgaggcgggtggatcacgaggtcaggagatcaagaccatcctggctaacacagtgaaaccccgtctctattaaaaatacaaaaaaattagccaggcatggtggcaggcacctgtagtcccagctactcgggaggctgaggcaggagaatgccgtgaacccaggaggtggagcttgcagtgagctgagatcagccactgcactccagcctgggctacaaagtggaaaagaaaaagaaaagaaaagaaaatagttttgattggctcccagttctgcaggctgtacaggcatggtgctgacatctgctcggcttctgaggaggcctcagtaagcttacaattgtgtgaaaggtgaagtggaagcaagcatatcacatgccagaagcaggaacaaggtcaatgccctctgaggggaggtgccacacactttcaaacaaccagatcactgtgaactcagagcaagaactcgccgatcaccaaggggatggcaccaagccattaatgagggatctaccccatgatccaaacatctcccaccaggccccacctccagcactggagatcacatttcaacatgagatctgggcgggtgggggggacacacagccaaaccatatcacttactatatgctaggtcagtggtccccaatgtttttggcaccagggactggctttgtggaagagaatttgtccgtggtgtgaggggttaagggggatggttttgggatgaaactgttccacctcagatcatcaggcattagattttcataaggagtgcacaacctaaatcccccgcacatgcagttcacaatagggggttcacactcctaagagaatctaatggtgatctgacaggaggcagagctcaggtggtaacgtccatggcctgggggttggggacccctgtgctaggtgctcttctctacactttatgtattttaacttactcgattttttttttttttttgagatggagttgcgctctatcgcccaggttggagtacagtggcatgatctcggctcactgcaacttctgccgctcaggttcaagtgattctcctgcctgagcctcccgaatagctgggattacaggcacccaccaccacacctggctaatttttgcatttttaatggacacagggtttcaccatattggccaggctggtctcaaactcctggcctcaagcgatccacctgccttggaccctcaaagtgctgggattacaggcatgagccaccaggcccagccaacttacttgatttttacaacaccctaagaggtagctgttactcttctctccctcttttatttattttagagacagggtctcacttgtcacacaagtctcagctactcggagggggcagtggtgcaatcgtgactcactgcagccgtaaactcccaggctcaagcaatcctccctcagactcctgagtagctgggattataggcaggtaccactaaacacccagctatatcccctcttgtagaagaggaaactgagatacaaaaagttgaagtgcccaggctcatacagccgggagaagctgagctaggacagaaaccagactgctcaggctccaaagcccaggtcctcccaccataatacattacccgaccccgtgaaacaccctcccagccatccctgcaggctccttattaaacagcctcattataaaagcctcctgggagcaggtttgagtgggagggagaggcagagagcccaagttctttgggagcccaaggtgaggtgaggcaaagagagagaagctggtgctctgccaacacaaccgggcagcttcccagaatgggccagaggcgtgcagaggggctgtggggcagaggtgcctgaagaaaggggctagacagtcagtcccagccagagaagggcatg

SEQ ID NO: 7595 - DNA, 2300 bp, Homo sapien
ctgccactagctctgccctctcaccaacagctagcctgtgtgtgttttttatgtgtgttgagaaagggagtggggagactcaagtgaaatggtctcattttccccctacacatccccttcagatcttttctccagctccattttgccaactgcccccagtggagaagaagctgggaacagggaaaaaaaaagaatggggcaccaggtcgggggaaggtgaggtttgggagagacagggaaaaggactgggttgagaaaggttggctcacatcctagcactgggtgggaagtcctcttcctcctacccaaaccttgacctttcccctttccatcaatatcactatgggaggctcctgcagccacactcccagaggagaagccaaacccggaaaggacagtaacgaagacagaaaaacagcgcccttccctccagcttgtcagcccactcaggcagaacctttctagcccaaaggaaggctcttctgctccctgtaactggagagcccagggcaggtcatctgaggctgagggccccaaggcatgtgtaggtgctagggaagggggcggggtctctgaggcaggataaactaaaggctgatggagtctcattttatttatttattttttatttatttatttatttttttttttttttgagacagagtctcagttgcccaggctggagtgcagtggctctatctgcgctcactgcaagctccgcctcctgggttcacgccattctcctgcctcagcctcccgagtagctgcgactacaggcgcccgccaccacgcccagctaatttatttgtattttttttagtagagacggggtttcaccgcgttagccaggatggtctcgatctcctgacctcgtgatccgcccgcctcagcctcccaaagtgctgggattacaggcgtgagccactgcacccggcctggagtctcattttataacagccctgggaaggaggcaaggtctcaagatcctcctcccccacgatattgtacacagcggaagattgatgggcagagaaggtgacatgcccaagaggccaaactggggccaccagcagtccttctgactctgagagtccctatttcctcctcctcaaccataacaaggaccctcacactatttcctatgtgggcctagaagggcgtatccagccccttccagtcccacctttgggtggctacccagctccaggatccttgctttaccaggcccagagcaaaatagaaagcaggtgtgcaggccagccacagaactcagtgtagggctcttgatgtctggcatggctttgggaggtgctgctgcccagctcccaggtgatgggagctgaggactaagaagttcacatggagccttcgtgtgtattatctctgctacctcagaacagcttcccattttacagctggaagcaatagggcttagggagttgcctcttgactctgggatttaagagcaaaccaggattgaacttgggttctttgatgcctggtggcaggtgcctaggcaggggtcccagcctcactatagctctggtcaggagtgagtgggtctggagtcctagtgaggaaaaatgggtgagcagccagaagctacatcagagggtatgggggacacgctggaagggaagggggcatgtgggcagagatgggaccagacaaggctggagcactgcttctctactggaggaggacagaggatgtgagtacctgcacgtgtaccagcatctggctcacccagaagcccacgtatgaccggcggtgccccagaatacccagcaatgcaggagtatccagacaccttcccggcctcagtttccctgcctgagtgagagaagggagctggccacattagtgtccaactctgcaaggttgccagagtaagacaactgcatctgaagatgccacccagagactgttcacggcagccagcgggcaagccagggaaccaccccccctcccccgtcccccttcctttcccctctctcccctctcccctacttgctcgtggcctggccccgcccctcgccttcctccggtgtgcgatggggggcggggggcggggggcgggcagagccgggaggagcgagcctagcggacgctgccacctgatcccatccaggcgctgagaggcaagccaccggcactcggcgcgcagggccccgggcaccctcggaccccgtgcggatttcgagacaagggtccagagatagcggcggccgcccccaacccgggccagaggcagagcccaggcgtgcggtgtgagtactgcagtggccggcatggggttg

SEQ ID NO: 7596 - DNA, 2300 bp, Homo sapien
ccttctctgcccatcaatcttccgctgtgtacaatatcgtgggggaggaggatcttgagaccttgcctccttcccagggctgttataaaatgagactccaggccgggtgcagtggctcacgcctgtaatcccagcactttgggaggctgaggcgggcggatcacgaggtcaggagatcgagaccatcctggctaacgcggtgaaaccccgtctctactaaaaaaaatacaaataaattagctgggcgtggtggcgggcgcctgtagtcgcagctactcgggaggctgaggcaggagaatggcgtgaacccaggaggcggagcttgcagtgagcgcagatagagccactgcactccagcctgggcaactgagactctgtctcaaaaaaaaaaaaaaataaataaataaataaaaaataaataaataaaatgagactccatcagcctttagtttatcctgcctcagagaccccgcccccttccctagcacctacacatgccttggggccctcagcctcagatgacctgccctgggctctccagttacagggagcagaagagccttcctttgggctagaaaggttctgcctgagtgggctgacaagctggagggaagggcgctgtttttctgtcttcgttactgtcctttccgggtttggcttctcctctgggagtgtggctgcaggagcctcccatagtgatattgatggaaaggggaaaggtcaaggtttgggtaggaggaagaggacttcccacccagtgctaggatgtgagccaacctttctcaacccagtccttttccctgtctctcccaaacctcaccttcccccgacctggtgccccattctttttttttccctgttcccagcttcttctccactgggggcagttggcaaaatggagctggagaaaagatctgaaggggatgtgtagggggaaaatgagaccatttcacttgagtctccccactccctttctcaacacacataaaaaacacacacaggctagctgttggtgagagggcagagctagtggcagaggtggggagagaaactgaattgatggtgtgggacagggagaggtggatgctaggcaggcaagaatccctgccagtctctgcctctgtctccaaaggccaaggggagttggggtggggagtgggaggcaaggtggggcccccagtgcaggtgcggctgagggaaaagggcctgagtttatttttgagactaaaaaagacacaaatgctttcaccagaaacattgttcctttttttccagtaatcatttattgggcgcctcttgaacgccaggcgatgcgagactgaaaatgatcaagtccctgctcacatttttgggatagaggtaggaagaaagggcaagaaagacttaacaaacggtggagattcgaacgtattatgggagctctaagaaaggaaaggaaagcgggaggaggcttagtggagaagacgacatttgagccggcctggaaggtggaaaagggggctttagagtcgcccttcccccaggtcggcagctggagctcagcccgggcaggcctgctgctctcccggcttggatcccctttcagcccattcatccgggcctgggccgggggtgggcgggcagacaatcagacactgttttatcccaggcatcggctccagcctcccgcttggcgcccgcaacgcggggccgccggggaaatgagtctctcgggactccctgggagcgtaagcgttcgaggatctgaccggagggccgggccggaaagcttgagagccttcgctcccgcaggtgaggcgcagaaaacactccctcggggaagtgccagccctcctcgcagccccgccctccggcccgccgccggccttcggggccgtagcggcgcgcagggcccgcagagaccgagacctgcgcactacaactcccaggaggcctcgcgaccagaccgccgaggggccactagagaaaggtgcgtctgcggcgaatcccgtcgcccagcgcacggcagcgggtgtgcctgagtgcgcgtcgcctcccaaccagagaggacgtggcatacggcgccaccggaagttccggcaagtgggccctgaggctggccccagcttccgggttggtcgcgcgccttcctgcggctaagatggcgacggagcatcccgagcctcccaaagcagaattgcagctgccgccgccgccacctccaggccactatggcgcctgggctgcccaggagcttcaggccaagttggcagagatcggagctccgatccagggtgaggaacacaggaagtcgaggggcc

SEQ ID NO: 7597 - DNA, 2300 bp, Homo sapien
aggactctgggtaattgagttatttgtattggatttagacagaataggactgtaagtctgggaatgttatataagatgtttggccccagaggtgcattgcatcagtcattacccagtgggttactcaggagtattaaaaagtaagtgttaaaaagcaacaagtatgagctgggtgccgtggctcacacctgtaatcctagcactttgggaggctgaggtgggtggatcgcttgagctcaggagttcgagaccagcctggccaacataatgaaaccctgtctctcagaaatacaaaaattagccaggtgtggcggcgcatgcctgtagtcccagctacttgggaggctgaggtgggaggatggcttgagctggggaggccgaggttgcagtgagctgagatcatgccactgtactccagcctaggcaacagagccagactctgtctcaaaaaaaaaaaaaaaaaaaaaagccacaagtctggacctgtgggtaaagtactgtctttgcccagattgtgctggatcttgaggggtggatataagaaaagagctcaaaagtttcttctgtataatttaatcttttggggaagaaaactctctgaaaagtagaaggcactgtttggctcaatatgaaattctctgctaggaaccagaagtttcctggggttttccttggtgttatttctagggattttccgttgtgatgagagggctcctccgtttggattagtagcctggaagtgtgggggtggaggggatgtcagcacccaagtggttcgtgattgttctccttgggcccattacccggctgaaagaatgcatttgccaggggctgcctgccaaatgcgttttcaggcagtatctactcccacttccctcccgtaggcagctgtgttactggagcaggaacgacagcaggagattgccaagatgggcaccccagtccctcggcccccacaagacatgggccagattggtgtgcgcactcctctgggtcctcgaggtgagaccctggaaccgaggggaagggcaaggaaggtgatttagacatttttaaaaagacttttaaggtatctatcacatttaaaaagggcatatatagtaaatatatagtttaatggttttttacacactgaacacacctgtacaaccagcacctggaccatgatccaaaacattaccagcattccaaaagccacgccacgtgccctcctcccctgcaggtttaccatcaccctttcagcaagagaggtaattttttacgtgagtgttttgcctcttctgacattggatttctttttcccgtctcttagtagctgctccagtgggcccagtgggccccactcctacagttttgcccatgggagcccctgttccccggcctcgtggtcccccaccgccccctggagatgagaacagagaggtgagactgatgatttattcctagggataagagagtggtagtttaggatgggactatttttggatttttagagaaaggttctgtgagaagatggggggacttaaattcctgggggtagtggggagcccttcttatttaaactaagggtatggcagagggactggggagacattactgaggcagagtcttggggtccctctgaggaacactaaaccccactgagcccagttggtgttgcccactctctgctgcttacatcacctgggcagcagcctttctagtccaagaggtggaagttggtggaaaaagggcactgtgggctgggtgcggtggctcacacctgtaatcccagcactttgggaggccgaggcgggcggatcacctgaggtcaggagttctagaccagcctcaacatggagaaaccccatctctactaaaaatacaaaattggccaggtgtggtggtgcatgcctgtaatcccagctactcgggaggctgaggcaggagaattgcttgaacctgggaggcggaggttgtggtgggccgagatcgcgccattgcactccagcctgggcaacaagagcaaaactccgtctcaaaaaaaaaaaaaagaaagaaagaaaaaaaaaagaaaaagggcactgtgatttgccttctctgactgggtgtctctggcagatggatgacccctctgtgggccccaagatcccccaggctttggagaagatcctgcagctgaaggagagccgccaggaagagatgaattctcagcagggtgagtgccaggcgttctgatgctgtagccacagaacctggagaggctgagctgagtcctcatccctctgtccctttccctggctcttggtaaaggcaggtta

SEQ ID NO: 7598 - DNA, 2300 bp, Homo sapien
tcccagctactcgggaggctgaggcaggagaattgcttgaacctgggaggcggaggttgtggtgggccgagatcgcgccattgcactccagcctgggcaacaagagcaaaactccgtctcaaaaaaaaaaaaaagaaagaaagaaaaaaaaaagaaaaagggcactgtgatttgccttctctgactgggtgtctctggcagatggatgacccctctgtgggccccaagatcccccaggctttggagaagatcctgcagctgaaggagagccgccaggaagagatgaattctcagcagggtgagtgccaggcgttctgatgctgtagccacagaacctggagaggctgagctgagtcctcatccctctgtccctttccctggctcttggtaaaggcaggttactgtgaacgagtgcagggcagtggcaccgtgaagactcatcaccaccttcttccttacagaggaagaggaaatggaaacagatgctcgctcgtccctgggccagtcagcgtcagagactgaggaggacacagtgtccgtatctaaaaaggaggtagggattggagctgagtgtggaaggaaagccaggagatgggacttgggtacggaaataacacaatttgtaagtgttcagtaagtaatagcttctattttgtgccaatttccgccctcagcatcttatagatatttttcatttaattgctttgagttccaagtactatacgtgcctacattttacagctgaaaaagcagaggttctgagacgcacagtaatttacccaaaggcatacagcttgtgagtggcagaactttggagtctgactccaaggccccttcgcagctacttcatgagatggcctccttgggaaaagcctgactgttgaactgtgggggagaatgggggaggagtttaggggttggggtgctggcacagtgcttggattccctgacccagctggttttcctcctcttgacagaaaaaccggaagcgtaggaaccgaaagaagaagaaaaagccccagcgggtgcgaggggtgtcctctgagagctctggggaccgggagaaagactcaacccggtcccgtggctctgattccccagcagctgatgttgagattgagtatgtgactgaagaacctgaaatttacgagcccaactttatcttctttaagaggatctttgaggcttttaaggtacaaggagagcacactaggaaggggcagtgccaaacagggaaggggctcagaggtgggtgagaggcagcggtgaacaggcatcttttagtgctggccttaggaactgggaaggggctcagagggcaggggtttcaccttgtctgcctccttagctcactgatgatgtgaagaaggagaaagagaaggagccagagaaacttgacaaactggagaactctgcagcccccaagaagaagggatttgaagaggagcacaaggacagtgatgatgacagcagtgatgacgagcaggtcaggcccagccctcctggtgggaagcagggactctgggcacaggtggctgagatgcatccagagagggaccatggtgaactcttacagagctttggtggcttaaggttggggtgggttgggcagtttcattcacatctgagtcctgcttaaaagggctgattgttctgttctaggaaaagaagccagaagcccccaagctgtccaagaagaagttgcgccgaatgaaccgcttcactgtggctgaactcaagcaggtaagacctgagaggatcctgcaggccctggagcccagctgggagaccacctggggagccagggaggtgaaaaggagttctttgaaggaggtgtgggtgatttgggtttgggtcctttgaggaagaagagcttcagaactgagaagtcggggctctcgagaacacgcattactatgtgttttccagctggtggctcggcccgatgtcgtggagatgcacgatgtgacagcgcaggaccctaagctcttggttcacctcaaggccactcggaactctgtgcctgtgccacgccactggtgttttaagcgcaaatacctgcagggcaaacggggcattgagaagccccccttcgagctgccagacttcatcaaacgcacaggcatccaggagatgcgagaggccctgcaggagaaggtgagggcctggcagggctcagacctgcccccgggtgtccccatccttcatagcagtgtgcttcaaaatgggaatctggtttgaaacccacctaccacctacttgttacttgtctaattatccttttgttttcctcctctgct

SEQ ID NO: 7599 - DNA, 2300 bp, Homo sapien
cttttagggaggtttaaataagaatcatgcatgaagccatgtagttaccatttttgtttctttcatttctttgtgtatatccaggtttctatctgatatcatttttcctctgcctgaagggcttcctttaacatttcttaagttagggggcgtggtggcttaagcctgtaatctcagtactctcagtactttgggagaaggctgaggtggtaggattgctagattccaggaatttgagaccagcctgggcaacatagtgagaccccatttctacaaaatattaaaaaaacatttcttgtattgtgggtctgctggttttgaatttgttctgcttgagtagtcttaaaaattctttatttggccttcatttttgaaagatctttgccaggtttaggattctaggttgacaatcttttttctttcaacacttttttttttcttctttgagatggaatcttgctatgtcgcccaggctggagtgtagtggtgtgatcttggctcactataacctccacctcctgggttcaagcgattctcctgtttcagcctcccgagtagctgagattacatgtgcataccatcacacccagctaatttttatatttttagtagggatggggttttgccatgttggccaggctggtctcgagctcctggcttcaagtgatccgcctgccttggcctcccagcttgttgggattacatgtgtgagtgaccgcatcagccttctttcagtacttttaagatgttgctccagtgtcttctttcttgcattgtttctagtgagaaaactgctgtcattcttacctttgttcctgtgtacataatgtgtcatttttatttggctgtttttaagattttatcactagttctaacaatttgactacaatgtgccttggtgtagtttctgaatgtttctttgcttggggttttttaagcatcttagatctgggtttttagtttttattaatttggggaaaattttgtcatgatttctgcagatattttctctgttcccttctctttcctttgggaactcaaattattcctctattaatgaaataataaatgaaaaaataaatgaagagctcactgatgctcttcatttttaaagaaattcttctctctttgtatttcactttagaaaatttctattgctatatgttcaagtttactattattttcttctgtaatttctgatctaacagtaatcccatacaatataattctcctttctagaagtttgatttcgggtcttttaaatctattctttctctcttaactttttgaacatgtggaatgcagttataacaatattttatttttatgttattttattttattttatgacggagtcttgccctgttgcctaggctggagtgcagtggcgtgatctcggcttactgcaacctctgccacccaggttccagcaattcttgtgccgcagcctcccaagtagctgggactataggcgtgcgccaccccacccagctaatttttttgtatttttagtagagacagggttttaccatgttgaccaggctgttcttgaactcctaacctcaggtgatctgcctgcctcggcctcccaaagtgctgggattacaggcatgagccaccacacctggctataacaacattttaatgtattgtctgctaactctaacatctgtgccatttctgggttgactgccattagttgattcattttcctcattatggattgtattttcctactcttttgcacgcctggtaatttttttttcttttcctttctttttttgagagaggttctcactgtgttgcccaggctggtcttgaacttctgggctcaagcaatcatcctgcctcagcttcccaaagtgctgggattacaggtgtgagccatcaggcctgtccagtgcctggtaattttttattgaatgctaggctttgtgaaatttaccttgttgggtccaagatatttttgtattcctgtacattttcttcagctcattcgggaatatagttatatggagatagtttgatcctttcaggtcttgttttggggttcttgaggcaggactgaagcagtcctccccattgtgaggcacaagtacctgtgtactctacccaccaccctgtgaatcaggaggtttttccggctggctagtgggagttactctattcccagttctgagtgagcagcagttgctgttatgaatccttttgggtgcttctttccctgtccttggtaggcatgtgctgcttagtactcccctgcatacttgaggaccttctgtaggtctcgagttctctct

SEQ ID NO: 7600 - DNA, 2300 bp, Homo sapien
gagcatgtgcgggagcagcaggctcaagtagagaaggaggacttcagtgacatggtggctgagcacgctgccaaacagaaggtaggcgcttccaggggcgctgggctgggtgagagccagggaccctggcctgccgttttcagtggcatggtgccctctagtggtgagagtgagggtggcctctgcttgctgctctgtgcttccttagatttggaagtcttagaaatcctccagtgggctgccctctttaaggacgatgagggggaggaactcagccaagtctgagagggagctcgaagagaattcagattcagcgcctttcccacagacttctatgtctatgtcaggctgcccacccttgttttgggggtccgggggtggttcaacctgtcttaacctgtgtctctttctccctatacagcaaaaaaaacggaaagctcagccccaggacagccgtgggggcagcaagaaatataaggagttcaagttttaggtcccctcacactagccctttttttggccctacgtctggatgcctgggcttcacacaagaaccacctctcccgcagttcccaaggacttgtcatttcatgttcttattttagacctgttttgtaaataaagctgtttcccaaggaaagagatgaatatttaacactcctgagcctccctcatctccttttagccccttcttgcaaaaggactaaaatagtctctttctacaatcactgggctgccccagtaaccacgaacataaactgggattagacggcgcatttgactggtggtgacgccaaccccaggctgaaatctgtgtttcaccactgccctgctttgtaggaaggcttgggggaagtacctctaggtctggtttgaccttactactttgtccttggggagtaaaaatagccagattagcgccctagcgcggcagaggaagtaacagtgggcttgggaagtaggccagggcaggccttcccaactgaccttgtgaccagaagttcaagtccttacctgtgcgacaacatagctcaaaagctaaattgtcttgagtccatatgaacccttgggttcaagcaacactagtcgctggggtttgggatttgtatgtgggatggggggacttactttctccaggttgtaatctggtcctgagcagcctttctgacagactagagcaggctggatcactggctcccatgggcatttgccagcctgtggggagggtagtcatgcgctgctgttgtactactgttggtgtttaagtgcaccagtggaggcgctcacttgccggagggttcaagatggtctcggggttgtggggggcatgatccagataggacgtggcagctgagctaggccttaggaggaatggaattttagaaatttggtaagcaacaaagcactggcactctaaagaggcatttggggggtagggaaagaagaggaaggttggctccagatgggccccggggtagcttgagaattcacttatgcgaagaaccttctggactccaggtccctgagcccccgcttgccctcggggcgggaacttcccggatcacaggcacccgcggtggcagcgggccccgggtctccgccgacctctctgtttgccggggccgcagggcagggctaggtcggcaggcggagagccggcttccccgggcagacccccaccgctgggggcgggttccgcattggctccgaagacccgaggggccgaggcgcgctcccgcggcggccccctccctgcagggaccgaatcccggaaaagccgggtttccgctggcggggccgcggccggccgtgggcggggaggggaggagcgggggcagactggcagcggatttgagggcaggacccgtgggcgcgcgctggccacagaccaccccttctactccgcgggagcgaggggcgcgcgtggctgcacgcagggcgcgagcgcgcccggcccggcccctccgcgctgggtggggccgcgcgggccgggctccccgccccctcccggacacgcccacccgtgtcggcctcgcgagccgcaacaggcagcggcggtcgagcgcgaggcccgcgcgcccagaggccccgcgcgtgcgtgcagctcgctggctgctcgcgctcgggcaggcgggctgaggaggctgccgcgcccccgccgccgccgccgcgggggaagcctgggagccagatcggcgtcgcctcggcctccgtaacccccgcctagccgggccatggcggaacgcggaggggcgggcggtggtcccggaggcgccgggggcggcagcggccagcgggga

SEQ ID NO: 7601 - DNA, 2300 bp, Homo sapien
catattcacaggttttggggattaggagatgacatctgggtggtgggggctgggtatttggtccaccacaaagagattagttagaatccagctctgtcatttactggctgtaagtgaatttgggcaggtcactactccacttgaaatgtttttctgttgcatgcgtagaacagtgagccccccaacacacatccacacagtcctgtttttgaggtctaggtaaaatgatatagatgaagagacctgataagctttcatacattttatttgattttgattctagcttaaagcaaagaaagagatttatttgtttttctttgtgttagtcagcagatctttgaaagtacttgggtgactgggcgtggtggctcacgcctgtaatcctagcactttgccaggccgaggcaggcggatcacctgaggtcaggagttcgagaccagcctggccaacatggtgaaaccggtctctactaaaaatacaaaaattagccagacatgatagtgggtgcctgtaatcccagctacccaggaggctgaggcagcagaattgctggaacacgggaggtggaggctgcagtgagccaaaatcatgccactgcactccagcctgggagacagagtgagactctgtctcaaaaaaaaaagaaagaaagttcttgagtgaggttaattcaaaaccagaatttagttctgttgacctggatttgtcctcctttaaaaaaaaaacaaaacatgaattatattaatttcttcacatactcttgttaatctgattttagctagaagccattttaggaaacttaatgtaacaaatatttgctgagcaactatatactgtgcccagcatttgggcagatgttggggagagagcggtggagaggcaagcctgctgcctgcccgccggaagttacactccagtggcatgataggaattgtgctggggacacatcacagactttgcaaggcatcgggggaagttctcctggcaaaaatgcataacccaaggctgaggaggcgttaggtggcagggtggtgccaacagaaggaacagcagcctccaaaggccctgaggcgagagagggtggcactgccacggagccaaaggaaagttagtgtggctggagctgagggagggctgtggagatgcaagacaggggcctgagcagggcctagagggcctcagcacggaggaaaaaagaggtatgaaatccagccggattctctggacttgtcatgactctggtaagcaacatccctcatgtgtaccgttccccagaacctctcccaggagaagaatgtgtaaagactttgaccacccaggcagccatagaaaggcagcttccagagtctccctcccactcctgctggaagtccagggtggccctgctgtggtaaggccaaggtaaagtcagagcagagttactgagactccacagtgagggacaatcctgtcacttttgagttgcggggaatttcttgatttgtggcactgaagattttctgcatatttggagcaaaatgcagctgaaatagaatttgtgaccatttaactatttcctgccaaatgatgtatgttttgtttgtgtggattatctcctcttgctaaagatttacatctgtacatctgtcaggtgtgatcaggtggaaagtagaagaggaactgtgtgattctcctcccttggtctcctcttccccctcagaaatggctccaacatactaggcatggagaatattttgcctttggcttgagatgaatgatatccatggaagttcatgcaataatgtaccttttgacacttaactttagaagctgggcatggtggcatgtgcctgtggtcccagctactcaggaggccaagacggggaggatccttgggcccagggctccagtctgggcaacatagtgagacccatctcttaaaagtataaacattaagtaagaggggatgctcttctactgagagaggggacccctgggactgaggacagcgttctcacattcttacttcaggtaaggcagattgcctaaccaattgttcatcacttttctcgcaagttcctcgcatatgacagcatcttccttctctgtttttctaggctattcagcttgaccctgaagaaactcgtcatgctaaaagaaatggacaaagatcttaactcagtggtcatcgctgtgaagctgcaggtgagtggggcaggactgtttgttcagggcccagggaagctggataaccatttgcccactgctgcggcttcagaaacactactgggaccacctctgtcttcctcctctcagcaca

SEQ ID NO: 7602 - DNA, 2300 bp, Homo sapien
atcgagaccgtcctggccaacatggtgaaaccccgtctctactaaaaatacaaaaattagcttggtgtggtggcacgtgcctgtaatcccagctactcaggaggctgaggcaggagagtcacttgaaccagggaggcagaggttgcagtgatccgagatcacctcactgcactccagcctggcaacagagcaagactccatctctaaaaaaaaaaaaaaaggcccagtacaacagcatgcagtttttcccaggaactcaaagcagtgagtttccacttgactatggggtgtgaagggtcaaatagagagataaggctagaaacaggcagacccaggcttcggacacgtacaggcctgactgctgagctctgttcaagtagtggaggccaatgaagacttctagtcggagggtagcatgagcaggtttgcactcggaaggaccactgtgggctgtggagggagaaagaccagaagcaggtgggcagggtatgagatgtcagctgaaggctgttgctatgatcccagagaggcaaggagaaaggcctgactggaaacagtggtgtcacagatggaaaagggaggatctggggtagctagaatgggcctgcggggagaacgagaaggagagactccaggcgtagatgttggttcaggtgtgttggcgacatcagtaagaggatcggggtgcaaggagaagacgggacgctgcgttccaccgtggaggtggtaaggctgaggtgcccgcgctgtgcatgcgcaggtaggagtcagcagtgggcactgtgaatccgaagggcaagagaaagggatgagctggagacccacatttgggaggtgttggggcacaggggggtggaggacctggggatagacattccttctccccgcagctgcacccaaggcccaggagctacactggaatttggcctgtcttcctgacaggctttgagtgccaagggcagagaccaagtcctccagtcttcgtgtcttcccacagctcgtcatgaaagtgggctctggtgggtgtttattgacttgaattgaccccaagtggacgttgctgagaactgtcatgcgatttgtccctacagcaacctaacatcaaacagaagtttgtggccctcctgaagcggtttaaagtttcagatgaggtatggcctcttactcccaaggttaatggtgagtagaattccccgggtttcacccagcatccctggagtacactctgtattgccactgagagtcaggattctaggattaatattcctgctccccgtggcatacctggtagagccctaagggagagggtggctaagaaggacttaagcaagcagaggagagagaggctatgcacacaacgcagggcagcacagctacgcccgacccttggtgatgcgcaagcctctggcatgcgatacagggacagacccagcggatgctgctgcggttgtcacttaatttcccctcttatcccacgggaacatcagtgagcagcagcttgtgaggtggaaatgtccttgttggtcagccctggaataaccaggaatggggctgctgagagagaagcagtcttttccctgggctccgggaggggcccgtttccacaggcctctcagtgggctaacagagggataaagatgaaaattgttgagagcgattgcttcgccttcctgtgagctgtaaggagggtaggaagaacccacatgggcgatgggcctcgggattcctcagctgtccctcctggcacagcttcacagtgtggagcggtggcaggaactggggggaaggtggcctcaccatgtccccgccctcaggctggatcatggaaatgacgtgaaggttactccagccagtgtgaagctctggcatgtcccttaagcaggactataagggcagcccaggagaaaggagctgctcatcaaccaaaattgttaatagggatgaccctaaattcagagactcctttttccctgcaggtgggctttgggctggagcatgtgtcccgcgagcagatccgggaagtggaagaggacttggatgaattgtatgacagtctggagatgtacaaccccagcgacagtggccctgagatggaggagacagaaagcatcctcagcacgccaaagcccaagctcaagtgagcccccctctctgtagctggcctccagactctccttcctggccatagcagtctcctgacccctccctcgctgtcccctctattaccagagaatcttggtccttcatcctttctgaacctctggctgtcttggagaaggtcactgttttgcctctcactg

SEQ ID NO: 7603 - DNA, 2300 bp, Homo sapien
taatcctacttccaccgtggccccactgtagtccgtactgcacgtggcaagtacagtgtggccttttcaaaattaaattccaattgtgtcacttcctgattaaaactcttcagtgattggccaaatctcagcaatttaatgttgagtgagtaaaaagaagccgaatgccaaaaaatgcacgccataggattccagttctgtgaaactcacaaacaggcaaaactaatccatgagggtgacgtcagcatacctgttacccaggggagagggaggggcatcgggaggcctcaggaatgctggaacgttctgtcttgatctggttaatggtcacctgggggcatatttgcataaaaattcaagttgactattctagatttgtgcttcttactttatagaagttatgccctcagtaaacattttgaaaacataaagaccaggcagaggcagggaagtaggcaggtgtgcggcctgtattggtagcagagtcctccctgagggctggatcattagggaggtagtgggcccagggaggaggcacgggaggttaatttagaaaggtggcccaggctgggtcatggtgggcctcagaggccccactaaagaatcagacttggccaggtgtggtggctcacacctgtaatcccagtacttttgggaggctgaggcaggcacattgtttgagcctggggattcaagaccagcccgggcaacatggaaaaacccgtctctacaaaaaaaaaaaaaaaaaaaaaatagtaatacaaaaaaattagccaggcatgctgacatgcacctgtacttggaaggctgaggtaagataaccacttgagcccaggagttcaaggctgcagtgagctgagaccatgccactgcactccaggctgtgcaagagagcaagaccctgtctaaaaaaaatttaaaaggatgtcaggaattaggctgggggcggtggttcatgcctgtaatcccagcactttgggaggccgaggcgggcggatcacgaggtcaggagatcgagaccatcctggctaacacgtctctactaaaaataagccgggcgtggtggtgggcgcctgtagtcccagcaactcgggaggctgaggcaggagaatggcatgaacccaggaggcagagcttgcagtgagccgagatcgcgccactgcactccagcttgggcgacagagcaagactccgtctcaaaaataaataaataaataaaataagtaaataaaataaataaaaaaggatgtcaggaattcgagacctgcctgaccaacatggagaaaccccgtctctactaaaaaagaaatacaaaattagccaggcatgatggcacatgcttgtaatcccagctagtcgggaggctgaagcaggagaattgcttgaacttgggaggcggaggttgcggtgagccaaggttgcgccaagattgtgccactgcgctccaacctaggcaataagagcgaaagtccatcccaaaaaaaaaaaaagtgatctgaggaaaggcaaaggcctgggctcagaaggtgggatagagagggtggatgtgagagtgtggccagagcgggacacacagcagtggcttggggatgaggaaggaagggagaatctcaacggagatgcaggtggctttggccaaggtaaggaatggggctaaaaaaaaaaaaaaaaaagaaaaaaaaaaaaggaatggggctatggccctccctgctctcctagaccagataaggtccggtcagggcaccagggagatgcatctaggggtcccctcttcactcctggagacagcagatcatcagtccactcttcttgtgccagcaggtcgtttgtaactggatatttactggattgcagcatatggtgcccacacggggtgtactcagtcacccgtgaacagtggcgattttccttcggctgaggcaggagctttaggaccacttgctttcaggaaaagaaaatgagtaactctctcttcaggatggtgatggggcctggccagtccaaggaggctcctgggtggtcactgagtgggaggtcatcttcactgtttcctctcctccatggtaggaaatcactgaccaggacatgtttggagatgccagcacgagtctggttgtgccggagaaagtcaaaactcccatgaagtccagtaaaacggatctccagggctctgcctcccccaggtactgcagatggaaaggaagcagggggtacagcctgcagctgtgcttagcatgggcttcagggctgagggaaagcggggctggcagcagctttggggttggaggggctatttcacc

SEQ ID NO: 7604 - DNA, 2300 bp, Homo sapien
ccacagcacgcaggtacttctgggtgcccccaaaacaccaggaccctctgagattccctgaacttcaggctctgttttgttggcttccttggacagttagttggagagaagaggaatacttggaaatgctctgaacaaaaactcttgaagaaagactaaattagagaggtctcctatattccttgcttactgccagtgtggaactggcttccacgctgacctctagggcgcaggcaggggagccaaaaacgctgtgtggtcgtggcctgccacggctgcgagtgtcgattccacaccaccggtgtctctgcctccatcagacgtcagtctggagattgtgccgtgaatccactgttgcagaggacagcagcctctggatctcatgggacatcctgacccgagctcccaacctgagtattgctgtgggcggtcatcgtgctttcaagccgggaagccaacaatattaaactgtttcaatggaaggacccgagagtgggctggagaagaagtcagaagaactgggcctcaggaatcgtgttctccttttgaaggcctgtggtgtcagagatctgggacagggattttcccggcacaccttacacagttccagttctgctagggttaaacagccagcctgttcattcccctgataacttaccaagtgcattgtcagtgtggcctcctgagctccatgctattacatggctgaaaatgaacttgagactagaatagcccagtgcctggggtgaggtattgtccttcttgttaatcactgttcctgaaataccttttgttccctcagacagcaggtacccacacagcactcattgccactctcattatttctctccccactgccctcgtttctgtttctctgagcacctgctggccgccctctgcctctcccttcctggttcttacgctgctgcccctcctgccacccacaccgtttcccatccgcgaggcttgctgcacctccatcctctccacctgccctggcaggacaaccgctgtggctttgttcctcatctccatgtgtcctctaaggactcgctttgctgcttctttctcctcctttccatcgtggtctggccagtgggagactgagtctccctcccaaagtcctgatatctgttctctctaacacccctgctccagagactccccatgcaccagtccagcagccctgtcctcaggctccccagggactccctaacaagagacactttcttttgttcctgcagattccaagaaaggtggtgtatgaccagctcaatcagatcctggtgtcagatgcagccctcccagaaaatgtcattctggtgaacaccactgactggcagggccaggtaagtgctgaaactgcgaggccatgtggggtcctggagggcaggcaatgcccggttgcattgtcagtgtggcctccatactattgcgtggggaggtggggaactcacccctccatcagcccccacctgctctgaactgagcccagaactctgagttctagtccaacttctgtcattatccaacttgtgggatcttaaatcactaagtttgctctacctcagcttcctcatacgttaaaaaacaaacaaacaaaaagcaacagtaattcctccagggcgccacatgcgtcaggcagcatagtggaacggaggcctgtagagaagcacccggctgtaacctccagggctgccccatgaaggcaggtcagcaaggcagagcatccctgcctgctccctcaccgctgtccacctggcttagacactggtgccggggacacctggagtgtcctagcatgtgaaaccccctaaggcttcccatctctcacactctgcgtgtctcgtgggtcggccccaccccctccttactggcagtccggagacctggctgcctttgcccagcttcggtctgaactgcagaggacaggggccctgcagctcggtctgggtctcacttgcctcttggcccttgtgaaggagtgatgtgttctcacctgtgtccctgctctcctccctccctatcccagtatgtggctgagctgctccaggaccagcggaagcctgtggtgtgcacctgctccaccgtggaggtccaggccgtgctgtccgccctgctcacccggatccagcgctagtaagggctctggcctcccttctcctgcccttagagattccctctgacctcatcttccaaccctgacttctaagcaatgatagaccctcctggcctcatcagaccaagaatttgcagaggggcgtatgtttaggggggtggcggcagcaggctgtagggct

SEQ ID NO: 7605 - DNA, 2300 bp, Homo sapien
cacagcactcattgccactctcattatttctctccccactgccctcgtttctgtttctctgagcacctgctggccgccctctgcctctcccttcctggttcttacgctgctgcccctcctgccacccacaccgtttcccatccgcgaggcttgctgcacctccatcctctccacctgccctggcaggacaaccgctgtggctttgttcctcatctccatgtgtcctctaaggactcgctttgctgcttctttctcctcctttccatcgtggtctggccagtgggagactgagtctccctcccaaagtcctgatatctgttctctctaacacccctgctccagagactccccatgcaccagtccagcagccctgtcctcaggctccccagggactccctaacaagagacactttcttttgttcctgcagattccaagaaaggtggtgtatgaccagctcaatcagatcctggtgtcagatgcagccctcccagaaaatgtcattctggtgaacaccactgactggcagggccaggtaagtgctgaaactgcgaggccatgtggggtcctggagggcaggcaatgcccggttgcattgtcagtgtggcctccatactattgcgtggggaggtggggaactcacccctccatcagcccccacctgctctgaactgagcccagaactctgagttctagtccaacttctgtcattatccaacttgtgggatcttaaatcactaagtttgctctacctcagcttcctcatacgttaaaaaacaaacaaacaaaaagcaacagtaattcctccagggcgccacatgcgtcaggcagcatagtggaacggaggcctgtagagaagcacccggctgtaacctccagggctgccccatgaaggcaggtcagcaaggcagagcatccctgcctgctccctcaccgctgtccacctggcttagacactggtgccggggacacctggagtgtcctagcatgtgaaaccccctaaggcttcccatctctcacactctgcgtgtctcgtgggtcggccccaccccctccttactggcagtccggagacctggctgcctttgcccagcttcggtctgaactgcagaggacaggggccctgcagctcggtctgggtctcacttgcctcttggcccttgtgaaggagtgatgtgttctcacctgtgtccctgctctcctccctccctatcccagtatgtggctgagctgctccaggaccagcggaagcctgtggtgtgcacctgctccaccgtggaggtccaggccgtgctgtccgccctgctcacccggatccagcgctagtaagggctctggcctcccttctcctgcccttagagattccctctgacctcatcttccaaccctgacttctaagcaatgatagaccctcctggcctcatcagaccaagaatttgcagaggggcgtatgtttaggggggtggcggcagcaggctgtagggcttgaggccccggcagaccccagaggatcgggggtggaaatatcaattcctgtgctccctgcctccctgcctggacccccgccatgccttgacttgctttatcctcttaaacccatgatgaaggagaggacacactggttttaaaaagatcttttattccttccatctgcaacatgctgctagacactcaggagtcagtgcttcccctaccctcagggccttcttaaaaggcccaagtcccttgcccttgtgaaagagaactatggattccaggcctgggggcacacaccctgcgggcatcccaggcacactgccgagtcctacgttagcctcagctgttccgtctgcttcatgggcaatgccctctgaccctggatttttctcttggttgtgaaagcactgtggcttattccctgtatgatcctctctgttttattttgtggattggtttgcttttcccctgtgggttgttgagatcacagaaagtcagctctgggcctcccccgggcaggatcctggcacccctgagcactgctatgacgctccccttcctccccagctgcaactgcaactcttccatgccgaggccagtgaaggtggctgctgtgggaggccagagctacctgagctccatcctcaggttctttgtcaagtccctggccaacaagacctccgactggcttggctacatgcgcttcctcatcatccccctcggtaaagacgggaggcaccaggagggcgtcgggcatgagggttccatagacagatgcctcatctggaacaggacggtggggttggggcctaggaagggacagtca

SEQ ID NO: 7606 - DNA, 2300 bp, Homo sapien
taagaaacaacagaagttgcttccggagaggggggctggatggctgaggacagcagtcacagagataactacatttcattgtaacttgcttgtttgccttttttttttttagttttttttttttgagacagagtctgtctctgtcacccaggctggagtgcagtggtgccatctcagctcactgcaacctccgcctcccgggttcaagcgattctcttgcctcagcctctccagtagctgggactacaggcgtgcgccaccacgcacagctaatttttgtatttttagtagagacagggtttcactatattggtcaagctggtctcaaactcctgacctcagatgatccacctgcctcagcctcccaaagtgttgggattacaggtgtgagccactgagcccagtctttgtatgtcttttgaatgttgcacaaatgaaagtatctgctatccggaaaaaaatcattccagtcacggtgtctcatgcctgtaatcccagcactttgggaggccgagatggaggactacttgagaccagcctgggcaacatattgagaccctgtctctaagaaaataaattggaaaaaaaaaaaagccaggtgtagtggcatgcacttgtagtcctagcttcttgggaggctatgatgggaagattttgtgagcccaagagtttgaggttacaggctgggccgaggccaaggtgagtggatcacctgaggtcaggaatttgagaccatcctggccaacatggtgaaacccgtatctactaaaaatacaaaaaattagctaggtgtggtggtgggtgctataatctcagctactggagaggttgaggcaggagaattgcttgaaccctggaggcagaggttgcagtgagccaagatcgtgccactgcactccagcctgggagacagactccatctcaaaaagaaaaaaaggagtttaaggtcacagtgagctatgatcacaccagtgcacaccagcttggatgataaagtaagaacctgtcacttaaaaaaaaccattggcagagcacaggtttgagaagaacctggttggatgtaactgagatgtgtaaaatagagggtcttcacttgtgtcaaaggcagcctgatttacagctttttttttgtggacaggtggcatccttattatggggggacgtccctctgatctttgcagttcattccttgtctctggtcactgggccctgggctgatcaccaccttctgagcaggacccagacggacaagctagactacacccagaaaggagaaattgggatggggaagggtcaggaaactgcggtaggactgagtgaagggaccaggggcagcccagggaagagatgagaccacgcggggcaccatcgctgtctccaaataccttaactgacacaagggagcagccttctttctgaagacagagctagggctgtggatgagcactgcaggaaggcacttcggggtctatcagaggaaatttttgctaaccttccgagttgtctcagagccaaacgtagtaagctacctgtcaccggatgtgcttgagctaagggcgctgaaccacctctgtcagagacggtgcatcccccaccggatgtgaccccgggatgcggagcctggggtcagatctgcgagccagataacagcggcactcacttctcgggtcttcgtgagcattaagtcaatgaacccagggcaccaaagcgcgcaacacgcagtaggcgctcagttagtggcgcctcgctctgtactccaggaagcccaaccttctccctgcgcctcagtttctcccgacgtcctcgatggcgccatggcgccacactaggtaccttcgggttcgacctcccgagcagctccacacgctgaggccccgcggcattttgcggccgagggcacccctcggggctggcgggccctgggaactgcgccccgggcgggtcctcgcaccgcccccgcctcgatggccccgccccgtccccctcccgctggagccggcccggcccgcgctcctttaaggcagcgaacgggccaagagaagcgtgtttcgccccctccgacgccaccgaggtagcggcttcacctttaaggcggcgcgggggctgctgggaaggccggcgggatggaggcggcgggaccggctcgcgggtgcgggtccgggtgaagcgggaggcagccagagtcggagccgggcccgagcaccaggcgcaggtcggcgcgggccgattgggccgggagacggggtcaggccctaaagcgggggaggagactccgggtcggcctaggggagggggtcgtc

SEQ ID NO: 7607 - DNA, 2300 bp, Homo sapien
ctaggtgtggtggtgggtgctataatctcagctactggagaggttgaggcaggagaattgcttgaaccctggaggcagaggttgcagtgagccaagatcgtgccactgcactccagcctgggagacagactccatctcaaaaagaaaaaaaggagtttaaggtcacagtgagctatgatcacaccagtgcacaccagcttggatgataaagtaagaacctgtcacttaaaaaaaaccattggcagagcacaggtttgagaagaacctggttggatgtaactgagatgtgtaaaatagagggtcttcacttgtgtcaaaggcagcctgatttacagctttttttttgtggacaggtggcatccttattatggggggacgtccctctgatctttgcagttcattccttgtctctggtcactgggccctgggctgatcaccaccttctgagcaggacccagacggacaagctagactacacccagaaaggagaaattgggatggggaagggtcaggaaactgcggtaggactgagtgaagggaccaggggcagcccagggaagagatgagaccacgcggggcaccatcgctgtctccaaataccttaactgacacaagggagcagccttctttctgaagacagagctagggctgtggatgagcactgcaggaaggcacttcggggtctatcagaggaaatttttgctaaccttccgagttgtctcagagccaaacgtagtaagctacctgtcaccggatgtgcttgagctaagggcgctgaaccacctctgtcagagacggtgcatcccccaccggatgtgaccccgggatgcggagcctggggtcagatctgcgagccagataacagcggcactcacttctcgggtcttcgtgagcattaagtcaatgaacccagggcaccaaagcgcgcaacacgcagtaggcgctcagttagtggcgcctcgctctgtactccaggaagcccaaccttctccctgcgcctcagtttctcccgacgtcctcgatggcgccatggcgccacactaggtaccttcgggttcgacctcccgagcagctccacacgctgaggccccgcggcattttgcggccgagggcacccctcggggctggcgggccctgggaactgcgccccgggcgggtcctcgcaccgcccccgcctcgatggccccgccccgtccccctcccgctggagccggcccggcccgcgctcctttaaggcagcgaacgggccaagagaagcgtgtttcgccccctccgacgccaccgaggtagcggcttcacctttaaggcggcgcgggggctgctgggaaggccggcgggatggaggcggcgggaccggctcgcgggtgcgggtccgggtgaagcgggaggcagccagagtcggagccgggcccgagcaccaggcgcaggtcggcgcgggccgattgggccgggagacggggtcaggccctaaagcgggggaggagactccgggtcggcctaggggagggggtcgtcatgggcgcggcctgtgggaggatcgggccagccctggtagggggcgcggtcccgggtggcccggggcgggggcgcggccttttcagggaaggcctcagggcgttgcgctggcctaggggaggggtcgtcgtgggcgtagcctggaaggactgggggccgcgtactcagcccctctagtgggagcgcctccgcagggtcggctcgtcgggaggatgggctccgcggcttggcctgccttttggggatggggctgtccgaggggctgggcccggatcgccggaggggccagggtctcctgcacaggagtgagcccccacgttccccatacctgtcctggttagggggtccccggggaaacccggacactgagccgcctaagtcggcctgagccggtggtctggggccgaagcaggatccggctgcaccgcattgcgtctcccaggcctagacaagctaggcgcgccctctgtaggccaagcgcgggcacggtgcgggctgccggctgggggacctgggcacacgggagactcaggcgtccggggaccgcctgtttacctaatccggggcggacggcggtgtggccccaggcccggcgcccgcctgcccgcaccctcgtcctcacagacgccacagccatggccatgatggtgtttccgcgggaggagaagctgagccaggatgagatcgtgctgggcaccaaggctgtcatccagggactggagactctgcgtggggagcatcgtgccctgctggctcctctggttgcacctgaggccggcgaagcc

SEQ ID NO: 7608 - DNA, 2300 bp, Homo sapien
gatgggctccgcggcttggcctgccttttggggatggggctgtccgaggggctgggcccggatcgccggaggggccagggtctcctgcacaggagtgagcccccacgttccccatacctgtcctggttagggggtccccggggaaacccggacactgagccgcctaagtcggcctgagccggtggtctggggccgaagcaggatccggctgcaccgcattgcgtctcccaggcctagacaagctaggcgcgccctctgtaggccaagcgcgggcacggtgcgggctgccggctgggggacctgggcacacgggagactcaggcgtccggggaccgcctgtttacctaatccggggcggacggcggtgtggccccaggcccggcgcccgcctgcccgcaccctcgtcctcacagacgccacagccatggccatgatggtgtttccgcgggaggagaagctgagccaggatgagatcgtgctgggcaccaaggctgtcatccagggactggagactctgcgtggggagcatcgtgccctgctggctcctctggttgcacctgaggccggcgaagccgagcctggctcgcaggagcgctgcatcctcctgcgtcgctccctggaagccattgagcttgggctgggggaggcccaggtaggtcagtctggggcactgaggtgggaggtcactggagggatcgagccttcaagaggaatccggtaatgtaggagaagaatctgagcagggaaccgtctgtttcctggagccccatgttaggaccccagtaaataccttttgaagaaataaatgcactttggcgaccccagccctgccctaagagaccatgatcacccttgcccccacgcagagccccatttccggctcccctctacctaagggagactggatggcatatgagaacagaaagaaaatccttaaggaaacatagcctcccaccaattaattcttctattcactcgttaacagatgagttattgagggccagccagggtgttaggtggatacagggcccaacaaaatagacaagattcctgccctattagagacaaaaacacacatacagaaataattggttgttacaaattgtgatgagttctgcagagaaaagaacaagattttatgatagctcgcagcagcgagtcttgtctactggtcaggcaggacttctgtgaggaaatgacaaactgaaacctgagggaagaaatgaaccagcctccaggaaagggaggcaggggagaagttgcatgtgcaaaggtcctggggtaggaaagagcttgtggtggaggaactcagggaagaactgtgtgactggagcttcatggaagggagacagggacagaagaggcctggggagaagccaagaaccagatcatggcctggttggtttgggttttattctcaggaaatcagaaagcctctggagggctttaagcaggcaggcaacacagtctgacttgagtttctaaaaactctctctggctgagatgtggagaataaacctcagtgggtcgaggatggaatcactctccaatgagtggttaggaagccactgctggaattcaaatgagagctggtgcttggaattaaggggtggctatgacggtggagaaaagggaccagttctggatgttctggaggtaggtccagcaagacctgggggtggaataagggagagagagaggaaggcagcatcactcccaagtttgtgatttaagcaaattaagggaggagagggccttggtggatcagaactctgttttggcctcctttaattgaggctgccaggatgatatgcagttggagatgtccaggagccattgggatgtacaaggagttagacttgttttattcccctcagagcttggctgagcccctgcctggcacgtgaaccctggggaagttgtatcattttggtttccttgtctttaaaatagggatcatgccatctgctgtgtacacttccaggctgttgggggaatttttttttttttttaaagctagtggttatggaaacacctgtcacttaggcatttgctaaccaacaacaaagtacagggtctcagacagcctggccctctgcaaggacattcactccctgccagttggccgtcagaggtagagaggaccactcaggggccgcacacctggtggagcacgtgcactctcacagagggggaacaatctgcacggagggcatgggcatcaaggccatgtgtgaagctggagcaaagtgggaggtgtgactagctggagacacaactgcagaaatgatcctgaaccg

SEQ ID NO: 7609 - DNA, 2300 bp, Homo sapien
ggaggcccaggtaggtcagtctggggcactgaggtgggaggtcactggagggatcgagccttcaagaggaatccggtaatgtaggagaagaatctgagcagggaaccgtctgtttcctggagccccatgttaggaccccagtaaataccttttgaagaaataaatgcactttggcgaccccagccctgccctaagagaccatgatcacccttgcccccacgcagagccccatttccggctcccctctacctaagggagactggatggcatatgagaacagaaagaaaatccttaaggaaacatagcctcccaccaattaattcttctattcactcgttaacagatgagttattgagggccagccagggtgttaggtggatacagggcccaacaaaatagacaagattcctgccctattagagacaaaaacacacatacagaaataattggttgttacaaattgtgatgagttctgcagagaaaagaacaagattttatgatagctcgcagcagcgagtcttgtctactggtcaggcaggacttctgtgaggaaatgacaaactgaaacctgagggaagaaatgaaccagcctccaggaaagggaggcaggggagaagttgcatgtgcaaaggtcctggggtaggaaagagcttgtggtggaggaactcagggaagaactgtgtgactggagcttcatggaagggagacagggacagaagaggcctggggagaagccaagaaccagatcatggcctggttggtttgggttttattctcaggaaatcagaaagcctctggagggctttaagcaggcaggcaacacagtctgacttgagtttctaaaaactctctctggctgagatgtggagaataaacctcagtgggtcgaggatggaatcactctccaatgagtggttaggaagccactgctggaattcaaatgagagctggtgcttggaattaaggggtggctatgacggtggagaaaagggaccagttctggatgttctggaggtaggtccagcaagacctgggggtggaataagggagagagagaggaaggcagcatcactcccaagtttgtgatttaagcaaattaagggaggagagggccttggtggatcagaactctgttttggcctcctttaattgaggctgccaggatgatatgcagttggagatgtccaggagccattgggatgtacaaggagttagacttgttttattcccctcagagcttggctgagcccctgcctggcacgtgaaccctggggaagttgtatcattttggtttccttgtctttaaaatagggatcatgccatctgctgtgtacacttccaggctgttgggggaatttttttttttttttaaagctagtggttatggaaacacctgtcacttaggcatttgctaaccaacaacaaagtacagggtctcagacagcctggccctctgcaaggacattcactccctgccagttggccgtcagaggtagagaggaccactcaggggccgcacacctggtggagcacgtgcactctcacagagggggaacaatctgcacggagggcatgggcatcaaggccatgtgtgaagctggagcaaagtgggaggtgtgactagctggagacacaactgcagaaatgatcctgaaccgggaaggactgggaaagggtggaggccgggtgtggtggctcacgcctgtaattccagcactttgggaggcccaggtgggaagactgcttaaatcccggacttcatgagaccctgtatctacaaaaaataatttttctttttttttttgagacagtcttgctctgttgcccaggctggagtatagtggcacgatctcagctcactgcagcctctgcctctcaggttcaagtgattctcctgcctcagcctcctgagtagctgggactacaggcacgcgccaccacacccagctaatttttgtatttttggtagagatggggtttcaccatgttggccaggatggtcttgaaatcctgacctcgtgatctgtccgcctcagcctcctgaagtgctaggattacaggcgtgagccaccgtgcctggccaaaaaattttttaaattagccagctgtggtggtgtgcacccgtagtcccagttactcaggaggctgagggggaaggaccacttgagcctggaaggtagaggctgcagtgagctgtgacggtgccatagcccttcggcccaggtgacagagtgagacattgtcttaaattaaaaaaaaaaaaaaaaaagagagagcaagaagggaggttggaccctagg

SEQ ID NO: 7610 - DNA, 2300 bp, Homo sapien
gtgtctgggcactgggcagctgcggccggggctgcatgcgtgctgccaagcttccctccagcatgcctcttcatccagcaacagttcctggctctgtctcaggcctactttgggctggacaacggggagacacgaggggaacccagcctctcctgggggtggacgtgtaaacggccagtgctaacaccgtcactgtggagatggacgggagtgtcagggcaccagggtgtggccttgggtcagaactgccattgcctctgcccagctcagggattccggctgcctctgccaggtcagaccccttcaggccagggaggcacagactggcagcagcacagggctgagccacctgccccctctgcccacagcctggaggcacaggtctctctgacagccgcactctcagctccagctccatggacctctcccgacgaagctccctggtgggctaatgctgaaggggcagccagtcaccagagcgcccacctggcacacccccctcaccccagccctgcgcatgggcctgctgcttgtcccgcctgtctctcccacagcccctgtcttttctgttcaatctcagggtaaccttctcccttgtcatctcagcctgagccctggaggctgggcctgcccactccagctccatcccttatttattccttccagcagggccctcttccctaggttcgggccagcaggaggtgccggctggagtctccaccatagactcagtggcctggcctccccagaccccagagccaagaacactaagcactcgccggcccttcggcaccctcgccctccctcccgactcaacccggccgttgcttctgtatatagagaaataagttattggccgcgcgcctcccttcagtccacggtactacccgggcctcccctcgtccctcttctagtggtaccgcccaggccttaatcacccccattccgtgcggtggtatctcccaggctctacattctcgggagcggcgcctcccaagggggtcctgggaccttctcgcgctcctcctggcctctgagggatgcgtcctacccgcgccatcgccccgtggcccaggacggggacctccccttagtccgtcctcccaccgccgggccctgccccgcatcccggccttatgcactgcccctcccacccggccccgcccaggcacggccgaccccgccccgggcaccgcccaccgagccatcctgcctcgcctccccccacgcctgcagcttctcgcgaggggcggcgacggtcccctggtggcaggaggggctccccctgttgcgggtgaggcggctgctctcatattttcagatgttgctgtagaaataaagacggtttaaatctgagctgggcttgttttgagacggaggtcgggggcccccagcgtctctagactggggtggagccgggaagggtcgtgcgtgagtgggggacagtgtgtctcgctcaaccgctgtccgcgcagctgggcccagatattgtgccccaccccggaattgcgtgaggggcccacaagtcaggctttccctaaaacactcacttgtggggttctggagaccgcgggctcttatgagctctgctcctcacaaagtttttgaccttgagtgagtttcccgagactcagttttttcatctatgaaatgcgggtgatgacgcgcggctgcgagttaggactgcccagtacacgaagaaccctggacaaatgtacttttattagtcttactagaacccacattctcatttaatgttcacaacgtgggtattgggagggcaaggatgactacctccgtcagacagatgtgaaacgtgccaagcccagccctaaattgagctttctaaacaccgagtcgcggtcaggctttccagcactgtcctcaagcctgagtgcgtccggagtgcaaactacaagccccagaaggcaatgcgccagcagtgatgggagtgggcgcggaggcgcgggctccccgactacgcctgcgcagcggggctgagttggagaacgtcttagactacaagttccgggaatcagcgcggcgaggcctgagaagaagacgtttgcgcctgcgcgtcgcgggcggggcctctggggcggagcggccaccatcttggaacgggaggcggagcagagtcgactgggagcgaccgagcgggccgccgccgccgccatgaaccccgaatagtgagtgagccccgcccgcgccgtccagcgcagcctcgatcccgaatacagggctgtacgcttaccggggttgtctggcccgggtcaggactgtgcggcgcccccacatcc

SEQ ID NO: 7611 - DNA, 2300 bp, Homo sapien
agaatgccaccaatgtcgagcaggcgttcatgaccatggctgctgaaatcaaaaagcggatggggcctggagcagcctctgggggcgagcggcccaatctcaagatcgacagcacccctgtaaagccggctggcggtggctgttgctaggaggggcacatggagtgggacaggagggggcaccttctccagatgatgtccctggagggggcaggaggtacctccctctccctctcctggggcatttgagtctgtggctttggggtgtcctgggctccccatctccttctggcccatctgcctgctgccctgagccccggttctgtcagggtccctaagggaggacactcagggcctgtggccaggcagggcggaggcctgctgtgctgttgcctctaggtgactttccaagatgcccccctacacacctttctttggaacgagggctcttctgtcggtgtccctcccacccccatgtatgctgcactgggttctctccttcttcttcctgctgtcctgcccaagaactgagggtctccccggcctctactgccctggctgcagtcagtgcccagggcgaggaatgtggccaggggatccaggacctgggatccagggccctgggctggacctcaggacaggcatggaggccacaggggcccagcagcccaccctttcctctccccactgcctcctctcccttcctacactcccagctcgagccgtccagctgcggtgggatctgagtatatctagggcgggtgggcgggtagcagtgctgggcctgtgtcttgagcctggagggagtctgctcctgccgccctctgccctgccagagacagacccatgcgctgcctgcccaccgtgcccctttgtccccatgtcaggcggaggcggaaggcccaccgtgccagaggctgggcaccagccttaaccctcactctgctagcacctcctccctttccccaaggtagcacatctggctcactccccactccgtctctggagcccaccagggaaggccctcatcccctgccgctacttctctggggaatgtgggttccatccaggattgggggcctctctgctcacccactctgcacccaggatcctagtcccctgccctctggcacagctgcttcctgcaagaaagcaagtctttggtctccctgagaagccatgtccctcgtgctgtctcttgcctgtcccacctgtgccctgccctccagcttgtatttaagtccctgggctgcccccttggggtgccccccgctcccaggttcccctctggtgtcatgtcaggcattttgcaaggaaaagccacttggggaaagatggaaaaggacaaaaaaaattaataaatttccattggccctcgggtgagctgagggtttttgcaaggaagttgtggtggccaagtgtggtctgtggtctaagcccagccttggggtggggggatggaactggaaccctgggcttggtggggtgcacgggggtcctggcttggtttctgtgtcctaaggctgctggcaaaagcccttgaccccgtttcctgaggccaggaaagctgcttgtgcttctgtggtctgtccccaagggcccagcaccgttctgtcagggaaagaggcaggcggccatcagctcatacctggcgtgccgccgccaactcccgcggggcacacggcagaggtgtggggtcgcgcagccgctgagagggcccccactgcacctggcccaacctccttcagcgccccccaaaaccccactgctcccattcagcccctgtcctggcgtcattgtgtgtcccagccaggtgcttctgccgtctccgacagtgacaagtgcctcgcacttcagcctttgccctgagcgcccgcccgagggggccgagtgcggctgtgccggtggctggagtgccgaggggtgcggggtgccgggggcggccgcgtctacgctgtccggagggtgaacggccgcgggcttgtcggggctgggggtggcgcccgagccgggcgggcagacgaggggcccgcggagacccagccccgcccgaggccgctcgcgcggcggccccgcccccggctccgccccgccggcttcgcgggctggagagcgagggagccgcgggcgagggatcgcaggatgagcgatcggggcccgggcagccggcagcggacgcgccccccgagcccaccggcccgcgccccgcgccccccacggccccgcggtcccggtcccggccgcatcacccacgtcccccgagccccacgggccatgcccggccggccctaagcgcgggcc

SEQ ID NO: 7612 - DNA, 2300 bp, Homo sapien
tgcctggcgctgactcagccccccggaacaaacaatcccccatggtgacagctgacacgcgtcactcaccgccagggttgcctaggaaccactggggcctgggctgagggtctggagtgggatctggggtcccgccctgttaagagtctagttcttagcagctgtggactgaggaccacgcctcctatcccctaccacccagcaggccgcactaggcactctgatgtgcacaggtccactttgccggcgaggaaccagacttgggacaaatgacttgctaagattgtccagctaaatggctgagtggacagagtacctcacacaggtgctcaatcaatatctgttgaatgaacaaagacatttcttcaaagcttgggcctttcctcccagcctgggcactccacaagggcaaagtctgggttttattcatccttgaccccctcaaagccacccagagcctgatctttgggaagcatcaatgcaggcgtggtggataaactgctgaggatcccctgaggacagggaccccacaggggctgtgggaaggccctgggtggggaaggccccaaaaagaggcttcttgaattccaggagcccttctcccaggagctggtcagctctgcattccctagcctgtggcccccagctccctccagtccttagaaccctagccctcctgcccctaccccacagaaagaaaaatagagtaactcggggtgcgggggagagggggaaagacaaagcaaccaagacccagagagagagcagagccaggccaaggagtgacagggctggagctggggtgtgtgctgaggtgcctttgggggctcactcttcacacagtaggggttcagtctatggattcccgatgtcaaagagcaaggtggcaggggatggcaaagggagcgcagggggaaccatggagcaggcggcaggtcccaggaagagaaaggagagaggaagtggagagcccgggaaagaagcaggtgaggcaccgggaggaaggagggaagggctatgggaaatgggattgagggagggataagaggacccctgaaagggaatgacaatcagggaggtgtgcgcgggaggtgtgagcagaggatgctgagctgagccagccagggccgagctgggcaggctgttacagaaacaggcacggggtttgggtgggggtggggacggagggcagtaaagtggggccaggggcccccaacaaccagctggaggctgattgatagttctgtagtgaggggacgggagccaggcagaggaggccctggaggagaggagcgggaggggaggaggagggagcctgggggaagcgatgggtcggatgcaggatgaggaatggacattttgaagaaccaggtgtgaggctaggccagggcgagggacagaccaaggggtatgtgagagacaaaggggaagggggacaggaagaggagggaagctggaaaatggagaggaaacctggggggctgggaagcccccaacaggaggggtagggaaacccaaggtgagccggtggtgggggctaggtctctgggggctgatgagagccaactgctgcttggtcagggagggggctgggaaggcaaagggttaatggactctgagatctgtgggtcctgtaaacagatgcagttgccatagcaaccagctccatcactctggctggaaaaacccacaaaggcgggggggggggggcagcagacagacaaactgcccgacggactaatggaggcggctggatggtggtggggggggacatagaagataaagcaacaaaaatgccagaattccaccccccacctcacgggctgcatgggagcagaggacgagggcagaggagggggtcagagaccgactgacatacacacagacaggcgggggcggcggaggaaggggggccccgggaagaaagccgaccacggggggtgttaatgggggcgaagccgacaagccgacggctgggggatagcaagtttcccctgggctctgagaccacccgccctgggtccctccagctccgcgtggcccctgccccccaccccgcccccagccccagccccagcccggccttacgtgccagatgacaaagaagatgagggaggcgcacagcaccagggtgagcatgtagcagaacgcggcgaaggtgaacgccatggcccccgcgccgggcggcggcccggggggcgccagcgcggggcccgggcgcaaggggacgccccccggcccgcgcttagggccggccgggcatggcccgtggggctcgggggacgtgggtgatgcggccg

SEQ ID NO: 7613 - DNA, 2300 bp, Homo sapien
agcaccggacgacggacagcacccgcgcggagaagaggagtgggaggcgggtggagtcagcatcctggggcttgcttggcagctctgtcactgataggtccggcctcccaccaccacctccgggtctgccggggctccgttccaagattgggtgaagtgtaggtgacgggggaggaaaacaagcccagagagggagaaacaggcgccccgaagggcagggcttggttggaactcgaccgccccgttccctcctggagtacgtcccaccaaggaagctttgctcctgactccggctgcaggttacctctcgactccctggtgtagtcgtggcagggtgcgtcaagtgcctcaccgcgcaggcgcgcaaataattctcgcccaccttctttcttaactcttctattggctgttcccaccgtgaactggcaagcccgtgatccaatcccaggcaccgcaagtcgctccgcctgtccctcacccggatgttgccttctgccgaatccgctcaggccagagctcgtcagtggccaattgggagaggggaggggcgagccggcgccgccgaagagccaatggcaggcgcgggggatgacgccacggacatggtggccgagaccggcggggtgggggacgtgtcgcgcggccgggtggcctcggtcggtaccctgggcgcggagcagctgcctcattagtattcgtacccacgaggcggcgcagcgggccctcggggacagcgagcgtcgcggccatggcttatcactcgggctacggagcccacggtgcgtggggcgcgggcggggcgcggcgcggccggcggggggagagtcggcggcgtggcccgctcaccccgagggagatagcgactgggaccgccgcccagggcgggggtgtcactcgggttcctgcccctcgtaacactccaacacgtcccggacttcgccctctcggcccagtcctgggaatcccatgccggagtcgggcaaaaacggggtccgcctcctcctccagaaactcctttgactgttgtgaacctgatgaggtccctgatcactgtccagggcctccaggtagccagctgtcgcctctcccagctttgttcacggaaggatgccctcccagttattttcacctagcacacttctactcactgtggctcagttcagaggtcacttccagtgagaggccttcagaaaccccaagtgggcaaccagttctaggcgctgcctcagctctttctttgcctacatttagcaacggatttctcgcaaaggatccctcatcacagttttttctcagttagctccccctcacccagcttggggtcccctcactgatcggtgcctccaggacccgtgcagggctgtccagccagggaaggggcggtggtttgggctcatgcttggtatttctgtcatctactctgatacctccaaacccacaggctccaagcacagggcccgggcagccccggatccccctcccctcttcgatgacacaagcggtggttattccagccagcccgggggatacccagccacaggagcagacgtggccttcagtgtcaaccacttgcttggggacccaatggccaatgtggctatggcctatggcagctccatcgcatcccatgggaaggacatggtgcacaaggaggtgtggcctgcccccggggcacgggtggcagaatttttggctagggctggggcatcatgggattccacccgattcctcacagtgccctcagggatggagcacacagaggggcaccctgaggcctggggtgcggcttgcccacagcttcctctctcccctcccagctgcaccgttttgtgtctgtgagcaaactcaagtatttttttgctgtggacacagcctacgtggccaagaagctagggctgctggtcttcccctacacacaccaggtgagcttcctaccaagggagctggtgggccttcctcattctgcccgagtctggcccccagacctcaacccccttctctcctcttttctcttcttcccctcctgatgtggccgctgctgccactgccactgccagaactgggaagtgcagtacagtcgtgatgctcctctgcccccccggcaagacctcaacgcccctgacctctatatccccagtgagtctccaacctgggctggggaacgtggtggggtggggtcgggggggacttgtgccttgagggatgaatgggaagagaggcgcagctactgagtcagcatctgttcttggtgctttgtgtatgtgtggcagttgcaagacaccaggcaggcagtgcagggt

SEQ ID NO: 7614 - DNA, 2300 bp, Homo sapien
acatggcgaaaccctgcctatacaaaaaattaaaaaatgagctgggcatgatggtgtggtgtgcacctgtattcccagctacttgggaggctaagacaggaggatcaattgagtctgggagtaagaggctgcagtgagctgtgtttgcaccactgttctccagctgcgtgataaagtgagaccctgcctagaaggagaagaagaatgagaaggagaaggagaagaagaagaagacagaaagaaagggagaaaaagaaataaagaaagaaagaaggaaaagaaaagacatagaaaggttttggattcagtttacaagtatccattgtgccctgcagtgacatgggaactgacttgcattagatgaccccctcccaggtacacgtggccccagtgctacctcctagccctccagggcctcagatcttcacatctgtgtctgggtctggctttgctcccaaactagacaatatgggcagaaaatgagctgcaatactggtgggttaattcatttttgtatgtgcgtgtgttcaggcaaagagcaactcaaagaccattcaattaaacatccttacccacttaaagattaggtaattgagatgtggacacaggaaaggactggtccagggttttatctatttattatgaatttcttggacacagatgtttattgggtgtcttccatatgcaagtattgtgcttggcactgggaagacaagggtggaagtggagaatgacaacagggcctgtcctcatggaacttacatgcagggcaaattgggtgcacccagagggggcctagaacccaacctatgacctccacccctgaccgggtcaggtctctgtcccctttgtccctctgagaggcacgagatgaactaactcttaaagataactaggcttatggacaagtggatatgagggggaagggcatcccaggtggaggggacctctgggcaatggcactgcaatcagaccacgtgggctgagtttggggagcaggaaggtcatctggtgtaactggatacctggtagctaattagagaggtcgcagagaacctgctcatgctctctagaaagcggtggctgaaggtctgtgagagggaggcccctgaagactgtctccgcggggttgggagtgatcagaacctgggtggagagaaaggaacccccgggactacaagtgaggcttaggggcctcacttcaagaagaccacaggcccggcgatgactcaggagtttaggctgcagcttcaggacgcaaatcagcacacctctgcccccaaatctgctggactacgggagagtctatgggacaggcccggggcaggatcctgccccacctataccacccaatctctcagacttcggatcctctgggccccagttttgcagtatgcgtgtatgtgtgcgtgcggccacgcgctcgctaggagcgtgtggttcgagaccccaaatcttcccatacgcaggcccccgggagtctacaggatggcggctgaggcgggaggacattttcagcaccggacgacggacagcacccgcgcggagaagaggagtgggaggcgggtggagtcagcatcctggggcttgcttggcagctctgtcactgataggtccggcctcccaccaccacctccgggtctgccggggctccgttccaagattgggtgaagtgtaggtgacgggggaggaaaacaagcccagagagggagaaacaggcgccccgaagggcagggcttggttggaactcgaccgccccgttccctcctggagtacgtcccaccaaggaagctttgctcctgactccggctgcaggttacctctcgactccctggtgtagtcgtggcagggtgcgtcaagtgcctcaccgcgcaggcgcgcaaataattctcgcccaccttctttcttaactcttctattggctgttcccaccgtgaactggcaagcccgtgatccaatcccaggcaccgcaagtcgctccgcctgtccctcacccggatgttgccttctgccgaatccgctcaggccagagctcgtcagtggccaattgggagaggggaggggcgagccggcgccgccgaagagccaatggcaggcgcgggggatgacgccacggacatggtggccgagaccggcggggtgggggacgtgtcgcgcggccgggtggcctcggtcggtaccctgggcgcggagcagctgcctcattagtattcgtacccacgaggcggcgcagcgggccctcggggacagcgagcgtcgcggccatggcttatcactcgggctacggagcccacggtgcg

SEQ ID NO: 7615 - DNA, 2300 bp, Homo sapien
ctcccgggggcctgcgtatgggaagatttggggtctcgaaccacacgctcctagcgagcgcgtggccgcacgcacacatacacgcatactgcaaaactggggcccagaggatccgaagtctgagagattgggtggtataggtggggcaggatcctgccccgggcctgtcccatagactctcccgtagtccagcagatttgggggcagaggtgtgctgatttgcgtcctgaagctgcagcctaaactcctgagtcatcgccgggcctgtggtcttcttgaagtgaggcccctaagcctcacttgtagtcccgggggttcctttctctccacccaggttctgatcactcccaaccccgcggagacagtcttcaggggcctccctctcacagaccttcagccaccgctttctagagagcatgagcaggttctctgcgacctctctaattagctaccaggtatccagttacaccagatgaccttcctgctccccaaactcagcccacgtggtctgattgcagtgccattgcccagaggtcccctccacctgggatgcccttccccctcatatccacttgtccataagcctagttatctttaagagttagttcatctcgtgcctctcagagggacaaaggggacagagacctgacccggtcaggggtggaggtcataggttgggttctaggccccctctgggtgcacccaatttgccctgcatgtaagttccatgaggacaggccctgttgtcattctccacttccacccttgtcttcccagtgccaagcacaatacttgcatatggaagacacccaataaacatctgtgtccaagaaattcataataaatagataaaaccctggaccagtcctttcctgtgtccacatctcaattacctaatctttaagtgggtaaggatgtttaattgaatggtctttgagttgctctttgcctgaacacacgcacatacaaaaatgaattaacccaccagtattgcagctcattttctgcccatattgtctagtttgggagcaaagccagacccagacacagatgtgaagatctgaggccctggagggctaggaggtagcactggggccacgtgtacctgggagggggtcatctaatgcaagtcagttcccatgtcactgcagggcacaatggatacttgtaaactgaatccaaaacctttctatgtcttttcttttccttctttctttctttatttctttttctccctttctttctgtcttcttcttcttctccttctccttctcattcttcttctccttctaggcagggtctcactttatcacgcagctggagaacagtggtgcaaacacagctcactgcagcctcttactcccagactcaattgatcctcctgtcttagcctcccaagtagctgggaatacaggtgcacaccacaccatcatgcccagctcattttttaattttttgtataggcagggtttcgccatgtttccaaggctgctggaattcctggactccagtgatcctcccacctcggtctcccaaagtgctgggattacaggcatgagccactcagtccagcttttatccccatttttcagatgggaaaactgaggttgagagtggagcatgctggcccaaggtcacgcagcctagggtcccttgtgtcctggccccagcctgcctgtcctaagctgagcccagcacccctgcccagccagtgagactcgtcacgcttttctcagctgtaactaccctcttctccaagtgaggcttcagggatgggatctgggtgggcttaactctgggcctactccttagagatgggaccccgcgagcgcccacccaccttggagattctccttcctcgagggttttacagcccgggaagctcaggcgccagagggttagaccagctcaaggtcgcgagcgcgagcgcggccggaggagaacccaggggtccagccgcccagcgggggcttctcggggacgggcggagcgcccgcggtgccaggcgctgccggcggcgccgccggtgccgcgggggcggggtcagcggagggcggggcgcctggcacccgggccgccaacgccgccgccgccgctgccgccgcgctcgggctcgagctccgcgcactccctccgcggccgctgagccgagcggacgcccccgggggccgcgtcgcagccctccgtgctcccccctatcatgcccggtgcccaggctggggccgcccaagcagccaggacaccatgcccgaggacggcgctggcgacggcggggaggtgcccgcgctcatcccggacgg

SEQ ID NO: 7616 - DNA, 2300 bp, Homo sapien
gtttggaggcagatgacatagaccaggaggccatggcaaggactgtggcccttcctctaagcgagatggggggctcagagggttctgaatggagaagtgatcagatctgacttggattttgaaaggatccctctggcaggatggagagggcaagagagacaccacgggagaggctgttggggaaatctagattggcgttgctagccacctgggccgggggtgggtggcaaagaaggtgtccaggagtggtcagattctggatctcttttgaaagtgaagccaacaggatttgctgagagactggatgtgggctgtgggagaaagagaggagtcaagcatgacctcaaggtttggggcctgagccaacagaaggatgaactcctccatcttgacttttgtctcctgagaaggggagtcattctgtgtgcttcacatgtatagaccttgtaagaaggaacttccaggcatatggcaagaacttcctaagccctggttctcgaggggctggctgggtctgcagggccagcctaggcactgtaaggtggtttgcaaaaacgcaccctggtctccacccaccacatatgctcagaagacaggaacatttgcttcaggctccacagctgacaaagcacatttgcaaacactgagcgctgtgacgcaatatctcagccctgctgagctaaaaatcctggactcattgccctcatgttgcaactgagaaaaaaggagacccagagagggccagtgactcccctgcagtcacaaagtcgatccatctgtggcagagggggaagctgcatcagggcagtttactgaagggcggaacctctcccccacctccccacactgtttctaacttctgctaagagtgcagcgggtgtgcatgggttaatccgccagccagctccccagaggccatcctggatgatgggctcagtgcacatgcctccagaggcctccaggaagggcgggaagaggaccctggccaggccgaaacagcaggccccgggggcagggagggctccacacacgtgatgcctgtgtcacatatacacatatatgtcactgtgtgccccatgcccatacatggccttgcatgggtcccctcacagccttccacatcctgcgtgcagcccagcccccacccagccccctaaaccacgcaccctgccttcctgacgcaggagcccagagaggcatttcctgtttaggggctgcctcctccccctctaagcccaggttcccagggccccaggctgagctggggtgaggggagggcagcccctggccccctcactcccccaacacccccacacgctggcccagctggaaccagaaagcttgagtatagggggagaggctgacgcaggggctcagtaaataaatgagaggctgaggatgcctgtgcctgggtgaccaagctgtttccattcaggccgaatcggaggtcttcatatgtcaggccatgtagaatgccacaccatttttgtatgtgcacctagggtctcagcatgtcagaatgtgtgtacgtgtggcaagggagtcatctgcaagccagcataggtccacggtgaggtgaagggacaaacagcttggcagagagtgcactcttgcatggggttgggggtgggggaggcgcatgcgcgcgtctgtggggcaagaaaggagtgggcatgagggtgttcccgtgcatggcgagcagctgggctgagactgctcccgggtgtgatggggctgctgtgtccagatttgggtctctgagtctctgggaagcgacctcaccccacagccccgagccccaacttgagggtcacagagctcggcaggcaggcttttcccaccccctgactctcagccccatggggcctggggcagccgtcaactgcgccttctcccctcctccgcccccaaccttagagccccccaccccactgcttcctgctctagcggcccccggggaagagggagcagggagctggcagccgccccagcccactccttacaaggcctgagcccggccccaggcccgcccccggcccgcccgcaggaggccccaggccctccccctgtcaagagctgccgccagcccggggccggaccagtccgggggcatcgcgatgctgctgcgcctgttgctggcctgggcggccgcagggcccacactgggccaggacccctgggctgctgagccccgtgccgcctgcggccccagcagctgctacgctctcttcccacggcgccgcaccttcctggaggcctggcgggcctgccgcgagctggggggcgacctggccactcct

SEQ ID NO: 7617 - DNA, 2300 bp, Homo sapien
gctcaccaaggcttccccatcttcagcccagagtccctggatcgcagttggctcacaagtcctcttgctcaaggcggccctgggaaaagggatttctagtctgtgtcagccccttcccgttctggggcaggttttgatggggtgggagggtggcggggaggcgggagagccgctgagctggccagcagtcaggagcatgggagctctgcctgggtggggcctatgctcccggtcctgggggcacagcactgaggcaacagcccacaagccacagaggtggggggtggggcagggattgccaagctggaggtgggctctcaggggagcttttcttctcacccacccaggctagggcagctgtgtcccctcagaagagaaaatcggatggtaagaaccatggctgttgcatggccttccctgcccccttgccatcacctttcctcagctcagcttccaggaaggagcccagagaaaggctgtgactgtgtcagaatcagtggctcaagaaagttaggatggtctagatttgaggggcttgtgggagtttgaggagcaggaaccaggatggggctggggaagctctgggttgatggagctcccactcaggaggggtcagggagggctgtggagctgcccaggaggcctgttctgggccagcccaaagccactcagtaagtggctgcctccttcctttcagcttcctaactggtgacagttttcttcttcccacatatgcacaggaccttgaccctgctgttcacagccagggggaccctcagagcagctggcactgcacccaggattctcgtcttcctcctgcagacaggcggacccacaggcccctcagggtctgcccagccaggctcctgtggtgctgctgggccctcccactccatctggcactggcctggactcctcctctgccctcctcgaggcctgcacagctgtggccgtggagctgacctgaccaggcaaggctgctgtctccatccctgagccgcctgccacctcccactcctgaagatccatctcttggggctcccctgacagagaagacagccgaagtcaaagccacatcctcttgctgatgttggatgcaggctgtccggcctcagggccagggagccagtttccactgtgcgggaactctgagtcagacgtgattatctgggggtctgtccaccctggctggatctggaggcaagatgccaggccccccaggtgttctcagggcagttcttggtgtctgcttctcagattccaaggactggaattaaaacctttcctgggactctggcgtgccctgtgtgtgtgtgtgatttaccttgcaagagaatcagggctcccgtggggagcacctgaaccaggccgacttctagggtgcctgcagattgccactcctcacactacccagcagaggctagagcactgtgcgtggggccaggctggggagggggaggtgggcgctgggctgcctggcgctgggcagagtcaacatatggcaccgggagagtgcctcggcggggagggtggatgcgtgtgcttggagcctgggtcatgtctgcacctgtcccagttgcctggcagattggcaaggcaggctggcagagcctgcgtgcgtgggaggcagccggcagcaccgccatgtgctgacgacctcacagccagactccccctggttagcactgagtgtcagaaccacccccagaacctcagttaagcaaataggttggtttccatggagacatggcatattttctccatggcaacctaaaatcctaaaacccaggttcaggaatgagtcatctatggacagtagagggtgctctcccacaaggctgacctgaggccaggggcagatgagcaactgaccacagagccaaaggtgcccccagagcatggctggggcctgtggggactgaggccgcttaaccacttcccgcccacgtgtgcaatgtgagtagctggtgaggctgcaggaggccgtgtgtggaggtggcatcccccagctggggccctcagagcagggctagcatggaggggacccctgacccccaaagcagggtccagaacagaggaggcgggcactggccaggcagggtggacacacaagagttaactggcgggtgtgacaggcggaccgccctcaggaagtgttactcactggggatgtgcgtgccttgccttgggactggattctcttcctgaagcgaaggagctcccagccatggaaagccctggagagtcaggcgcgggctctcctggagcccccagcccgtccagcttcactactgggcacc

SEQ ID NO: 7618 - DNA, 2300 bp, Homo sapien
gctgtccgtgtcggtgttcgcggccaccaaggaggaggcgcagctggccacggtgctggcctacgcgctgagcagccactgccccgacatgcgcgccagggtcgccatgcacctcgtgtgcccctcgcgttacgaggcagccgtgcccgacccccgggagccgggggagtttgccctgctgcggtcctgccaggaggtctttgacaagctagccagggtggcccagcccgggattaattatgcgctgggcaccaatgtctcctaccccaataacctgctgaggaatctggctcgtgagggggccaactatgccctggtgatcgatgtggacatggtgcccagcgaggggctgtggagaggcctgcgggaaatgctggatcagagcaaccagtggggaggcaccgcgctggtggtgcctgccttcgaaatccgaagagcccgccgcatgcccatgaacaaaaacgagctggtgcagctctaccaggttggcgaggtgcggcccttctattatgggttgtgcaccccctgccaggcacccaccaactattcccgctgggtcaacctgccggaagagagcttgctgcggcccgcctacgtggtaccttggcaggacccctgggagccattctacgtggcaggaggcaaggtgcccaccttcgacgagcgctttcggcagtacggcttcaaccgaatcagccaggtgctcataagggagagggcaggggtaatggggcaggaggggtggtgggatcagggagttatgaggagtggccctggatggaaaggaggcaatgaagcaggagggatcatagttcaggaggtgggtggatggtgtggaagatccaggatacttccagaggggtgaggacgctggactgtggctttagggaagtcagtctcaggcctgtcaatgtcatcaaactttgctaacctgtctttcctcctgcaggcctgcgagctgcatgtggcggggtttgattttgaggtcctgaacgaaggtttcttggttcataagggcttcaaagaagcgttgaagttccatccccaaaaggaggctgaaaatcagcacaataagatcctatatcgccagttcaaacaggagttgaaggccaagtaccccaactctccccgacgctgctgagcccttccctcccctaatctgagaagtcagcctcttggctcctcaggccaccatttaggcctgactggggtaagaaatgtcgctccactttacagaggtagctgtggtgttgaaacactggacttggatatggggtgctgggatcgattcctagctttaccactaactagctgtgtggccttgagtaaatcccgttacctctctgagcctcggttaccctgtctgtaaaaagggaggtgagaatacctacctcacggaactgttgggaggctcagatgagatgctatatgtgaaaacattctgtaagcttcgtacaaatgtgaagtattaatattatcgcagtattattgttgttattattattgttattattaacaatcttgggtgggtagtaggagagcaaaaagtatgaatgggatggagctaagaagtctgaatacttaatgaaatggactttttggaaagaaatcagatgaaggcataaaatttagttcttagctcttgaacagaagcctaaaattcctggttctctcagggcttcgccttcaagggttctggaggagggaagggtctgcaggttccatgggtgacagcctgagatctgtcccttcaacgggctgggctgggtatgtgcctaccgatgacaatgtgtaaataaatgcgtgttcacacccacagctggctccgttactctcctgagctgggggtggggggatcggggccggcttctccccttgcacgccgtggggagatggccgcggacgaagggcaccgtctgcaaagcactgaaccatcagggccttccctgcaggccgaaggcctgcgcgaatgtcggccagttactatggagaccggcccgcggtatcccagcatgcctcgggaccaaactgtccaactgtgagcatccccgacggtcgcctcctgatgacgcacacggaagcaccgataggctctgcctcccgaagaaaagggagccgcgcagcgcctacgggagtccggcggcagcagccggtaccggcaaccacgggcagctctcagggaatctccgtcgtgaggccagaggctccagtccccgcggtgcgtatcgtcatgcatggcttttggttcgccctctccggttagtcgagcagggccggcacaacctcctcctccgaggccg

SEQ ID NO: 7619 - DNA, 2300 bp, Homo sapien
tggtgcactcctgtaatcccagctactcaggaggctgaggcaggagaatcacttgaacctaggaggcaaggttgcagtgagccaagatcgcgtcattgcactccagcctgagcaagaagaacaaaattctgtctcaaataataataataataataaataaaaaataaaacactgaggaggtcaaagaaaatccacatggcagcatgtctgacttctgagcctccagtctataaggcctgtgctgaaaggatctgcacttacttttctcctctttacagccaaggtcaccagtggaaactctcaaggacaatacctgtgtctcctccaaggcccatccctcgtgcctaacacagttcctggcagagaccaggtactcagtgtgtgtttttgctctgggctgcaaaataaaggttttctgatcactcttcaactcaacaaccttggcaccctactgcctgtggaatagtgggacaaacactttatccttatttgaagccctgcccagtctgtcctgacatcccaagattcagagcactctgccctataggggcctccctggctcagcctaaaaagttgagtaatatacggtaattgatttagcagtggcagtgtctgcccttcccacggcctctcctgttctaaagagtccacagatgaattaatccacaaatacttattaagagtatagtggcctgatattggaatgttcaaagccttctgcttaagagtttgtgtgcggccgggcgcggtggctcacacctgtaatcccagcactttgggaggccgaggtgggcggatcaggaggtcaggagatccgagaccatcctggctaacacggtgaaactccgtctctgctaaaaatacaaaaaattagccgggcgtgctgcatgcgctagtagtcccagctactcggggctgaggcaggagaatcgcttgaacctggaaggcagaggttgcagtgagccgagatcgcgccactgcgctccagcctgggcgacagagcgagaatccgcctcaaaaaaaaaaaaaaaaaaaaaaaaagagattgtgtgtgttggggagcagggcatgtggacacaaggtctccgccctaggagaagtgctggagagtaggacaagtaccactacttcggacggggagggcgatgcctccaatggggggcttccctgattcctgcagatcatacgttggcccccaacttcacactggccagaatcccggttctagtcttttccgtgccaccaacccctgggccctctttctagaaggaaagaaaacacctttggcctctgcccagagctacagacacctgaagtaggagcaggcaggagatgcgtggtggataaagaccagagagacttgggatcgaattccactctcacccccagttcagttttcttcagcttgctgctccacaggcaggatgtgaaaatttagatgcctcacccctcgcacctccagcttgctgctccaaataggcaggatgtgaaaatgtagatgcttcccccccaacctctataaaacagggccgacgaggatgggattcgaacccacgcgtgcaaagcacaatggattagcagtccatcgccttaaccactcggccacctcgtcctacgtgacaggtttgtccacattcacttatctctcatctactccgcaccttccaagcactaccacgtaagtcgcaacgcagacctcttcggacacagggaaagaagaagccgcggaaggaagggagcgttttgatttcctttctgctgagcccgcgccatcctttaccacgctgcagccgagctctgccgcggtttccctccgagtccggccgagcgcgccgcgcgttcagggcgcgcccggtccagggtgcgcgcgccggcggggagggagaggagtgcgtcccgggaagccggcggggcccgggcgggcgggcgtctgcacggcgcgcggccgagcggcggggccgtggctcctcctccctcgtagggggcgagccggcgcgccgggggctgggggcggtggcgggcggcgggcggcgggcggcgggcggcgggcggggcggcgctcggggctcggctggcctcggctcgcctcggctgcgctcggcaggctgcggtaaatccgggcttgcggccgctggcgtagtctgtggccgggtggtcgttgctgcgcgccccgagccccgagagccatgcagatgtcctacgccatccggtgcgccttctaccagctgctgctggccgcgctcatgctggtggcgatgctgcagctgctctacctgtcgctgctgtccggactgcacggg

SEQ ID NO: 7620 - DNA, 2300 bp, Homo sapien
aagacggacagggtgactgtgaagaccaacacaaggcacagcgctgtcagccagatctgggagccagaggcaggggtgtgagcaggcagggcagtcccagggccccaccctcttgcccaagccccatgtgggagcaggacacttggggcctggcccagctgtgtccctgacccactgtgaccctatgaccttggagtcaatgtgagccccattcttccccaaagatggtggttgggggctgtatccaagccaaaccttctggaagacagtgaagactgaaggttttcctggcttctggggctcatctggctctgattccggctccttctccaggtcaagatccagggtcagagctactttctggggactactgggaatcccgttctcatctggggtgaggggggacggggaagggtcatgcttgtgacccaggtttcccgacagccaggcccaacgaagggagattcccagcagttaaaacaagtgatcctcagctcagcatggtggctcacgcctgtaatcccaacattttggaaggccgaggcgggcatattgcttgagcccaggagttcgagaccagcctgggcaacatggtgaatccccatttctacaaaaataaaaaaattagccgggcatggcagcctgcacctatagtcccagctactcgggagactgaggtggctcacttgagcccaggaggtcgaggctgcagttgagttgtgatagcactgcagtgcagcctaggtgacagagtgagatcctgactcaaaataacaacaaccccctcaccccaaaacaaaaaaaggtgatcttcctccagcctaagctgaggctgcaggcgaagggaattcatgatggaaatatgcatagctaccaggaagcgcgtgcatgggtcgggtgatgagcgaagcaccttagatggattatctcattaccattgctttacaaatgacacattgaggttcagaggggtgcagtggctaagtggtttgtctcaggccacacagctgggatgttgtgaaactagtattccaattcagaggtcttcggatccaaagtttgcatgcatggaacctctgtcgcctccccattttatagaggtggaaactgaggcccaaacaacagcagggatgactttaatcctaccaacttcccttcatgatcttcctgtttgcacaaggctactaggggtgggctctggctgggaacagatggaacagcttcccaggggaggtggctctagcttcctctgcatctcccacctccccaggagggtctcagggcttaccagactggaggagctcagctttggtctccagctcctgagcttgggcctgggatgatttattggccaggtagtagcgggcaaacttctgcagaaggacaggaaagtgttgggcctgcctggcttgcctgaggtgtctggatccctccccataccattggcctggaggctggggcccctcagtgtcttctctgggggtcagggctgagaccaggtctcctccacctcccctggcctctctcagggcctcaggctcaggactctatccaagatgctttgaggtggggcctcgagcccaacagcaggctcaccaggtgaggcaggctcaggtaacacacgatggacatgaggatgcccacacagggcgtgataaagtaccccagggcagaggtctcggcgtccacgccacctgcggaggaacttcagctgcagaagagaggcacctggtcccgccggctcccacggggcttccaactcttgtcccacttcccattgtgtacttctcagacccactcccagcctcttccgctcctcccttcactgacaaatgggaatcttgtacagggccccagagcagccctgcacttctctcactttccccatgtgtcatttttgttgagcacgtactatgtgccagtagccttctctcattgcatgctcattacaatctgagcagggagctataccaatcacgtcggtggggaagctagcacagagaggtgacaagccttgtccaacacccctagctggtaagcggtgaagcagattcaaacccaagactatctgaatcccaaacccatccccttatccttcaacttcaacctgctgccacatgccagtattagccccaggaatcctgcccctgtccctgagttaacccagtcctcacttggttattactcctcactgcagggcccatgagccccactccctagccccagacccaatccccatttccatatcacctgcttacctccatcttcacccagaacccatgtgtcttgctctcacatgc

SEQ ID NO: 7621 - DNA, 2300 bp, Homo sapien
taaataatttcccttatgattcatctgcagtaaaatcaggatattatctcgacatcaaatgttattgtgtataggtaggttttgttttatatgagtttcattgcaggatagtaacaaaatatttattacaaggacgatggaatcggctccagctgaccgtctgtgctttgaaatgaaatctgaactccttaatcagccctcagacttgccataaccagcctggctgttgtagaggctctgtcccctcctcccaccaatgccagccaaagggatctatttgtatgtcccagaatgtgtcagcactctcttgtcccttgtcttgggacaggctgttctctccctgaaatgccctcatcctctcccttcactgtctcaacaaattcagtgctccctagcctccattctcaagtccttccttcacaacctgtgccatagctgtgctgcaccagcggcctcgcttttctttaaataactcattttccataaataaattgatttttcaaagaaaagttgatatcataatcataaataggaaaccagtatgagtagccctgaaaataaagttgctataaaaataaatataagaaaaatacaagttaataacttttgataaaattgtcagcagaccctctgaggctaactgaggggaagggatgggaaggcagattaagaagtgttagcaacctgttaacacccttgacatattcagaggcttgaaagaaaatgggaagaataactttctctttcggtgtaatttaatgctgtctctgttctccctaaaatcacctgcattttactgcaaccacccatttatcactcaacggcgctagatgctgccagtaaaccaatggaccagataagcacagcctctgcccctacagactctcagtcggctggaggaaaaacataagcaacctgggaatggctataaaatgtcattgcttaagaaaatagtttgtggccgggcgtggtggctcacgcctgtaatagcaacattttgggaggccgatgcgggcggatcacctgaggtcaagagttcgagaccagcctggtcaaaagatgagttcgagactagactggccacctcttcagtagagctggtgaagccccgtttctactaaaaatacaaaaattaaccggacgtggtggcatgcgcctgtagtcccagctactcctgaggctgaggcaccagaatcgcttgaacctgcctgggagggggaggttgcagtgagccaagatcacgccactgcacttccgcctgggcgacagagcgacactcagtctcaaaaaaactagtttgtgttttggagcctctcacttctccagcgtccccgatacgcccggggattgcagagaacccacacctattcgtagattatgagagtaggagcaaattaatgatttatagtcttttcaaatttttttttttaacagaaaaagagtagggagttgaaagtaatgctgtttttttccaggcactcccggggacccagcgcggcgaagcccgccaggatcgcgggcgacctgtggcagctctggttcccccgcccgggcccggctcgggttacgctctgggcggggactccgcagcggctccctagttagggggcgccccggtgggttccagctttaggggtcgcaggagcggctctggcatcacctcggagctgacgaagcgggaagagccccgcaccagtgctgcccctacagagctctcggcggggggtggaggtgaggttacacctcgtccctacccccgccttcccctccgccgcagggatccgggacccgcccccgcggagaggacggggggctgcggggaggggctgtgcggggagcgggcgggttccgcaggcccctaggtggggcggggcccgagccagagtcgagtccctgaggcgggtgggggaaggagagacgggtggcgcgaccctctgtccccgcctcggggcggagcccaggtcccagcctgcggagcgcgagacacgccgaaatccgcccgaggctacctgtgcgactccagccgccctgcaccggaatctggggagacccgccccccgccccaccggtctgcggccctccgccccagcgcaggtgcaggtgcggcttctctgcccctttcaccccaggcgcatccgccgcggcggccatggcgcgaggagacgccccgcgggacaggtgagtgggcccgggtgcgttgcaagtggccgggggcgttgcagacccgctccctgaaggcgctccgaggctcagagaagaccggatcgaactacaattcccatcagccgactccctcggcc

SEQ ID NO: 7622 - DNA, 2300 bp, Homo sapien
ttttttttttaaagaaaagaggctgggtttagtggcttatgcctgtaattacagcactttaggaggctgagacgggcagatcacctgaggtcaggagctcgagaccagcctggccaacatggcgaaatcctgtctctactaaaaatacaaaaattagccaggcatcatggcacacgcctgtaatcccagctactcaggaggctgaggcaggagaatcgtgtgagcccaggaggcagaggttgtagtgagccaagatcctgccactgcactctggcctgggcaacagagagagactccgtctgaaaaaaaaaaaaaaaagaaaaaaaaagagaaaaagaaaagaaaaaaaaaggtaagaaaagaaaagaaaatcctggcaaactagtgggtctctgagtggccagtttcactgcatgcctgtatcgcatgtgagtttgtagccgtggattcactgcagttttagaaagaagggcaagcatttgacagcttcatgtaccatgaatattaacacattcacacacaccatgttattactaaataatttcccttatgattcatctgcagtaaaatcaggatattatctcgacatcaaatgttattgtgtataggtaggttttgttttatatgagtttcattgcaggatagtaacaaaatatttattacaaggacgatggaatcggctccagctgaccgtctgtgctttgaaatgaaatctgaactccttaatcagccctcagacttgccataaccagcctggctgttgtagaggctctgtcccctcctcccaccaatgccagccaaagggatctatttgtatgtcccagaatgtgtcagcactctcttgtcccttgtcttgggacaggctgttctctccctgaaatgccctcatcctctcccttcactgtctcaacaaattcagtgctccctagcctccattctcaagtccttccttcacaacctgtgccatagctgtgctgcaccagcggcctcgcttttctttaaataactcattttccataaataaattgatttttcaaagaaaagttgatatcataatcataaataggaaaccagtatgagtagccctgaaaataaagttgctataaaaataaatataagaaaaatacaagttaataacttttgataaaattgtcagcagaccctctgaggctaactgaggggaagggatgggaaggcagattaagaagtgttagcaacctgttaacacccttgacatattcagaggcttgaaagaaaatgggaagaataactttctctttcggtgtaatttaatgctgtctctgttctccctaaaatcacctgcattttactgcaaccacccatttatcactcaacggcgctagatgctgccagtaaaccaatggaccagataagcacagcctctgcccctacagactctcagtcggctggaggaaaaacataagcaacctgggaatggctataaaatgtcattgcttaagaaaatagtttgtggccgggcgtggtggctcacgcctgtaatagcaacattttgggaggccgatgcgggcggatcacctgaggtcaagagttcgagaccagcctggtcaaaagatgagttcgagactagactggccacctcttcagtagagctggtgaagccccgtttctactaaaaatacaaaaattaaccggacgtggtggcatgcgcctgtagtcccagctactcctgaggctgaggcaccagaatcgcttgaacctgcctgggagggggaggttgcagtgagccaagatcacgccactgcacttccgcctgggcgacagagcgacactcagtctcaaaaaaactagtttgtgttttggagcctctcacttctccagcgtccccgatacgcccggggattgcagagaacccacacctattcgtagattatgagagtaggagcaaattaatgatttatagtcttttcaaatttttttttttaacagaaaaagagtagggagttgaaagtaatgctgtttttttccaggcactcccggggacccagcgcggcgaagcccgccaggatcgcgggcgacctgtggcagctctggttcccccgcccgggcccggctcgggttacgctctgggcggggactccgcagcggctccctagttagggggcgccccggtgggttccagctttaggggtcgcaggagcggctctggcatcacctcggagctgacgaagcgggaagagccccgcaccagtgctgcccctacagagctctcggcggggggtggaggtgaggttacacctcgtccctacccccgccttccc

SEQ ID NO: 7623 - DNA, 2300 bp, Homo sapien
tcactgcagattcgctcagattgctggaggccatgacacccagccagtagactcctcttattgtggagggggacactcagaatgcctcacaggcagctttagcatcagtgaatgaagaacacaggaacaacccccctggaatttcatacggaaggggatccaaagatcaagggattgttcaaatggaagattgagagaggggtgggtaggtacattagaggtcagattgagaagaaagaagcaacacagacccatgtccaggaggaatcatctctctgtcatccaggtcaatggggttagagacagtggcagacagataagcggacatcgttccctccacctcagctgtgacactgaccacaggatggccccaacctctgccaaaatgcataagacaccagaatagggtctccacaccttgtacacctcttctaagacatacttctcctcagccgcctctcctcccactctacctctcttactaccacccctttccatgaggagcggagagttccctggccccaaattgtcctttttgatgtcaaagttcatctccatgcttcctgtgtgactgggacttcccagtcccaccctccaatttttaagtggcctcatttccagccacttaagtgattccatgcgcacacagctactccatcaaacgagatttcagataagaacattccctagcccacttgcttcttgcattattgaatcccaggataagaacggcacatcctcgcccctgtagagagcaatcatctgtggtgaaaagagaaaaaaagcgggtgtgtgggggggtggggatagggcaaaggtgacaggatatgaaaaggatagaaaaggatatgaaaggacagaaaaagaaacgaaggtggaaagtggagagctgaaggtggagaggcagagccaggagccttagaggcgcaaatgtggagaggggtggagggaacctggcaaaaatacagggtccctggtaggtgcaggggtcatggagggtccggcgctgccccttcgcttctcagctgctcccccatcttgcccgcctaggcagggcggggagccctccggagcggtgcggaggcagccaggccccgcccgccgcagccgcggcagccgccggaggattcctgtcctaatatggagctgggattcccccggccccgcccccgcccccggcccgcggggagacagaggctggcagcagggcggggggaagcgctcgcttgggggccggcaacggggggaagggatgcctaagtgcagacccaggtcctcgccgtgcccccacgtccctgcctcagtttccccttcagtaaggttaattagctgagagggaaaccacgaatcactgcagactacagcgctgatgttggtttctattcttggctgtgggaaaacaggatcaacgccaaattcagctggtccctttcccaccggactccctttccacccatcctcgggacttagacccccatgaacaccccctgataagccgccaaggcccgatttgggaagcgggggcgggaatttgttctctaaaaatggccaagggaatcccaggttaaatagtccccagagaggaaccccagcagtgacctgtcccacggaggccaaggaaagtcctccttccctgcatgtgaacgtgaccttgtctgtcaagtaacgagggggatttgtagacaaccctgttcttccccattccctcaactcctcagaaaaattagtgtcagtgccggcccctctctgccctctgcggactcctgccgcgggcttcaggccgccctaaacctggccctgtcgcttccctcaactgaacgcattcagacgccagggtccccacactccattcaagctttcctaacgcagcgccttcctctccgctcagctcccgccaggcttggccccctccgcagcctcctgctcccccctcgcccgcctccctccctctctcattctacgtcatgagatgacgtcggaagccgggcgggaggaggagcccccctccccagtcagcggctcccgctgcagcttgcttagcccagcctcccgctctcccgcccccccggctctaaaacgagccccccacgcctggcaggagctatataaggcggcgtgaggcaggcgaggggggcagcgcagccgagcggagcccaggagagcagagagcgagcctgagcgagagacggggaagcacggaggaggaagccgccggtgcgtcgggacgggagcgcaggtgctcgggcacccgagctggagctccgcagccgccggtcatgtaccgctccaccaagggcgcc

SEQ ID NO: 7624 - DNA, 2300 bp, Homo sapien
actcctgccgcgggcttcaggccgccctaaacctggccctgtcgcttccctcaactgaacgcattcagacgccagggtccccacactccattcaagctttcctaacgcagcgccttcctctccgctcagctcccgccaggcttggccccctccgcagcctcctgctcccccctcgcccgcctccctccctctctcattctacgtcatgagatgacgtcggaagccgggcgggaggaggagcccccctccccagtcagcggctcccgctgcagcttgcttagcccagcctcccgctctcccgcccccccggctctaaaacgagccccccacgcctggcaggagctatataaggcggcgtgaggcaggcgaggggggcagcgcagccgagcggagcccaggagagcagagagcgagcctgagcgagagacggggaagcacggaggaggaagccgccggtgcgtcgggacgggagcgcaggtgctcgggcacccgagctggagctccgcagccgccggtcatgtaccgctccaccaagggcgcctccaaggcgcgccgggaccagatcaacgccgagatccggaacctcaaggagctgctgccgctggccgaagcggacaaggtccggctgtcctacctgcacatcatgagcctcgcctgcatctacactcgcaagggcgtcttcttcgctggtggtgagcatgctggggctaccgcagatccgagctgccaggcgccggagaccctggagctgagggaacccgctggggctgtcgcatgtctagggcagcgtgctggcgagctggggagattcgggactcgggagattcgggactttctacttttcctcctgagctccctccagacctcaccttagttctgaatgagagttagagagcctggacggtgtccctaacaccagattatgagaggataagagccaggacagagcggcctcggtgcccgccagtgcagaagcgctccgggagccggggagggaagcccgggaagttgcagggatggagctgcctgagcctaggggaacatagctactgtccgcggtgctgaaagggatctcctgtcgccttcggggcgctgcccatggtgctgacggctgcgccggccgtgtatggctctgtccatggttctgaacccacagtcggcttcggagctctgtccgcggttctgaaattcagagccgctttggagctctgtccgcggttctgaaattaagagccgagaggagccgaccccgctttagaagtcgagggcttgtgggctatggagatacagcaacaggttccctggccaagagctgcgggcagcgggtcaacaggtgtttgcagaggcaggtccatgagaaattcctctggattctctgaaactcagaccatgccttcctcacttcttctctgcctcccagtcttactcctgacgcactacgtcttctcgccctacaggcactcctctggcgggccccacggggcttctctcagctcaagagcttgaggacatcgtagcggcactacccggctttctgcttgtgttcacagccgaggggaaattgctctacctgtctgagagtgtgagcgagcatctgggccactccatggtgagtgctaagggtcctttcagctgaggctgggcatggagtgggtgccgtgagccttccactcctgaggaactgggaattactatggagggagaggttataccctacaagatactgtagatcaaagattggctcctgctgttctccctaatggtcatctcttcttttcctccctccaggtggacctggttgcccagggtgacagcatctacgacatcattgacccagctgaccacctcactgtgcgccagcaactcaccctgccctctgccctggacactggtaaggactcccttctcccttcctcggtccaatttcccacctgctgcccttctccccaccatccactgtctctctctcagccactcaccctcttatctgtttttctcttcatctatctagatcgcctcttccgctgccgcttcaacacctccaagtccctcaggcgccagagtgcaggcaacaaactcgtgcttattcgaggccgattccatgctcacccacctggagcctactgggcaggaaatcccgtgttcacagctttctgtgcccctctggagccgagaccccgcccaggtcctggccctggccctggccctgcctcgctcttcctggccatgttccagagccgccatgctaaagacctggctctactggacatctccgagaggtaagcctggagtgttcagat

SEQ ID NO: 7625 - DNA, 2300 bp, Homo sapien
aaataaaaaataaacataatttaaaattcaccaggcatagtggcatgcacctgtattcccagctacttgggaagctgaggctggaggatcccttgagcccaggagtttgaagctgcagtgagctattactgcaccactgcctgggttacagagtaagaccctgtctctaaaacatttaaaaataaaaaagccaggcgcgatggatcacgcctgtaatcccagcactttgggaggccgaggcaggcagatcacaaggtcaggagtttgagaccagcctagccaacatggcaaaacctgtctctactaaaaatacgaaaattagccaggcgtggtggtgggtacctgtaatcctggctacttgggaggctgaggcaggagaattgtttgaacctgggaggtggaggctgcagtaagctgagatcgtgccactgccactgcattccagcctgggtgacgagagcaagactctgtctcaaaaaaaaaaaattaattaattaaaaaaaaattttttttttaaatgaagtcttggccaggcacggtggctcacacctgtaatcccagcactttgggaggccaaggcgggtggatcacctgaggtcaggagttcgagaccagcctggccaacatggtgaaaccctgtctgtactaaaaatacaaaaaaatcagccaggtgtggtggcaagcgcctgtaacaccagctacttgggaggccgatgcaggagaatcacttgaacttgagaggcagaggttgcagtgagccaagattgtgccactgcactccagcctgggagacagagtgagactccatctcaaaaaaaaaaaaaaaactaagccactaagccatcatttaaaattgttttagataatttttaggccaggtgcagtggctcacgcttgtaatcccagcactttgggaggccgaggcgggcagatcatgaggtcaggaaatcaagaccatcctggctaacatggtgaaaccccgtctctactaaaaatgcaaaaaaaattagccggtgtggtggcaggcgcctgtagtcccagctacttgggaggctgaggcaggagaatggcatgaacctgggaggcagagcttgcagtgagctgagatggcgccactgcactccagcctgggtgacagagcgagactccgtctcaaaaaaaaaaaaagaaagacaatttttaaatgttctaaatagttgctaacttgaaagtatacagcgttgtacagctatatagagtatgaccccagtttgttttttcaaaaagcattatacataaatacacacacaaagaaaaaaaggagcagaaaagatatacaccaaatattggcagaagtctcatctgggtggtgggataacatgaggtttttattttcttttaggtgtttatctatgctttccatattttctcagtgtaaaatgaagtgtctagcacataacagatggtcagtaaatgcgaatctcctttctcccccaactcctgctctcttctctgaaaggacaatgaggaaatagaaggccaagggcttcccgaggacttctccatcaggcaggaacctactgaagctttgctctttctgtggtctgtagctgtcagccctacaatagttcatgttcagccaacatctgacccagagccagggtcaggagcttagtagaagggcctgaagtagcccctgggatctgggtactccatgtagtaaccctgcctggggctgaactgagatctccacagggacttgtttctgcagaggtggcaagttgttcagagataaaagagatttttgatggaagaagtaagcaatacacctcagccctagcaaccatagttcccaccctggggaggggaagaacacaggatttcaaatgagaaggcctgggttctattcctacctctggcaccaattcagaacctgggcaataaaacaaaattataacttaaaaaagaaaaaaaaggacctgggcaagttactttgcttggctgaacctcagtttgcacatctgagaagcagtatgaagaccccaatttcctaatgtctgcccatattggctaccaccagtactggttcccttccctgaggtcccaagatagaagatgacagtgggtaagaaaggatgtttattcaggcctgatgcctcgatacagctagatgtacaaaaatatatcattcaaagtcatgaaaaccatcatcatattggtgtgacctccttcctccccttgggcacagcttttgcaactacctcctttgaaatctgggagttggtggggcaagggtcacttcttggcagcttcttcttggg

SEQ ID NO: 7626 - DNA, 2300 bp, Homo sapien
ctgccttcccgcggggcagggctcgggacctgcagcccgccatgcctgagcctcccgcccccgatgggctcctgtgcggcccgagcctccccgacgagcaccaccccctgctccacggcacccagtcccatcgaccacccaagggctgaggagtgcgggcgcacggcgcaggactggcaggcagctccacctgtagcccgggtgcgggatccgctgggtgaagccagctgggctcctgagtctggtggggacgtggagaacctttatgtctaggattgtatgggattgtaaatgcaccaatcgacactctgtatctagctactctggtggggacttggagaatctttatgtccagctaggggttgtaaattcaccaatcggcactctgtatctagctcaaggtttgtaaacacaccaattagcaccctgtgtctagctcagggtttgtgaatgcaccaatggacactgtatctagctactctggtggggacttggagaacctttgtgtggacactctgtatctagctaatctagtagggacatggagaacctttgtgtctagctcagcgattgtaaacgcaccaatcagcaccctgtcaaaacagaccactcggctctctgtaaaagggaccaatcagcaggatgtggggcgggggccagataagagaataaaagcaggctgccccagccagcagtggcaacccgctcgggtccccttccacactgtgggagctttgttcttttgctctttgcagtaaatcttgctactgctcactctttgggtccacactgcctttgtgagctgtaacactcaccgcaaaggtctgcaggttcactcctgaagccagcaagaccacgaacccactgggaggaacaactccagacgcgccgccttaagagctgtaacactcaccgcgaaggtccgcagcttcactcctgagccatcgagaccatgaaccccaccagaaggaagaaattcagaacacatccaaacatcagaaggaacaaactccagacacgcagcctttaagaaatgtaacactcaccgtgagtgtccacggcttcattcttgaagtcagggagaccaagaacccaccaattccggacacactagggaagtttaattacttttcaattcctcagataaggagtttttgtctctggtcaccaggtgatttttgctctcctcatgattcaaaggtcaccaggtgatttttgctctcctcatgatacaataagatgctggcttatttggtcacagatgatatatcgaatgttctgggtctgttaagcctcacaacaactcaggttttatcttaatcgtacggttaataatagcacatgctgactaggtgccgggcattgttttaagcactttgctaacttagtcctcacagcaatcctaagaggtaggtgctacatattacaatacctgctgtagtggggaggagacaaagcataagaaacttgattaagttcacatgcagtggcgcaatcctggcttactgccgcctccaacttctggactcaactgatcttcccgcccagtagagatggggtcttgctgtgttgcccaggctggtctcaaactcctgggctcaagcgatcctcctgccttggcctcccaaagtgctgggattacaggcgtaagttaccgtgcccagctcagggtctacactcaaccgtactgcctttcaacagcatgtgaggaacagagagaggagagacttccattaccaatcaggagctccaggtgtatttcaaaccctaggattatcaccgtgtgcagcagatggcgccctggcgcatagcaattggccggacctgcacacggagtcaaaactaccatacccacaatgctatggggtatcaaggtcccaccctactggttagctgtccgaggtagtgcctgtgcgcgttcctgtgggaatgtgtgtacctaggccattcgggcccttcctttatctgcataaaacaagttaaaaagtgttttatcctcctctcatcctccttgtcttactagttggcgagcaatagggttgaaacaaggctgctgtttgttggcctcacctgccctagcctaacgtgaggacccttgacctctggcccaagatggtggcgcccagagcttcgctcttgctgctcccctgaggtgaactgaagccagcagccccgcatcatgtcaaagctcggccgggccgcccggggcctcaggaagcccgaggtcggcggtgtgatccgggcgatcgtgcgggcaggcctggccatgcccgggcccccactaggcccagtgctgggtc

SEQ ID NO: 7627 - DNA, 2300 bp, Homo sapien
cggcaatattcacaatagcaaagacttggaactaatccaaatgtccaacaatgatagactgggttaagaaaatgtggcacatatacaccatggaatactatgcagccataaaaaatgatgagttcatgtcctttgtaggggacatggatgaagctggaaaccatcattctcagcaaactatcgcaaggacaaaaaaccaaacaccacattttctcactcatagatgggaattgaacaatgagaacacatggacacaggaaggggaacatcacacaccgggaaccgttgtagggtgggaggaggggggagggatagcattaggagatatacctaatgctaaatgatgagttaatgggtgcagcacaccaacatggcacatgtatacatatgtaacaaacctgcacgttgtgcacatgtaccctaaaacttaaagtataataataataaaattttttaagaaagaaataaagtttctattttattcctttctttgaaccaacagggacaagatctagattgaagagagaaaagggagggttgacaaaggaatttcaaagcaatactgcaaaatcctattcaccacaagtatcattattattcccattttacacataaggaaactgaagcttagtgagattaagaagctggagttcttggagcagagcgctggatttagagccagaagccaaggttggaacttaggcatctgctactggtgtcctaactctcccttcctctcccttacttgggcaatcctggtgtcgggcccacctcagcctccctgaggcctgatggtctggctgtgccaccatgcagctccaatcccagtactgccccaggagaaatccctgcctcctcctccagtgagtcttggtgatccctctcagaccttcctccatgcagtccagtgtcaggtggaagcactggggctcctgtgaagcatcagctccacatctgcctggcttgtgacctggggcaagtttcttcttctgcctgagcctcagcttcctggtgtgtaaattggggattataacagggattcagtatatattcactgaggacctgctctggcaggcaatgcattaaaagctgggggtacacaagggagtgaggctgtcccagggtccccgtgcacacccagcacaatggacgcctctggtggcatcagtgagggcagctatcctgtgtcacagggtttgtgtgacctgcagccagcagcccagcggtctggtggtgtcctgcttggtggaagtctcgcagggagattctctgtgactaacgagtgtcttttcccctaaaggatgtgccgtcggctgctttcttgtttcatctagccgctgggccccagaacagttggcaaagcagttggtatctttggctatttttaggtggaggagttagcggggtggatatagtagggccccaggggagtctggtagatggggaacttcaggtgcaacaagtttgtgggggtgggagtggcagcggctccctctcaggaatgtttaggcaaactaaacatgcatccttcataatggaagtcaaaagccacctcctctgtgcagtcttccttgattttctcattaaacacccccaccgccccccacaagaccaaagacttgatctggaactataatccagcctttatagttccagaccaagagtactgagcaatagggaccttacctgatgcagacaaggtttctcttctgcacctctgaggctccatccctagtcagaacgacaaggtacgaagttaggagttgagactgaagccactcatacagctgagattctctcttggcccgtttctagcaaactacaacaagcaagtcacttttgtaaatctatttcctcatctgtaaaatgggcaactatcgtgcctgcctcccaggattaaagtaaagggtttaatttgctcaaagcacagcgcacagcgcctaacgtagactgatagatctctcgcaagccccaggcccagaaggggcggtgctcccccaaaactctctttcctttgcagcacagcggggggtgtgtgcatcctggcggaggggaggggactgaggggaggggaatggggggtgcccgagctgggctggaagacaggtctgcgactctggtcaactgcagctgctttccccggcctccaccgctgccgcacaccccctttgcctttagcattttcctcctctcctctaattgcgtggcgtccccagatggtaggcggggtgtcggagctgggggtgcgtagtcccgggcctaaggctagggaaggggcctccagcgccgtgtgagggccc

SEQ ID NO: 7628 - DNA, 2300 bp, Homo sapien
ttattattcccattttacacataaggaaactgaagcttagtgagattaagaagctggagttcttggagcagagcgctggatttagagccagaagccaaggttggaacttaggcatctgctactggtgtcctaactctcccttcctctcccttacttgggcaatcctggtgtcgggcccacctcagcctccctgaggcctgatggtctggctgtgccaccatgcagctccaatcccagtactgccccaggagaaatccctgcctcctcctccagtgagtcttggtgatccctctcagaccttcctccatgcagtccagtgtcaggtggaagcactggggctcctgtgaagcatcagctccacatctgcctggcttgtgacctggggcaagtttcttcttctgcctgagcctcagcttcctggtgtgtaaattggggattataacagggattcagtatatattcactgaggacctgctctggcaggcaatgcattaaaagctgggggtacacaagggagtgaggctgtcccagggtccccgtgcacacccagcacaatggacgcctctggtggcatcagtgagggcagctatcctgtgtcacagggtttgtgtgacctgcagccagcagcccagcggtctggtggtgtcctgcttggtggaagtctcgcagggagattctctgtgactaacgagtgtcttttcccctaaaggatgtgccgtcggctgctttcttgtttcatctagccgctgggccccagaacagttggcaaagcagttggtatctttggctatttttaggtggaggagttagcggggtggatatagtagggccccaggggagtctggtagatggggaacttcaggtgcaacaagtttgtgggggtgggagtggcagcggctccctctcaggaatgtttaggcaaactaaacatgcatccttcataatggaagtcaaaagccacctcctctgtgcagtcttccttgattttctcattaaacacccccaccgccccccacaagaccaaagacttgatctggaactataatccagcctttatagttccagaccaagagtactgagcaatagggaccttacctgatgcagacaaggtttctcttctgcacctctgaggctccatccctagtcagaacgacaaggtacgaagttaggagttgagactgaagccactcatacagctgagattctctcttggcccgtttctagcaaactacaacaagcaagtcacttttgtaaatctatttcctcatctgtaaaatgggcaactatcgtgcctgcctcccaggattaaagtaaagggtttaatttgctcaaagcacagcgcacagcgcctaacgtagactgatagatctctcgcaagccccaggcccagaaggggcggtgctcccccaaaactctctttcctttgcagcacagcggggggtgtgtgcatcctggcggaggggaggggactgaggggaggggaatggggggtgcccgagctgggctggaagacaggtctgcgactctggtcaactgcagctgctttccccggcctccaccgctgccgcacaccccctttgcctttagcattttcctcctctcctctaattgcgtggcgtccccagatggtaggcggggtgtcggagctgggggtgcgtagtcccgggcctaaggctagggaaggggcctccagcgccgtgtgagggccctgaccgacagtggggaggggcgcccatgtctctgggagaaccccggagtccccggaaatggaggcggagtttggggagtctgaaatgggggaggggtcgtgtagactacgggggagtcctgagccggctaggaggggcaagggagtccctcagacggagtggagagcggggcttccctggtcagagggcggtaccaggggaagggcgtggtctcctgcgaaggggcggagctccgcctacgaaggctgagcatcgccgcaagaggcggagtctggagcgaggcggagctctcctaggggcggggaaaatggggcggggcctccggacagggggcggagcgtggctgttcgcgctcatccccctcccccggccctgggtgtccccgtgacgaggcagcgcggagccgccgcgggccgggcccatcccgccgcagcggcccggggccgagcaggggctaggcggggagggagcggcgcccagcggggcccggagcgtggccaggtgaggccgccggggcggagggggcgggggctgcgccaggcgggccccggcgggcgcggggggcgtgtttgcgtgtctgggggtggtgga

SEQ ID NO: 7629 - DNA, 2300 bp, Homo sapien
cagcatctttgtgaagattgaaatgaaataatgtccatgaaagggcttggcacaggcctgcctcccagaacactcgatatgtgctaggcgctgttctatgtactttacagaaatcacctcattcatttcttccaacaaccctctgaggaagggattattatcatccccatttgcaaaacaggggaaacagaggcacagggaagttcagcaacttgcagaggcaggatttgaaccaagcagttttgctggagaaccagagttcttcaccccacaccacacacactaggtgctttaggaaaggcagctggtgttaacatttttctcatctgatcaggaagttgggtggttagagttgtcacagtactttgtgaaaaatgggaagataaaataataattatgaattgaggtgggtttggtcaattttgtctttcagctaggaaggtgaggagggacaaacagctgaaggccctatgtggggggaggaggggtcgggcccttgttctggctgcgttgggtgggtgtctggtgcttcaccccttctaggccagggatgctcaccccaggacgatgagttcaccatacttgatgggctcctcgcctggctgcgcatcttcaccgggagaggagagaacgcaagagcccttgttcccccggtgctggaggtctgaggttcggggggaccccacttcagggtttccttccagcaccattctgggcagagtgggagagaaaagagctttgtaggttcccaccccagcccggctcaattccagctgcagcctgctgcagggccgcctaggctaaggcaagggtgacctttcaccgcctctactgctatggcaaccacttcccctctgcctcctctaaactgcccgaggttgctgggataccagggaggggtggcacagtgaagagagtcaggatattcagtggtgccaaagagatggaccaacttggggtggccagaggctgctttttggccaagatcccagtctgggatgtgcttcaaagcggggcacccaatgagttgggggccgttacccctcatctcagactcagttcctgcttatagctcttagcctctggacctctgatttagcctctctgacaggttctttgaatctacctgtccatctgaatctttcttgcccctttgaggtctaggcctctgtctgtccatctgctttctcaatgactctctgtcctcccagccgctgtcctttttgccgtctctctccccccattccccatctctgcctgtctgcccgcctccgcctcaccatctgcctcagtctccccatctcggcctccccctgcgggtaggccaatagactcctcctgggtgcgcgctcttccctccctcaggtgtctgtctgcgtccccagccgcccgggtctcaggaggcctgcggaggcggcgctcccccctcgagctcgggctgcagcacagccgtctcccgcaggcagcccgtttggaaaacatccccgcgccagagggaccgcgccggggcaggcccgcgccctgcgccccgggcgggcagaacgggaaccgcggcccagcacctacgcaggtccacacccggcggcccctccgcacaacacgcgcgcgtgcacggccccgcacgccccgggcccggacggcgcagagaccacccgcacccgcgaccgcagggacgcgcgggcgcgcagcagccaccggcgcccgccctcggacccactccctccaccacccccagacacgcaaacacgccccccgcgcccgccggggcccgcctggcgcagcccccgccccctccgccccggcggcctcacctggccacgctccgggccccgctgggcgccgctccctccccgcctagcccctgctcggccccgggccgctgcggcgggatgggcccggcccgcggcggctccgcgctgcctcgtcacggggacacccagggccgggggagggggatgagcgcgaacagccacgctccgccccctgtccggaggccccgccccattttccccgcccctaggagagctccgcctcgctccagactccgcctcttgcggcgatgctcagccttcgtaggcggagctccgccccttcgcaggagaccacgcccttcccctggtaccgccctctgaccagggaagccccgctctccactccgtctgagggactcccttgcccctcctagccggctcaggactcccccgtagtctacacgacccctcccccatttcagactccccaaactccgcctccatttccggggactccggggttctcccagagacatgggcgcccctccc

SEQ ID NO: 7630 - DNA, 2300 bp, Homo sapien
atcagaccctgccagccttgggccctttgcttagggtgagcctccatctagaggggcttctggagtcagagagactgggctcaaatctggacattttcacctactagccagaggcaagtcacattacctccctgagccttgatttctctcatttgtaagatgggcagaaagccacttgcctggcaggccactgcacagattccattaggtgattgataacatgaaggccaggaacacagaggcagcagcccatggcagcgatgagagctatgcctcacctcctctgtgcctctcacagccatgccctccagacaagagctggaaaggcaggtggaaatttgacatgtatggacatatggaggtactggcattgtgtgtcattttttccttccattttggttttgagtagtggtgtgataagtgacagcttactacaggtgaaccctttctagttcttcaaaacccagtagaggtgttccctctcccagaaacctgatcctagggcgagaattcccttttcttcctctaggcttatggcatccttggcttgtgcctgggtgtggcaggtggcacctaggttcctggagaagctgaggaacccctccactgagggcccacaactgacccgtggtgcatcacctctaccgccccagtgcacagcacccatccaggcatggctcaagtgtccaggaaatacttggttaactgaatgaaagtgcttttgaaactgctctgacacccccctcccactccccaaggtaccaatttgttattgtagggtcttctagtttcaggtgcttgtagagcttgtttattaaggtaggatctgcctagaagttggcagtttcctccaagtctcatcaggggttcactttctctctttctctctctcctcttgcaaccccttcttcttaacccccgacatctacagctacaatggttgtctggcaagtggggacaagggccgccggcgaagccgcctggcactgagccgccggtcgcacgccaacggggtgaagccagacgtcatgcaccacatctccacgccgctcgtctccaaggcaagcaactgacccatagacctgaggtcctgccctccctgcccaaggcccaggtcttcggccttccaggtcctacctgcccacagcccccacaccttaacaggggagcccactttgtgtcatcactcactgcttattgggccatccgagaatggtgatgaaaaatcctttgcagtgtgcgcagttctttacagtttgcaaaatgttgccttaaccactggacctctctgaaccttggctgcctctaagatggtgctgcttatttccatccaatggaaatggaaatgggtggaaatgagctgcaccattttagaggcagccaaggttcagagagtgggaggtgacagtcatactgcaatgataaaggaaaaacctttgactttagaggatttgggttagaattcagcctctgatatttccagctgtgtgcctttaggccagtttctctctgacctgcagtttcttcaactctaaaatggaacaataaccccattctttttatttttgaaacggaatctcgttctgtcacccaggctggagtacagtggtgcgatctcagctcactgcaagctctgcctcccgggttcaagccattctcctgcctcagcctcccgagtagctgggactacaggcgtgtaccaccacacccagctaatttttttttttttttttttgtatttttagtagagacgggatttcactatgttggccaggccagtcttgaactcctgacctcaagtgatccgcccacctcagcctcccaaaatgctgggattacaggcgtgagccaccgcacccagcctgataaccccatccttagggtgactgtagggcttaaatcatgtgaaacatctgctgcactgtccaccctctgagaaggatggagctgcccccttcccagggagtggctgctgggccttgagctccaggtgcttgctcaaggcatacacttatcatggctgcacaccctggcaagtgacttttttctccccaccaggcactgagtaaccgtggtcagcacagcatctcgtatacactgtcccggagccactcggtcatagtggagtatacacatgatagcgacacagacatgttccaggtatgctcaggcctctccacacacctcctggccaccaggcctctaggctctgcaagcatttcaggtgaggctacgggttgggaggccatgggaaagctgcttctctccagacgaggaagcaggatgtcccggtgtgggct

SEQ ID NO: 7631 - DNA, 2300 bp, Homo sapien
ttcttgcttccagagcatggcactgctgcagtgggggtgaaggggagggtggggatgctgcaggaggtgtgggagcattccaacttctctcccctcaacatacacacaacacacaaagcactcaaaatccaactcttccaagttctctcttctgaccctgttgggaaccaggcaggggaacattctgatcccatttccagtggggaacctcagaccctaggaggaaagaccagcaaagggcaccacagtagatgctggggaggattcagaggtattggtggaggaggtcagagccctggtcttgtcccagctctgcctttgccagctgttagagcctcagtttcctcagtgctaaaggggataacagtcactacctcgccaggtggttgtgaatatacagagagcacctgtaacacagttgattcgtaactgttgctcctcaccgaccccttttgcattcccatggggaagagccaaggctggggagttatgactccagtgatagactgctccatgtgagtgactgtgtgtgtgtatctctatgttggggccagggatatctgaactgtgtggtgttataggagtcggcgaacctcttagcctcagtttccctatctgtacaatgggtaaagtgatcatacctcaggatttttgcaagaattaaatgaggtcctccatgccaaactgctagcaagggacctcagtatatgctcatcttatctgtgatcataaaaatgtgatcacgtagctggttggggggtcctgagagcactggggtcttttccttgcctgagctgccccctgctggcagtgggcagcactacctcccttacctgtgcacatttcaacttcacctgtcagccaactttatacccattttaaagacaatgaaaacggaggcacaggaaagaagaggggtgactttcctaaggacaccgaccaacttgttgaactcccccatataacaagtaatcatcaaagctaacagcttgtaacactgttgtgtcaagcagggccttgggcacctttgtggatgagaaactggtgtctatggtaagcagaggctgtctggcctagacacgggcgtagcaaggagaccgtgcgggatttcagtacccaaacgcccctcaccctgcgcaactatagggagcggcactgcagtcaacacatcacaacttacaatatcccttggattggattcaattattagcctggttttccggttcataaagccaagactcccagacaacctcactccaccccccagtctgaccctgggccctcaccactactccccatttggcctaggcccttccgcatgccccacccagaccgtggtcccgtgagtccgtccagacctgtaaaagtggaccgcgggcccgcctctgctctggactccctttcggggccgcaggaggctttctcatccatcaggcatctggcaagcaccaggaaactaccagcctgtttgtgctaaggaaactgaggctcgggaatgtttagcggctccttccaggcccgtggcgggtgggtggtggtacagtgaagcagtcgaggcgtttctccgcgcccctacacgggtgggaccacctcagccctggcccgatcccactcaaccgtagccccgattcccggcaccgagagctttgcaacttccaagtctccacccccaggtcccgagtcccgagaggaaggtggagccacattactcctattgtgtaggttcccacctgcaagagtgctgtcgggtcctctgaggtgaaaccccaaaggaaagcgggatcgggactgggggagggggattcccaagtccctgacacccgcgccgtctcggcctgggcttggtgacctcgtcagtcccgtctgccgggactaggccgcggccaggccgggcacagcggtacccggtccggcgcgtgtgcggcctgctgacaaaaggccgagcccgcagggccaatccgcgcgccaccccgtagcgcctgggggcgggagcgggcgagccgagaagctcgtcttggcgcgtctattggctggtactgacgcccatccggaccccgaggccaggcagttggccaaggggggcggggttcgcagagccccaatgaatgggggagccggaagcaggaagtgagtttgcgaacggagcagctgctgcaggtgaggcgcggcgcctgggcttttggggtcaaagcgtgtcatcccgggggaccaaggcgaatccatactgagcgcaaaatcgttccctttctgcccactctccagtaccccctccaaattcaccccgccctcgaggccaagga

SEQ ID NO: 7632 - DNA, 2300 bp, Homo sapien
atcgggactgggggagggggattcccaagtccctgacacccgcgccgtctcggcctgggcttggtgacctcgtcagtcccgtctgccgggactaggccgcggccaggccgggcacagcggtacccggtccggcgcgtgtgcggcctgctgacaaaaggccgagcccgcagggccaatccgcgcgccaccccgtagcgcctgggggcgggagcgggcgagccgagaagctcgtcttggcgcgtctattggctggtactgacgcccatccggaccccgaggccaggcagttggccaaggggggcggggttcgcagagccccaatgaatgggggagccggaagcaggaagtgagtttgcgaacggagcagctgctgcaggtgaggcgcggcgcctgggcttttggggtcaaagcgtgtcatcccgggggaccaaggcgaatccatactgagcgcaaaatcgttccctttctgcccactctccagtaccccctccaaattcaccccgccctcgaggccaaggagtgctccggggagcaaagagttaacagccctttccgaacctcgaggctgtgctattggggcggggcttctggaggccggggcagggcgaggaggctggacactctgtcccagccgggacggggcgtggcggggagaatgccccgggttggggaatccccgggttccaacggggctgtcagaccttcagtaaattgttgccctttccaagcctcagtttccctatctgtaaaatgggctttcttctggttgtgaacttctgtggcttccctggtggagcacagggagcgagcaggagaatggagggccaaggaaaaggcatttagagggatgagaatgggacagtttcaagcaaaatcatttattgctgtggatactttccgtccagggcgacttcatctgattagcgcacccacctggtaatattggggttattctctcttttatagaggaggaaacggaggtacagaaaagtgaagcaatggacttgacttttaggagtctggggccgagtcctggctaaaggctgagccttccagctggcggcctggcactttatccttgtgagcacagtggaaagtgtaaagaattctgaacaaaggccaggcgcggtggctcacgcctgtaatcccagcactttgggaggccaaggcaagcagatcgcttgaggccaggagttcgagaccagcctggacaaaatagcgagaccccgtctctatcaaaaatacaaaaaattagctgggcatggtgatgcacgcctgtagtcccaactactttggaggctgaggcaggagaatcgcttgaacccgggaggcggaggttgcagtgagtcaagatcatgccactgcactccagcctgggcaactaagtgagactccgtcttaaaaaaataatactgaacaaggaagcagggaggggcctgggctgggagcctagagatgaggatctctgctgctgatgtctccattgtgggattaggcaaggctcttagcctctctgaacctcagtttccccatctgtaatactaggtagttagagtcaatcaatttttttttttttgaggtggagtctcactctgttgcccaggctggagtgcaatggtgcggtctcagctcactgcagcctccacctcctgggttcaagtgattctcctgcctcagccttcccagtagctgagattacaggtgcctggcaccaagcctggctaatttttgtatttttagtagaaaggaggtttcaccatgttggtcaggctggtcttgaactcttgacctcaggtgatccacacacctcggcctcccaaagtgctgggattacaggtgtgagccaccatgcctgaccttagagtcaatctttaaggtttagggactacagaccaaatatggtccaccagtgtattttgtgaccccttgggtgagtcatctcaccttctctaagcctcagttagcatatctggtgaatgggtacaatagtattcccttccacatgggcttttgggaggattaaatgagatcataagagttcagagccaggtatgcaattggtatggggtaaacaacagctgtgatgacagtgatggttctcagcagggcccatggcggacacccagtacatcctgcccaatgacatcggcgtgtctagcctggactgccgtgaggccttccgcctgctgtcacccacagagcgcctctatgcctaccacctgtcccgtgccgcctggtacggaggcctggctgtgctgcttcagacctcccctgaggccccctacatctatgctctgctc

SEQ ID NO: 7633 - DNA, 2300 bp, Homo sapien
ccaacatgggcaactacaagtcctttggtgacaccaagtttgttcccaacttgcccaaggtgagccaagggagggttggggaaggtggggatggggggctggtggggtagagatggaaaatgcagtagaaggagccccaactggagtgtcagaagccctgagcagagcatggaccctgtcgcttccaccctgcatgactgtgggtgtcaccagcctcactgggtgctgcggcctcttcgtgtataaaggaaaagcaccactcgccctgactgctgatccgcaggctgaacaagggcgagatgtggaagtgttctgtgaacttttaggtgctctcaaaaatggagcttgttggtcatcaccaggaacagtgggaagtgctgggccgggggcatccctcccagggttatgagacttgagcctatctcgggcagaggtggttcttatagcaggtataagagccgggacttcaatatgcacacaagtcacctggcagtcatgctgacatgcagcatctgattcagcaggtctgtggtggacccaagatttgacattttttctttgagacagggtcttgctctgtcacccaagctgaagtgtagtggtgtgatcatgactcacttcagcatcaacctcctggactcaagtgatcctcctggcttagcctcccaagtagttgggaatatgggtatgcagcaccacaccagctaaattttcttttcttttcttttcttttcttttcttttcttttctttttttgagatagggtctcactctgtcactcaggctggagggtagtggcacggacacagctcactgcaacctcaacttcctaggctcaggtgatcctcctcagcttccagagtagctggtaccacagatgcctgtcaccatgacacctggctaatttttaaaaattttttgtagagacagaatcccactgtgttacccaagctggtcttgaactcctgggctcaagcaatcctcatgctttggcctccccaaatgctaggattacaggcatgagccactgcgtctggcctaattttttttattctttgtagagatggggtctctctgtgttgcccaggcttgtcttgaactcctggcctcaagcatctctccctcctctgcctcccaaagtgctgggattataggtgtgagccaccacacatggacgcttgacatttctcaggacctacaagtgctgctggtccatggaccacacaatgagccagagctcttagatcataggagaagagcttgggagtgggtagggaggctctggaaggcaggtttgggtggtgtgactgggccattggcctccctttccttgcaggaaaagctggaacgggtgatcctagggagtgaggctgctcagcagcacccagaagaagtcaggggcctctggcagacctgcggggagcttatgttctctctggagccaaggcttcgacacctcggactggggaaggaggtgaggcccctgactcccccgaggggacagggagtggagggaatccttcaaggccacctggtaaggagggaaggacacgggatggggaggcagtgggctctgcctcacactcctgaggcaatgctgctccccactgcaggcctcagttttgtcatctgtagaatggtaagcatgttgggtcgaatgctttctgaatgccctcccagatctgacattctgtacacaggatgccatgtgctgatggagggaaggagaggaaggctggaggtggagggagctgaggaggggatggcagggaaggaggggggtcccaggtttcccacctctggaggccacatccgttgcatgggatgaggaccttggcaagccttaggggtgggccagccagagagaggcctgggcagagctgcagcaacactggagatgagcatgtttgtttgttttataactttttcccctggaggtagatggaggggtaaggggtagaggctgctgaaaggagggaggggcgggaagcctgggaatatgacgtccctgcagccctgaccttggcaactcctctttctcatgtcccctgtcttccccaacagggaatcaccacctatttctctgggaattgtaccatggaagatgccaaattggcccaggactttctggactcacaggtttggggttaggggagctcaaggtagcagaggtttggtggggttcctagtcccagccccctcacaactggtgaccactcctgggtctctgcttgactactccctgtgtactagggaaggcgcgacccctgcccaccccaggctatagagcctaatgacag

SEQ ID NO: 7634 - DNA, 2300 bp, Homo sapien
cccagtgcctcatgcacagcctggcacactggagttgctcagtgactgtcaaatgagtgcattaataaatcatgccagccacatggacaatactctcaattgctttgatatgtccagccctgtgcgagccatgggggagccactagggatccggaggtgatcacagctcactggggatgataagatatggagataaataatcatacaagggggccgggcgcggtgactcacacctgtaatcccagcactttgggaggctgaggcaggtggatcacaaggtcaggagatcgagaccgtcctggctaacacggtgaaaccccgtctctactaaaaatacaaaaaattagccaggcatggttgcaggcgcctgtagtcccagctactcaggagactgaggcaggagaatgacctgaacccgggaggcggagcttgcagtgagccaagattgcgtcactgcactccagcctgggtgacagagcgagactccatctaaaaaaaaaaataataataataatcatcatcataatcatacaagggaagtgttaatgagtggccaaaacatataaacagaactctgaacacttagaggagggaagatcgcatccatcttcaagagtatccgggaacgttctggggaggaaggggtggttcccactagatctgaagaacaggttggattttcaaaggttgtgatggtggtgcactgtaaaaagtttttttttttttttttgaggtggagtctcactctgtcccgcaggcagtggtgagatctcggctcactgcaacctccacctccggagtcaaatgattctccggcctcagcctcccaaaaagctgggattagaggcacccaccaccatgcccagctaattttgtatttttagtagagatggggtttcaccatgttggccaggctaatctcgaactcctgacctcaagtgatccacccgcctcagcctcccaaagtgctggcattacaggtgtgagccaccacacccagccaggtcgctgtaaaagctttctatggcttaactcctaacaacccagagagaaatggttattatcctcatttttcatctggaaaatgaggcacagaggggctgtgtatttgcctgcggtcacaaagctgttgggtggcagagccagaacttgaactccagagcttgtgctctttgctgctgtgcagcttgtgatgtcatggaacacgacaaggtgcacagagagggtagagcagttgaagtgtgtttgagggcagtgcttcccgggggtattcaggggaccctcagaacagcccatttaataaatcagtaaacaggttcggagataatgatgccatggtggctagcatttgttgagcaccccctcgatgtgtgactatgtcatcactgcagctcctttacagatgaggagactgaagcttgggaggttgcaacacttgccccaggtcccacagtagacagatgaagtcgttgctgaattgtgagcttcaggacaccaaggactgtatctgtttcacctagtgtggcacctggtgtcttttattatttatttatttatttatttattttgaggtggaatctcactgtcacccaggctggagtgcagtggcacgatctctgctcaccgcaacctctgccacccgggttcaagcaattctccagcctcagcctcccgagtagctgggactacaggctcatgccaccacgcccagctaatttttttgtatgtttagtataaacagtgtttcatcatgttggccaagctggtctcaaactcctgacctcaggtgatcctcccacctcagcctaccaaggtgctaggattacaggcatgagccaccatgcccagcctaaatctttatttgattgactgaatgaacgaaagcagcaatgcatttaatactccccctgtagtatttccttcctcacagggttactgtaaagagtaaattaagtaattaacctaaaacgtagagcacaggtttttttggcagagctcagtaagaaacagctgctgctgtaattgtgattattaagatttttatgatgattcagtttccctattcagacctttccctgctgttttctctccatctcctccccaggctcagacgtgcagcttctggaatacgaggcgtcagctgctggcctcatccgatccttctctgagcgtttcccagaggatggacccgagttggaggagatcctcacacagctggccacagccgatgcccgattctggaagggccccagtgaggccccatctggccaagcttgaggaagatgtgtggccttgccccc

SEQ ID NO: 7635 - DNA, 2300 bp, Homo sapien
gtgtcttttattatttatttatttatttatttattttgaggtggaatctcactgtcacccaggctggagtgcagtggcacgatctctgctcaccgcaacctctgccacccgggttcaagcaattctccagcctcagcctcccgagtagctgggactacaggctcatgccaccacgcccagctaatttttttgtatgtttagtataaacagtgtttcatcatgttggccaagctggtctcaaactcctgacctcaggtgatcctcccacctcagcctaccaaggtgctaggattacaggcatgagccaccatgcccagcctaaatctttatttgattgactgaatgaacgaaagcagcaatgcatttaatactccccctgtagtatttccttcctcacagggttactgtaaagagtaaattaagtaattaacctaaaacgtagagcacaggtttttttggcagagctcagtaagaaacagctgctgctgtaattgtgattattaagatttttatgatgattcagtttccctattcagacctttccctgctgttttctctccatctcctccccaggctcagacgtgcagcttctggaatacgaggcgtcagctgctggcctcatccgatccttctctgagcgtttcccagaggatggacccgagttggaggagatcctcacacagctggccacagccgatgcccgattctggaagggccccagtgaggccccatctggccaagcttgaggaagatgtgtggccttgcccccaattccatcagaccaaggctgcaagtggccctccattcgtgtgtgtatttaggggctggggagggggaggggcaggagcttggaccttggtactacctcagctgagggtggtgacacaaccccttccatttgtcagcactttccagcctgccaattgcttcccctctgtgatctcatttcatctgcactgccatacgtggagtgagcaagacagggcttaccatcctgtctaccagatgaggaaatggcagttctgagaagtcactggtctagatcccgcaggtggcacgtgacagctagggttcaaaacgttctcaccaaatccaatgctcctcacatattaattttataaccagacaaataaatattagagacaaccaccatctttgcggcgtgtgtggctcctccttgcctttgcctgtcttctcatttactcccagcagagtgatgggctcaaggcctggggagggggcaaggagggccatttttagcctcccttccacaacaggatgttgacattatctctagatgaggatacgcagtcacagagctgaacatagcacaatttttgcagctctcctttgtggcattccttgcatttttaaatgttctggggccgggcacggtggctcatgcctgtaatcccagcactttgggaggccgaggcgaggggatcacgaggtcaggagttcgagaccggcttggccaatatggtgaaacctcgtctctactaaaaaataaagtagctgggcatggtggcatgcgcctgtaatcccagctactcgggaggctgaggcaggagaatccctggaacccgggaggcggaggttgcggtgagccgaaatcgcgctactgcgctccagcgcaagcgacagagcgagactacgtctcaaaaaaaaaaaaaaaaaaaaaaagttctgggaacctacaaactcaacttcagtcagaatcctctgcatttgtcccataaccctcgtgttttgtttctctgggcctggacctctacagtaacgcagcaaggcaggacatggtccttttcaaccgggtaaccatgaagatggagacaggaggagttctttttgctgctcataaatgctagaaggggcttctttccaaccctggaagccagagggctctgtggctgacccagagattgtaggacccagacgcctggaaaggtggctctgactgggaaggagcaaagataaatatctttgaggaatctgagacagattcctcaacccaggaaggtggccagcgcgtcctcctgagcctgggtgggaaagcttggcgcccggaacctttgtactcgcccttccctgtgctcgggcactattgggcgttacgcgagggcggggccggttgccaggacgacgcctgcgaagatggccgctgcgtcctcatcggattccgacgcctgcggagctgagaggtgaaggcagggctcctcaaggcctcttttcccacccgtgtaaagagggtcccttggtccccgggctctgggctcctgctgttctcgggcagtctggaa

SEQ ID NO: 7636 - DNA, 2300 bp, Homo sapien
atttgatgagtttggaccagaggttttcagactctaagttgtgaatcattaaatcagtttagtagatcacaaccagcaacatttttaaaaatagaatagtaaattcaaagtatgtcacaagtgagggccaggcacattggctcacacctgtaatcccagcactttggaaggctgaggcaggcgatcacagttctggaacagcctggccaacatggtgaaaccccatctctactaaaaataaacaaattagccgggtatgggccgggcacggtggctcacgtctgtaatcccagcactttgggaggccgaggcaggcagatcacaaggtcaggagatggagaccatcctggctaacacggtaaaaccccgtctctactaaaaatacaaaaaattagccgggcatggtggcaggtgcctgtagtcccagctactcaggaggctgaggcaggagaatggcgtgaacctgggaggtggagcttgcagtgagccgagatcgcaccactgcactccagcctgggtgacagagcgagactccatctcaaaaaaaaaaaaaaagccgggtgtgatggcacacctgtaatcccagctacttgggaggctgaggcagaagaatcacttgaacctgggaggcaaaggttgcagtgaactgagatcgcgccactgcactccagcctgggccacagagcaagactctgtctcaaaacaaaaaaacaaaacaacaaaaataaataaataattacaaatacaaatagaaaaattagccaagcatggtggtgcatgcctataatcgcatctactgggaaggccgaggcagaatcacttgaacccaggaggcagaggttgcagtgagctggagatcacaccactgcactccagcctgggcaatgaagtgagactccatctcaaaaaaaaagtatgtcacaagtgaaactgtgtatgtgtgtgtaaattgtcctgtgtcacagtataaaatttgcaaacaactggcttgggccataggtgctgggagggccggtggtatgctcgttgaaagaagggtaaagaggagagaactgacagaaaaggcgggttggagtcaaatgtggaaggccttcagtgtcctaagaaagagaacaaaagccattggaggttttctatcagagaccagacatatttgtgtttttgaaaggtagcaaaggcagcattgtgaagggcagactggggagaaagacccgaaagacgagtctgggagatctattaggaggttgaccccaaaagtgagggccagtgatatttggtctggaactgaggtagtgagattggaggggagatgagaaatataggaaatatttcagaggcagcgattccccaggcctgtctctatcacttctcacctattatatctggggcctcccctacccatcccctgtcttgctttcctctccaagatatttccccaactaaactctgacgtctccacataggatgcagtgaccagcctttgctttggccggtacgggcgggaggacaacaccctcatcatgaccactcgaggtgagtggagtcagacctggcaagggctttgaagtcgggagtgaagggacaggcctgcttctggggaaagaggaggaggtggaaatgaagcatgggtggacctgggtgtggaaagtaaggcctacagaagtgtccttctggagctaggcctccactgggacagcccaagggctgggtcctgggctggattcgatctttctagttcacccagcatccccagtgcctgccacgatgccaggaacatcacagtactccacaaataactgctaagtggattaatgaattaatgatgagagactattaagatgcactttgttacttccagaaacagtctcgtctggaagacggatgtgtacagaagcaactctataggaggcagattgtttggggaagaaagaatgggaatgtgggtagaactggggaggacaaatccatttccactgtccacttccctaggtggtggcctgatcatcaagatcctgaagcgtacagcagtgtttgtagagggaggaagtgaggtgggtcccccaccagcccaggccatgaaactcaatgtgccccgaaagacccggctttacgtggatcagacactgcgagagcgggaggctggcaccggtgagcctcagactgggtcctttcccttcttcctcctccactgctcctacacagcaaagctgggggaatgctgcccagcctccctgtgcactgggaggagatctcggccaactaggtaggtcactcacctctgcaaatccagggacagccta

SEQ ID NO: 7637 - DNA, 2300 bp, Homo sapien
gacggggcgcccgcgcagctgcctctcgtgctcaccgcgctgtgggccgcggccgtgggcctggagctggcttacgtgctggtgctcggtcccgggccgccgccgctgggacccctggcccgggccttgcagctggcgctggccgccttccagctgctcaacctgctgggcaacgtggggctcttcctgcgctcggatcccagcatccgtggcgtgatgctggccggccgcggtctgggccagggctgggcgtgagtggggtgcgggatcgggcggggagaagtgggagccttggacaggggggaggggccccaagacctgagatgttagaaccgggttacattaggatccaggttgttagaatcagacatttttttagaacctgggatggaagagctagaattgagtgttatttatttactcgcaaatacttattgggagcctactaggtgcaaggttttgttacagggacgaagggtacaatagaacaaattcctgatttgaggggggtgcagatgagaaactagaggaataataagcaaatcatatagaatgctagaaggtgatagtagtttggaaacaagaagtagagcagggtaaaggggttgcaagtttcaatattaaataggtggttaggccgggtgcgttggctcacatctgtaatcccagcactttgggaggccgaggccggcggatcacttaaggtcagaagtttaccagcctagccaacgtggtgaaaccccgtctctactaaaaatataaaaaaattagtcgggcatggcggcacgtgcctgtaatctcagctactggggaggctgaggcaagagaattgtttgaacctgggaggcggaggttgcagtgagccgagatcgagccactgcactccagcctgggtgacagagcaagactccctccgtctcaaataaataaatacataaataaacaggtggtaaattctcatcacaaaaatatgagtgtttgaggtaatggctatcctaattagcttgatttattccaagctgtactgataaatcataacatcacttggtatcccataagtatatacaactggaatttgtcaatttataattagaaaaaaaaattacaccaggtacaggctctacacacacattttatgccaggcagaggcttttgctgagactgaggctgtagtgtgctatgatcacacctgtgaacaaccactacactccagcctgggtaatgtagcgagactctgtccctaaaaattttttttaattaatttttaaaataatatacataaatgtgtggtcaaggtagacctcatagagaaggaggcatttgagcaaaaaacttggagggcgtggggggcggttagccatgtgggaatctgagggaaaggtgttccaggcagaggtaacaagtggtgcaaaggctctgaggcagttgtgtacccagcatgtatgttcccagaacagcaagaaggccagtgtggctggagtgcagtaagagaggggaagagatgtcacagatagaaggatgttgtaggacactgaaggctttgctttttactagaaataaattggagaaccacaggagggttttaagcagaggagggtcagtttggttgctggggtgagaccgtacgaggtggggcaaaggtggaatcggagaccagtcaagaggctattgcagtaatccagagagttcctagtgacctggacaaaggggtgaccgtggaggaagggagggatttgctgctggatgtcagtggcttgagagaggtctcaggactggggatgttagggctggaagagacctcagacctgtagtgctagaactagaagggcctgggacatcttgtttagcctgcatttacttgtaaagaaattgaggcttagccagggcaaatggctgttgccacttccgcaggatgggctctggggcagccctgtgcacaatatggggcatctgagctgctgggggaactgacgctgtggttccttcctgcagttactgctaccaatgccaaagccaggtgccgccacgcagcggacactgctctgcctgccgcgtctgcatcctgcgtcgggaccaccactgccgcctgctgggccgctgcgtgggcttcggcaactaccggcccttcctgtgcctgctgcttcatgccgccggcgtcctgctccacgtctctgtgctgctgggccctgcactgtcggccctgctgcgagcccacacgcccctccacatggctgccctcctcctgcttccctggctcatgttgctcacaggtggggagcctgggaggcctctgcacagag

SEQ ID NO: 7638 - DNA, 2300 bp, Homo sapien
aggtctcttccagccctaacatccccagtcctgagacctctctcaagccactgacatccagcagcaaatccctcccttcctccacggtcacccctttgtccaggtcactaggaactctctggattactgcaatagcctcttgactggtctccgattccacctttgccccacctcgtacggtctcaccccagcaaccaaactgaccctcctctgcttaaaaccctcctgtggttctccaatttatttctagtaaaaagcaaagccttcagtgtcctacaacatccttctatctgtgacatctcttcccctctcttactgcactccagccacactggccttcttgctgttctgggaacatacatgctgggtacacaactgcctcagagcctttgcaccacttgttacctctgcctggaacacctttccctcagattcccacatggctaaccgccccccacgccctccaagttttttgctcaaatgcctccttctctatgaggtctaccttgaccacacatttatgtatattattttaaaaattaattaaaaaaaatttttagggacagagtctcgctacattacccaggctggagtgtagtggttgttcacaggtgtgatcatagcacactacagcctcagtctcagcaaaagcctctgcctggcataaaatgtgtgtgtagagcctgtacctggtgtaatttttttttctaattataaattgacaaattccagttgtatatacttatgggataccaagtgatgttatgatttatcagtacagcttggaataaatcaagctaattaggatagccattacctcaaacactcatatttttgtgatgagaatttaccacctgtttatttatgtatttatttatttgagacggagggagtcttgctctgtcacccaggctggagtgcagtggctcgatctcggctcactgcaacctccgcctcccaggttcaaacaattctcttgcctcagcctccccagtagctgagattacaggcacgtgccgccatgcccgactaatttttttatatttttagtagagacggggtttcaccacgttggctaggctggtaaacttctgaccttaagtgatccgccggcctcggcctcccaaagtgctgggattacagatgtgagccaacgcacccggcctaaccacctatttaatattgaaacttgcaacccctttaccctgctctacttcttgtttccaaactactatcaccttctagcattctatatgatttgcttattattcctctagtttctcatctgcacccccctcaaatcaggaatttgttctattgtacccttcgtccctgtaacaaaaccttgcacctagtaggctcccaataagtatttgcgagtaaataaataacactcaattctagctcttccatcccaggttctaaaaaaatgtctgattctaacaacctggatcctaatgtaacccggttctaacatctcaggtcttggggcccctcccccctgtccaaggctcccacttctccccgcccgatcccgcaccccactcacgcccagccctggcccagaccgcggccggccagcatcacgccacggatgctgggatccgagcgcaggaagagccccacgttgcccagcaggttgagcagctggaaggcggccagcgccagctgcaaggcccgggccaggggtcccagcggcggcggcccgggaccgagcaccagcacgtaagccagctccaggcccacggccgcggcccacagcgcggtgagcacgagaggcagctgcgcgggcgccccgtccgtgctcccagccgcccagggctgccccatggcctggacacccagctgtcggagccggaggactaggccgcttccgtattggggcggagatagcggcagacggacgtctgctacggccaatagaagctcggaagggggtgcggcgagcgctcagactctcagggaacggccggcccacgcggcgagttgatctggccaacggaccagcagtggaggcgctcggaatcccgcggcgctggagcccggataacgccgcggagtgattgacccgcccaccctggaggctcctcccatcccgtcggagccccgcccgctggcgcgggggccaggagtgcccgggggattgagttgcagccggggtggtgtcggggtttcccggctcagcacattctcccctactccccacagccgccccgatattaatagccctgccgcagcccatccagctggctcagagccgttccccatgcccgggtgtctccatcaccccagaaaacatg

SEQ ID NO: 7639 - DNA, 2300 bp, Homo sapien
aaaagcctctgcctggcataaaatgtgtgtgtagagcctgtacctggtgtaatttttttttctaattataaattgacaaattccagttgtatatacttatgggataccaagtgatgttatgatttatcagtacagcttggaataaatcaagctaattaggatagccattacctcaaacactcatatttttgtgatgagaatttaccacctgtttatttatgtatttatttatttgagacggagggagtcttgctctgtcacccaggctggagtgcagtggctcgatctcggctcactgcaacctccgcctcccaggttcaaacaattctcttgcctcagcctccccagtagctgagattacaggcacgtgccgccatgcccgactaatttttttatatttttagtagagacggggtttcaccacgttggctaggctggtaaacttctgaccttaagtgatccgccggcctcggcctcccaaagtgctgggattacagatgtgagccaacgcacccggcctaaccacctatttaatattgaaacttgcaacccctttaccctgctctacttcttgtttccaaactactatcaccttctagcattctatatgatttgcttattattcctctagtttctcatctgcacccccctcaaatcaggaatttgttctattgtacccttcgtccctgtaacaaaaccttgcacctagtaggctcccaataagtatttgcgagtaaataaataacactcaattctagctcttccatcccaggttctaaaaaaatgtctgattctaacaacctggatcctaatgtaacccggttctaacatctcaggtcttggggcccctcccccctgtccaaggctcccacttctccccgcccgatcccgcaccccactcacgcccagccctggcccagaccgcggccggccagcatcacgccacggatgctgggatccgagcgcaggaagagccccacgttgcccagcaggttgagcagctggaaggcggccagcgccagctgcaaggcccgggccaggggtcccagcggcggcggcccgggaccgagcaccagcacgtaagccagctccaggcccacggccgcggcccacagcgcggtgagcacgagaggcagctgcgcgggcgccccgtccgtgctcccagccgcccagggctgccccatggcctggacacccagctgtcggagccggaggactaggccgcttccgtattggggcggagatagcggcagacggacgtctgctacggccaatagaagctcggaagggggtgcggcgagcgctcagactctcagggaacggccggcccacgcggcgagttgatctggccaacggaccagcagtggaggcgctcggaatcccgcggcgctggagcccggataacgccgcggagtgattgacccgcccaccctggaggctcctcccatcccgtcggagccccgcccgctggcgcgggggccaggagtgcccgggggattgagttgcagccggggtggtgtcggggtttcccggctcagcacattctcccctactccccacagccgccccgatattaatagccctgccgcagcccatccagctggctcagagccgttccccatgcccgggtgtctccatcaccccagaaaacatgcaaaacagctcggcgcctctgtgttcctgactgtgaaatggggatagggctctgtgtcccaccagcgaggtgctggaagaggctcacgaggagctccagagggcagcctctagagcggcccgcggccactattattatcggcctttctattgtggagaggagtaaacagactcagagaggtcccgtggatttctcaaggtcacacagcgccccagcagcggagcaggaatgcaaacccaggatctccgccgcgagatccaccccggcgcccccgagtcccgcagttcccggcttcaggacaaccccttgccaggtccaacccgagctccttcacccccatccggcccctccctcctcccccatatttagtgcgaattcgatctggggctgggctgggccctacttaatggggcccgggtgtccgagagcgtgccgagcggagcgaagccaggagcccgatcgagatgatgatggttatgcagcccgagggtctgggggccggggaggggcgctttgcgggcggcggcgggggcggcgagtacatggaacaggaggaggactgggaccgcgacctgctgctggacccggcctgggagaagcagcagcggaaagtgagtgctcgcccatttcctgacagcaaaaccga

SEQ ID NO: 7640 - DNA, 2300 bp, Homo sapien
cgggaaattgccaaacctgggactgcagccgtgcttggagacaggtgcagggggagcctaaggggaggcctgtcacccggggcaccccagccgagtcagcggagcctctcggcccttggggtcatctcctgtcatctaacccagcagaagtactctgattctaaattctgggactctcaggtcatttaaattccactgagtaccccagtaccctgccctctcctggagtcatacagtgttggcacacgctgagcagggtccaatggcctcatagtgccctcctggttacccctggcctgccactctccaaagtattctccctctggcctggatcattttccctttgggaacccaggtgtcctgccccctctacttgggaaagtctgggagtgaaaatagctcagggagggaggggccctgagtgcccaacgggctgggcctgggtagcagctgcccctgtgcccctctttggcgcccccgaggtgctgcctcagcactaagtgtccatctggctggagagtcaggttacagcgtaaggggacccaggtctcccctcctccccgacctatggccttttcagcagactcagggccccatgcctggggtatcttgggaaagaatgggggtagggaaaagggtaaagatcctcaggttgcgggggtcctgatgtctgacagtctgtgatgtggggcctgtctgtgctctttctgggcttcagtttcttcaattgttaaatgagatacagcgactatggaccccaccctggagacgaggtggggtggggtctgagaggacccttctcactacccccacactcccaagtccactagttgcctgactgcaagccttcagggtggggtctgggaatatttaactagaagaagattcttctttctgaaccccccctaacttggatctcctggggtttgcccagcctgttttcagcagcagaagtggggcagtgggcccaggggaatgaaccctggtgggggtggggagcccagaaactctcttgtcattttaaacccctcttgagggctcccagccctctcctccagccctggggacagcaggcagctgatgggcagagcctgggctggggattagcactctaggttaaagacaagctctgcccctgcactgctgagatgcccaggacaaacagcccggcctctcaggcctcggttttgctgtcaggaaatgggcgagcactcactttccgctgctgcttctcccaggccgggtccagcagcaggtcgcggtcccagtcctcctcctgttccatgtactcgccgcccccgccgccgcccgcaaagcgcccctccccggcccccagaccctcgggctgcataaccatcatcatctcgatcgggctcctggcttcgctccgctcggcacgctctcggacacccgggccccattaagtagggcccagcccagccccagatcgaattcgcactaaatatgggggaggagggaggggccggatgggggtgaaggagctcgggttggacctggcaaggggttgtcctgaagccgggaactgcgggactcgggggcgccggggtggatctcgcggcggagatcctgggtttgcattcctgctccgctgctggggcgctgtgtgaccttgagaaatccacgggacctctctgagtctgtttactcctctccacaatagaaaggccgataataatagtggccgcgggccgctctagaggctgccctctggagctcctcgtgagcctcttccagcacctcgctggtgggacacagagccctatccccatttcacagtcaggaacacagaggcgccgagctgttttgcatgttttctggggtgatggagacacccgggcatggggaacggctctgagccagctggatgggctgcggcagggctattaatatcggggcggctgtggggagtaggggagaatgtgctgagccgggaaaccccgacaccaccccggctgcaactcaatcccccgggcactcctggcccccgcgccagcgggcggggctccgacgggatgggaggagcctccagggtgggcgggtcaatcactccgcggcgttatccgggctccagcgccgcgggattccgagcgcctccactgctggtccgttggccagatcaactcgccgcgtgggccggccgttccctgagagtctgagcgctcgccgcacccccttccgagcttctattggccgtagcagacgtccgtctgccgctatctccgccccaatacggaagcggcctagtcctccggctccgacagctgggtgtccaggccatg

SEQ ID NO: 7641 - DNA, 2300 bp, Homo sapien
ttctggtttgaactagatgatcttgtaattcccagatgggttcttcctgcctactgcacaaacaaaatcaattcagagaccatagcattgcagaaaagaacgagtttaactgacacaagacctgccatgccacacaggagacagggttattactcaatcagtctcactgaaggcttggaggtcggggtttttcaaagatagtttggtaggcaggcggctaggatatgggtgctactgattgcttgggaatgaaatcatagtagtgtggaaaatggccctcctgcactgagtctgcttctgggtaggggtcacaggactggtggagtcacacgtcagtgtggggccattccatagtcacaaatgcaaaagcctggaagagatagctcaaaagatcagtcttacattccatgatagtgatgttaattacaggagtaactggcaaagttgcaaatcttgtgacttccagaacaatggctggtaatcctttaactatgcctacatcttagtagaattcaggcccctctcatcctcctaacttggtggcctttcattagttttacaagggtggtttagttttcaggaaggcgtattctaatttaaagtataagctaaatttatccaaaagttaccttggcccatgcccaggaatgagtgaagacagccagcctgtgaggctagaaagcaagatgcagtcagccatgtcagatttctcttactgtcataattttgcaaaggcagtttcaatttttttttttttttgagatggagtctcactgtcttaccaggctggagtgcaatggtgcgctctcagctcactgcaacctctgactccctggttcaagcgattctcctgcctcagcctcctgagtagctgggattacaggcacgtgccaccatgcccagctaatttttttgtatttttagtagagacagggtttcaccatgttgtccaggatggtctccatctcctgacctcgtgatccgcccaccttggcctcccaaagtgctgggattacaggcgtgagccactgcgcccggcctaaaaatatttttagtagtgacggggtttcacctcgttggccagactggtctcgaactcctgagctcaggtgatctgcccgcctcggcctcccaaagtgctgggattacaggcgtgagacactgcacccagcccatctgtcgttcttctctctagactgtgagctccaagaacgcagcactattcctgtaatgcatctgtgcatgctttcccttggtagaccctggaacacagcaggtgaatgcttcaagggacagtctcaaccctgtgcaccctgccttagtggctactgaatgcttgcatgattgcatttgaacctcacaacagcctgagacgctgccagcactcaaaaaattacctgccatctcgctgttgagaagaggggcctgaaagaggcgatcaagctgcaaacccaggctcagaagccaactgcctggatttaagtttagctcaattccttaccagatatttggcaagccacttaatatttctctctctctcttttttgagacggagttttgctcttgtcgcctgggctggagtgcaatggcacgatctgagctcactgcaacctctgcctcctgggttcaagtgattctcctggctcagcctcccaagtagctgggattacaggcgcccaccaccacgcccagctcttttttgtatttttagtagacacagggtttcaccacgtgtgccagactggtctcaaactcctgacctcaggtgatccacccgctttggcctcctaaagtgctgggattacagggctgagtcacagagcccggccacgccatttaatctctccaagcctcgtttcctccactgtacgatggggatagcacctacttcagagattgctacgccgaataaaaggagctggcatatcatgcctaacatataacaagcacgtgatagaggtcagtgactagctttagcctcaggccagcagcctcccgctctccctaccctgcgcgccccacgtgcctcctgtaaacaagagaacgcgcaggcgccgcaaaccagcgcccattggtcggcgtgccgtcgccccgctggagggaggactcaggccccgctggccgcgggctcggtacccggtgggtcggtggagcgtctgttgggtccgggccgccggcttcgccctcgccatggcgccctggctgcagctcctgtcgctgctggggctgctcccgggcgcagtggccgcccccgcccagccccgagccgccagctttcaggcctgggggccgccgtcccc

SEQ ID NO: 7642 - DNA, 2300 bp, Homo sapien
cttctagcaatgggggagggtgctgaatctctagggactctctggcaggggccacaatctccacaggaacctcttcttcatgcatttgaaagatgacatgaaggaaatctgtttcatggttggtgaggtacttgaagtagtcatccacagacaaggtggttttccatgagttcatcaaggaggccttgtttgaccacttctcccagcttttggtagcttggagtgatgggagggagggcatcttcttagtattggactgtaaagtgtttgctctctgggagtaaagtccaaccagctcagggttgatgatttgaggctgtttttcttgacgtagaaaggctgaggacaggaaggtcgaccagtctttatctgctgcaggctcaactaggggcccttgatcaaaatgtaagtggtcagaagagacatggctcatcaactccttgtagacctccctggtagtactgccaacaaagttatcaatatccattttttcaatggctttgggatccagttcaccagccagatggttatacagggctccggccccctcaatgtggaaagagtctaagaagtttctatcagagacccgtacggcagccgcctggaccacgacctcatttctaagcttcaaagtaatggtcactggctgtgggtgaagtggaaaggatttggggggctgggggtcccactgcccagaggcttcttcctcctggaggttcctcaacatcttctccagctcctccaggcgatgccctgcagctgggtgacgggtcacaacccccaggagaggaggcaggcctgagtccagtggtgggtagcgagtcccctccaacttcatcttctttatcaactgcttcagatcctcagccacgatgagcccagtcagctctggtttgctctctgtagccaagaccagcggggttaaggggcgagatgggagtggaggaaggcccaactcatctgccagcctccagccctcacgcagggagggcatggattggcctctccggagctcagggcagaaaggcgagggggaagccctgctggtgggggccacaggatagctgggcagcgacaccatctgtgaggaactgatgtcgatttctctcttctttcctatggagggcagccagtggaaaggctttttcctcttcaaccgagggatggacttcaattccttcactggatccatccttcctggctcattgagaaactctggtggacggctgagttggatgaggtagttcaggttgaggttagagcactgcacttgggcgaagccagtgctgtgaggccaggggatagggcacagcttgaacgtcccagcggggcagacagggtgcagcttgtccacatccccagaggcctgctctgccctcagcagggcctggaagtcggcaagcaggccacggtagacgttgggactagtaaggaagagtgtgcagtccctggcgaggctggcggccaaccgggtgagggtggctgattcagtgaagacccccctgggagtcgacatggtcaccagcaggtgcaggtagcgcaagaagagctgctcgctgctcagcagcacgtaggcctcgagccgcttccgcagcttctggttgtttttgtggctcagactaagttcggcgggcggctcccgccagctgcacttcagctcgtccaggatgaccttgatgagacgtagtcgggcctcaggaggcactcccgctgctatcccgctgccggccagcagcttggccacctggctgcacagcgacgccaccgtcagcttcgccagagggaaggactgcagaatccggccctcctgcggggggcgcttctgaggctctggggacgtcgtcctagtggggaagagcgacagcggacgcagcagccggtggtaaaaccgctggagctcaggctcgggcttcgggggctccatcatagagccggcggccgccaccgtccaggaacagaaagccgaggggttactaaggcaaccaggagcccgacggcccgagtgcgcctgcgcggccgccacccggtggctgacgaagcagggccttgcgtgcgcacgcactaggaggaggagttaagggtggctttagaggctcagtccccgcgacgccgcgctggttggtgctcctgcgccggaggagttctgcgtctcggggtggtgactgggtccagaatggcttcggattcggggaaccaggggaccctctgcacggtgagggtcgaggcttcgtgtggagcctcgccgggcagagagcctcggcccctgggatgatcgttaccttgggaagaggagaaggagt

SEQ ID NO: 7643 - DNA, 2300 bp, Homo sapien
attaactcggttactcttcaggacaatcctccagattagcttctattatcatcccccatttaacacagaagaaacagagacacaaaaagtaacatgcatgaagtcttagtgccattaagtggcaaagagggggtttgaactctagagctcatacccctaatcactttacagagtccaccactaccagggtcccagcttcagaagccatcttatctcattccctctcaccattgctctttccacgaagcattctgcgaatgccatccaggcaacgcttgcatgctcatttccacctgagtgcaggggatgtgcctgatacccatgtgaactcttctccctaaaaagccccagtgtctggtccatacctgccgaatgactgggtgaacttgttttttttttttttttttttgagagagggtctcactctgtcacccagcctggagtgcagtggagcgatccaactcactgcagcctccacctcctggactcaagcaatcctcctgctttggcctccccagtagctgggactacaggagtgcaccatgacgcccagctaatttttgtatattttatagaggagggttttcgccatgttgctcaggctgctctcaaactcatggacttgagcaatctacctactttggtgtcccaaagtgctgggattacaggcgtgagccactgagcctggcctggataaacacttaacagaatcaaaggaagccagttcccagagccatgctggtggctctacctttccagatctttctcattgtgccaggtcacctccagaccagctggccttttatttattattattatttttttgagacggagtctcactctgttgcccaggctagagtgcagtggcgcgatctcggctaactgcaagctccgcctcccgggttcacgccattctcctgcctctgcctcccaagtagctgggactacaggcgcccaccaccacgcccggctaattttttgtattttttagtagagacaggatttaactgtgttagccaggatggtctcgatctcctgacctggtgatccacccacctcggcctcccaaagtgctgggattacaggcatgagccaccacacccagtggtatagaaagctacccaggatggtatagggcctgagctgctgtttgctttgtcaagattatgttgtttcccaagcaaaaactgcctgttttcccaggaactccctcagcctagctcctcagtctctggggcacctgaggttcaggacaacaagacaggcagttagaatctgtcagggcaagctggacagctgtactctaggctctgcctccaggtctgtgtgtaactctgagaacatgcctttcactctctggggttcactttctgcatctgtaaaatgggagtagggttcgcctaatagattcgcctggtccctcccagaggcttctggactgtctgcagaaaagtttaccctgttcttacctgccaccccttgcagggatttgcgcaccgcgtccacacagctctgacaggtcatctgcaccgcgaactccaactgcaagggcggcagggaccaaccgatgatcgctggggaagtgccttggtatgactttgtttcaccacctaccctatgaccaccgcaagggtctgggaacaagccccacttaacccctcttcaagcaccttcttcatgatctctcatgaccattccaggaccatgggagtcaccccccaacactcacgcagggcccctgctaccctcgcaccctagtttcatcccatggccccaggccccaacccaagtgcccactccttctcctcttcccaaggtaacgatcatcccaggggccgaggctctctgcccggcgaggctccacacgaagcctcgaccctcaccgtgcagagggtcccctggttccccgaatccgaagccattctggacccagtcaccaccccgagacgcagaactcctccggcgcaggagcaccaaccagcgcggcgtcgcggggactgagcctctaaagccacccttaactcctcctcctagtgcgtgcgcacgcaaggccctgcttcgtcagccaccgggtggcggccgcgcaggcgcactcgggccgtcgggctcctggttgccttagtaacccctcggctttctgttcctggacggtggcggccgccggctctatgatggagcccccgaagcccgagcctgagctccagcggttttaccaccggctgctgcgtccgctgtcgctcttccccactaggacgacgtccccagagcctcagaagcgccccccgcaggagggccggatt

SEQ ID NO: 7644 - DNA, 2300 bp, Homo sapien
tctcggctcactgcaagctccaactcccgggttcacgccattctcctgcctcagcctccctagtagctgggactacaggcccccgccaccatgcccggctaattttttgtattttagtagagacggggtttcaccgtgttagccaggatggtctccatctcctgacctcatgatccgcccgcctcagcctcccaaagtgctgggattacaggcgtgagccacctcgcctggcccaagcacatgccatttcaatggccttgtgctacacaactcccaccctcctattctgctctctgttccaggttctggccatattgggctcttttttttttttttttttggagacagagtcctgctctgttggccaggatggagtgtggtggcgtgatctcagcccactgcaacctccacctcctgggttcaagtgattttaatgcctcagcctcctgagtagctgggattacaggtgccagtcatcatgcatggctaatgttttgttttcaattagcaataattgcgcctcggataaacctcattggctatgatactgccactgcgcaaagctaatgttttgtagttttagtagagacagggttttaccatgttggtcagactggtctcgaactcttgacctcaggtgatccgcccgcctcagcctcccaaagtgctgggattacaggcgtgagccaccgggcctggcccatactggctcttgactcttccttgaaccagatttgcttctgccccagcactctttgacttgtactttctggccggcatgatcttccctcagaggatggcttagttcccttgattactccaagtcctcatcaccatctaacacgcttatgttttacttatttcttgcctgtttctccccaccataagatccaagaaggttgggatttctgtcatttttttttgttcactgctatattcttggtggtgtccacatggtaggtgctatttgttgactgaacacgtaggcaaatatttccctgagtttgtcacatgtctatgtttttgatgttgtctgccatgcaacaatcttatttacatactcaaatctgtttaaaaaaatttttgagacggaatctcactgtcgcccatgctggagtgcagtggcgtgatcttggctcactgcaacctccgccttccgggttcaagtgattctcctgcctcagcctcccaagtagctgggattacaggcgcgcaccaccacacccggctaattttgtatttttagtagagacggggtttcaccattttggccaggctggtcctgaactcctgacctccggtgatctgcttgccttggtctcccaaagtgctggaattacaggcgtgagccaccgctcccggactaaaattttttttaaggctcaacttttgcttcctgcagaattaattttctcgtttattaaactgtttattatgaaaaccttcaacatacaataacgtcattccattatttcttgactgggaattccatcagggcagaggcctttgatttttcaccggctgccaggacctcagcaaccccagggaatgtttccaaagaatcaattaatggcacgagggcttctccggggcctgcctcaggtcccctcgcggtgctcagcacagtcctgggagccgtttgccgactcaaggcgcctgtcctggtttctcccgccaggcccggccttcccccgtacactcacgcggcaacccccaggcgcgggtttggacagggcttccagaatgggaggagccctgacttccaattgtacaaagttttcctgggagcccgccggtcccagccccacccgggccagagaccgccttacagactaggcctctctgccgccggcgccgctcgcgcgcgttctcctctcttcagccctccctcttcttcccaaccccctctcccgccacgggctgtggcggttggtcgtccctttcccaccccctcagctaacgagcgggctctaggccctctgggattggctgtgcctgagcacatcttccctcagcgtttctgattggtcgctggacgcgcgggatgcgagtccccattggctaggccagggcgcctgcgcggcggggttctcggtcgccagccattcctgaggaggactgccggtcgttcggacgtcttgcctgtcgctggaggagaggtccgggctctccaggaaggtggctgcggcgacaaaatgaagatattcgtgggcaacgtcgacggggcggatacgactccggaggagctggcagccctctttgcgccctacggcacggtcatgagctgcgccgtcatgaaa

SEQ ID NO: 7645 - DNA, 2300 bp, Homo sapien
taactagacctagttgggtttcagaggtcaaatcaagtaattaggttttgggctgcatgcagaggtggttagtagttttgatgtccgcacactgggcttgaactgtgatcctgagatttatgttcccagtctccttcaatctggagagattattacttacaatgagttgatccttgttatactttggtattttggaagaaagttttatccccagacatgttgagacaagagatctaactgaaggagatgagaggatttctataccatatgcgttaccttctaatgctggccacctctgaagggcacgtggcagctgagacgaaattgattttcttcatcactgatcccgtggcctttacacaggctcagaggtgcatcagaatccacaatgaagtggacaagattagtgaccaacacatctgtaaatgttatattttctttttttagttccttagctttttctaccctaggataaattattgaccagttttctgcagtcagattcctgaatcatgttgggttttttttttttttagtttcactcttgtcgtccaggccactcttgtcttgcctcactgcaacctctgcctcccgggttcaagcgattctcctgcctcagcctcctgagtagctgggattacaggggcctgccaccacattgggctaatttttgtatttttagtggagatggcgttcaccatgttggctaggctggtcttgaactcctgacctcaggtgatccgcccgcctcggcctcccaaagtgctgggattacaggcgtgggccaccgcacctggccctcgtgttgggttttaaaacccactcttttttttcccccccaaactctgacttcacctttctctttatgaaaccgttctctttttggggcgggggtggtggtgaagaagctgctttggatggtggtgtgtggtacttgtgtcatcttcactcctgatgatccctttcctcataaactctgcactgcttttagcctgttttgttcgtgttataagttcttccatccagtccctgcactccaccttttaacccttttcaaaagctgcttcgcaaagggtcttgactaaagttgcttgcttaatgaatatgaagcagcctaaggatgagagaaaacgaggcagcagctggaccctctggagaatgttactttgtattttgtttacagctggttgtgactaagctctgtcctctaaagtcggttctaggggattaaaacagctctggctgatggcgcccaataaaataaaacaaaaaaacctttgctgctccagttttttctcagggtggggtcggggtatactttaaatctccatggtctcagaaaggtttcttcatcgcggaccctgggaggctggttcccagagggaacttgtcctcagcgtctcctggacagtgcagcctcctgccgggcctacttctggaaggccattacagaggtcctttcaccacctgtgagaggtttgattttgggggagctccgggactctcaaggctacagtgtggactgctggcccaaggagaaggttggtttcctgaagtggtgggtggtgggttggggggggtcttcgttgtttttcttccctggcatgtgcctgcataagctatttccacagcgtcctggccgcgagggggggtggtgcttgggaggttagagggagacacctagagtgaacggcaaaatggagcgcggaatactgtctggctgtgcacgtggaggtggcgaaatgtggaagcttaacgaagttggcgccatgaagctaaagactgctaccccggggctctagctcgctccgcctaatggcgggccgcaccccgccggcgaagcccacgtttgtaggtccgccctcacgctgatctcttgcccaatcagcgagttcggcttcgcgaggttggtgcccattggctttcgcataaaagctccgaggttacagacgtttccacctcttgccggcctcttaggtaattggcgtccgtggtaaccaatcaggaagaggatctgagggaacgccggccttttactttcttgagtggccaatccggttgtaggctcacctcccccttctactcagagcactgctgcggccgccgccattttagcgttttgtcagaagcgtccgcgccgcgaggaggaggccctgctggtttctgtgcgggtgagactccgagcctttccactgcctttcttgtactgtgttaaatcttctctcactcccttgggcttcgggggtgtcctggtaggtccgcagtctccacacccgtcactgagagccgacctcggtcct

SEQ ID NO: 7646 - DNA, 2300 bp, Homo sapien
agcaaatttagcagtgtctcaagaatctggctaacttcctaccacctattactgaagccacagcactaacctaaatccttttttgttgttttggagacagggcctcctgttgcccagaatggagtgcagtggcatgatcacagctcactgcagcctcaacctcctgggctcaagagtctcccacttcagcctcttgagtagctgagattacaggcatgcaccaccatgcccagctgtttttttttttttttttttttgagatgggagtacagtggtgccatctcggctccctgcaacctctgcctcctgggatcaagcaattctcctgcctcagcctcccaagtgctgggactacaggcactcgccaccacgcctggctaatttttgtatttttagtagggacagggtttcgccatgttggccaggctagtctcaaactcctgacctcaggtgatctgcctgcctcggtctcccaaagtgctgagattacaggcgtgagctatcgcgcctggccaactaattttgttgtttttgtttcttttgagatggagtttcgctcttgttgtccaggctggagtgcaatggtgcaatcttggctaactgcaacctctgcctcctgggttcaagtgattctcctgcctcagcctcctgagtagctgggattacaggcgcctgccaccacgcccagctaatttttgtattttagtagagatggggtttcacgatattggtcaggctggtctacctgacctcaggtgatctacccaccttggcctcccaaagtgctgggattacaggcgtgagccatcacgcccagctggccaactgattttttatttttggtagagacagggtttcaacatgttgctcaggctggtcttgaacttcagtgggcttaagtgacctgcccacctcaacctcccaaagtgctaagattacaggtgtaagccaccatgcctgggcttaaatccttccttctatatctaaatttctgacatctattagtttgaactttgtagcttaagaactgggagagaataaaaagacaaacataaaaagatatttaagtgttagaaacatttatttgtcaaaaaatttttttaaaaaagggaggagtggagtaaaacaagggtaaatttcagctaatgctgtaccacgatcacaggtcggacataaaaaacaaacaaaacaacaaaacccccaatggtcctagcaatttcagaagagtaacttaagtgttaagagtccagagctaacagaagagtaaaaggctgcttgccactacatggtcattttaaagggaaaggagatgctgcaggtaggcagggagaaggattcaactcctagggaaagcaagataagaggggttccactgcacaggaaaaaggggatgccagcataatccttacctagggctgctcagaggctgagaatataaggaacagagtgaaaggctacagagactagtttcaggaggaaagaaaagtcaacttagaagaattaagaaagaaaacatagttggtcacaaactccttttgtttactgaaacatgaagcaatggaaacatcccggcaaaggggaccgcgcggagcaagttctcatatatgaccgcagcccgagggttcagtccgcaattatcctacctgaaagagagcacaacacaagaggcttacacaatgcctggagagcagcctggctccgcgtacaagcgccctgggtcctgtcctgtattccggggggaaaaaaaagaacaaaacaaaaccaagtcagactggatctaactcatatcccatgtaattacctaggagtctatcaatagctatatataggaatccacttatggctatatatataggacaagatgcaatctagctgaagaatgtgttggtgataaatacatctttcttatccatcttttaggcaagataacccctgtgacagaaggctactgttgctgtaacaaagggcatacatacattttcaagaactgcaatttaattttggagtccaggaaaagcagaagatgctgagatgtcatatatggcgaattgcactattctaaatgtgttttgttttaatctttcacagtaaacaagctttcagaaatgatggtcacaaggggtaggatatcaaggagcagccagtcattcacccaattccaacacacctacatgtcacactgtcacagagtgagagccacagttccagtagttcccctaattgaccaaatctcccttgccaaatcaaaagaaatcattcctagaattctctaatccttctattgatgatgggaactccag

SEQ ID NO: 7647 - DNA, 2300 bp, Homo sapien
gagaaatttgggcataaacattagataatattaacataggatagtgctattttaaattagcagcacatataagccgggtgcagtggctcacacctgaatcccagcattttgtgagactgtggtggaaacatcttgagcccagaagtttgagaccagcctgggcaacacagtgagacccccatctctacaaaaaaaaaaaatttaaattagctggatggggtggcccacacctgtggtcccagctgctccagaggctaagataggaagatcacttgcgcctgcgaggtcgaggctacagtgagccataatggtgccactgcactctagcctggacaacaaagtgacaccctgactcaaaaataatagtaataatagttaagggccgggcgaggtggctcacgcctgtaatcccaacactttgggatgccaaggccagcggatcgcttgaggtcgggagttcgacaccagcctggccaacacggtgaaaccctgtctctactaaaaatacaaaaattagctggggggtagcgcacgcctgtagtcccagctactcgggaggctgaggcaggaaaatggcttgaacgcaggaggtggaggttgcagtaagccgagatcgcaccactgccctccagcctgggcgacacagtgagactctgtctttaaaaaattaaacaaaaaataaaaataaaataaaattggaaggacagtgcctcttctgaaatggctgagaaacaaaaagaactcaggtaaagaacatatccaagtagctggggtggaagagggcagcctggggaatgtgtcccagatggtatcagagaagccattatggagccactaaaatgaggaatggtggctgacaacctccctggcgggctctactaggagataaacccaatccatcaatctccataaaaggctactctttgctggaaggtgacagtggggaatcagcctaaacttcttttttttttttttttgagaccgagtcttgctctgtcacccaggctggagtgcagtgacgccatctcggctcactgcaacctccgcctcccgggttccaacgattctcctgcctcagcctcccgagtagttgggattacaggcgcccgccaccacgccgggctattttttgtatttttagtagacacggggtttcaccatgttggccaagctggtgtcgaactcctgaactcgtgatccgcccgccttggcctcccaaagtgctgggattataggcgtgagccgccgcacctggcacgcctaagcttgtttttaccgccaggaggtgcccttggaccacagctgaattttgaatgctagacagtcgggaaactcagttgcctagacttccagcttggtgtgtacgaggagaccctgtcccacccagaactagggacctcgctgggcctctccaccaagtattcctctggcgtgctcaccacagaccaggactgtgatggacacacaatgagtgagagagaatcagaccacggatactcacgagcaaacaaaacatgactaagcgtagcctgggtagcaatgcctcttaggcctgtcccagttctgccaggttatctttctgccccttggttctcagtttccgtagcaataaataacacctctgcaatgacaaactttaaaataatgtttaaagcgctacaaaacaatgactagttttgcttaaaatgtggcgcacctgtatttttgaaatgttgccccaagctgccacagaagccggccagcccgctacaaaagcccctttttagggccctcggggagattcctctgtcattagctccccgcccccctcaaagggcccaagagcaggacccattgtggtgagcgactccccaaggcctccgcttttctaggcagtggttgcgttcagagcccctctgacgcagcagtggcgaccctttccagggtggtgactggctggctggggctgggggtgggctgacctccgcggcgccgcgccaccaccaacaggccccgcccccgtgctgcgtggtcatttgtatgcagcctcgggattggtcactcggctcccgcgaggggaaggggagggaagcagcgcgcactcgcgcgtgcgtgagctggcgcgcgagaaagggcccggtcgcgtccaggctcgagcggccgtcgccattttgtaaggttctctctgacgtgggagccgccgtcgctgccgccacccggaggtgcgagggggtcgtgtgtgtgtgatgtggggagctcgggggcgggtcgggccgggcctccggcagactgcacggcccggatttgggtttctcattttg

SEQ ID NO: 7648 - DNA, 2300 bp, Homo sapien
gttcagcttcatggaatcagttaatgatggaagccaggttctgcctttgtgtgcccatgagtctcaccacctacctgagtctcaccacccagcacttctctattctccagacctccttccttccagaacccgagactaccgagactacagccctggtcctaggaagtagggctaggagaaatgcaaaattgggggttttgttaaagttacagacccagtcccctcctcctctcttgaatgctgctgaatgctaaattacacaagaactttggacagtagaggtttttttttttttatccccagcagatattctgaacctcattttttagttttgaggacagagtgtgtttgcgtaagttagagccgtaagtagtgctggtccacatttccccagcctgggccctaggcaggagccacggctgctcatccgtctgggatgagcctctaagacggttgaggaacctgtgtatgttctatgttcaagaggctgcgattaagagcgtgtcccccagagtcagaaagaacttttcaaaacccggcactgtttcttccggctgcgtgaccttgaaccagtaacttaatgtcttttttttttttttttttttttgaggcagaatctcactctctctcgcaggctggagtgcagtggtgcaatctcagctcactgcagcctccacctcctggtttcaagtgattctcctgtctcagcctccccggtagctaggactacagtcgtgtgctaccacgcccagctaattttgtatttttagtagagatggagttttaccatgttggccaggctggtctcaaactcctgacctcaggtgagccacccgccttggcctcctaaaagtgctgggattacaggtgtgagccaatgcccccagccaacttaatgtcttttttttttttttttttttttttgagacagagtctcattctgccgcccaggctggagtgcaatggcgagatctcggctcactgcaagctccgcctcctgggttcacgccattctcctgcctcagcctcccgagtagctgggactacaggcacccaccaccacacccagctaattttttgtattttttagtagagacggggtttcaccgtgttagccagggatggtctcgatctcctgaccttgtgatccgcccgccttggcctcccaaagtgctgggattacaggcgtgagacaccgcgcccagccaacttaatatcttttgtgcagcttcctcatctatgaaatggggacaacagtgggccctcaccccacagggagttatggtgacgtgatgcatgtcaatggcagggatatgtcacagccgacatttattgagtacttactaacattctctgtggcaaaccaaaggaaacaaagcggagagaagcatactgtgtcctcctttgaactcctgggcacttgctaaacagtgtgtcagtcttcctggcgtatcataactttttcttaactcaagagcagaatctaggtctttttttttttctactagtctcgctctaaggtgcgcccaggttcaagcaataatcctgcttcagcctcctgagtagctgggattacaggcgcctgccactacgcccagctaattttttgtatttttagtagagatagggtttcaccatgttggtcaggctggtcttgaacttctgacctcaggtgatccacccacctcggcctcccaaagtgctgtgattacaggcgtgagccaccgcgcccaacaaatctgggtctttttctctcaacttgcctacagggtatagtaggccatcttgggttgatcatgggctcaaaacagtttgtagaaggaaagaatgccactttctagtcattattgcctgtggggccccatatgtgctgcctgcattaccctgggctgcacactgctgtctgaagcactgaagcccatcacccctttcttcaccccgcaaacccgtccctctctggcccgaagtcgttggagcctttcctgaccaccgcattgctctgagctgctgctgccttcctgcttcactttctgtgcttctgatgtattcccgtccccaggcttcccaggtggcttcccctcttcccctgggggctgatttccactgagcagccaaccgcagcctctggccacaaggagagcggagcacaggtagggcaagaagacagaaggccccggtggtgagtggagggcttggtggtccctggacacccctcactggccacattctccttgcaggagcaggaagccgcctaccaccatgagcagcacgctgtcacccacagactttgacagcttgga

SEQ ID NO: 7649 - DNA, 2300 bp, Homo sapien
ctgtctagcagagaggaaagaacatattaggattcagaagacctggagtttctaccatgaactaattctgtgaacttgtacattcacttaggtgtctgaacatcagtctgttcatcaatagaataagaatgagaatgtttatcttacaaggcttcttgaaggattatgaaatgctgaaaataggaaattataaaagatattattttgctaatcataagacttaatacccttgacttctaattgggtcacgatattataggctgtcattgagacccttagttcccgtaaccagtacagcagcagcagcttggtggttccagttcctttggcagggcagctgattctctaatttttttttttttttttggagatggagtctcgttcttgttgcccaggctgaagtgcagtggcacaatctcagctcactgcaacctctgcctcccgggttcaagcgattctcctgcctcagcctcctgagtagctgggatttcatgcccaccaccacgcctggctaatttgtgtatttttagtagagaaggggtttcaccatgttggccaggctggtcttgaactcctgacctcgcgatccacctgcctcggcctcccaaagtgctgggattacaagggtgagccactgcgcctggccatgggcagctgattctcatcccatcagctttaatgtccctgaccaagtgtccctgatgaccgtcatgcacaggttggtgcctccttcccccgaaccaaccaacacataatcctacctctgggaagagttgcagtttatgcccttgtttctttaatgccattgcctgaaagagtggctattaaaaataataaatagcctcaggcctggcacggcagctcacgtctgtaatcccagcactttgggaggctgaggcaggcagatcacctgaggtcaggagttcaagaacagcctggccaacatggcaaaactctgactctactaaagatacaaaaattagtcgggcatggtggcatgcacctgtaatcccagctactcgggaggctgaggcaggaaaattgcttgaacccgggaagaggaggttgcagtgagccgagatcaagccactgtactccagcctgggtgacagagcacgactccgtctcaaaataataataataataaatagcctcaaatgcagctaactgtgaggtacacaccagagagccagttccagtttcgtggtagaagcacagatatcagagctaggagagaacttcaaagtaatctttcaatggaactccccaaccctcctcccaacccattttatagactaggaaaaccaaggcgaggtagatgacaccactagttagggttgtcaaaaccatatctggaaagtacttcaattgcacatatttgtttcagtatgcataccttttcagaaaggagcaaaatcctaaattacccataaatctattataaaaccttaaatccaataattcactcaaagcccattctttgagtgcccttacttgaccatttcaggcattccctggatagaaacgggccctcatcttcaggggcagtacataacctaacggctctgtacaaagctcaccctgttaccactggctcatctctgagctgagttctctaatctggaagaacagcacctacttctcagagctggagtgggggtgggagtgtcacatgagatgatgcgcttttagcacccacctggcactctgtgagtttgtcatgatttgggcataattccttcctctcctaagcaggcagcagttcaccttggttaaggaccttggaccttagaccactcagacgctaacaaaccaaggagaaacccagccgtgtcaggcctagaaatgtctgcccccacccccacccccctcaagacggtgactaggccggaattctcctggttgataaatgagaggagctgagaagcgctgagatgcctgtttggagcatctgatctgtagaagacgaatcttcactgtgccatggagatgttctgggagggagagccggcccagctgcctgaaggaggacgcgagagcgaggggacgggtgagaggaatgcttagcggagacggactggaggtgcccggagaggaaaggggaacggaggctggatctcgggaaacctcgtcggcagtgtcattagaggaaggatcgcgtgtctcggggatacggattttggaggaaaagcagaatagggacaaaggtgaggtgtccgaaccggggagatcaagacctgtaagctgtggtgggggacccagggaccagcgaggacgggaaggcggggttttggggggac

SEQ ID NO: 7650 - DNA, 2300 bp, Homo sapien
gtctcactctgtcagccgggctagagtgcagtggtgtgatgtcagctcactgcaacctccacctcccgggttcaagcaattctcctgcctcagcctcccaggtagctgggactacaggcacatgccaacacgcctggctaatttttgtatttttagtagaggtggggtttcaccatgttggctgggctggtctcgaactcctgacctcaaatgatccacccacctgggcctcccaaagtgttgggattacaggcgtgagccactgcgcccggccacgatgggaaatattttaaagaaccatcctcaataccttggtttctcacccataaaatagtgacgataacaattttcttacaagatagttgagaggatgacatcatttatgtaaagagctagtggggtccgacaacaagcagtcattcaatgttactggtcccttccccttggcaactcctcttctgaaaaaggacaagagactgggggtggggatggggagctctgcggggggtgtggggggaatgaaaggaagactccaatgattcctcaaatgccagctgtttatcaagtttgatggttacgatggattttccagaaataaaagctaccttgctccaataggtctacctgtgagcaactgagatggggaggaatggggaggagcgctgagcatagactcgagaagggtatgattcaggtctcgatagacaatgttctttggagtagcaccaaggttgtgtactgggcaggcactctgccagctcgccagcctgttctgtccaatcctggcgtcttggagctggggtggaagaatttttcctgaaggaaagcagccaacaccctgtcccacccttctccttgggcaactctttgccaggcaggaatctctcatcagggttttcttttggctgtcagatcaccagcagttataggcttaagcccctgtcaccatgcccctcccggaacctggcagagagcagcagctgggactctgcaggacctccttattccagccaggaatgcacttggaaaaccccagagcttctcctgtcagccagagcccagaaaagccagctcctggtcttggcacattcagtgcagtcaaacgtggaaaggggcctggatagggaggggtcgactcccaggtcccacctttgcgggggaagctggtccccctggattaggctgggagatgcttggggctggttgtaaggtaaaagacggggggtcgttttttctttttttgagacagagtttcgctctttttgcccaggttggagtgcaatgacgcgatctcggctcactgcaacctccgcctcccaggttcaagcaattatcctgcctcagcctcccgagtagctgggattacaggcgcccgccaccacgcccggctaatttttgtattttcagtagagacggggtttcaccatgttggccaggctggtctcgaactcctgacctcaggtgatccactcgcttcggcctccaaaagtgctgggatgacgggcgtgagccactgcgcccggcccagggcgtcgtttttaatttcagattagtaattttttagtatatgtcccaaaaattgccgagatatgtgtatggttataaaaaaaattcgctgtctatatgaaattcaattttaattggccgtctttttctttgctaagtctgggacccagggcttggcctggggcagcccccgccgcagacaaggctgttggaggggtcacgaacccgcttggtagccccgcgccgttaccgtcgcccctcccggccgagggaagggtcctggaaagcgcgaagggcggccaaagcccggattagggccaagggccgcatctcgccgccaccgtgggaaactatctttgagaggagggaggagtcgtggcctggcctcattcccgctcacctccagccttggccgcctctcgcgggctcttccccgccccgaacctcccacctgcgggcccactggcacccgcggcgctcagaggctctaggtggctcccggcggcggttcgcggtctcggggccctgcagcgtcgagtgcgcaggcgcggcgggcaggtgggcggggcgtgcgcgggcgcaggcgcgcgcgcgggaagggatgggctcgcgctgccgggcgtgggcgtggactcgggcgtgggcactggcggagttccaagcccgggctgaggagggggcggcggcggcggcggcggcggcgggcgggtacccttcgactgggcgttgccgctgttccctgcgcggcatggaggggacggccgtggccgtgttcgaggtgatgctgggaaggg

SEQ ID NO: 7651 - DNA, 2300 bp, Homo sapien
aataatgggagttggccgggcgcggtgggtagcctgtattctcagcactttgggagaccgaggcgggcagatcacttgagatcaggagttcaagaccagcctggctaacatgaggaaactccgtctctgaaaaaaatacaaaaattagcggtggctcacgcctgtaatcccagcactttgggaggccgaggcaggcggatcacctgaggtcgggagttcaagaccagcctgatcaaaatggagaaactccgtcactactaaaaatacaaaattagccaggtgtggtggcacatgcctgtaatcctagctacttgtggggctgaggcaggagaatcgcttgaacccagggggcggaggttgcagtgagctgaggtcgcaccattgcactccagcctgggctacaagagcaaaactccatctcaaaaaaaaaaaattagcagggtgtggtggcaggcggctgcacttccagctacctgggaggctgaggtgggaggatcacctgagcccgggaggttgaggctgcagtgaaccatgatgatgccatcactgcactccagcctgggagtcagagtgagactctgtcccctctctccccccaaaaataaatgaaatatattttattttcaatttgtctcgaataaatgtgtttttttttttctttttgaaacggagtgttgctgttgcccaggctggagcgcagtgacccaatcttggctcactgtggcctccacctcccgagttcaagcaattctcctgcctcagcctcctaagtagctggggctacaggcacacaccaccacacccggctaatttttgtatttttagtagagatggggtttcaccatattggccaggctgatcttgaactcctgacctcaggtgatccaccgcctcaacctcccgaagtgctgggattacaggtgtgagctaccacacccggtcgattaaatgttttacccagacatcttggagtcctgttcaacttaaaatattgtgtgtagtctttactgcattagaacttagaaataatagctaatatctgttaagcatttgctatttgccaagtactgtgttaagcattttgcacatatttttatttaatttttttttttttttagtagagatggggcctcactatgtttccagggctcaagcgattctcccaccttggcctcccaaagtgctgggattacaggcatgagccactgcgctcagcgttgcacgtaccttatttgtttactttcagcagcagccctatgtggtagttttatccccattttaatagatgaggagtctgtggtttggagagattaagtaatttgcccaaggtcacatgctagaatttggcacatcagggattcaaatccaggtgtggagtgcagtggcctgatcagggctcacttcagcctcaatcttatgggctcaagagatcatcctgcctcagcctccccagtggctgagactacaggcacacgccaccacgctgggctaatttttgttgttgttagtagagataaggtctgcgtatgttgtccaggctgatctcaaactgttgagctcaagtgatcctctcacctcggcctcccaaagtgctgggattgcaggcataagctaccgcgcagggcagcattagcactcttaaatagtattctgaccctcaaaagtgttgatttaatgaaagatcaagatgattcataaccagatgccactcttattcatagtcttcatgttggcttttatttggggcaggaaaaaagaaacaagaaaaacaaactcccacttaatttttccctaattattatttccagatgaatttatcttctgaataaaggaatttattgtctcaatttcctgtcttactgggcattatgttgaatttcactgactcttttcttatgtcactctcctagctatttattttgtttagacacaatactctgaacaaacctaaatctgacattttagaagcaagaatacaatttttggggggaaattagagttactaatttaactgggtcatagagatgtattattactgtgatttctaaagaagattatgttttctttgaattgtgctcttttcagattttgagatttttaataattcactggaagtgtgacatagatgtatcaaagggagcattgctagaagggcagctagtgatttccatagaaggattaaattctaagcaccaggcaaatgctcttcattgtgtaacaactagtaagtagagaaagaaaaaatattttctatctcttttgtcatggtttatgtcgtagcttatttaaaaatttcaatt

SEQ ID NO: 7652 - DNA, 2300 bp, Homo sapien
ttcaccatgttggccaagctggtctcaatctcctgacctcgtgatctgcccgcctcggccccccaaagtgctgggattacaggcatgagccaccgcgcccggccaagaggcctctcccacatccaggcgctcacaaaggcctatcacttaggcctgatgaacacttctgattcctggtgacgcctctatctccactgtctttacttgttattgggctcttaaggtcttcctgtctctagtttgatctaagccacacctttgaaagaacgatctttctgaagtacaaaattaccaatatatttcaccagtgcttaaaactctttattggcttcctgtcttctacagatgaaaatctgtttctagccaggcaaggtggtgtgtgcctttagtcccagttactcgagaggatgaggccgggagttcaaagctgcagtgagctacaatcacgccactgcactccagcctaggtgacaggcgagacctcatctttaaaaagtaaaaatttacataggaagttgttttatgcctttgcataaggtttgtgttaactttcagcaagaaattccctttctctcccttgtctggcatatcactcttcatccttcaaaacccagctctggggcaggagtggtgacttatgcctgtaataccgtcactttggggagctggggcgggaggacagcttgagactagcctgggcaacacggtgagacccctgtctctacaagtaaaaaaaattagccggtgtggtggcatgcgcctgtggttcctggtactctggaagctgaagctgaggcagtaggatcgcttgagcccaggaggtcgaggctgcagtgagccaggactgagccactgcactccagcctgggcaacagagcaagaccttgtctcaaaaaaacaaaaggtcagctcaggtatctcctcatggaaacccttcttcacatccagaggtggtcggcttccttctctattctaaccctgggctttgtacacaggtctgcatcccctcctagcatctgtgagcttctctcagggaaaagctcattgatctgcatccccaagacctgctggggaagaatctatccatctaaactcgctttaatttgacaaatgaatcagttaagagtaggaaagctgcctatgggcactgctcaatgcaacgtgagcaacaaagggagacagaactgaggccagaaaggtgaggggggacagaggctggcagggaggggagcttgtcagtgcagactccaggaagaatctatacagaaagttactgagcggcctgagtcccccaagtgagggctcgggacaatctcccgcctgggtgagagaatagggagaccctgaaacgtctctgcagcctcgggctgctccagaagcgcccacagctgcagggttttggtgtggatgggacctgctgacagggatgcggtgggaagagcccctcggcgcccgttctcccaggcttccccttggccaagggtgctcctagcacagggccatgaaagtaagatgaagaggcttgtttttctcctagataccagcgggcaagcagaaaacaagaggctcaagaggggcagcccccgcatagaggagatgcgagctctgcgctctgccagggccccgagcccgtcagaggccgccccgcgccgcccggaagccaccgcggcccccctcactcctagaggaagggagcaccgcgaggctcacggcagggccctggcgccgggcagggcgagcctcggaagccgcctggaggtaactgggcgagggccgcgcagggaagggctcagcaggaggtgcaggccacgggccgctgctgagaggtcctcaccccgggcccccttgttcccgcaggacgtgctgtggctgcaggaggtctccaacctgtcagagtggctgagtcccagccctgggccctgagccgggtccccttccgcaagcgcccaccgatccggaggctgcgggcagccgttatcccgtggtttaataaagctgccgcgcgctcaccaagtcctcttccgcgtctgcttccgcgtcgggcccgggcggggcggggcggggcgtggagccgcgccgcggcctgacgtcacccacacctccctgggactgcgtcactggtgcgcgccgcgggtcagggcgcaatggcggcgctgggcggggatgggctgcgactgctgtcggtgtcgcggccggagcggccgcccgagtcggcggcgctgggcggcctgggccccgggctgtgctgctgggtgtcagtgttctcctgcctcagcctcgcctgctcctacgtgggcagc

SEQ ID NO: 7653 - DNA, 2300 bp, Homo sapien
gatgctcacctttccagcaggccgctgaggaacctgcacgggcagggctgagcgcagacccacactgttgctgggacccttgtgttcacagacacacgctgaaggtcataaccgttctgcatcaccgagtcatgtggagggtccccactgagtctcccctttgtgactgtcgggttgcccatcctctcctccatactgtaagctctatgggggcaggaaccaggcccatctggttcctgatgaacccggctcccagcactgggtggccatggtggatgctggtaaacatctatatttagagtgaatgaaaactttttttttgagacaaagtgtgtcgcccaggctggaattcagtggcacaatctcagctcactgcaacctgtggctccctggttaatgcgattctcgtgcctcatcccaacagacatgcggtaccacgcccggctaatttttgtatttttaatagagatggggtttcgccatgtttgccaggctggtctggaactcctggcctcaagtgatccacccgcctcggcctcccaaactgctgggattacaggcatgaaccactgcacccggtggaaaacatttttgatggggagaagaggaacaaagacatagctggtgccactgcacatcagagttgacctgcaccaggactgaatccccctcattttacaaacgccacagctgaggcccagtgagtggtgacagaatggcttctggctgcctgtaagcccctcacaagctgcagctgtcctcccctctcgcccctaggaaatgcttatgtatgtaccatccaactctcctggcctacaggaggaacttgttttcagtggtcaggtaacgtgcccaggactacactgctgtgctgacaggatcagaattccaatcttgggtttccccgagtttcctgccacctggcccatggggatcagggctggagggagaacgaggatggctgaggtttaggtggcttaaggaccaggagacacggggaggtggtgacttcctgtttcccaactgggcagaccactggtggtggcgggcacagctggaaggaaaccaggctcgccgagccaccgaagccccagctttctcaaccaggaagcaaagaacctcccccacctcacgccgggagccctttctctgagaggagctggttccgagccgctcttccagggaaatggcccggcggcgacagagcgggagggaggggccgcaggcgctgcgaggacgcacagcttcccaatgcgtgcccccggcggttgggaagccgcgccgcgcagaccaatccggcccgaggcggaggccggttggctccggaacgcctggcccgcggggcgggcggggcagctggggagggagggagaggcgagaggcagctggggacagggcggggcggcgggggcggggcgcctgcccggaggccaagccctctcggccccaccccgcagcagccctgccaggggcgccgccccagccccccccacggccgaaccccgtgccggttggggaccctccacgtgactcggtgatgcagaacggttatgaccttcagcgtgtgtctgtgaacgcaagggtcccagcaacagtgcgggtttgcgctcggccctgcccgtgggtgcagggacgtgtgggtgtgtgggcatgtgtgggtgtgttggggagggtgcccagcgacatgtgacaaagacgcccgtctccgggagatggtgaaggggcccgcgagcaggcgctttgtctggctgtctgcagagtgaggttcgcgccgcggcggcgggcgcccgtgcggtgcaggatgccggggcgccaggatggccgggggcgcgcgcgcctgtgccagggtgagtgcgctgcggcagcgccgggggacagcgcggagggcccgcgccggcccgggcctcgggcgtgactgggcgccacccgtgggcgctgcagcggccgcgtgtccccgtgacctcaggagccggcccgggcccgggtggatccccgcgcgcccctccccgtccgccctccacgtgcgtgtccgcggcgcgcgcgcccgccggcgcgcacccgctcgcctgtcgccgccgccaccgctaaccgcgccgggaaaaggtgccgggaaccgagcgagccggggccgcgggcccgagcgccatgggcccgagggtgggcggcgggcggccggtcatccccgggcctcgtccccgcgggagagcggccaggagtcggcgggggccggccgggctcgcagggaggccggcccgcgccccctgagcgacggacaccaggtgagggggccgccgggcgca

SEQ ID NO: 7654 - DNA, 2300 bp, Homo sapien
agaacgaggatggctgaggtttaggtggcttaaggaccaggagacacggggaggtggtgacttcctgtttcccaactgggcagaccactggtggtggcgggcacagctggaaggaaaccaggctcgccgagccaccgaagccccagctttctcaaccaggaagcaaagaacctcccccacctcacgccgggagccctttctctgagaggagctggttccgagccgctcttccagggaaatggcccggcggcgacagagcgggagggaggggccgcaggcgctgcgaggacgcacagcttcccaatgcgtgcccccggcggttgggaagccgcgccgcgcagaccaatccggcccgaggcggaggccggttggctccggaacgcctggcccgcggggcgggcggggcagctggggagggagggagaggcgagaggcagctggggacagggcggggcggcgggggcggggcgcctgcccggaggccaagccctctcggccccaccccgcagcagccctgccaggggcgccgccccagccccccccacggccgaaccccgtgccggttggggaccctccacgtgactcggtgatgcagaacggttatgaccttcagcgtgtgtctgtgaacgcaagggtcccagcaacagtgcgggtttgcgctcggccctgcccgtgggtgcagggacgtgtgggtgtgtgggcatgtgtgggtgtgttggggagggtgcccagcgacatgtgacaaagacgcccgtctccgggagatggtgaaggggcccgcgagcaggcgctttgtctggctgtctgcagagtgaggttcgcgccgcggcggcgggcgcccgtgcggtgcaggatgccggggcgccaggatggccgggggcgcgcgcgcctgtgccagggtgagtgcgctgcggcagcgccgggggacagcgcggagggcccgcgccggcccgggcctcgggcgtgactgggcgccacccgtgggcgctgcagcggccgcgtgtccccgtgacctcaggagccggcccgggcccgggtggatccccgcgcgcccctccccgtccgccctccacgtgcgtgtccgcggcgcgcgcgcccgccggcgcgcacccgctcgcctgtcgccgccgccaccgctaaccgcgccgggaaaaggtgccgggaaccgagcgagccggggccgcgggcccgagcgccatgggcccgagggtgggcggcgggcggccggtcatccccgggcctcgtccccgcgggagagcggccaggagtcggcgggggccggccgggctcgcagggaggccggcccgcgccccctgagcgacggacaccaggtgagggggccgccgggcgcagcgcgggggccggccagggaggggccacggactccacgggaggttcggggggcgccttctctggcgggggagggtatggcggggagtggggaggcggctggcgattcctggggacgcctgggaaaggaagttccgggaccctccctgctctcggtcctcctccgcttcctgcctcatgcctcaccttgtccccagcgcctggactcccccttaactgcttgggaaatgtgacctttgctctggggggcctggccctgcaggccccaaccttccctcatctctggcggccctcttgggcctctgacccagcccctccccgggccaggctcacagaagctggcttctgggactgtcctgggcccaagtgggcacctgcgccagccccacctgtgcctgggctgtggccccttcctacagggcgctcaccatggccccgccgctcctgctgctgctgctggccagtggagcggccgcctgcccgctgccctgcgtctgccagaacctgtccgagtcgctcagcaccctctgtgcccaccgaggcctgctgtttgtgccgcccaacgtggaccggcgcacagtggagctgcggctggctgacaacttcatccaggccctggggccccctgacttccgcaacatgacgggactggtggacctgacactgtctcgcaatgccatcacccgcattggggcccgcgcctttggggacctcgagagcctgcgttccctccaccttgacggcaacaggctggtggagctgggcaccgggagcctccggggccccgtcaatctgcagcacctcatcctcagcggcaaccagctgggccgcatcgcgccgggagccttcgacgacttcctagagagcctggaggacctggacctgtcctacaacaacctccggcaggtgccctgggccggcatcggcgccatgcctgccctgcacaccct

SEQ ID NO: 7655 - DNA, 2300 bp, Homo sapien
aacggttatgaccttcagcgtgtgtctgtgaacgcaagggtcccagcaacagtgcgggtttgcgctcggccctgcccgtgggtgcagggacgtgtgggtgtgtgggcatgtgtgggtgtgttggggagggtgcccagcgacatgtgacaaagacgcccgtctccgggagatggtgaaggggcccgcgagcaggcgctttgtctggctgtctgcagagtgaggttcgcgccgcggcggcgggcgcccgtgcggtgcaggatgccggggcgccaggatggccgggggcgcgcgcgcctgtgccagggtgagtgcgctgcggcagcgccgggggacagcgcggagggcccgcgccggcccgggcctcgggcgtgactgggcgccacccgtgggcgctgcagcggccgcgtgtccccgtgacctcaggagccggcccgggcccgggtggatccccgcgcgcccctccccgtccgccctccacgtgcgtgtccgcggcgcgcgcgcccgccggcgcgcacccgctcgcctgtcgccgccgccaccgctaaccgcgccgggaaaaggtgccgggaaccgagcgagccggggccgcgggcccgagcgccatgggcccgagggtgggcggcgggcggccggtcatccccgggcctcgtccccgcgggagagcggccaggagtcggcgggggccggccgggctcgcagggaggccggcccgcgccccctgagcgacggacaccaggtgagggggccgccgggcgcagcgcgggggccggccagggaggggccacggactccacgggaggttcggggggcgccttctctggcgggggagggtatggcggggagtggggaggcggctggcgattcctggggacgcctgggaaaggaagttccgggaccctccctgctctcggtcctcctccgcttcctgcctcatgcctcaccttgtccccagcgcctggactcccccttaactgcttgggaaatgtgacctttgctctggggggcctggccctgcaggccccaaccttccctcatctctggcggccctcttgggcctctgacccagcccctccccgggccaggctcacagaagctggcttctgggactgtcctgggcccaagtgggcacctgcgccagccccacctgtgcctgggctgtggccccttcctacagggcgctcaccatggccccgccgctcctgctgctgctgctggccagtggagcggccgcctgcccgctgccctgcgtctgccagaacctgtccgagtcgctcagcaccctctgtgcccaccgaggcctgctgtttgtgccgcccaacgtggaccggcgcacagtggagctgcggctggctgacaacttcatccaggccctggggccccctgacttccgcaacatgacgggactggtggacctgacactgtctcgcaatgccatcacccgcattggggcccgcgcctttggggacctcgagagcctgcgttccctccaccttgacggcaacaggctggtggagctgggcaccgggagcctccggggccccgtcaatctgcagcacctcatcctcagcggcaaccagctgggccgcatcgcgccgggagccttcgacgacttcctagagagcctggaggacctggacctgtcctacaacaacctccggcaggtgccctgggccggcatcggcgccatgcctgccctgcacaccctcaacctggaccataaccttattgacgcactgcccccaggcgccttcgcccagctcggtcagctctcccgcctggacctcacctccaaccgcctggccacgctggctccggacccgcttttctctcgtgggcgtgatgcagaggcctctcccgcccccctggtgctgagctttagcgggaaccccctgcactgcaactgtgagctgctgtggctgcggcggctggcgcggccggacgacctggaaacgtgcgcctccccgcccggcctggccggccgctacttctgggcagtgcccgagggcgagttctcctgtgagccgcccctcattgcccgccacacgcagcgcctctgggtgctggaaggccagcgggccacgctgcggtgccgggccctgggtgaccccgcgcctaccatgcactgggtcggtcctgacgaccggttggttggcaactcctcccgagcccgggctttccccaacgggaccttagagattggggtgaccggcgctggggacgctgggggctacacctgcatcgccaccaaccctgctggtgaggccacagcccgagtagaactgcgggtgctggccttgccc

SEQ ID NO: 7656 - DNA, 2300 bp, Homo sapien
gggtattttacaattgcatggaaggttaattgttgaatttttcaacaccgggctttctgtgtaaattgaagacagcatggatcatgctgtgttgctctgccgcagtgagtggtcaggcccctgcgtccccttctgctcatacccggtgttccagccataccaaactgcatggtttgtgaccatacaatggcccgtgtcctggccacaccactctcttcccttttcccttcccgccggtcctctgtcactcaccttgtctgtgagtctcaactcccatggtttcctgatacctgagtcccctcctcccatcactagttcagcactggcatttgcttcctttggctcccaccacacttggtttctcctctttgtttacgtgtctagtgccttccctgacgtgagctcctggagggcagggactgtgtcttcttgtccgctccggctccccagtgctgatggagactcaggcaggctgcgctggaccaaataggacacgtggtggtgatgacatttttggtccaatccagtagcagcctgtgaagtgctcattgcaggcagagctgagtaagctgtgaccccactctcaggcagcttctcttcgggggggagcggcagggacacctgttccgaagatcatgtcctgcatgatctctgtgtgctgaggaatgaagcatgagtggagatggctggggtccatgacgagtatgaccttgggcaagtcactgtgaatggcactcctgggtgaggcttaggctgagtgcaggctccatgcagatacttcctccagctctggccccacaccagcagcacaccagccagaaggcaaatctcaaggcgagtacgggagttggtggcacctctctgcctccagctgtggaagaggcacccggtgcctgtctgggtgctaggataaggacaagaattgtcacaaccagcagctgtagcactggacacggggaacagggactttctgccatttcccactttggcattccagctgatcctctactctttattcccagatagggcccctggtttgagtctcattctgagctcaccttccgggtagcccccttccttcatgggctggaagggaagcagaaagctgcttattgtcatcttgggaaaagatagagaagaggcggaaacagaggtgccagtgctggtcaggatcctggacctgaaggaatgtgcaggatccctccaccctgacttttcagttaacgcgtgttctcggggacatcggggtgttcagacctctgcctggcttggatcagggcgcacttacgttcccgtagcaggctcagcctacccgctctcttcagatgccagcttctgtcacacagtgagcgcgccgaaccatgcaagacctccgaccaattagcctcgggttcgggaggccaagcaaaagatctaacagtgagctattgactgtgcctcctccaaggagctggtcagagctcagcctggtgttttgcttccttgcgatggtggggtggtacccagtaggtgggaactctgttctggcttcttactggggtgccctttaggataacactttgttaaatgaactgagctgggtggtttcatagtatgttcaagcatgtgaacatctgcttgctgataaatcgtactgggtcaccagctcacactaatcaccaggtaacatgtgccctggtgagggatccagtcttctggccctgtggggagacaggcccatgatgtcaccagttcccaggtggacaacccaaggcatagtgaggtctcggcaggaaggaggaagacattagactccttcttttttcttctccccattgaatcttctgctcctttccttaggccagatgccctgtctctctcctggctggctttcccagccctggccctggccctcccttctttgtgaaactcgaacaccactgccctttcatctttccaccagaacttgtgagcagtggcttttgaccgccgctcttccagctcacccctgacctagtgtttgtttttttatccttccctcagtctactcaaggcccacccctaagccagagattggctcccaagcagcctctctctcctgggagcggtaaaggaggggacagttctggaaagtcattgacaggggattaacctagaacatcaattataaacaggcagcaggcctcaggcccagacttgggtgttacaggaacagtgtggcctctctggaactctgcagaccaactgccgtggtaagagaaccgactttcagaggcctctaggcactttgtcctgggtaggggtgcccacacatcctggcc

SEQ ID NO: 7657 - DNA, 2300 bp, Homo sapien
gagttcaagcgattctcctgcctcagcatcctgagtagctgggattacaggcgcatgccaccacacctggctattttttgtatttttagtagagatggggtttcaccatgttggccaggctggtcttgaactcctgacctcaggtgatccgcccacctcgacctcccaaagtgctgggattataggcatgagccatcatgcctggccagttacagaggtttcaagcaattagaactggaagaggaaggctgaggaaggtggaaggagaatgtgggggaaacagcttcactgttgggtgtaagaaacttgattggtcactgggaagaggcctctacaggagatgtaaccaggtgagggcactaggatttgctaaggtgcaggtaagtcagtgactggaaaccaaactgaggaagcaagattagatgcaaaggtagacggggctgggcgcggtgctcatgcctgtaatcccagcactttgggaggccgaggcgggtggatcacctgaggtcaggagttcgagaccagcctggccaacatggtgaaaccccttctctgctaaaaatacaaaaactagccaggcctggtggcgggcacctgtaatcccagctactcaggaggctgaggcaggagaattgcttgaacctgggagttgaaggttgcagtaagctgagatcacgcccctgcactccagcctgggcgacagcatgaaactccctgtcaaaaaaaaagaaaaaaaaaagcccaaaaggcagacagggctctgagggcccagctgcaggcctgagctgcagattgtgtcccatggtgttctggtaagctccctgaaagcagccgtcatttgtttactaatggctccttcaccctgctgtgccctgctcttagggaaggggctttgttcactacagttgctcagtatctgctttttgaattaattaggctgtcatccaaagtttcctcagtttaccccaatgtaccctcatgtgtcataacgccttctgtctttctactgaagcccgctgcagcctggctgactcggttccctgtgccagtcctcacctccaagatctcccctagaaggttgtccctggtagcccacagtaggtcccccaggcccttttcccttttttgtcctgctccttgctttcacccggtctcacttccagtgccccaggcactgtgataggtacctgtcctcccaccaccactcatgggggctctgggaccagtggcagggcaggacctcagattcactactcttatcccaagccacagttccctgtgtccctcttccctctgtcctctcagtacctaatagtgccaggaacaagtaggtgcctaatgagtgttttgggtgaattagttgaaaaggggtcaaactgggaaccagtgaggagagaagggtgcaagatggggaatacggaaaggagttacttttggaggtggcagggatggccagcaccaaggtcagtatggcagtaaatctggcaatccacatttctcactggcaccttctgcatgggctggaggcctcgttcaggtcaacgttttctgtgtttttttttttttggagacggagtcttgttttgttgcccaggctgcagtacagtggcaccatcttggctcactgcagcctctgcctcccggattcaagtgattctcctgcctcagcctcctgagtagctgggattacaggcaccaaccctttgcctggctaatttttgtatctttagtagagatggggtttcactatgttgggcaggctggtctcgaactcctgacttcaggtgatcacctgccttggcctcccaaagtgctgggattacaggcgtgagccactgcacccggcctctggtcaacattttcattgaggatgagcatggccttctctttggctgcctcccaatatcgtcctgcccccatctgaatgggccccgtttcttgtatcctgaaagttcctgctttggggcaggtttctcacccagaggcctccttcacagcagcagggcattttgcctgctcactctgaaacctcacctgggcctgactgaccgtgccttcctctctttctcttagctgccttctagtctcacctgtggacactttgccaaaggagtcgggcctgacggtggaagatgggaaatggccaaaagaataaaccatttcctcttacttaccgaatgaaaagcttgcttcatcttggcgttcaagactctctaatatgattccacctgttgggctctttcttccatttgcctccgcaggtaccctcttctgtgtcagcccccatagtgagattagtc

SEQ ID NO: 7658 - DNA, 2300 bp, Homo sapien
acccaaggttggagttcttcaggacgggtagaaggaatgacagggaagttggagtgagaaactacttatacaagaagtctgagagaagagtcagatctctccaggctcaataaacaatttctagttagcaagatgttctcatagtctttgattctcctttttggaagcaggttattttttctctttgcccttatcaccatctgatgtactatgtattaatctgggccgggcgcggtggctcacgcctataatcccagcactttgggaggccgaggcgggtggatcatgaggtcaggagatcgagaccatcctggctaacaaggtgaaaccccgtctctactaaaaatacaaaaaattagccgggcgcggtggcgggcgcctgtagtcccagctactcaggaggctgaggcaggagaatggcgtgaacccgggaagcggagcttgcagtgagccgagattgcgccactgcagtccgcagtccggcctgggcgacagagcgagactccgtctcaaaaaaaaaaaaaaaaaaatatatatatatatatatatattaatctgtctgctctcctttgaaggcaggattttggtttgtttggtcactcccttatcccctggttggcacagaccccagtttacgcagcggtgaatgaaagtaaaaatctcgggacccccccccagcgccccaattcatgcgaaagtgaagattaagccttgaagctgagtcactgcaacaccctcttccaaaagaatagctgttactagcattaggcatcagccatatccacacggaaaggtaaaaacctcaggcatttgggaagggctgcccccacagatcattcacaagtaaattcttgctggcctcccataaacaaggacaggtcaattgtagcttcaggtctacaatctaagtctagctcctaaaaattccacaataagaatgtcattacaagcttattttcccaggtgcagaacaaagtcaaaactacctactcagagacatctgcataactgactcttcctttactctctttttctcttcagacattcatctcatcttacgtagatttaccgggcattagctaaagtcccataggaatgtaactattgtcctaatcgcctacttgcccttcttcctacatgccttcccctcattccccctttaaggaaatgcataaatactaaacctcccgaaaacctcttcggaaaaacaaccacggatgtgtctgtggttcgtgtttttcccgagcacgccctcaaactggattaataagcctcgatgacagagacttatgcctcagtcacttgttccacttgtcaaagctttcctctttgacaagtgtcttgggtcttgtcaagtgtcttgtgtctcaaacaaggcttccaaaccccctaggtcctgagtagcttcgctctgcagatgacaaaaccgagactcagaggttaagttgcttgcccaaggtcacacagacgtactgtagacccccatcatcatctacgcagctgttaaaggacatagtcatgtaacccgtgtggcacaagcgccttctccttcctcctgcccttcgctaacgttagcttttcctgcgacctcttctccgctagccagcgcgtatctgcgtctagccgggatgcctgagccccagtgcgaactgttgtgcttgcagcttcgggagacacgtgctactcgggtgaatgaatcgaacgtccccacccccgccgacagccaataactgcgagccacagcccggccacttccgcctattgcgggcgtcggctagggtccggcggcccacgtgaggctccggagacaagggagtaggcggtggtgcgccaggggcgggctctcccagcctcgccacttatccaggcgctcgccggggacgggaggggcggggctgacgtggggcgccaaggcttaaacgtgacggacaggcgggcacagggaggagtccagagcctaggggcgaggagtgacggagaacactgcccaataacgggaggggttgggctgtctgggccaataggaagtccgtaaggcggggccgggactgcagcaagttcggttgcacggagaccgcagctgttctctgtcagtggaggcagcagcggtagaggcggcggcgaggactggcgacggcgaggaggtgagtgtccgccgcgctccgcacggtcctcttcccgcggcgggtcggagcgggtggacgtgcgccggcaccgctgcgagggacgcttatgtaagggtcgcgcgcgcaaaggcggcgcgggctccgcgagtgacggctggaggagacagcgacggg

SEQ ID NO: 7659 - DNA, 2300 bp, Homo sapien
tcctatcatgtaagatgcctcatccccgctttgccttccaccacggttggaagcttcctgaggcctccccagcagcagaagctgctatgcttcctgtacagcctgcagaaccatgagccaattaaactttttgtctttataaattacccagtctcaggtatttcttatttttattattattattttttgagacagattctctctctgttgcccaggctggggtgcagtggcgcaatcttagctcactacaacctccgcctcctgggttcaagcgattctcctgcctcagcctcccgagtagctgggattacagttgcccaccactacacctggataattttttgttttgttttgttttgttttgagacggagtcttgctctgttgcccaggctggagtgcagtggcacgatctcggctcactgcaacctctgcctcctgggttcaagcaattctcctgcctcagcctcccgagtagctgggattacaggcacacgccaccatgcctgcctaatctttgtattttttcagtagagacggggtttcaccatgttggccaggctggtctcaaactcctgaccttgtgatccacctgcctcagcctcccaaagtgctgggattacagttgtgagccactgcaacctggcctaatttttgtatttttagtagagaaggggtttcaccatattggccaggctggtcttgaacttctgacctcaagtgatctacccgcctcagcctcccaaagtgctaggattacaggcatgagccactgctcccagcctcaggtctttctttatagcagcaggagaacggacaaatacaaccaccaactcactttgttcgagggcttgctgtgtgccaagccctgtggaccacatttaatacgcacaacaattacccaagttatttgtccctcttacgaatgaaggagaaaaatgtgcccaaggtcacaaggctgcaaggaatgaagctacagtttacccagaggcagttggtcctcagagcttgagtgctcaaggatagtgctgtgctgctgggacattaggggcagcgctgggcctggaaaaaatccaggcctcctgactcctagcctggagccgtcctgtttccttctgtttcttaaaaaaaaaaaaaaaaaaaaagaaattctccagtattgtataacacatataccataaagtttaccatttcaaccattgttgtgcaaccaatctctggaactcttcatcttatgaaatctgaaaatttacagccattaaattcttcattcctccctcccccagtgcctggcaacggccatcctccttgctgtctttgtgaatgtgattgttctagcttggagccatactgatgcttttttgaaaaatatatttctttttgagacgcagtcttgctctgtcacccaggttgggtgcagtggcacaatctcggctcactgcaacctccgccttctgggttcaagtgattctcctgcctcagcctcctgagtagctgggattacaggcgcccgccaccatgcccagctaattttttgtatttttagtagagacggggttttaccatgttggcaaggctggtctggaactcctgatctcaggcaatctgcctgcctcggcctctcaaagtgctaggattacaggcgtgagccaccgggcctggcccaattcttaaaaggctgtctctgtttggttgttaagccatggtgctcagtgtcaatggatgccggggccatagagattcagaggagaacaaactcttcagggatgaggtagtcagggaagctgcctagaggagaaggaggagaaggaggaggggggagggagaggggaggggaaggaagggggaggggaggggagaaggaggggggaggatgggggaggagggaggggggagaggaggggagggggaggggagggggaggggggaaggataggtgaaggagggagtggcaatttcctccccttggccttcactccttgacccagaaggtggggaggcagtggtgaggtgactcagggatgcttggccctgtggcctgccctttgatttatgaaagccaccttggcagcaccaacctttgcccccagtgatctcttgtcagatgggtggaggcactgggccacctcagagggccagtgtcttgctgaggggccggagcagtcctgtgcctgcagcctccggagccatgggaacagggctgcgaagtcagtccttgcgagagccccgaccctcctatggaaagctgcaggagccctgggggaggccccaggagggccaactccgcagggcgctaagcctc

SEQ ID NO: 7660 - DNA, 2300 bp, Homo sapien
tgtaatcccagctactcgagaagctgaggcaggagaatcacttgaaccagggaggcggaggttgcagtgagccgagatcgcaccactgcactccagcctggcaacagagcaagactctgtctcaaaaaaaaaaaaaaaagaaaagaaagaaagaaaagaaaagaaaagaaaaaaaaaaggaagaggctccacgaggcaaagagaaaaaggccaggtgaggacataggggagggcagccctctacaagctaggaagagggcagaaaccaaccctgatggcatcttgatcttagatttccagtctccagagctgtgagaaaatagatttttgctgtgtaagccatccagtccacgctgttttgttatggcagccccagcagactaatattgtcaggttgggaataatgactcaagatggctcaaggagaaaggcaggaccaggtatataatttgcagggcctcgtgccaaatgaaaacgctggactccctgttcaaaaattattgagaatttcaaggcactttgggaggctgaggcaggaggatcgcttgagcccaggagtttgagaccagcctgagtaacacagtgagatctcatctctacaaaaaattttttaattagctgggtgtggtgacacgcacctgttgtcccagctactcaggaggctgaggcaggaggatcccttgaacccagaaggttgagactgcaattgtcagaggtgtttgaaccagagcaactccatcttgagtaggggcttggtaaaataaggctgagacttactgggctgcattcgcaggaggttaaggcattcttagtcacaggatgagacaggaggtcggaacgagatacgggtcataaagaccttgttgataaaacaggttgcagtaaagaagtcggcaaaaacccaccaaaaccaagatggcgatgagagcggcctctggtcgtcctcactgctacattcccatcagcgccgtgacagtttacaaatgccatggcaatgccaggaagttaccctatgtggtctaaaaaggggaggcatgagtaatccacctcttgtttagcatataatcaagaactaatctcatgcctgtaatctcagcactttgggaggccgaggcagccagatcacttgagatcaggagctcgagaccagcctggccaacatggtgaaaccctgttgctactgaaaatacaaaaaattagccaggtatggtggtgcacacctgtaatccagctacgcaggaggctgagacaggagaattgcttgaacccgggaggcggaggttgcggtgagccgagatcgtgacactgcattctagcctggatgacatagtgggactccttctcaaaaaaaaaaaaaaaaaaaaggaccgtaaaaatgggcaaccagcagcccttggggctgctctgcatatgaagtagtcatgcttttgttgctttactttcttaataaacttgctttcactttatagactcgtcccaaattctttcttgtgcaagatccaagaacgttctcttggggtctggactaggacccatatccggtaacaccatgggcggtgattgcgccactcaactctagcctagagcaacagagctagaccctgtctcgacaaaaaaaaaaaaaaaaaaaaaaaaaaaaaaagagagagagagagagaattttaagacagcaacagcagagcattaaccatgtactgggccctgtgtgcaagctcaggttttacacctgtgaagccaatcctaaagagaggttcaggatggaggccttgaactagatacagaggtcaggggtccgtgtttaatgcaggctggagtcctcatatgtgctcatgcacagaggtaggcacgcatataaccagttcaaacagcaagcagaacacaagcagagacaggaaaagcgaagtgaagaatgagcagccatcagagatgcattcttagctgtcactatccctcactctaccccttgtcaagggaaggcttcggcagccatgttcgtatgtatcacgtgaccccctctctcggtcactgtgggttggaggagggctgatcacctgacccaagttagccaatcagagctctctcctgacactggctcaggttgaagttctagaaaatgttaattgggggagctgtggctggcagagaaggaaaaaggaagctgaagggcacttgggctcataatggtctctccaaccctgatcctgtcctttatggacatttggcagcgctgctgccttgaggtgccttgcaatgctttatctttttgttaaagccacctctgttgcttcagccagcttgag

SEQ ID NO: 7661 - DNA, 2300 bp, Homo sapien
ttgctttttttttttgtttgtttgagatggagtcttgctctgctgcccaggccaatctcggctcactgcagcctatgctcccaggttcaagcaattcttttccctcagcctcctgagtagctgggactacaggcatttttagtggagacggggtttcaccatgttggccaggctggtctcgaactcctggcctcaagtgatccgccctacctcagcctcctaaagtgctgggattacaggcttgagccactgtgcctggcctcaactttgtcttttgttgcttgggtagaataccctattagagtctggccccttttatgccctgatgatgtgtctgactcccaactcccttccaaaccagaaactcggccattcattccccaggcctgggtgtcctgcgaagaaaatggactcaaatggactcaatcgtaccaaagctgcagctggctgtgaaggttgagttaaatgggaaatggcagtgaaagctcagggcccattacccaggccccccgccccatgataatgccctttctctttgttctgttccaggtccaggaaatgaaatgaagacaaaagcgccccctgtgggtgaaggtaagatgcagctctctttctttttttctttttcttttctttttttttttttgagacggagtcgccgcgatctcactgcaagctccgcctcctgggttcacgccattctcttgcctcagcctcccgagtagctgggactacaggcgcccgccaccacacctggctaatttttttgtatttttagtagagacggggtttcaccgtgttagccagatgcaactctctttctagggctccccagcatcctgtcttctagaccaaggatgcccacactgcaccaagccagcacagacccagcctccactgagaggtcagtgcccacaggctgccctcagctctaaaggcccagagtgtagatgagccaggaagcactgccacccttgcacacttgctccccatctgggatcctcgcccctcttcctcccccaccccagaccgttggagaggtctccccaggtgtccacccagcctgctcccctggttactgtgcccacaacatgtggcaccttcccccgcacccagcccctcccagtgcaagccgtgcctcactgccagactgcgcgggcagggagggacctgtcccctgttcccggaagatggaagatcgcccacacctggcactgtgcccagcccctgcgggggcgtcataaatatctcctgaatgattcattcattcctttgggagagaaagcacgaccccttagtggttaaaggtatggagtttgaagtcacacagacctgggttcaattctggctctgacctttggctctgtgaccttggtcacctctctgagcctgtttcttcatgtaaaaaatggagtcaccacgaccagattaggccacggtgaggactgagatgatgttgtaaggcaccagcacagagctgacctacagctcaatcgtggtgggagggagtaattatccattcagaaaaggggaaactttccgctgcgcctcctgtcgctgttttccttggctcccggaggtgcgcagtatcgggtccgtttttaaggtaaagaaactgaggcctagaaagagaacaggataacccagggcgcggaggctggggctagaacccaggccggctggctctgagtccagtgcttggcctgcctctcagaggcctgtgggcacgtccccacccacccctgtccccaggcgtgggagcgaggggttgggcttggcctcagggcgtccctggatcccggacgcgcttggggatctccggctcggaccccaggagcagagacagcgctcgagcttgtcactttaaattcaagagggagcgggcgggcaagcgggcgagcgcgagggagcgcgcggcgggctcctgggagcgtgcccggactgcggcgcagctccggtccgccgccccggcccggccgagcccccggcccgcgccgcgctcctcggaggcgggagcccggcgacactgcaggggtggcgttgccgccggcggccgggctaggcgcaggtgcgtgcgcgctgcgggaggcgggccggcagctggagcccagccggagcggcggcccctccgcggagcccgggtgagtacgcaccccgccgacccccgtgcgcggccgggatcgcaccctgatcgcggacgcacgcagccccctcctcgggccctgggcccgggaccccagagccccgcgcactccgcgctcctgcacctccgcgccgcgcttgcacacgaacgaatgccg

SEQ ID NO: 7662 - DNA, 2300 bp, Homo sapien
ggtgggggagcggaggctggggcttgacgtcaggagattgaatccttgctgtgtcctgctggtctaagacacccctctgcctctctctgaggctcagttcccaaatctgtaaaatgggaggaagcaggtcatctgcttggtctacctcgtggtctgagagctaaatgaaattgcaattgtgcagatgaggcgtgatggagggagaccacctggctttggggtcacgcctggatccaaattctagttcagcctcttactagctgtggatgttagtcaacaacttagcctctctgggcctcaggctcctcatctgtgaaatggagctaagagtccctacctcctagggaacagtgcctacacgtggcttgcaatccactaatgggtgttgttattattaggaaatgttcagtgaaactgtatagcatgacaaacatcaagtgtgtcattacagagattatccctatagcaaccaaggccaaacgcctctgcctgactctcagctccctccacccccagtctggccccacctgccttccagccttgccacccaaggcctgacgacagcagcagttgggaggaagatgctgacagctgatccgagggggtggggcccctctcaccactccttggggcggggagccctgctctggagctacctgcccagcccagtgtcaagtcactgccgagccctgtggcagtttcggggaggaaggggcacctggaaaggcagagctgtgctggggaggatccttccctccaagtggggctccatccagcctgcagaccacagcccggagcgggagccgggcagaggagtcaaggagctgggctctgcctctccacctagtgactcctgccctggctgcctctttagaccacagtgagtttaaaggaggttgaaggtgctttttcacctgcctgacttggaactccatgaggggggatgtcatgaccagcataaattagggggaacctaatgacgtctgccccttgttcttttaagcttcaatagaaacactcagtccaagatctgggaagacccttgtgcccatttttaaaagatttcaactctggccattaggagaagtggagagatcaggtgacaatgagttcccagttcaatgctggatttactgctggcatccaacgtgctccactgagcaagcaccagctcctcatgctgcaccactgtgcaagcgagcctcaccctctgcgggggcggggtgggggggcagcattccgctccggcctccgcagcttcgcacgtgccgctgtctccggtggaacaccttttccctcccccatctgactgtgtttcactttttcctcaagactctgaaaggtttcctgactccctcaacgtgggcgaggagctcttttcccctactcccgtcccgctgcctgtccctactcccgttgtagttctgatcacactgatgtcctgcgtgtctaccattctaagccgtgggcttctcaaggcagggcctggattttgtcttaaacagttcagggtccccgggcccttgggcaccagggggacatctcatggtgcaataataagaaacactcacactttacagagggaaggttctatcgctttccctagatcgtggccagccacggtgtcaggtggctgcccacctgcagcagagcttcctggtgctgcgggagggggcaggccaggcctggtggggccagtgaagggggtcatccccttcccacctggcatgaaacgcctgtgttgtgctgcgtcctgagacccctggggaaatgcaccattcattcattcattcattcattcactaaaggtcactggctcctgcctgggatctgggacccagcccctgagcacacccccgcccccactgtcatggtcccgctgtttgtcttctcccttccgacctcccgtggccccagcgcggccagctcacagtaggtgctcgggcagcgtttcttcagggacctagacggcctggagaggaagggccccagcccagccgcccgggcctctcacctggctctcggggcgcccggctcgcacttcctcccgccgccccgccccttccacattcctgccccgccgggcctgccccgcgcagtctgggtctctgcgccgcagccgcccgcccgcccgctcagcgcccggccccgggatgacggcggcccaggccgcgggtgaggaggcgccaccaggcgtgcggtccgtcaaggtggtcctggtgggcgacggcggctgcgggaagacgtcgctgctgatggtcttcgccgatggggccttccccgaggtgagtgccccgcgc

SEQ ID NO: 7663 - DNA, 2300 bp, Homo sapien
ggtatcaaaataaagaatatttcccagtgactagaacgcaagaagatgatatcttattaacaaaccttttttgctgtttgtgagatgtttcagtcggctgttggagtaattatgcaagctctttaacctttctatacttcagttgtctatctttaaaatgaatatagcgctaacaggcactttagcttgtctcctaaggatgttgtgaaacaaagcagagaatgtctgtacaaactccccaagttgtgcatgcagaaaaaccttctgtggtaataaataataataccttgcatttacgtagcgcttttaccttggagttcaagccttgatagaattagaaggtatcattattttaattgtctcgctaacgtcctcctgaaagagttgatggctgtttatgcaggttatatgattcactccatgccctacctctctgctccattccctgcttccaggagtcagagcttaaagagtgggaaaccaaggcagggagaaaaagatttgtgtgacaccgctcagcaagggcgtagtggagccaatagtgccaaccccgatgtgtaacgccccagccaccgtcctttgtgggatttagaatttaaacgggccccagagcaagagattggctggggaaatgcccggatcgcggctgggctgctcgcatggcactgctcgggtacctccggccgggctccgtcgacgttcggagcctgctggcccgtcgggcagctgtcgggccgcgggagtcggtccgtgggcagggccggcgcagctcgggcggctgctgccccgtcgctgacccccgcgcgaagctgcgcgcaccaacaggagacatcttcccggccgggcctcccgcgcccgccacggcccagggcggcagggtcgggccgggggccgggggcggcccgcgcacccctccgtggggggcgccccgactcgccgggggcggggtcacgtcccacccgggccgccgggggcaccggcgcggcggaaagctgagcgtggccgaggagcgggggcttcctgggccacctcgccgggcgcctccggccggcggtgggcgcgccggccgccaccgcccccgggccgtcgcggagaccgcttctgcgcctggtacctgtggacgcccttgttaagcgcctgcagcacccccggggagccgagcccaggacagacatgctactcctgtttcctgccccttcggagcgacgagcagtgggtgaggcggggccaggccgctgcaccgaggagcccccgggcccagggcagacgggccccgtggcggcggcgccggggcctgcccgggaatggcgggcaagccggcctcggcccaccggccggcacgcgaagggagggcagccggcggccatgcgccccttccctgcgccctctcgccctgggcaggcctgagccgggagcccaggtcccgcgggcccagcccggcggcttgaccccgggagaccctgctttgaggcgggtatcggttgccctggcccaggcctcccggccctcaggttgtgtgactgtgacgggcagcctggggccaaaggcggttgaaggggaaggggacgcagatctcccactgcttggggggggtgatgtgctttgtggggggtcgggggtcaccaccctcccaggggggtgggggagggcggccagcacagctggccgcgaggggcggggtcgcagaggcgaagtgtgtgtgagggtgtgtggggggagggcgcgcggaggaggatcggtgccctgcgcgcaggcgcgagcagccagccaggcccgagccctggaagaacgccgacggggagcgggggcggcgggctggcgggagggagggagggcgggcggcctgacgcgagggggcgcagggagccgcgtcggcgtcgcggggcgcgggcgattcgaggccgacgcatccgcgcgtgcgcgcgccggcggtgtgtccgcgttagaggggagtgacgcgtgcgcgttcacgcgcgcccgggagagcggtaagaagcgcagggaggcctgaagggggtgggggggtggagaggcgagctggaggaggggtggggaggtggcgcctgcgcagtgcgcctcggaggagctgtgtgtatgtgagagtctgacgggttcaaaatggcggcggctgcttcagcggctcctcctgtgtgagggaaacaacacccctccccggcagcggcggcggcggcggcggctctcggagcaccttcccagcggctgggcccgtggccgctctgtctttcctgggcaggggacgctccgggaggaggggcaacgccagggggcccatcccccgg

SEQ ID NO: 7664 - DNA, 2300 bp, Homo sapien
gatttagaatttaaacgggccccagagcaagagattggctggggaaatgcccggatcgcggctgggctgctcgcatggcactgctcgggtacctccggccgggctccgtcgacgttcggagcctgctggcccgtcgggcagctgtcgggccgcgggagtcggtccgtgggcagggccggcgcagctcgggcggctgctgccccgtcgctgacccccgcgcgaagctgcgcgcaccaacaggagacatcttcccggccgggcctcccgcgcccgccacggcccagggcggcagggtcgggccgggggccgggggcggcccgcgcacccctccgtggggggcgccccgactcgccgggggcggggtcacgtcccacccgggccgccgggggcaccggcgcggcggaaagctgagcgtggccgaggagcgggggcttcctgggccacctcgccgggcgcctccggccggcggtgggcgcgccggccgccaccgcccccgggccgtcgcggagaccgcttctgcgcctggtacctgtggacgcccttgttaagcgcctgcagcacccccggggagccgagcccaggacagacatgctactcctgtttcctgccccttcggagcgacgagcagtgggtgaggcggggccaggccgctgcaccgaggagcccccgggcccagggcagacgggccccgtggcggcggcgccggggcctgcccgggaatggcgggcaagccggcctcggcccaccggccggcacgcgaagggagggcagccggcggccatgcgccccttccctgcgccctctcgccctgggcaggcctgagccgggagcccaggtcccgcgggcccagcccggcggcttgaccccgggagaccctgctttgaggcgggtatcggttgccctggcccaggcctcccggccctcaggttgtgtgactgtgacgggcagcctggggccaaaggcggttgaaggggaaggggacgcagatctcccactgcttggggggggtgatgtgctttgtggggggtcgggggtcaccaccctcccaggggggtgggggagggcggccagcacagctggccgcgaggggcggggtcgcagaggcgaagtgtgtgtgagggtgtgtggggggagggcgcgcggaggaggatcggtgccctgcgcgcaggcgcgagcagccagccaggcccgagccctggaagaacgccgacggggagcgggggcggcgggctggcgggagggagggagggcgggcggcctgacgcgagggggcgcagggagccgcgtcggcgtcgcggggcgcgggcgattcgaggccgacgcatccgcgcgtgcgcgcgccggcggtgtgtccgcgttagaggggagtgacgcgtgcgcgttcacgcgcgcccgggagagcggtaagaagcgcagggaggcctgaagggggtgggggggtggagaggcgagctggaggaggggtggggaggtggcgcctgcgcagtgcgcctcggaggagctgtgtgtatgtgagagtctgacgggttcaaaatggcggcggctgcttcagcggctcctcctgtgtgagggaaacaacacccctccccggcagcggcggcggcggcggcggctctcggagcaccttcccagcggctgggcccgtggccgctctgtctttcctgggcaggggacgctccgggaggaggggcaacgccagggggcccatcccccggaatccctcttctgcgactggggagtagccggggggctcgtcccgcagcgcggagccagacctgagggggagacgcgaggggagccagggcccccatcccggcgcgccgcgccgctcccgccctgtccgccccccggggccggggcccgcgttccggggggccggggcggcgcggggagcctcgggccggccggtctcagctgatcggccgctgctcccgcaggcgaccagcccctgctggccgagggcacggcgaggagggcgctccctgcggccggggccggcccggggctcgggcccgggctgctgaccgctggcctgggggaggcgggggcgccccgggctcggcgccgaggggtcgcgctcctctctcctgacgcctccgactcccggtctccaaagccagaagagaaggtttgattcagcaactgtttgctcccttttcctggtcgctctgaccctctctggatactgggttgatccacggaaaaaccgaagacgacgtttgggatttaattattcctctcagctttggaatcttttacttctcacttggacaagaactcaagagcagaatctccggtga

SEQ ID NO: 7665 - DNA, 2300 bp, Homo sapien
agttggcctaatttcaatattgttgtgtctcaggaaatagggaggcctgaggagagaaagagaacaagggaatagcaatgtggcaaagcagtcagaacatatacaacatttcaagtctgctctcctatatggatacagttcatggcacctcaaaacaagtataatagtaatgtcaaagatcactgatctgctgggtgcagtggctcatgcctgtaatctcagcactttggggaggccaaggcgggtgaatcacttgaggtcaggagtttaagatcaccctggccaacatggtgaaactccatctctactaaaaatacaaaaattagccaggcatggtggtgcatgtcagtaatctcagctactcgggaggcagaggcatgagaattgcttgaatccaggaggtggaggttgcagtaagccaagattgtgccactgcattccagcctgggcaacagagtgagactccgtcaaaaacaaaacaaaacaaaacaaaacaaaacaaaacaaactactgatcaccactgacaaataataatgaaaagctttttttttttttttgagacagagtctcactctgtcacccaggctggagtgcagtggcgggatctcagctcactgcaacctccgccttccgggttcacgccattctcctgactcagcctcccaaatagctgggactacaggcgcccgccactgcgcccagctaattttttgtgtttttagtagagatgggatttcaccgtggtctcgatctcctgacctcgagatccgcccgcctcggcctcccaaagtgctgggattacaggcatgagccattgcgcccggcataatgaaaaggttttaaaatgtgacagacatgaagtgagcatatgctattggaaaaatggcggctacagacttgctcaatgaaggtttgccagaaaccttcaatttgttaaaaaaaaaaaaaaatacactatctgcaaagtgcaataaaatgaggtgcgctcatactctgggtatggaccagagcacttagataaaattgtgatggtcaaagtaatagctaacatttactgagaactcagcacagttgatccttgaacaacactggtttgaactacatgggttcacttatacatgaattttcttccatccctgccactcctgagacagcaaaagcaatcccacctcttcctccttagcctactcatcatgaagatgaaaagatagtaaatatattttcaatcttaatagtaaacaaatgttcttttatgatttaaggaatttttatcttactttattgtaagaatacagtatataatatgtataacataaaatatgttaatcaactgtttacattatccataaggcatccagtaaacagtaggttattggtagttaagtttctgaggaattccaatttatatgtagatttctgacttgctgggggttggtgcctctagccgttgcattgttcaagggtcaactgtatatgccagacactgttctaagcacttcacatttaagtaacttgtccaagattacacagctagtaattagtgtagctcaggacagttttgctacagagtccatattctcaaccaaatacatcctatcacagaaagtttacaagacagaatggcttacttctttctgagacataaactgacactgaagaagtaacattccaccacaggctgaaaagaagagctggatcagctttttcactgcattttgccaatgattagctatccaagaaacaaaaaaacacccagactttaaaaaacctggatagaaagttagtcactggctgggcagagtggctcacgcctgtaatcccaacactttggtggggccgaggcgggctgactgcttgagctcaggagttccaagaccagcctgggcaacatggcaaaatcccatctctacaaaaaaaatacaaaaattatctgggcatggtggtgcccacctgtggtcccagctactcaggaagctgaggtgggaggatcgcttgagcccaggaagtcaaggctgcagggaggcatgattgccccactgcactccagcctgggtgacaaagcaataccctgtctcaaaaaaaaaaaaaaaagtttatttctgataaggtctgttaggttagatataattgctattttattttaaatcacagcaaagttatttgtgttcacccttgggtttatttagaaaatacaaggttacaaagggcttccaaagatcattattagcagtaagaagattaccgaggaaaggaaaagtggtaaggaagtgggaagaaaaccgaagactgatgactgaat

SEQ ID NO: 7666 - DNA, 2300 bp, Homo sapien
tctacagcctcgacctcctgggctcaggtgattctcacacctcaccctcccgagtagccgggattacgggcacgcaccaccatgcccagctaattttttgtatttgtatttgtatttttttgttttgtgtgtgtgtatgtttaattttttttgtatttttagtagagacggtgttttgctatgttacccaggctggtctcaaactcctggacagaagctgtctgcccgtcttgacctcccagagtgatgggattatagatgtgcaccaccgtgcccggccagacatacaatattgtcagctttttattttctctcccttccttgaccaccattttctgaatcttttagcttatattttacctctgcatggaattgtccctgttgaatcatctcttgttagaattctacttattcttctccctcttttcctaaagccttttctgatcagtctaataaaaatatgatacttcccttttgtttttactgccgcttgagcacctactttgtattaaacattttactttatcgactttaaatcttcacagtggcccacaaggtgatactcattctccacaagatattaatgttcagagaaattatataacttgtctaagtagtataggagctgagatttaaacttaggtctcaggcaggtgcagtggctcacatgtgtaatcccagcattttggaaggccaaggcgggcagatcagctgaggtcaggagtttgagaccagcctggccaacatggcaaaacgctgactttaccaaaaatacaaaaattaggcaggcgtggtggcacacggccatattcccagctacttgggaggctgaggcacaagaatctcttgaacctgggaggtggaggttgcagtgagccaagatttcgcaccactgcactccagcctgggtgacacagcgagactgtctcaaaataaaattaaagaaataaataggctgggcatggtggctcacgcctgtaatcctagcactttaggaggccaagacaggcggattgcctgagctcaggagttggaggccatcctgggcaacatggtgaaaccccgtctctactaaaatacaaaaaattaggtggggtagtggcgtgtgcctgtagtcccagctactgtggaggttgaggcaggagaactgcttgaacccaggaggtgggaggttgcagtgagccgagagcgtgccactgcactccagcctgagcgacagagcgagactccgtctctaaaaaataaataaacaaacttaggtctctttgactccaaagctattgttttctctccactactattttatgctgactcttgtggccttatgcgttttgttgtagttgttatagttaacaagaatctgatatagattttcgtgtccatcctggtgtctttatcattctataaatatttgtggaataaatgaaaaggggactttgttcttcatgaactaggataattatcttcatgggctaggatattagcaacaggtttgcgaaatagccctgtttaacaaaagaatataaattcaaaatcagtctgttacccactaaattatggatacttcattcaaattatgagatagattaggtcaacctgcatcaaatcagtatagatcagtaagtaagagcttgactctagagtgagcctgccccggttcttttcctgctttgttctgtaagttacctaacatctgctttctcatgtatgaagtggagattagtatttagcatttagaattgttaggattaaatgagacattagataaaagagtcaacaactgactgtatagtaaacatgccttagggaataattattattaacattatccattgtctttcccattctttgtgatttgattatgattgttgagtgagaactttttccttgtgtattattgaaaataagaaaggacagtattttttcttctactttttaaaaaatattcttactatatttaaggatattagtggctcgatagagatgatcgatgcatcttttatggcagggagtcgtcgcatggtggatgtcatggacgtgaacacacagaaaggcattgaaatgaccatggctcagtggacacgctactatgagaccccagaggaggagcgagagaaactctataatgtcatcagcctcgagtttagccacaccaggctggagaatatggtgcagaggccctccacggttagtgtaatcattttcttcatattgtcattgtcaccaaaagggttgttttcggctggacgttggtaactgatgcttgttatcccagcactttgggaggccaagggaggcag

SEQ ID NO: 7667 - DNA, 2300 bp, Homo sapien
tgtctgaaaaaaaaaaaaatttatatcctgttataggatatatttatttatacaaataaaactttatttgcaatatttactaacaagatatttgtaataattcatacattcttactgaatagaaagttttaagtaatgtaactcagttatgaggcatatatgcttaaagttacatataattattttaaatattttccttatattcttgtattatgtaatgtcatggtcttagtaattcttatcttttttgcctatcttttattctcaattagcaggagggggtaaagttaggccttgtttaatttgtgatttggaaacttactgggagtgagtttcctagtgcccgatgtgatttttttcctttcctggtggcctctagaatttgcacttgctgcaacttgaacttacgtttgttttaaagtaatatgttttctcttaagtattcatactttactatctctataatatagatagcactgaagatcaaaataagcattttccaagaagacctctcaatagctagatcactgttaaggaaagcctttcaaacaaaataagccgattgcagtgggtcttgagtcttaagatacagtgtccgggagaagtttagggttaggatgaccatataagcatttccaggagaagctcagccgagagcacaaaagtctgtccttcccctggtaaactactataaaaataacatatgtagcccctggcagcaaagctccagactttagaaagcctagttagccactaaatctgtaccagaaactcactcaaacaactgtcctggaaataaataagaatgcttaagagctagatgcttaaatcagagcatctgcaaaaaaggcaagttatacatttgtaagggtctaaaagtcacataaaaatcacattggctctaaaaaagacccaaactgtttctgctaagtatttgattcctactcaggttctcccatgctgatgtttggtacactgtggatcactagaaactcaaccagagtgtgcaccctcctttcctcctgtagactgaaaggagtgtgtgttcagtctgagcttcatcccagctggggatccggggatcagggtttgttgtgcagaggtgtgagcaatacttgtcagtccgagtggctgtgagaaggcagtgaggtgtcttgacaggatgcaggactggctgcttcatctggggaatatcaagaatgagacaggcaaacagacttgaatagaaatggaaatccaagagtacaatactggtattctgagggtaggataatcttacaggcagaggagactgctggaattgggagaatgtgtgttccctggcttcctgcaccttgtttagaggcaggagggcaaagtgtgttgtgcctcagttgtttgacttggtcacggtggaactgctgcaggattgctgcgcagacatttctagtactgtactgtgggggtggagtccttgtcagaatcagaagcaggcatctgttttagatgtagttgatgttagccgtattttattgaatatctcaatattggctgacatgggccatttctgaaggttttttggaacacataggcagattctggattgtgggctgggagcaagtcagcgagggcaggtgaagcaggcagtgtgccggagagagaagataactcaagaggaactcagctcctgtgcctagttcatccagagaggcggaactttgggcgaccccctctacttgctgagaggggagagagaagtgtgtgtgcagtcagccagagagctctggcagtaacagtggtaacagtgagaggtgaccctgaggggaagggtgtggactgaaacaaggacaaatgtgggccaaggtgcctagtgtagcccgcagaatgagttaaagccttccctttggctggcgccttcagaagtctgccaccgggagccctcagggggctggccctaggttctcctattgcagtggtggtgggagggagacagggcgggggctgtggctgagctctcctccctggcagggcctcttccaatcgcgaggaagaaagcagttgctgaacacaccccctcccggctctgcagcagaacggctgggccctctgcctggctcgctcactctcgctcggctccccctcctgccatcttccgttgcaaagcatttctgggagctgcatgtgggtgacgcagcagcattgttcgcaggcacaggaagccgcggctgagctgaagggctcgagaaggagcccagagcgctgcacgctgctccctctgggtagtctgaagggtcagagctggactgccctgccctatgtgc

SEQ ID NO: 7668 - DNA, 2300 bp, Homo sapien
aaactgggaggcctccctccagattcagatgccaaattgtgcatttgtgcatccgcttctatccttgtgaccagttactcagctatcttcacagatatgattgaaagccagttaaaataattacatagatatctaaaaggagcagagtttttctttgacgtagtgagatcattctctcaaaaatccccttaccttggactttgcagtgtggaatggaaaagagaagaaaggggccgggcatggtggctcacacctgtaatcccagcactttgggaggcccaggcaggtggatcacctgaggtcaggagttcaagaccagcctggccaacatggtgaaacaccgtctgtaccaaaaatacaaaaattaagccaggcgtggtggcatgcgcctataatcccagctacttgcaaggctggggcaggagaatcacttgaacccaggaggcagaggttgcagtgagccgagatcgcaccattgcacttcagcctgggggacaagagcgaaactgtctcaaagaaaaaaaaagaagaagaagaaaggaattactgtcagctaataaattgtcaattatgaattttcatgcctcttcagtttagatcctgtataatttttttccccatactgtcctctatcaaggttatgtattaaataaatgatagcattctgatcctggctgtgaatttggcaaataaatgaggcttctgtttgttgttccctagctgaaacttgcaaagccatcacattccaggggtgtttaggcagaatataaaggtatggagttgaacagtatatttagagaatcacctcctcgtccctagtgggaggagtcctgcttggcctctgcttggccacaggtgactgccttaaaacaattcagtcatttctggttgttgagtattttgtgtcagaaaagtgtttaagatatggtaagaaattaaagtagtagaaaacatggtccttgtccttgaaaaggtcaccagcagggtaaatgcaaatgctaagaaatgtgttccacacttaaatattattgaagtgtctgctatctaccagttcgtatgcttgaatttggagtactaaagaaatgaacaagactagtttcaccttaagggagtttactgtcttctttaggagtataatctgagaagtcaggatgaggaaatattggagggctcctggagtgacttcggtacatggcacttgatacagaaagctcagggaggggtgaatcttaacagctctgcaaaaagaaagggaagcagctgaattagtaggccaaagggctaggacaagggctggtaaatttttctgtaaaggtcaagatagtaaatactttaggttttgtacaccacacagtcaacaatttctcagttctaccatggtagcatgaaagcagccattgattggccgggtgtggtggctcacacctgtaatcccagcactatgggatgccaaggcgggcagatcacgaggtcaggagattgagaccatcctggctaacatggtgaaaccccgtctctacaaaaaatacaaaaaaattagctgggcatggtggtgggcacctgtagtcccagctacttgggaggctgaggcaggagaatggcgggaacccgggaggcggagcttgcagtgagccgagatcatgccactgtattccagcctgggtgacaaagcgagactctgtctcaaaaaaaaaaaaaaaaagcagccattgataatacatacacaagatgagttgtgtgtcaataaaatttattctagaaacaagcagtgggcagatctggccatagtgggccaagccccaggctaggtatgctaccatgtaatcttctaccctatccagtcttaaagcaacctgatatatttgacctcactgctttctctttccagcttaaattccccactcggccaaaggtgcgggttcctaccatccccattacgaagcctcacactatgaaaccagctccacggttaacacctgtgaggccagctgctgcctccccgattgtgtcaggagccagacggagacgagtgcgatgtcgaaaatgcaaagcctgtgtgcaaggagagtgtggtgtttgccactactgcagagacatgaagaagtttggggggcctggacgcatgaagcagtcctgtgtcctccgacagtgcttggcagtgagtgatctgctgggtaaagaattttggggaggggtggcagtgccaaaggaactgaaatacatatagtgtagagttaaagagacttcagagttggaaagaaaaggtttatactctctttttggctttattttgtaccttt

SEQ ID NO: 7669 - DNA, 2300 bp, Homo sapien
gactcggtcatcccctggggctggccccagcgaccaccacagtgccagccgcgatgagcgcttcaaacggcggcagttgctgcggctgcaggccacagagcgcaccatggtacgggaaaaggagaacaatcccagcggcaaaaaggagctgtctgaagttgagaaagccaagatccggggatcgtacctcactgtcacgctacagaggcccaccaaagagctccacgggacatccattgtgcccaagctgcaggccatcacggcctcctctgccaaccttcgccattccccccgtgtgctagtgcagcactgcccagcccgaaccccccagcgtggggatgaggaggggctggggggagaggaggaggaagaggaggaggaggaggaggaagatgacagtgcagaggaggggggtgcagccaggctgaatggccggggcagttgggctcaggatggagacgaaagctggatgcagcgggaggtctggatgtctgtcttccgctacctcagccgcagagaactttgtgaatgtatgcgagtgtgcaagacgtggtataaatggtgagcagggattcagggggtcaggaattaggggtatgggagtaggtggcaggttttccatatgagaacagcatgcaccttggcatctgaaagcctgtggggtcttatgaggagtgaattgaccctttttcccaaactttgggtcctgtttaaagatgtagcctgttgtacccgcagatgtcattagggaactggccatttgcctcctggccctgctctatactttcccatgtctcattgttatggggagggagactgatttgcgggatagatttgtagtctgtgataaaacttgagagtcttgcgggctgaaaatttcctcctcaagtcagctgaactcatcacatgttggttgagagcctatgatgttctagtcactcttctggtgctgataacacagataacctcacttaagcccctgactcaattacctctccattcagtgagagaagtgggcatgcttttcaagatgaatttgaaggtgcttaacatttttcttcagttttaatgctcatccccccaaacctggatcagaattccctcttccagcaagcagagtccagttttgaagcttccttaatgagagctaccatttcttcttaagttggacagacacttgggggaaaaaattgctagtgatgatgaacaaggagcttcccattgggcattgttggtttttccttaaactctggtatatatttactctaggatatatcctttttatctgggtcacacacatcctattacagtagtgtggtgtcctgaccaatggcattcactcaggaactttttagaaatgtcaactgtcaggaccctcataggcctcttaaatcagaacctcttgggtgggcccagcagtctgctttaacaagcgctcctccaggggactctgatgcatgctcgagtttagagcagcaaaatctgctgtattgtcagcagcttgcttctgccatagaagcttcatgtgccactggtaaaattgtttcagtctctaaatagaccctattctttgcaaacatgagtttatttcccaaatctgaattaatgtatagtgtatctaaattctccttaatatttctctgtctagggctaataggactgcttggctctacctcttggttttcagggcaaggcacatcagattcccgttatgtgctgtctctcttcccctgccaaccaggctggggggcaggggctataaaatattaaattgaagccagcatgttgtggtttgtggcctgtagatttgtagactgcagtggaaagccaggcctatccctttcagttctggtctggcctggctagaaaatgtcaggatagcactgaggcagaacttgagggtgagagaggactctgtaagcctgataaagagcctcttttgacctgatacagtaatgggctgaaggcagggtgaattgtggatgtgctgagtagcaccctgcatttcaggcagctgcgagtgattgacaagggagggaacggagcaggccttcttagctttagacagtaagaagtctagaaacttcaagaggctcccttatatacacttcagcaggaaccatgccattttaatacagatgaaggggctatagactgttgcttgctatgggtccctaacaactgttgtgttctcaaacactccagaataaatcagggtaaagtggtcaagttatatactatcaacatgtaggtttgcaaagcgtctagttgttgtagagttcaaggcaattttttgccta

SEQ ID NO: 7670 - DNA, 2300 bp, Homo sapien
tatttactctaggatatatcctttttatctgggtcacacacatcctattacagtagtgtggtgtcctgaccaatggcattcactcaggaactttttagaaatgtcaactgtcaggaccctcataggcctcttaaatcagaacctcttgggtgggcccagcagtctgctttaacaagcgctcctccaggggactctgatgcatgctcgagtttagagcagcaaaatctgctgtattgtcagcagcttgcttctgccatagaagcttcatgtgccactggtaaaattgtttcagtctctaaatagaccctattctttgcaaacatgagtttatttcccaaatctgaattaatgtatagtgtatctaaattctccttaatatttctctgtctagggctaataggactgcttggctctacctcttggttttcagggcaaggcacatcagattcccgttatgtgctgtctctcttcccctgccaaccaggctggggggcaggggctataaaatattaaattgaagccagcatgttgtggtttgtggcctgtagatttgtagactgcagtggaaagccaggcctatccctttcagttctggtctggcctggctagaaaatgtcaggatagcactgaggcagaacttgagggtgagagaggactctgtaagcctgataaagagcctcttttgacctgatacagtaatgggctgaaggcagggtgaattgtggatgtgctgagtagcaccctgcatttcaggcagctgcgagtgattgacaagggagggaacggagcaggccttcttagctttagacagtaagaagtctagaaacttcaagaggctcccttatatacacttcagcaggaaccatgccattttaatacagatgaaggggctatagactgttgcttgctatgggtccctaacaactgttgtgttctcaaacactccagaataaatcagggtaaagtggtcaagttatatactatcaacatgtaggtttgcaaagcgtctagttgttgtagagttcaaggcaattttttgcctattctgtgaggcaaaaaatgataaggtgtgatccctgtacacttgtagaagaacgagcctccaggtactctgcttttcccagaagccataagcagcctgtgatgggagctccactgatcaagttaatgaaggcgagttctcttcccttctatcacaggtgctgcgacaagagactttggacaaaaattgacttgagtaggtgtaaggccattgtgccccaggccctcagtggcatcatcaagaggcagccagtcagccttgacctcagttggaccaacatctctaaaaagcaactgacatggctcgtcaataggctgccaggtaagtgagcagccctgccgctgtctttccaggggcccagaagaagcgggcaagaaaagttgcattattggcagtgcttcttagcatcactggagggcagtgtagggcagcagtcccatgccattgttgcttagcaagaggtttacccagggccatcttaagtgtcagtctcccaggcagcactctggactggcaggccaatcactgcaatggacagcaaagagaacggaatcagtgttgctgccagccctgcagttctcctcagcataaccactaaagaggaaatttgagtcagatgttactttggtcagctccttataagcccttgttctcttcagcattttgagctcttagaaagacaggaagtcactccttcttgtattgctctggtgggaactaagcaatcaatttaccactaaagctagaagatgtagtataggataccatggaaatctttgagctggatgactaaaagattaggcatagtccttctctcctattagactggaagtttgttcactttgctcagatcgttacggctctgagtatgctgggaaacagtgtattattacatgtctcattccatccattgcaggactgaaagacctcctcctagcaggctgctcctggtctgcagtctctgccctcagcacctccagctgcccccttctcaggacccttgatcttcggtgggcagtaggaatcaaggaccctcaaattcgggacttgcttactccaccggctgataaaccaggtatgctctggacctgacttctctgtgcttgtcttggggtagctttgtcttccaaacagacctcgtcttcagaagctaaggtagtctcagatatgacgctgtggaagaatagaagagcacaaaatgaaaacagaatgatggactgtgtacaagaatagggtaactataagcagataactacct

SEQ ID NO: 7671 - DNA, 2300 bp, Homo sapien
aactgaaaatggaaaacagggcctagaaggtggtaagtgtagaattggagatgtacatagttggggtcagggagtcagggaagactacctggaggaggtgagtcttagcggatgagtaggagttgtccacggaggaaggtacacagaagggcttccaggcccaggaaacagcagaggcacagaagtgagaatgggtgggtgagttggtggggaaactccaggtgcagaggatggtagcgaaacaaactggagcattcaaggtccaagtcctccaagatcttgacttgcagattaaggagtttgttcacctaatctgctttgggcagagtgtggtgagtcctagagacccctctaggtctctcactctcagtagccccagaaggcctggagagctgcttctgggtgccaagcaggcagtgactccatcagatctagatttgggaaaagcatccctggtcagggcctgcatcagggcagtggctggccatgaggaccctgagaagtagacagattcacggagattctcaggaggccagacaggagactatggtgacaaattagattagagaaggggagagaatgaaggagcagttggggaaaagaaaactgaggctctgacatgggtatatgggtggcgagtgactcaccacccactgagaggagaacctcacaagctctgacatgctctggttccaggttctgttggggctgatccaagatggtagcctagaggtgcacagagatgggggccttgctttgcaaaaggatgctggctgctggcccacagcatggtaatgagatttgagctttatgtgcccagggctgggaggagggtcctgtcactttgaaagcaaagagaggctctagagaggggcatgttgagataggaatgctgccttgagacacctggctttccccactctgggtgggctctcagcagggtgggtttcccctgccaggcagcactgaaacctctgtgcgcttccgggctgggagagtttttaccgtaactacatgtggaaccatcctgaaggaacatctggatgggatggggtacagggaagggagctgccaagagtgctggccagggacctgggtctatgagctggttggggggtggggttgggtgcagggtacttgatcctgagtgggccttctgcggccaggattggttctagagtaggaggggtgggatcagggatgggggaagcctgtaactgcgctgcagttgtcaggtcccaggttctgggtgacctactaaggattctgggtccagtgtgggtcccaggttagacgtcctagtcctgagtccgtgtccacagttctgggtgttgagtctaggacagtgatctggagttgacagtccaatctaggtctgagtcctgaccccaagtctagagttcagggtcatggtagtagcctagggtcagaatcaaggttggggtcagtaaccaggatgggatcgaggtcatggtccaaaatctggatctggggacctgttgggggtctgaggtgagtgtcgcagtctgggtatggcgttggagacccagggctgtgatctgaggtcatggttagagtctgaggtggtgggccaaggtttgagtctggggtcctgtttggagtctggtgtcaggtcgtggactgcgtccaaggtcagggagtccggggttatagccagggtctgagatgaaagtcccaggatggtgttcagaggtctgaatctgtgtcttggtgagcgtccaggttccctgtgatcacgtttggtgtcagggctgcggcccgactggggagcctgggatccagagatgtgacccgaggttgtggtcagagaatgggtctcgggtcgtcttccgtgccgggtccctgtcgtgttccaggcccgggtctccgtccagcatcgagggccgaggtcacggccagggtctgagcccgcggtcgcaggtctggttcggggtcagattccgcgcggcctccagggggcgccgtcgcccgcccggctcggcccctcgcgggctcgctggcgttgtgcgcggcaggcggggccggaggcggcggcggctccggggcgcgggcgcgcgggcggcggcggcggcggcgccccgactgcagtcccggcgggagcggagcgcgagccggggccgggcccgagccggcgccatggggcggcgccgcctgtgagcggcggcgagcggagccgcgggcgccgagcagggccaggcgggaggcgtcggcgcccgaggccgagcgagccgcggccgggccgggccgagcgccgagcgagcaggagcggcggcggcggc

SEQ ID NO: 7672 - DNA, 2300 bp, Homo sapien
tctgggagatgggactcatgagtccgactgtgcaggcctgtcagagtcagatgggagcactgtgcccactgtgaagcctggcccccattcctcaaaggccctgcactaaaggccaggcagtgaggactgaaatgatggccgcagctctgacccaggtgcccaggcagtgcccccgaaggcatgagaggccacccagctcgagcctggttacccgtgtcagactggaggcctgaggagggcctctgtcccctggtagtgctcgggggccggggtccagggtccaggccccttactcaggcatgaggacaccctatctggggtcccctgagagcccctcccacagcccaccttgcctctccagttccctgtggcttacacccgttccatgccccctgccctgaggccccagccccaacctctttcccagggacctgccatttggtggagtagccctgagttccacttgagcctctgccacagacagtgtgtctgaccagctccctgagccctagtttccccaactggacccaccctccctgcctgtttctcaggctgctgtgcaaatcagccagacactggagtggggcagggtccagaggagtggtgtggcctcagagccccctgctaaccttttccccatgctgcagcctgacctggccccggtggccacagcatcccagggcccccagactgaatcgtgttgcacctgcacagcccgccccggtggggggtatcggcctcacagagcaggcgcagggccctgggctgcagtgagtgggggcccaggtgctaagccagggctccctgatgccagagccaaccccgctcctctgcctcaccctggtgcccatcgccgtccagctaccacctggggaaacagatttcaggaagagggtagaaacacaggggccccaacccagaatccaggaatcttcacgttggcagcagccttagcagctgcctggcccaccccttgcctggggccgagaccacctttgccacctccatagccagttctgcccagggagcccaacccacaccatccacaatgatgggaaggcctctgagagaggcgtggctctgtgaccttacactgttgccttcagggtacctgctcttccgagacttctgcctgaaccacctggaggaggccaggcccttggtggaattctatgaggaggtgagacccagaggcccaagccctgctctgcctggagaaaggggaggaggttggggcggctttgtggaacccacaagctgcctggtgtgggcatccccattccctgctgggctctagatgacctgcaggaatcctgtcctccagatcaagaagtacgagaagctggagacggaggaggagcgtgtggcccgcagccgggagatcttcgactcatacatcatgaaggagctgctggcctgctcgcatgtgagtgtcctcagctggccctgtgtgctggcccagagtcacctgcagattgggaggggaagagaggaccctgctgagaattcatggccacctctgtcttccccagcccttctcgaagagtgccactgagcatgtccaaggccacctggggaagaagcaggtgcctccggatctcttccaggtgtgtgcctcccggtccctccccaggcaaggtcaccttggacagcccctggtcaacaagcctggtcagccaggggtggggcctgggcaaccacggtctctcggggctcagtcaccaacttccagcttcctcccttagccatacatcgaagagatttgtcaaaacctccgaggggacgtgttccagaaattcattgagaggtgagagcagggaagtgtgggagaggaagggggagggaggggccgctctcagaaggggtatggctggcgtggagggcagaagccagccttcattaggccctgagcaggcaggtggctggcccgtcagcggcccccttgcaaggactcctgagaagtcagacaggctgcaggtcatctcccaccctgccctcctcagcaccaggcagctcaaagcccatcccaggcagtctcctagctccagggagctaggagagctgtgccacctgtgcctctttctctcccgtgggctgtatagcaccttgctggcccacctggactgagaagcatcagagtcctggtaggggtaggcccagtagagcgcatggcccccgtgaccctcacagccagagttggcgcggtgggtgggaattgtaggtagatttcagccagctttagggagcagctgttttagggtcactgctgcccagccatggagtgagctctgtgtcactgg

SEQ ID NO: 7673 - DNA, 2300 bp, Homo sapien
tgccaggcagagaagggaggcaggcagctgggcagggtactcagggctgaatacaagagtcaggggcaatggcctttgagccaggcctccagcattggtgtgggaaggagggaggacatttctgaggcagggaagagccagggactcatgagtggcccaggctggccggaggactataggaaggagccatgcctggaggcactgaatgccaggcttaacctatcccggagccaggtgtgtgctcagggcctgcagaatgaagatacaaacgacatggagtccagacctgccatgctcagggagcccttgaaggtgcggaacagggctgagagtggtgagagctggctctaaagtgattgcctggttactgagtacaggatgtggggagggaggtgaaggacaggaggcagggagacaaacctccgcagtgggagaggaagagatgaaaagaggccagacgggaagaacgtggtccagcagaaacaggctggacttggggctgagtgaggcgggagtctggggaagagggtaggtgtggttgggttggcttcggacatactgatgggatagcatgggatccctgggcacagagatgtcctggagtaagctgaaatgtggacctgggggtggcatcagggtgacaatgggaacggacagtctctctcccagggatgtgggggtcagggagagagaggaggccgtggaagagggttgagaaggcactgtcatggaattaagtgccagtggggagctgtgttcaagatggcagaaatcaggagaggctggaaccaagaaagtcctgtcggggttgagtttggagagggctcagggaagggaccgcctctgagaaaaggggtggccagggagggctgcagtagtggtgagcaggtgagctctgggcattcagaagccttcgggctgctaccaaccccaggacctcacagattgacaccatagcgtggggtggcaaagtgaccccagatggcacaggcgccatgtgactacagggagaaggcagggtaaaaatggcaatcaggccttccagcccagagtctcagaactgaggacgccctacagcaggaagtgatgctcaagctagctggccctcctcaatcatgttccacgtagggaaagggagaatagagggtcagccttggccacctagcaaaaccagggccccagaccccaggctgggcctccagtaatcaagggccggaactgagctgacggaggcctgcaccctagttccggtgtgggtggaggggccggccctgatttcgaaactcgccttcctctcctgacgctggcagccaaccgcagcctctgcaaaagggactcgtgcggcgggcgaaggcagccgttcgccgcgggcggtcctccgccgggacggctctgccgctgcctgggcctgcgcccctctctccccgaactcctatccctgacttcagggccccgggggccgcctccccgcatcgctgggcctgcagacaccggccaggtcccaggggaaggtgcttcccgctcagccggcaagcacttagtggcgtctgctcgttgctcgtctccaggccgggtgaggggagccggggcgccccacttcacccgcacaccccagcagagtcggtgaccgcgggacctggggtaggaagaccggggcgagcaaggggatccgcgggggaaacgcaggcatcacggctgcagcaggaccgcggcccgccgcgcacgcgcgtgcactaccgaggggcccagtgcccgccccctccggccccgccttcctcttccggacccggctccgggggtctgcgcagggctcggggcgcctcctgcgggccgcgggcggagctgtaaccgggcaccgccctccaggccgccccagcggacccgggcccgaccgaggtcggggcgcagacccaaggccgggcatctcctcgggcgctcgcggttgctctgccgcgcgctggcctggccgcggttgccatggttgcggggggacgggggcgcgcgcgaagccccgccccggcccggcgcagccccgcccgctccgccgcccgccccgccctccctgccgcccgcgctgccgccgccgccgccgccgccgctactgctgcgggggccgcggggggcgcagctggggcgcggctcggaggggaggctagggggccgtgccaggcccgaagccgaggcggggccgggatgcggcgctgaggcccagcatggccggcccgggccccaccttcccgctgcaccggctcgtctgggcgaaccggcatcgcgaactggaggccgcactgcacagccac

SEQ ID NO: 7674 - DNA, 2300 bp, Homo sapien
tgttttgttttgtttttttgtttttttttttgagatggagtctcactctattgcccaggctggagtgcagtggcacaatctaggctcactgcaacctccacctcctgggttcaagcagttctcctgcctcagcctcccaagtagctgggattacaggtgcccaccaccactccttgctaatttttgcatttttagagagacaggatttcaccatgtcggaccaggctggtctccaactcctgaccttgctgggattacaggtgtgagccaccgtgcctggccactaagggttttattctttttgatacaattatgaatcaaatgtttttcttaattttattttttgattgtgtattgcaaatgtataaaattacaattgatttctgtatgttgaccatgtatcctgcaacattgctaaactcattcattcaagtagatttttagtggattcctttcctcagtattttttttaacatataagattatgttatctgtaaatagatttagttgtatttcttcctttccaatttaggtgccttttgtttctttttcttgcttaattgctctgactagaacttccagtagaatattgattaaaggttgttagaggctggatgcggtggctcacgcctgtaatcccagcactttgggaggccgaggtgggtggatcacgaggtcaggagatcgagaccatcctggctaacatggtgaaaccccatctgtactaaaaatacaaacaattagccaggcttggtggcgggcgcctgtaatcccagctactcaggaggctgaggcaggagaatggtgtgaacccgggaggcagagcttgcagtgagccaaaatcacgccacttcactccagcctgggcgacagaccaagactccatctcaaaaaaaaaggggggtggttagagcaggctgggcatagtggttcacgcctgtaatcccagaactttgggaggctgaggcagccagatcacttgaggtcaggagtttgagactaagctggccaacatggtgaaacatcatctctactaaaaatacaaaaacaaaaaaaaaattagccaggcatggtggtgggcacctgtagtcccagctgcttgggagactgaggcacaagaattgcttgaacacaggaggcagaggttgcagtgagtccagattgtgccactgcactccagcctgggtgacagagcaagactccatctaaaacagtaaataaataaataaaaaagaaaagaaaagtggttagagcagacatccttgtattcttgtcttgttcttcatcttaggggaaaaacattcagtcttaccattaagtatgatattagttgtgagtttttggtagatacccttcatcaggttaaggtaattcctttccattcctcattgttagagtgtttttatcatgaaaggatgttggattttgtgaaatgctttttctgtgtttattgatatgatcatgtgattttttaaaaaattctattgatacatcaattgacctatggatattgaaccaaccttgcattcctgtgataagttccacttggttgtggtgtataattcttttcatatgttgctagatttggttggttcgtattttgttgaggattttgtgtccatattcataagtgatattggtctgtagttttcttgtgatatatgtctggttttggtatctgggtgatgcctcataactgaagtggaaaatgtcacctctttgtctattttttttaatagtttgcaaataattggtattaatttgtcttcaaaagattggtaggattcagtggtgaagccatttgggcctgagtgtgtgtgtgtgtgtgtgtgtgtgtgtatgtgtgtatagttttttgttgttatatttaccaatcagtctcttgacttgttatccatctattcagattatctatttattctcaaattagttttggtagtttgtgtctcactaggaatttgtccatttcatctaaattataaaatttgttggtgtacagctatcattgtatccttttataatgctttttatttctgttgctcccctctttcatttctgattctggtgagtaatttgaagtttttgttttgttttgttttgttttgttttgttttgtttttgagacagagtcttactctgtcacccaggctgaagtgcagtggcatgataagagctcactgcagccttgaactcctgggcttaggtgattcttcaacctcccaagtagctgggactgcaggcatgcaccaccaagcccagctaattttctttttttgtagagatgtggtctcactatgtca

SEQ ID NO: 7675 - DNA, 2300 bp, Homo sapien
gtcttaccattaagtatgatattagttgtgagtttttggtagatacccttcatcaggttaaggtaattcctttccattcctcattgttagagtgtttttatcatgaaaggatgttggattttgtgaaatgctttttctgtgtttattgatatgatcatgtgattttttaaaaaattctattgatacatcaattgacctatggatattgaaccaaccttgcattcctgtgataagttccacttggttgtggtgtataattcttttcatatgttgctagatttggttggttcgtattttgttgaggattttgtgtccatattcataagtgatattggtctgtagttttcttgtgatatatgtctggttttggtatctgggtgatgcctcataactgaagtggaaaatgtcacctctttgtctattttttttaatagtttgcaaataattggtattaatttgtcttcaaaagattggtaggattcagtggtgaagccatttgggcctgagtgtgtgtgtgtgtgtgtgtgtgtgtgtatgtgtgtatagttttttgttgttatatttaccaatcagtctcttgacttgttatccatctattcagattatctatttattctcaaattagttttggtagtttgtgtctcactaggaatttgtccatttcatctaaattataaaatttgttggtgtacagctatcattgtatccttttataatgctttttatttctgttgctcccctctttcatttctgattctggtgagtaatttgaagtttttgttttgttttgttttgttttgttttgttttgtttttgagacagagtcttactctgtcacccaggctgaagtgcagtggcatgataagagctcactgcagccttgaactcctgggcttaggtgattcttcaacctcccaagtagctgggactgcaggcatgcaccaccaagcccagctaattttctttttttgtagagatgtggtctcactatgtcatccaggctgcttttgaactcctggcctcaaacaatcctcctgccttggcctcccaaagcactgacattacaggtgtgaaccaccgcccccagccaagtcttctctctctttttttgcccaccgtggtcaacctagctaaaggtttgtcaattttgttgatgttttcgaagagccagtttttggtttcattaattttctctattatttttctattctctatttcattaacctttactgtaatatttattatttctttctgttctttctggtttagtttgctctttttccattgtcttaacatggaaggttaggttaaggttattgatttgagatcttctttcttaatataggcattcacacatattacatttatacttctaggcatgtcttttctttttttgacatggggtctcactccatcgcccaggctggagtgcagtggtgtgatagctcactgcaacctccgcctcccaggctcaagtgatcctcccacctcagcctcctgagtagctgggaacacaggcgccagctaattttttctgtttttagtagagatggggtttcaccatgttgcacaggctggtctcgaactcctgtgctcaagcaatctgcctgtctcagcctcccaaagtgctgggattacaggcgtgagccaccgggcctggcctggcctttacctgtgtctcataagttttttggtttttttttttttttctgagagggagtcttgctctgtcgcccaggctggagtgcagtggcacgatctcggcttactgcaagctccgcctcccgggttcacgccattctcctggctcagcctcccgagtagctgggactataggcgcctgccaccacgcccggctaattttttgtatttttagtggagatggggtttcactgtgttagccaggatggtctccatctcctgaccttgtgatctgcctgcctcggcctcccaaagtgctgggattacaggcgtgagccaccgtgcccggccataagttttgatatgttgtgtctttattcctgtttatctcagagtattttctgatttctcttttgatttattatttgagacgttggctatttaggagtgtgttgtttactttctacatatttgtgaatttccaaagttttttttttctgctattgacttctaatttcattccattgtggttggaaaacatacattgtatgacttctatcctttcaattttattgaggttttctttttttttttttttttttttttttgagacggagtctcgctctgtcgcccaggctggagtgcagtggtactgtctg

SEQ ID NO: 7676 - DNA, 2300 bp, Homo sapien
tcattgtatccttttataatgctttttatttctgttgctcccctctttcatttctgattctggtgagtaatttgaagtttttgttttgttttgttttgttttgttttgttttgtttttgagacagagtcttactctgtcacccaggctgaagtgcagtggcatgataagagctcactgcagccttgaactcctgggcttaggtgattcttcaacctcccaagtagctgggactgcaggcatgcaccaccaagcccagctaattttctttttttgtagagatgtggtctcactatgtcatccaggctgcttttgaactcctggcctcaaacaatcctcctgccttggcctcccaaagcactgacattacaggtgtgaaccaccgcccccagccaagtcttctctctctttttttgcccaccgtggtcaacctagctaaaggtttgtcaattttgttgatgttttcgaagagccagtttttggtttcattaattttctctattatttttctattctctatttcattaacctttactgtaatatttattatttctttctgttctttctggtttagtttgctctttttccattgtcttaacatggaaggttaggttaaggttattgatttgagatcttctttcttaatataggcattcacacatattacatttatacttctaggcatgtcttttctttttttgacatggggtctcactccatcgcccaggctggagtgcagtggtgtgatagctcactgcaacctccgcctcccaggctcaagtgatcctcccacctcagcctcctgagtagctgggaacacaggcgccagctaattttttctgtttttagtagagatggggtttcaccatgttgcacaggctggtctcgaactcctgtgctcaagcaatctgcctgtctcagcctcccaaagtgctgggattacaggcgtgagccaccgggcctggcctggcctttacctgtgtctcataagttttttggtttttttttttttttctgagagggagtcttgctctgtcgcccaggctggagtgcagtggcacgatctcggcttactgcaagctccgcctcccgggttcacgccattctcctggctcagcctcccgagtagctgggactataggcgcctgccaccacgcccggctaattttttgtatttttagtggagatggggtttcactgtgttagccaggatggtctccatctcctgaccttgtgatctgcctgcctcggcctcccaaagtgctgggattacaggcgtgagccaccgtgcccggccataagttttgatatgttgtgtctttattcctgtttatctcagagtattttctgatttctcttttgatttattatttgagacgttggctatttaggagtgtgttgtttactttctacatatttgtgaatttccaaagttttttttttctgctattgacttctaatttcattccattgtggttggaaaacatacattgtatgacttctatcctttcaattttattgaggttttctttttttttttttttttttttttttgagacggagtctcgctctgtcgcccaggctggagtgcagtggtactgtctgctcactgcgagctctgcctccgatgttcacgccattctcctgcctcagcctcccaagtaggtgggactacaggcgtccaccaccgtgcccggctaattttttgtattttttagtagagacggggtttcatcatgtttgccaggatggtctcgatctcctgacctcatgatccaccccccttggcttcccaaactgctgggattacaggcatgagccaccgcgcccggacttattgaggttttcttaatggcctagtgtatggccttgaagagtgttccgtgtgcgcgtgagaagcgtgtgtgtggttgttattgggtagagtgttctagcctgcttatgaagtccagctgtagtgttgttcttatcttctggttctttgttgatcttctagttgttctatcccttattgaaagtggggtactggagtctccaactgacatacttttcttttagctttttattttggaaaatttcaaacatatatgaaagaagagataatgtacttactcatcacccagcttcaacatttatcaacatcttgccaatcttactgaatctatccttccttaccttttttaaaaatgtttcctagagtgtgtcaaagctcatcccagatgtcctaatgtttctagtaaatgcttctgcacaattctaaaagacaaggatgtttttaaacccagccccgacactatcatac

SEQ ID NO: 7677 - DNA, 2300 bp, Homo sapien
aatcttactgaatctatccttccttaccttttttaaaaatgtttcctagagtgtgtcaaagctcatcccagatgtcctaatgtttctagtaaatgcttctgcacaattctaaaagacaaggatgtttttaaacccagccccgacactatcatacctcacaagattcatgctaattcctcagtgtcttctagtcccaagtccatgctcaagtgtccccccctgtccaggcaccctcttcaggggtcctccatgtttcatagcgagaaggggccctgagagttgggcaccccgggcaggctggctggagggggctttggaaaggaaggctttggccagcgtgtgagggtgcaggtctcaccagctcctgtttggtctgtttcaggaacaaatgtggtatctggggctggcggtctgagaagatggaaactgttagcggctacgaggccaaggcaggagaggctaggggtggggggctgggggtaggagatgaggtccaggaactcagctcctctccacatccatcccagagtagcccctgggctctggaaaccctgagcatttgtgggaactcagcgggcctgagtgcccagcccctgcggagtacacagggctcacccacatcatgggcccctacccagggtaccgagatcaaaagaggagtgtgttcctcttgaccctggggctgcatctcctcgttggtgacttcctggggttcagaccctgccacctcctccattttggggagcaagatctcatctgtctctgggacaggaggacctgggttctgcactggtgaggctgagtgtggggagcaggctctgagcccccagctccccgtgtcccctgctccccaggtgtacagtgccaccaacgtggagctggtgacacgcacacgcacggagcacctctctgatcaggacaagtcgaggagcaaaggtaaacccaggtgcgcctgcctgctgcccggtcacaccgtgtggtggggtcaccctggcctgggattaggggccagagtttcccaggatgagctgggaggcctccccattcccgtctgacccctcttcccccagacagtaggctccaggggtggaggtgggcaggggcgatgcgagcattgtgaccccttaccagctcccaccccttctccgtagcggggaagactccattccagtccttcctggggatggcgcagcagcattcctcccacaccggggtgagccggggctgggccgagacagggctggcggggggccgagcctgggcgggagggcaccctctgtcaccttgatggctgagtccgccctgggacccacgcaggcccccgtgcagcaggcagccagccccaccaaccccacagccatctcccctgaggagtacttcgaccccaacttcagcctggagtcacggaacattggccgccccatcgagatgtccagcaaagtacagaggtgaggtctgagagctggctggggacttgcctcgggacaagggctcttgcagacccctctctgggcctgtcatagttagggacccactccctcggctggcttctctctggactccactcctggagggcaggagtcatgtctgccttatccatggtcctcagcccttagcaaggggcttggcacagaaaaccggtagtttgtctttgatgaatggatggtgccacccatgtatggttttctattgaatttcatgagtacctgctggggccagcgtggcacagtgggaagggcccccagcgacgtggcctgggagtggagcgtctgccttggtggaacagaacagttacgctcttgcctcgtgaggagccttgagcaggtataggcggtaacagcaggcacagtgcctgcacaagcctagcgctctccccaccatctcaggaggattctcttagccacccaacagtcgctgggattcgaaccctggcagtcttgccctggggtgtgctggacataaaagtttggcaacacgtgagctggtgaccagctctgggctgaggaggaaaacggggctgtgggccaggcccagagagaagcccacagcctggcacctggcctccttgtccagaccagatgagctggtacgaaatcctcaggagccccagcctgggcccagggaggagggcagcttgggccacgtggccaggacaccagctcccgggggaggcgggcagcggcatctgagcagagcagggcactccaggccaggcagaaggtgggtaaaggcagctgcccacgaaccagagggcagtcctcaatggaagggccaccagccgtgcctcacccatgtcctgt

SEQ ID NO: 7678 - DNA, 2300 bp, Homo sapien
tctgctgttgccgcatcaggtaccccaacgggaggaagagggagcctgcacagctttctggtcaccaagccccgcgggttgagcgtggcccctctgccacctgcctagggaaccctttcccgtgcgaggtggaccccaccgtgtttgaagtgcccaacgggtacagcgtgctgggcatggagcgcaacgagcccctccgggacgaggacgatgacctcctgcagttcgccatccagcagagcctgcttgaagcgggcactgaggcggagcaggtgggacttgcccagggggtgggctctggcctctgcagccacacggcagaagtgacagctgtgggctctggtggctgcaggtgaccgtctgggaagccctgaccaacacccggcccggtgcccgccctcctccccaggccacggtttatgaggaacagcttcagctggagcggtgagcccctcatggggctggctgggtccctgtccccccagccctggcttggcggggagggggatagcaggaaggtgctaggaccccaggccctctgcaaggccaccctctgtcagcagcgctatctgccaccaaaggtggtgtgaggggtggggaagcagggccctgccttgtctcctctgcttgccaccctgtctttgcctttgtcctccaaagccggtccccagcccctcggcttctgccccagccttggcgctcactggcctgttcttccctcccctgccctgcctggaagggccctccaggaaagcctgcagctgtccacagagcccaggggcccaggatcccctcccaggacacccccagcccccggtccacccagctttgaagagcagctgcgcctggccctggagttgtcttcacgggagcaggaggagcgggagcggcgcgggcagcaggaggaggaggacttacagcggatcctgcagctgtcactcactgagcactgagccatagccccgggagggctggccaggccactccctgcccgcttttgtaatttatttatttataaactctctgctgctgagcttggggcctggagccccaggaatgagcaggcaggggagactgagatggaaataaagagactgtcgcagcagggctgctctgctcactgggctggagcggtggggaccctgaaggtggggcgctgtggagaggcactgtggatggcggcctcagacctgggcttgaatcctggtcatggtccccttagcctatctgagcctcagtttcttcagttgtaaaatgaggagaccaccccccaccctccgcccctcagggctgaaaggagctggcgagagtcacgtgtccttaccaagcaggcgtcctgtgaaagtcagatcccctgtgccctgtcccacctgctggggacccggttcgtcctgccacccagcctagtcttctggaaaccggcccacgtgcctgctggggaggaaaagcctgggtccccaggcaccattcacctccagctgggaagagccccgacgccgacccctgcagccaagcccaggccctggccctgactgcggcttgttctctgcgggtgggtttgcgcaagtcacttccgcctgcgtagctggaagccctgccctgctcgcctccgaggtggacctgagagcccctcatgggcttcctgggttatttgtaaaccccaggccgttttccccggaagcctgtcttccagtggttcctgcggagtgggaacgagaaggccgaccagcagggagaaatgtttggggtgggggcccttggccgagggcgcgccgtgcctgatcctctctagacctgtcccccacctccccacctcagctctgcctccctaggacccgcctctgcagggcacaggacgctggaggcccagaacagctcaggtgctcccgctgggccggcccgggccgggcgcttcctgggagggggaccaaactcccggccttcagctcttgccctccgggtctccgggctccgcacctgcgcccgcccccggcctcgcccctgacctgtgcccaggggctgggcgggccgaacagcggagaccggaggggcggggcccggccgccctgagaagctccgcgggcccggctgggcgagtgtctggccctttaagggccgcccccgaggaggtgccaggcccgggtggcgccgtccgtccttcctggtcctgcgggtccaggactgtccgcggggttgagggaaggggccgtgcccggtgccagcccaggtgctcgcggcctggctccatggccctggtcacagtgagccgttcgcccccgggcagcggcgcctccacgccc

SEQ ID NO: 7679 - DNA, 2300 bp, Homo sapien
agtccaggtggagctggagcgctcatgctcaaatacttgtggagacagctcgccgtcctcagcaagacgtggcaaacaagatgcagtgaatctttggtaaaactgaatttacaacagaagtatcatcccctatcgtgagattttgtccttaatatttctttggtgataaacatttctcaaatgaaatgatagcatttgcaagtgacagggtaaaaaaaaaacaacaaaaaaaaactggccgggcgcggtggctcatgcctgtaatcccagcactttgggaggccgaggcgggcagatcacgaggtcaggagatcgagaccatcctggctaacacggtgaaaccccgtgtctactaaaaacacaaaaaattagccaggcgtggtggcgggtgcctgtagtcccagctactcgggaggctgaggcaggagaatggcgtgaacccgggagatggagtttgtagtgagctgagattgcgccactgcactccagcctgggtgacagagcaagactccattgcaaaaaaaaaaaaagaaaaaacctccttcttgctgggcacagtggctcacgcctgtaatcccagcactttgggaggctgagaagggaggattgcctgagtccaggagttcaagaccagcccaagaaacatagggaagatctcatctcaacaaaaaacttaaaaattatctgggcatggtggcatgggcctgatgtcccagcaacttgggaggctaaggtgggaggatcatgtgagcctcggagttcggggctacagtgagctgtgatggtgccactgtactccagcctgggcgacagagtgagaccctatctcaaaacaaaaacaaaaacaacctccttcctcagcagaaacaaaaaatgtgcaacctatgtcagtcccattccccgcttttttccacacagtccctctttacccactgattttacatctgggaagaggggggatgggagaggaaggagcagggtcagcactgttctgggcctggggtgtctaggtggggagcagggtccttggggccactgtgaccctgggttcctcatctccccccaggcagcccagctggaggcaccccggcctccccggctccgctacctgctggtagtttctacacgagaaggagaaggtctgagccaggatgagacggtcctcctgggcgtggatttccctgacagcaggttcgagcagggagaggaaaggaggggcaaagaggtgagggacaggggggacaatggctttccctctgtcccctgccagctcccccagctgcaccctgggcctggtcttgcccctctggagtgacacccaggtgtacttagatggagacgggtaagcaatggcaactggaggtgggggctggagggtggaataactgagtgtgacggatgtgacggggcctgggcaccagggtacagtagaactttaggctgggactctggggcctgctcccagctccacgtcagattcaccgtgatcctgagcaaggcacctgactcctgggtctcggcttcccgtatccagcaaaaggatgggttctctgtcgcagagcctggagtctggcctcacctgtgcctggtctcctgcaggggcttcagcgtgacgtctggtgggcaaagccggatcttcaagcccatctccatccagaccatgtggtaaggacagagactgcctggactcaggccagcctctccttcgaaggaggctgcagggcctggggaagggcagcaagggaacagtgtgacccagcctctcctcctgtctcagggccacactccaggtattgcaccaagcatgtgaggcagctctaggcagcggccttgtaccgggtggcagtgccctcacctgggccagccactaccaggagagactgaactccgaacagagctgcctcaatgagtggacggctatggccgacctggagtctctgcggcctcccagcgccgagcctggcgggtcagtgtgtggaggggagggactgggtggaggggaaggcaggataatgcagtggggggcatggtggagaggggaaagggccccttgactgaggggctctgctcccaggtcctcagaacaggagcagatggagcaggcgatccgtgctgagctgtggaaagtgttggatgtcagtgacctggagagtgtcacttccaaagaggtgggcagggggcccggggactgagtcccctctagcaggggctgcaagcttgcctttcctgggagccctccccaccttgcctgtctccagtcctgagccattcctggatgccttggccttggccctaatcca

SEQ ID NO: 7680 - DNA, 2300 bp, Homo sapien
agggagggtgtgcacactccgcaccctcccccgtgcacatcttttcacctttatcctttgtagtatcctttataataagccactaaacgtaagtgtttctttgagttctgtgagctgctccagcaaattaatcaaaccgaaagaggggatcgtgggaaccccaacttgaagctggtcaggcagaagttctggaggcctggacttttgactgggatctgaggggagggagatgcagtcttgggggctgagcctcaacctgtgcgatccgacactatctcccggtagacagagttggaattgaattggaggccacccagctggtctgttgcttggtgtgtggggagaaaaaccccacaccttttttttttttttttgagatggattctcactcttgtccacccaggctagagtgcaatggcgcaatcttggctcactgcaaccaccaccttccaggttgaagcgattctcctgccgcagcctcccgagtagctaggattacaggtgcccaccaccatgcctggctaattttttttggtatttttagtagagatgggggtttcaccatgctggcgaggctggtctcgaactcctgacctcaggtgatccacccgtttcggcctcccaaaacgctaggattacaggcgtgagccattgcgcctggccaacccaatatctttggtcaccaaagtcttacgtgttgataattgtgatggtgtgagagcagaggaaaaacgccatttgagttttccccccaaatagtacataaaagatttgcctcatttaaaaaataaccacacatgttctattttatggaatccatcagttaagtggtcatttattgatgaacatttaggttgtctgagggctcccccccgcccccattccaggtaatgctttataaagcacttttgtggccgggcggggtggctcacgcctgtaatcccagcacttcgggaggccaaggcgggtggataacgaggtcaggagatcgagaccatcctggctaacacggtgaaaccccgtttctactaaaaatacaaaaaaattagccgggcatggtggcgggcgcctgtagtcccagctactcgggagaatggcgtgaacccgggaggcggagcttgcagtgagccgagatagtgccactgcactccagcctgggcgacagagagagactccatctccaaaaaaaaaaatcttttctttttttttttttgtgccacgacgctggctaattttcatatttttagtagaagagggggtctcgccatgttgcccaggctggtctctaactcctgacctcaggtgatccaccccctccgtctcccaaagtcctgggattacagacgtgagccaccgcgcctgccccaataccatcgttttctagaaatgaggaaactgaggctcagagaagtaactactaatctctaacagagccggaatcagatcctaggtttctagattctcattccaagagactaacgcgggagcggggaaggtggctcctgggcagtcaactgactgcacatttccgcccaaggcgggacctggatccagaagtgcttggagctcgcgggtgggaggatcaggatgactgctgctcccggagcccgacttcaactcccaccgggcataggagcctctcagcagcgcgaggggtcgcccagcctggacctggaacgcttgcagcacgaccgtcgcgcgcttccctccggaaccagctcccaccgtcacagccccctccctcggccgctcccggctcagcccaggctggggcggggcctcggaagcaactgccctcgccctagccagggctgccgcttgttaggccaagttttcaaacggcaaaatcaaccgcgctgaagagactgtgcctccttctcttcactccgcatcccagacgcctcagagaaactacctttcagaccttcgcggcctctcctgcgcccgcagcgcccggcagctggggacccgggcttagccacatcgaccgcaacgttcgcgcgccaccttgtgtccattcccttagcctccagggacaacccggaaaccacatttcccagcgtgccgagcgcctctgcgcaggcgcaaagagtttccctcgttgccatgggaacctcgccccttctagagtcctggccgcttgactcagctaagcgcgaaggtgttgtttcttcctgaggtgcgctggggctgggacccggtctgcagaaggtccaggggatggcgtcgggggattgaggagaggagaccaagccggccttgcctccgggaccagcgcttccaaattctctggggcgtcc

SEQ ID NO: 7681 - DNA, 2300 bp, Homo sapien
ctgatttttcatatttttttgtagagatggggtttttaaaaattaattaattaattaattttttgaaacagaatcttgctctgtggcccaggctggagtgcagtggcacgatcttgggtcactgcaacctctgccttccggattcaagcgattctcttgcctcagcctcccaagtagctggaattacaggtgtgcaccaccatgcctggctaatttttgtatttttagtagagacagggtttcaccatgttggccagactggtctcaaactcctgacctcaggtgatctgcccacctcgcctcccaaagtgctgggattacaggcacaagccaccatgctcagctggagatggagttttgagggaagatcctttgagcctgggagcccaggaggctgaagtgcagtgagctgagatcacaccactacactctggcctgggtgagaatgaaaccttgtctcaaaaaaagagaaggggaggggaggggagggcaggggaatcataaaagtatatttactattaagtggaagtggatcgtgataaaggtcttcatcctcgtcgctttcacgttgagtaggctgaggaagaggaatggttggtcttgctgtctcaggggcagcagaggcaaaagtggtggaaggggaggcaggagaggcaggcacattctggtgtaactttatggaaatacattgtaacttctgtctgacatttttgctttttcatttctctaaaaatgtttctatatagcagcagtcccaacctttttggcaccagggactagttttatggaagacttttttcccatagatggggttaagggggtagtttcgggatgattcaagcactttgtatttattgtgtgctttatttctattattattacattgtaatatataatgaaataattagacagctcaccataatgtggaatcagtaggagccctgagcttgttttcttgcaactagatggtcctttctggggtgacagaagacagtgacagatcaccaggcattagattctcataaggagctggcaacctagatccctcacacgcacagttcacaatggggttcgctctcctgtgatctgacaagaggtggtgcttatgtgggaatgcaagtgatggggagcagatgtagatgcagatgaagcttgtgttcgcttgctcacccgttgctcacctcctgctatatggcctggttccggtggcctgggggttggggacccctgctatatggtattaatccttcttccactgtttgattgagtttcagtgcctgcatcacagaagggtccatgtcataaaaaatgtcaaaagtggtcctgaataatcagaacccttcttctagactaatgttaattattttctgccactgctgcttctacatcttcttcttcatctggcacaggttcagaagcactcatctctatcgagtcatcttctgttaattcgtcttgggtggtgtctattaagctcttcaatttttctgagatccatatcaaacccttcaccccatcttttttgccatatccacaatctttttcatgatttccttgcttggctttatcatcaatcctgtgaaatcatgcataacatctggacacagtattctccaggaggaatttattgtttcaggcttgatggttttcatggctttttccataacaatgatggcatcttcagtggtataatccttccagactttcacgatgttctatcagggttcgcttccatagagttgacagtcctttccatagagtaccatgtatatgtgtaatgagcctttaaggtccttacgaaccccttgatctagagactgaattagagacgatgtgtttggagacaagcagaccactttgacaccttcggtattgaactgatggggttcaatgccaagggcattgtccaataacaagagaattttaaaaggcaatcccaggccaggtgtggtagctctcgcctgtaatcccagcactttgggaggccgaggcgggcggatcacttgaggtcaggggtctgagaccagcctggccaacatggtgaaaccctgtctctactaaaaatacaaaaattctctgggcatagtggtgcgtgcctgtaatcccacttacttagaaggccaaggcaggagaattgctttaacccaggaggtggaggctgcagtgagctgagatcatgctactgcattccagcctggatgacagagcaggactccatctcaaaaaacaacaaaaaaaggcaatccccttactgacaaggtacatcctgacttcagggacaaagtatcaatgaaatcaat

SEQ ID NO: 7682 - DNA, 2300 bp, Homo sapien
ctggggaagctggcagggacagcccagccaacatctacagagcagctcaggatgccagaggctgcccaaggagaaaaggcaataggcccaggcggtggtaggagctactgtggctgcccagcggcacaccccatttcacgctccctgggcggtggcagggccccacggctatcagctttcaggggtgggagggactgggaatgaggaggggtctgccccacccatggctccctactccctcagggcttggtggactcaggaggtgggtgccacacacctctggaaacagcccaggaacccttgccaagaccctctggggaggggtagtcaatcccccagagcctagacgccatccctacctagcatgctcagcacctgactggactcagcacctaggcccttcccagccctggtagacagggcctccctgcttccatcactaactccgcagggacactgtctccctgaatgtgggccccacttagtccgcaaggcagatggggggattagactaggcccagcccaaacaatacagcagaaagggccctccagctccatgcagtgcccccacaagctccctcctctaggacgccgatggggagagccaggcaggacgtggaccctgaagacatggcctgctcctctgcctcccctctggtggtctcctttccagagcagcttcctcccttgtgcccacgtgtaccagtggcttagccctcttccagtgcagaacacccagaccccagagcagggaaaggaggaggcagaggcctctgagcaggcagcagcccaggagtctgtgccccaccctcccagtatccctggaaggaagaaccggatgggatctctggagggtgattagagctgggctggtccctgtgctggttcccagactcccactggccagtacttttgcctcctgccaggaagttggtgagggggaggcagcagtatgggtgagtcagtgatgacaggagcccaagggacaaaggtcatgggtggagaattgagagacattgtttacagcagtccacctcctccaggaggccttccaatgctaatcatccctgtggtcctaaccaatctctgacccaccctttccctcttctggtaggaattatagcctctcactgacaactgtgcatctgtctgccttgtgacagtgagctcctggggtgcaagagagactgtggtttgattggggccctacaatgcctgtgactatcagcagtgataatcatttagctatacttcctactttcaaaaactttttgacatctattttaattaacatgtgggaaagtgcttagaacagtacttggcacatggtacgtgcaatgagtgttaggtttattattaatattttctgctcagactcacattattgtgagagacagggcagattttgccagtgaagaactagggatccaaacacattgtggtggggggaccagacccttgctctgccttcctactcagtatggaatcttcctgactggtggggcgggccggacacgacttgggaccccaggagagtcaaaacggcaaacacttactcggactaagagtgggcagcatctttgggcacagactgtgagaaaggaggtttcagaacccatgggcttctccagccaggtctcctggggccagtgggggttgggtgggagccgggaaggggcctggattagcccaaactctcttcagacctccagacctgcccccacaaggcggggcgggccaaaggaccgagtgaaggctccagctggactctagggagttacaaactggccacggggattagcgaagctgaaaagaacatttgcctaggaagggaaaacgggaagtgagaggctgaagataactctcctgaagtctctcgggacccacagcagaccaatgggggccggggaaggtggtgaagtcggggcatcccgacaggtcccccgccccagcctgcccctcctcccgcggcccacagctgaggcaccgccccgcccctcaccctacactgcctaccattggctagcgccagggccccgccccgcataggcggcctgccattggctgaagtctttcctgtttgcgtgcttttgggggtgggggaggcgtccctccctggaccccggcgacttcctctctcggtttgtctgggtcatcttgtctgcccgccgctggcctggccccgtctgtctctctcagcagctgtctttctcgcgcccactggccggtctctcctcttccccgcagttgcctccttctctgcctgcctgggtggccgccatgggccggaagcggctcat

SEQ ID NO: 7683 - DNA, 2300 bp, Homo sapien
gagtttgctggttaagagaccaggcgcagcagcttgcacctgtaatcccagcactttgggaggccaaggagggcggatcacttaaggtcaggagtttgagaccagcctggccaacatggccatctctactaaaactataaaaattagccaggcctggtggtgcatgcctataatcccagctactcaggaggctaaggcaggagaatcgcttgaacctgggaggtggaggctgcagtgagccaagatcccaccactgcactccagcctgggcgacaagagcgagactgtctcaaaaaacacacaaacaaaaaaacaccatctagaaaggttagcaagatcacagaaggcttttgtttgttttgttgttgttgttgttaaatagaagtgatctaaacatgttattgctgagtgagtagggggcgggtggagaaaaatggggaggtttagagaatggaataaggagacaaccacaggagagccaaagggtgtctgggcagccaaatagaacccggtgatatcagcaggcacctttgccgtggacctgtcaccatgggcagtgacattccttagcatttcagagggagggacagactggagaagagggcattttccaaggctgaggattggcaaggcaagaatggcagagaatcaagggggattctaggctgctggaaactactggaaattggctgggagccagagccaggcagtaagggaagagtggtcagtggagggaaacagaggaggggaataggctgggagaagaatcctgaatggggagcgctggggttcctgcatgctgaggacgcagaacgctcccacagtggcggtggcgtggtggagggagagggggatgagagcaccatcagagagggcacttcagagtgtgagttcttgaactctctcaaatagcccctaatgatggtgacaggggatgtgagctgctcgtttgtgttttggcactgtgtcccacaggcatcttgtgaaaatgccagcaccacagcacagggagcacctggtagatcacagggcactggcgttttctgtgagtgagtcattggttttccatccagagctgcttcaggagatccaatgagttttgttggttatcgaggttctacctcctaagaatggcttcagagtcagaggcccagaggctaacatgagactctaaggcattgcaatgtcaaagggtggagggtgtgttatctctagtattcctcatgtccccacaaggatcgggagagtgggcaagagaagaccctcctctccatcatctccagatagaatgtaaggattagaaatcttgtcatcatcttgagtgcttagaaacacacctatgtttgaaagaatgagcataaaatggagaactatcacttgaggcaggggcaacctctgggggaagtggggctagaggaggctctgatgggagatggcacaatactcagatcttgccagttttccacttttgcaaagactgacctaccgtccaagacttacaggccgcctcatgatatgagaggctcattcaagcactgagtttacacacacatgcacacacacactctcacttgccacagccaccctaaatggggaagggcaaagggaggccctctgttccccttaacctagagggcaagggctagtgactcagtcctggctgggcactccgatgggcagctccctctcagcttccccttctgctgtggagctacaactgtccctgcctttgttccttcaattctcaagctccctgactcagcctcgttcctgaacttcccagcaggggacaaagcccttgtcagtggggtggtgtgggggcagtggcagtgagggggatctgggggaaagctgtagagtcagagttccagtccttttcccagtctcaaccttcagggtccctcagccttgccagttcagtggtcacctctaggctcctccccaacttgcccagatctctctctgaggccagactgatggggtggaaatggttaactagaaccttcctcccacccagctgggcaaagtctgacacctggtggccaaggtgagtaatggccagaaggccccttttcaagtcttcccggaactgctccagagcctggatggccaaggtgaaagaggaggtgactagagaagaaggtgtggagggtggtaggagcaggacagaagatgcagtggtagaaaaacccagagaccccatcctttccactcaagctgctgcgatggaagcacattaggccagagaacctggaccaggggaagagggagtgtctgggaaggcagtgagggactaggaa

SEQ ID NO: 7684 - DNA, 2300 bp, Homo sapien
tttcttcagcgccccctcccctccgctcccccgacactggggctgctttctccctgactcagcaaggtgctttataaggtgctgaggggctcagccaaatccaaaccacattgtgcagactccacaaggagcggcttcgaggcggagggagaggctgaagcggctccccttctccctctcccctccttcttggccccctccctctgaaagggtagcagctagggggacctcctggctggcctccgtgccatgcacccatgggcatctgccttcttgaccttggcatgggcatcaagaaatcactgggttcatccatcaggaatgtcactgaaactccagagtcctggctggtgggggcagggaggaggtgcgggggcggtggggggggcagaggtaggccctgagcacttttcacaagggtccctccaggcagttttcatcagagctgctactgaggtccctcaaagtcccctgccccccaccccaagccagctctcctttcccagccctttttctccttgtttaggaaaaaaaaaaggaagaaaggacagagagagagagaaaaaaaaaaaccaacccaacaacaaagtctgtcccactccagtgaggtaattgaaaacaaacttcttccccaccccccccacccccccacctcagtgctcgcggtacagagaagggaagagctgccctgggacccagcactggccatgatcaggatgcctgcccaggccacaggttggaggcgctggggctggactggcagagtgccctcccattccaggggcaccaggaaggagtgggagacaaatctctgatgccactccagggagaggcatcaccttccaggtctggcccaccactggcctctcccactttgaaacaataaataaacaacaacaaaagcaacttattacccagtgatttaattggtggtgtggctatagggcacccaagccttggggaccacatgactctcccccaggaaaatcatgaagcagggcagtccccagccctgggttagagctgcctcctctgagcgtgttctccccggcagcccttggagagggaggaggggaccccctctgggagggtccaggcatacccccaggtatcctgcccagcaaatcccaacccaggcctgcgggaaggagggggagccctcaccgctaagccacccccacctcaccaccggaaaaaccaacaacccgaaaccccaaaggaaggagaatgccagggtcttcatggggaaacatttcacaaatggggacgctcgggcggtccatcgccttgaatcggagcattcccgctgagtcacccaagaagcctgtggtgttgaaactggtccgttgcctcgtgctgattaatgaattacaaatcccccacccatgtacattctccctggtcactggaggaagaatgaagaaccttgtgaacttgagggaaaaagtcccgccaagtggcctcttctcgcctctgggccgggcagtgggcctgcagtgccctcttcctcccccgcagggggcattgtgagctggttagtcacctgccccagccccagcgcctcgcttagctctagcttttggaaatgggacaagcggcgggacaataggcagggggggcggtcagcccagacaaagggcagcaggaaaaacaccatcacttgctcccaggccagctcgctggcatttgggagaatgtgtcattgcatttactcaagggggaggaggagggaaggttagagatgaggaggcagaggtagggtgggagcagggacctcgcacaggcagaggtaggttggatcagggaccccgcatcggcaggggacagggggcagggggcggtgtcccaggccaacgcctggggagaagcccacccgaagccggcgctgtcccccggctcctgggagtcctcagacggactgatggcctccccgccccctcccccaggaggcccagggtggtaccgccacagcctcgcctcacctcaccccccctcggtgctgtgggagggagagggagccccagaagccctcccttccctcctcccccctcctacccccaccccggggagggccgctacaatttgtggttacagctttacacgtcagaaaaaaaaaaaaaaagtttgcagaatgtcccacaccgaaaaaaaaaaaaaatccgaaaccgagcgaaaaaaacctgcgagtgggcctggcggatgggattattaaagcttcgccggagccgcggctcgccctcccactccgccagcctccgggagaggagccgcacccggccggcccggccccagccccatgg

SEQ ID NO: 7685 - DNA, 2300 bp, Homo sapien
gggcactatttccatggatcccccgggaaggggaagggaagagtaacctcctcccccaaggctccacggaaggggcaagggctggtgacgaggggagcagaagggaaggagagggagaaacaaagtgtatgcatgtatccaaatgtgtacaattattatgtatcaattcaactcatttgaaagtgggtctggagagcaagggtggcagagataaatatatcttctgcactaccacaggacctgaggggcaaggcacgggcaggccctgcaggaatacagggatgccctgggcccttccaagaactaccagagccttggtactgtggggagagtaggggtcagtgagtttctccaggactcccttacattttacacacgtggacccggaagcccaggggaaggggaataccttccagctgatgcatccccacctggcacacagtctggtttttttttttgagatggagtctcactctgttgccaggctagagtgcagtggcgcgatctcggctcactgcaacctccgcctccgggttcaagcaattctcctgcctcagcctccagagtagctgggactacaggcgcgtgacaacatgcccggctactttttgtacttttagtagagacggggtttcaccatgttggccagaatggtctggatctcttgacctcgtgatccgcccgcctcggcctcccaaagtggtaggattacaggcgtaagccaccgtacccggccagtctggggtcttttaaaaatacagacccggggctgggcgcggtggcccatgcctgtaatcccagcactttgggagaccgaggcgggcggatcacttgaggtcaggagttcgagaccagcctggccaacatggtgaaacccgtctctactaaaagtacaaaaattagccaggcgttgtggcaggcgcctgtaatcccagctacttgggaggctgaagcaggagaatcgcttgaacctgggaggcgtgatcgtgccactgtactccagcctgggcgacagagcgaggctctatctcaaaacaaacaaacaaaaaaaccccacacacacacacaaaaaacaaaaaacaggccggtgcagtagctcactccactttgagaggccaaggcggaaagacagcttgaaccccacagttgagaccggcctgggcaacatggcaagactccgtctctacccaaaaaaaaaaaaaaaaaaaaagggccgggcgtggtgggtgtgcctgtggtcccagatactcaggagactgagatgggaggatcccttgagcccaggagttccaggcggcagtgagccgtgttcgcgccactgcactccagcctgggtgacagagcaagaatatgtctcaaaaaacaaacaaacaaaaaaaggcacataaccacgatctaccctcgtaaaacgtttccagagcgtcccagcggtgcccctcatcatctggcggcccctacgcctctctgagactcacagacctactcccctctccagggggcggagcccacaccgctgagcatttactcttgttcttccctctgccaggggcaccgttctacccctttctgcctggagaaactgccgtttttccttaaaggatcctcgaagccggaaggagcagccacctcccactcccggctgctgcaagcaagctgctttgacttctttctagagttggggattgctgctggagtccgagtctcaggcccagagtgggtgcgatggtcttgcttgcaccctgtatcccccggcagacgcccgggaactctactaagtgggtgaccccagagagctcgcccccacactccgactccgagtccagcactcggtccactgcacagggacctcgcgccccacagctgcgtcctctctgaccttcgcaatccggtgcgcggcccgcggaacgccccgatctccaggggcacggaaggccgaggcgtgccgggggagccaggagcagctggctggcgggcgccgcgggcctccccggtcacgtgacaccccggacaacgtgcgccgtcacgtgacggcagagcctgtgagcgtttttctcacgtgacggaggcgcctgcacgtggaccaatggggaggcgggggcggggccggcaggggcggtgcgcgggaagggaccccggacccggaggtcgcggagagctgggcagtgttggccgctggcggagcgctggggcagcatgaagtgcctggtcacgggcggcaacgtgaagggtgagtgcaggtcggcctggcagcggcggtgcagcagccgcggagccgccagcctaacccccttccgctcttc

SEQ ID NO: 7686 - DNA, 2300 bp, Homo sapien
ctgacagaaaagccaggcctctgtccggagacccagccccaagccctgcccctgtccccaccagcccagctcacctcccgcagcacctcacctcctcctctcacttcctcctcctcctcacacagctttggcaaccgctgggggcccctcccaagggtggggggtgtcaccccttcctctctgaggctcttcctgcctgccccagtgcccctgagctgtgggctcctcccaccttccccatggccccagtgactgcaggcttgagttcctgtgctggtgtggagggcccaggactgttagacgcaggggccgggccacctccagttcttttgtttgtttcttttgagacagagtctcgctctgttgcccaggctggagtgcagtggcgcggtctcagctcactgcaacctccacctcccggattcaagtgattctcctgcctcagccccccaagtagcagggactacagacaagcaccaccatgcccggctaatttttgtatttttagtagagacagggtttttgccacattggtcaaactcttgacctcaggtgatccatccacctcagcctcccaaagtgctgggattgcaggcatgagccactgcgcctggacttcatgtttgtttcttgagacagggtcttgctctgtcacccaggctggagtgtaatggcacgatctgggctcactgcaacctccacctcctggtctcaagagatcctcctgcgtcagcctccacagtagctgggactgcaggcgcgcaccaccatgcccagctaatttttgtattttttgttgagacagggtttcgctgtgttgcccaggctggacgcaagagaccatcccgccttagcctcccaaagtgctggaattacaggcctgagccaccacggcaggcccacttccagttctgaggttactggcatgtaaagcaccaactcagggttccaacaagaattaaggttcatttatcgtctgctcttcttttttttttttttttttttgagacagtctcgcactgtcgcctgggctccacttcccaggttcaagcgattctcctgcctcagcctcccaagtagctgggattacaggaggctcccatcatgcccagctaactttttgtatttttagagagatggggtttcaccatgttggccaggctggtctcgaactcctgacctcaaatgatccgcccgcctaggcctcccaaagtcctgggattacaggcgtgagccactgtgcccagccacgtctgctcataaagtaattatttttatgtgcacaccctgcaatattactgtgctactcaaaagctaattatggggccaggcttgttggctcacgcctgtaatcctagcactttgggaggtcaaggggggtggatcacttgaggttaggagttcaaggccacctggccaacatggcgaaaccccacctctgctaaaaatacaaaaattagctgggcacagtggcgcacgcctgtaatcccagctactccagaggctgaggcaggagaatcgcttgaacccgggaagtgaatgttgcagtgagccaaagtcgcgccactgcactccagcctgggggacagagcaaaactctgtctcaaaaaaaaaaagcgaattatgggacttataagaaaatattaatttagcatgccccaaggaccaaagtgcgctgggaattcagccgtagctgtctttgagtgtggtcagccgcctgggcgccacagagacccacgaagaagtggggggtcctccgtgaatgcgaggtccaggctgtttttatctcttgagcctcagtttcctttcctgcacttggagcagttaaccctcagtgcctagcagccggttattaacatgttcacaacaccttccacccagggaaggggtgggaaagtctgttgggcttttgaaagagaaaaacaacttccacagtccttccggccccacatcctctgaacagggctgggcgcctcctctggggcgtaaccagcttggtcacgcccccgacagaccccgcccccagcccgccgccgaggccccgccccccgggccgccgcgcctcacgtccagcgggggcgctagagggcgggggactgggcggggcgggcccgggaggcctggaggcggggccgcgggccgggggcggactggggcgggcggaaggagagccaggccggaaggaggctgccggagggcgggaggcaggagcgggccaggagctgctgggctggagcggcggcgccgccatgtccgacagcgagaagctcaacctggactcgatcatcgggcgcctgctg

SEQ ID NO: 7687 - DNA, 2300 bp, Homo sapien
ggcccgctcctgcctcccgccctccggcagcctccttccggcctggctctccttccgcccgccccagtccgcccccggcccgcggccccgcctccaggcctcccgggcccgccccgcccagtcccccgccctctagcgcccccgctggacgtgaggcgcggcggcccggggggcggggcctcggcggcgggctgggggcggggtctgtcgggggcgtgaccaagctggttacgccccagaggaggcgcccagccctgttcagaggatgtggggccggaaggactgtggaagttgtttttctctttcaaaagcccaacagactttcccaccccttccctgggtggaaggtgttgtgaacatgttaataaccggctgctaggcactgagggttaactgctccaagtgcaggaaaggaaactgaggctcaagagataaaaacagcctggacctcgcattcacggaggaccccccacttcttcgtgggtctctgtggcgcccaggcggctgaccacactcaaagacagctacggctgaattcccagcgcactttggtccttggggcatgctaaattaatattttcttataagtcccataattcgctttttttttttgagacagagttttgctctgtcccccaggctggagtgcagtggcgcgactttggctcactgcaacattcacttcccgggttcaagcgattctcctgcctcagcctctggagtagctgggattacaggcgtgcgccactgtgcccagctaatttttgtatttttagcagaggtggggtttcgccatgttggccaggtggccttgaactcctaacctcaagtgatccaccccccttgacctcccaaagtgctaggattacaggcgtgagccaacaagcctggccccataattagcttttgagtagcacagtaatattgcagggtgtgcacataaaaataattactttatgagcagacgtggctgggcacagtggctcacgcctgtaatcccaggactttgggaggcctaggcgggcggatcatttgaggtcaggagttcgagaccagcctggccaacatggtgaaaccccatctctctaaaaatacaaaaagttagctgggcatgatgggagcctcctgtaatcccagctacttgggaggctgaggcaggagaatcgcttgaacctgggaagtggagcccaggcgacagtgcgagactgtctcaaaaaaaaaaaaaaaaaaaagaagagcagacgataaatgaaccttaattcttgttggaaccctgagttggtgctttacatgccagtaacctcagaactggaagtgggcctgccgtggtggctcaggcctgtaattccagcactttgggaggctaaggcgggatggtctcttgcgtccagcctgggcaacacagcgaaaccctgtctcaacaaaaaatacaaaaattagctgggcatggtggtgcgcgcctgcagtcccagctactgtggaggctgacgcaggaggatctcttgagaccaggaggtggaggttgcagtgagcccagatcgtgccattacactccagcctgggtgacagagcaagaccctgtctcaagaaacaaacatgaagtccaggcgcagtggctcatgcctgcaatcccagcactttgggaggctgaggtggatggatcacctgaggtcaagagtttgaccaatgtggcaaaaaccctgtctctactaaaaatacaaaaattagccgggcatggtggtgcttgtctgtagtccctgctacttggggggctgaggcaggagaatcacttgaatccgggaggtggaggttgcagtgagctgagaccgcgccactgcactccagcctgggcaacagagcgagactctgtctcaaaagaaacaaacaaaagaactggaggtggcccggcccctgcgtctaacagtcctgggccctccacaccagcacaggaactcaagcctgcagtcactggggccatggggaaggtgggaggagcccacagctcaggggcactggggcaggcaggaagagcctcagagaggaaggggtgacaccccccacccttgggaggggcccccagcggttgccaaagctgtgtgaggaggaggaggaagtgagaggaggaggtgaggtgctgcgggaggtgagctgggctggtggggacaggggcagggcttggggctgggtctccggacagaggcctggcttttctgtcagggcagggcctagcccctgcccccataaaagaggagacatagggggcttggtgagataccctgaaacctcccccctctgacccc

SEQ ID NO: 7688 - DNA, 2300 bp, Homo sapien
tcaggcctgtaattccagcactttgggaggctaaggcgggatggtctcttgcgtccagcctgggcaacacagcgaaaccctgtctcaacaaaaaatacaaaaattagctgggcatggtggtgcgcgcctgcagtcccagctactgtggaggctgacgcaggaggatctcttgagaccaggaggtggaggttgcagtgagcccagatcgtgccattacactccagcctgggtgacagagcaagaccctgtctcaagaaacaaacatgaagtccaggcgcagtggctcatgcctgcaatcccagcactttgggaggctgaggtggatggatcacctgaggtcaagagtttgaccaatgtggcaaaaaccctgtctctactaaaaatacaaaaattagccgggcatggtggtgcttgtctgtagtccctgctacttggggggctgaggcaggagaatcacttgaatccgggaggtggaggttgcagtgagctgagaccgcgccactgcactccagcctgggcaacagagcgagactctgtctcaaaagaaacaaacaaaagaactggaggtggcccggcccctgcgtctaacagtcctgggccctccacaccagcacaggaactcaagcctgcagtcactggggccatggggaaggtgggaggagcccacagctcaggggcactggggcaggcaggaagagcctcagagaggaaggggtgacaccccccacccttgggaggggcccccagcggttgccaaagctgtgtgaggaggaggaggaagtgagaggaggaggtgaggtgctgcgggaggtgagctgggctggtggggacaggggcagggcttggggctgggtctccggacagaggcctggcttttctgtcagggcagggcctagcccctgcccccataaaagaggagacatagggggcttggtgagataccctgaaacctcccccctctgaccccgcagccaggccccaggctggccgggagtggcccctcacactggttctccccactttctctgcctgtggcatcgaaggccccgggcaccatggcccaggccctgggggaggacctggtgcagcctcccgagctgcaggatgactccagctccttggggtccgactcagagctcagcgggcctggcccatatcgccaggccgaccgctatggattcattgggggcagctcagcagagccagggtaagggggcagggtgagggctggcggaatgctgggacagaggacagggggctgagggctgaattctggagggaggccgggagggtctggtggtagggattgggagggggactcagccagtagcacccctctgcaggtgccaggtggaaccctaaggtgggaagggtccggggaggcctctgtacgtctcttacccccagcctccgagggtttgcacccactactggggcagaacatccttcccctttgaacctctggctcaggaatcccagatccaaatcacagaacccatacctcctccttccccctttccccaagctacagacagaaacacaagtccagatatagacagaaacttgccccaggtcacacagatcagacacagacccagactcaaactcaggactctgggcttccagtccagggctctctccagccagcttcccctatgaattgtctgtgtccctgtcctgggtgacagccaaccagtccctcccccaatacacacccactcaccccttcagtctcctgcttctgcccacgtcggagccacatcctttcctgtccccgtgacaagcattggcagctcctgggtcacaggtcaccccacagggctcccagagatccctagggccaggagctgggttcacctgggtagcctggagggtggcagtgtgggccttgggtaacagctgcccagcgtctggatacctgtgccatgcacccccaggccgggccacccacctgcagacctcatccgccaacgggagatgaagtgggtggagatgacctcgcactgggagaaaaccatgtcccggcggtacaagaaggtgaggggggcaggggccccacttggcttccatggctcattcctctctgcctcagcccacatcttggcaaaatgtacccaccctgtgtcccagcacctccggcctttgctccctgccacccaaagtgggcccctgcctgctgatgagctgtgcctggggcctgccagcaggagctatggaggctgcctagtggagcccttggcctcacccacaggtaaagatgcagtgccggaaaggcatcccgtctgccctgcgcgcccgat

SEQ ID NO: 7689 - DNA, 2300 bp, Homo sapien
aaattagctgtcatggtggcgcatgcctataatcccagctactccagcctgggcaacaagagcgaaactccatctcaaaaacaaaacaaaacaaaacaaaacaaaagtagctgggcatggtggctcgcacctgtagtcccagctacttgggaggctgaggcaggagaatcactggacccggggaggcggaggttgcagtgagccaagattgtgccactgcactccagcctggtgacagagtaagactctgtcttaaaaaaaaaaaaaaaaaaaaaagggatagggtcaaaaaaaaaaaaaaaaaaaagagagagagatagggtctcggctgggtacagtggcttacacctgtattctcaggacattgggaggccgaagcaggaggagcacctgaggtcaggagttcaagacaagcctggccaacacggcgaaaccctgtctctactaaacacacaaaaattagccaggcgtggtggcgtgtgcctgtaatcccagccactcaggaggctgaggcaggagaatcacttgaacctgggaggtagaggttgcagtgagctgagatcacaccactgcactccagcctgggccgacacactgaaactctgtctcaaaaaaaaaaaaaaaaaaaaaaaaagcggagcgagcgagagagataggctctcactgtattgcccaggctggagtgcagtggcacaaccaggactcactgcagtctcgacccccggggctcatgtgatcttcccacctcagcctcccaagtagctgggattacaggcccacaccacctcaaccagctagtttaaattttttttttttatagagacagggtcttgctatgttgcccaggctggtcacaaactcctgggttcaagcaattctcctgcctcaggctcccaaagtgctgggattataggcagccaccgcaccaggagaggctggatcttatagacatcctggcccctgtgtgcaagtccactgggtccagaagtgaggagggggctgcacagatgtgtggagaccctggcccaggagggcctctctgggagaacgtgcaatagggcaaagcgctggcagctgggacagaaagctgcagggctgggacctccggcctccatccaaaggtagggctcagggctgtgtgctccaggctgctctcccgggcaccccacccctaagggcgggccctagtaccagtctctgcctgctccggctctccccgcccctcctttccatctcttctccatggtgggcctccctctttcttcatggcagccctacgtctgtgaccctcgacgacagtccctgtccatctgtacctggccctctgtcgggacttcctctgtgtctctgaagacccccgtctctccctgcctgctccgtgccctcctcctgctgggtccgtgtcccgccacacgcccccaggtctgggacgttttcgtggctgacgggcgggggggggggggggcgcgtccccggcgggtccctatcggtccctgtcggtccgtccgccccgcgccgcccccgctgggcactgggcatgccccaggcgtttctatataaagcggcgccgcttgggccgggcgctgtgccactgccaccgccgccgccgctgcatcccgcccggtccgagtccgcccgccacgcccgccgagccgctgccgccgccaggtaccccagctccggccccgccccggggagagccagggaggggggcggccggggcaggagtcgcggggacgaggaccccgggcgcccgctccccgcggcgggaccctcgacgctacgccccccacccccgggacccggtgcccccaactcccccccgcgctggaggggcagagccaagcccggaccccagggcaggaaggacctgtgagccgcactggggcaggagccactcggtctgggcagcagaaatccctccctaccttcggggtgggggtggggctgccttggcctctctctgcagggacaggtgtcggccacctctccactcccaaagtctaggggctggaaggccaggcagggacttggctgccctgactccttcgtctctctgtccctctgtctctgccatcagtctctcagccactccacccacgagatggtgagtcttctgtggtccctcccccacaaggcccaagtccctgggcagagagtgggcccagaggacagcaggcagcacctaggacctaagcctgggagttgccccctgcagacagcttagacccacgaccagctcccccacccccaccctgcggctgcatcctgggaggtgggcactcttagtgccctgtgac

SEQ ID NO: 7690 - DNA, 2300 bp, Homo sapien
tacgagtacacaaacactaggtgctcaataaatgtgtgttgtggattgactgaataaatggaaggggcagaagtgggacacctgatacaggccggaggggagggaaggcatcctagaggaggcaatgcctaagctgggagctgaagaatatgagtcagccaggtggctgcaggaggaaaaggcatgttctgggtgggaggggctgcagcacagagaagagggtgtgagagagcgtggtggactctttcccacaggcagcctcactggccggggattgcagagaaactaccagggctggggcttgggacaagtggtttggtcacaattcaccccatgtgctctgacactgggaagtgtccacggaggaatccagtggggccccgtgcccctaaagcttactgcctgctgggggaacccagggcagggcagccactgaagagagagggagggtggctctctgcaaagtaacacagcctcggcagtggagtgacattccaagtggagaaaacactgagcaaggcaggggacacagaggtggtgtccacagggggtgctgcacggtgggagaggggagaggaggccagtgtgctagattagggccagcttgagatggcctcagttttcttatctgttcaatggggataagaatgtctaattggctgtgcgcagtggctcacacctgtaatcccagcactttgggaggccgaagcaggaggatcgcttgagctcaggagttcaagaccatcctgggcaacagagcgagatcccgtctctactaaaaatttttaaaattagccaggcaggccgggctggtggctcacgcctgtaatcccagttctttgggaggccaaagcgggcagatcacttgaggtcaggagttcgagaccagcctggccaacatggtgaaaccctgtctctactaaaaataaaaaattagccggacatgttggtgcgtgcctgtaatcctagttactccggaggctgaggcacgagaatcacttgaacccaggaggcagaggttgcaatgggccgagattgcgccattccactccagcctgggagacagagagagactccgtattaaaaaaaaaaaaaaaaaaaaaaaaaaaaaaggccgggcgcggtggctcacgcctgtaatcccagcactttgggaggctgaggcgggtggatcacgaggtcaggagatcgagaccatcctggctaacatggtgaaaccccatctctactaaaagttagccaggcgtggtggcgggcgcctgtagtcccaggtactcgggagcctgaggcaggagaatggcgtgaacccgggaggttgcagtgagccgagatcacgccactgcacccagcctgggcgacagagcaagactccgtttcaaaaaaaaaaaattagctgggcatggtggcacgtgcctgtagtctcagctactagggaggctgaggtgggaggatcgcttcagcccaggaagtcgaggctgcagtgagctgtgatcgcaccaccgcactccagtctggtcaacagattgagaccctgtctcaaaaaagaaaaaacaaaaacaagtctacctgcctggctcgctccagattctgtaaagtgatgccctgctatgaacttgattcaggatctgtatgcggttccccagcaccctctgcgggtcctgggtgccaagtgtcaggaattcaacctcaaagggcccgccctttccccaagacagagccaggctccttagcctggcattcaaggcccccactctggcgctaacgctgtccctcgcccagcccatctacccgggctcctctcctctttctgtggaggactccctgccctccccagggcctctcactccagaactagcggagtcccctcaccctcaccgggcggcggactccgcccttactcctgggcttacttgtacctggccaggatgccccgcccaagcaccgcctctagcgcggctggtcccgccccaaggacgcccctttgctccaggccccgccccggggtcccgcctccaccactcgggccaggacctggggcccagccccgccccgcgccccgcccacctggagcccgtagtcgcgcgccgcctcccacacgaacttcttgctgacgccgccagcgccgaccaccagcagctgttttccctccatgaggcagcgcgccgaccgccgaagcatggtctccaccagcggcgccgccaccgcctcgtcggccgccggccccagccgcggcgcggcccacagcccctccagcgcgccgcacgcctccagacacaggccgccgttcagctccagggcca

SEQ ID NO: 7691 - DNA, 2300 bp, Homo sapien
tcacagacaagatttgctgtgttgagtgtgttcattccttctttctttttttttctttttttggagacggagtctcactctgttgcccaggctgtagtgcaatggcgtgatcttgattcactgcaacctctgcctcccaggttcaagcgattttcctacctcagcctcccaagtagctgggactataggcatgcaccaccactcccggctaatttttgtatttttagtagagacaggttttcactatgttggttaagctggtcttgaactcctgacctcaagtgatccacccgccttggcctcccaaattgctgggatcgcaggcatgagcgaccctgcctggcctaagttcattctgtcaacagcgtttttggtttttgctgggtgtagtggctcatgcctgtaatcacagcactttggaaggccaaggcaggaggatcacttgagtccagaagttcaagaccagcctcctgggcaacaaaacaagacctcccctctaaaaaaaaaaaaaaagaaagaaagaaagaaaagaaaaaagattatgtgattatgtcattccagttacttgggatttgaggtgggagaatcactggaacccaagaagtcaaggctgcaatgagccacgatcttgccactgtactccagcctgggtgacagagtaagatcctgtctgaaaaactaaacaaaacaaagaaaaaaaaaccataaagttttttttttttttttttttttttttttttttttttttaagatggagtctcgctcttgttgcccaggctggagtacaatggcatgatcttggctcaccgcaacctccgcttcccaggttcaagtgattcgcctgcctcagccttcccgagtagctgggattacaagcatgcaccaccatgcccagctaattttgtgtttttagtagagacggggtttctccatgttggtcaggctggtcctgaactcccgacctcaggtgatccgcctggctcggcctcccaaagtgctgggattacaggtgtgagccaccgtgaccagccaggttttcgggttttatctgtttgagacttggtctcactctgccgcccagcctggagcgcagtggtgcaatcttggctcactgcaacctctatcgcccgagttcaagcgattctcctgcctcaacctcccgagtatctgggagtacaggtgcgcgccaccacacccgtctaattttttgtatttatagtagaggcagagtttcatcatgttggccaggctggtctccaacttctgacctcaagtgatccacccacctcggcctccgaaagtgttgagattacaggtgtgagccaccgcctccggcctgtttgtttttttgagacaggatctcactgtgtcacccagcctggagtgcagtggcaccatcatagctcactgtaaccttgaactcctggcctcaagtgatcctcccaacttggcttcccaaagtgctacgattacaggcgtgaggcatcgtgtccggcctcaacaacgttttttgaagtgtctattctgtaccaggtgcctaaatgtgcttaaattaagaagggagtaaacgccaacaaaatcccatatttacaggtctatcactgacccccaaaaccctatttaaggcgggaacctggcaacatagcctggcagtgagctggccactcagtaaatgctccgatttgcagggtcctcgagccagaggcactttgaggagaccctgatgcagccgcctccctttctggagtgaaccgaaagcaacgcgacctgcctttcatcacgcagccggcctggcagtacccgtctccaacagggctggggattgcatttacattcacacctgcatacacttccgaccctgctccatccaaactcaaaacaccgtagaaccaaaacgggctcccagaaagccttgctgggaagaccgagggtcctgcggaaaggattctgcaggctgaaggctaggcgcctcgccactctaggactacaattcccgagaggccttgcgacggaagccatctttgttccccaccaggctaagcgattttccggagggggagtaagatcccttgcgtcaccggcgcgcgcagctgccgtcgcggagagatgatgtttaggtccgggactgtcagtcagtgcgcggccaggtacgggccgacgggcccgcggggccggcgccgccatggcggccgtgtttgatttggatttggagacggaggaaggcagcgagggcgagggcgagccagagctcagccccgcggtgagtgccctgccctggcgcgactggatcctggagccga

SEQ ID NO: 7692 - DNA, 2300 bp, Homo sapien
aggccgcccgtccctcggctcacttggccctttctccagcaagcgggccatgcagttgtgaccagggcgaggcctgtgaatggaacatgacctagtatggtttgtgggcagtgagctggacagatgccagcttgcccttgtaccagccagctgttgggctgtgccagtcagggggcaagtggggatgagacagagggtgagcaggggccctgctctggatgagccacaggagaaggacaccaggcagtcagggagggagtggcagccacacagatcttcctgaaggaggcaggacccataacacagctggggtggcgccatccactgggggcaggccaggcgaagggcacagtggtgggaatggagagaggaacaaggagtctggctgcagtggggaatcccatgaagaggggaccgggccacatgtggcttggcctcagatgccaagagcctcggacacgcttccatgattctctggccagcatttgccgactgctctttcaacatgccaggcacattttggggagtggagctgagctgatagggcctgctccaggagctcacagtccatgggccccagaatcccataaagccacatagtggcccctgtgccttgcaggggaaggtgatgacaggggccttgctcagaagggtgggaaagcttccgagggagctgttgatggtgtccagaaaggaagttaaaggccagatttgagctttccaggccgtgggagaatgggttaacagagtgcaagcctggaggccaggggagggatgaggggaccctgatggggcctcctaactgatcctgacctccccggccccctgcccagtcggacctcttccaggatgatctgtaccccgacacagccgggcccgaggcagccctggaggctgaggagtgggtgagcgggcgggatgccgacccgatcctcatctcactgcgggaggcctacgtgcccagcaagcagcgggacctgaagatcagccggcgcaacgtgttgtctgacagccggcccgccatggccccgggctcctcccacctaggggcccccgcctccaccaccactgctgctgatgccacccccagcggcagcctggccagagccggggtatgcacgcgcaggcaggggtggtgctgggagccccaggtgtggccctggcctgctgtgtgggcttcagccattcgctgtccctctctggggtagtggtgggtttgggagggctatggcttagcagcccctgaccaccgccccctacccctgcttcatgtccccacaggaggctgggaagctggaggaggtgatgcaggagctgcgggccctgagggcgctggtcaaggagcagggcgaccgcatctgccgcctggaggagcagctgggccgcatggagaacggggatgcgtagggccacagccacacgccaccttcatctcctccgccgcccccttcccactcagcttctgccagcgggtcgcaccgggctagctggctgcccagagcctctgaggcagcgcaggggtcagttcccacccccacccgtcccaggcccaggccgaagccagcgcccagctttcctcactgttcctgtggaggatgtctacgcccaggcgagctcctcgacctctgagggaccatctccccgaccactgcccagccctctgctccctccccagaggaggcgggagggtgggctctatattttcattccaaataaaattctctttctaaaagccaggctgacctgctgctgcaagggtggggctgagaagtctggaaacctggagacagaggatgtcacaggagtcacacatgtgcagaaggtctgggggcagtgagcagccccacaggcattgctcccctggattgtcaggcagggaaactgaggcagaagacctgagaacacatgcaaggctgcatccagcttcaagttggtgctgcttcttccttggaggacaggcccggcagcccagcctcctccagagagactggggagggtctggtgtggaccaggggtcctgcagcagggaggggcaggtggggtatgtgggcaggaagcggaagcctgggccacccttcactgcagacgagcactgagctcacttctcgctcgacacagccagagctggaggtgggtgcccggcacggaggggcctgcggaccaatggtaagcctcggagccccccgggttcttgggatgggggccacaggcggtcggggctagaatgtctgggcctgtggagctaaggagggccccacattggccccagggaagaggtgagacctaagaggagtatggca

SEQ ID NO: 7693 - DNA, 2300 bp, Homo sapien
ccaggagtttggaaccagcctggacaacataggagacctccatctctacaaaaataaaaattagctaggcatggtggtacgtgcctgtagtcccagctacttgggaggctgaggcgggaggactgagccccagagtgtgaggcggtagtgagctaggaccgtgccactgcactccagcctgggcaactgagcaagaccctgtctcccaaaaaaagaacaatgcagtcaggacaagtaagaccaaagagtggctgggtgaggaatggtccaggagagccctaggaggaggtgatgtctgaccagagacctgaatcgagtggggaaaggagcctttttgggatctgaggaaagagcttccagatggagagaacaggatgtgcccaggcctcggggtgggaaggaaggtgggtgggatctagatgatccttctagccccagggtttatagagcactaggaaaagcaagggctttggacccaagccgatggggattgcatccggctggatgacctcaggcaggcaccgcacctctctgtgcctgtttcctcaatggggtgtggcaatgggaatgagatgggagacaagcccgaggtcaccctcagacacacagtgggggcctcttttagccagagacaaggctcctgtgacctctgctcttcccccgcttcgtcctccatccatctctttctgggaaagggagggtgccatcggtcagccagggcagtggatgctcaaggaaagaataagggaagtagccggtgccccagagccgctggcctaagggaacgggggtacattccacctgtggaacgggatggggtgggtctggagaggccagtctgggctccttgtcacaggcgctggctagagaaagagagaggcctgtgaatggatctccaggccttcgagggagatggtggagaaaagaaggcaaggtgcaagggactcactggccatggccccctttcaaattgtaataagaaagctcagcagaatgcacaggtgtttaccctgaaaaatgggactcctgggtcttccactcgctccataaacactgctattttctggatgggcacggtggctcacaactgtaatcccagcactctgggaggctaaggcaggaggattgcttgagcccgggagttcaagagcagcctggccaacatggtgaaaccctatctctactaaaaatacaaaaaaaatagcagggtatggtagcaggcacctgtaatcccagcgaattgggaggctgaggcaggagaattgcttgaacacgggaggcagaagttgcagtgagccgagatcgcgccattgcactataggctgggagacagagcgagactccatctcaaaacaaaacaaaaaacacaccagcctgggcgacagagcaagagaccccatctctacaaaaagtaaaagaaaaattagccaggcgtggtggtgtgtgtctgtagtcccagctacttgggaggctgaggcaggaggatcccttgagcctaggaggtcgagcctgtagtgagccatgatcatggcactacattctagcccggtagtgacagaccttgcctcaaaaaaaaaaaaaaaaaccaccccaacacctgctgttgttttctttacattgttaaccaagagcatgaaatttaggccgggcatggtgtctcacgcctgtaatcccagcactttgggaggccgaggcgggcggatcacgaggtcgggaaatcgagaccatcctggctaacatggtgaaaccccgtctctactaaacatacaaaaaattagccgggcgtggtagtataagcctgtagtcccagctactggggtgaatttcttgaacctgggagggcggaggttgcagtgggccgagatcgcgccactgcactccagcctgggtgacaaaaactccgtctcaaaaaaaaaaaaaaaaaaaaaaaaagagcattaactttgataacttaaaaagagtcacgtgaacatatccactgtccgtgtagattctacatttatttgttgggggcggtaatggggccccttggaggtgtgcgttccgtcgggggccgggaaggcggggcctcacccaatcctggagactcctgcggatgccattatgaggagcaagaacgcgaaggggcctcgggtccgctgtaaggctgcacccgcacctgcggcgcctctgcggcggccgccgtcggccctgccccgccccgcccccttcttccggaggagctgcggtgggggcgctccaccgggtcctaggaaaggggctctctctggccccgtccccggcggccccgctcccggccc

SEQ ID NO: 7694 - DNA, 2300 bp, Homo sapien
tcagactttgaagtcccctgcaggcccccaaggcacagaggcggcctcctggtcttaggccacctgggtgtctacggcccagacaggtcacaagatcccagatgcctgggccaggtggtggctctccccactgcctcctctatccatccccagcctctaaagggacatcctgtatgtggatgaaggagaagaaaggctagttcaccaggcccctgcgtgcgccaggctcttgtaatgccttacacactttcttattgcatcctctcaacagctgatgacacgggagctcggaaggtgaagttgctcctccagagtcgctcagctgggacatggcagagctggatttgaatccaggctaggcagctcttgcctcttctggcgccttgctgagggaggccctgccccagcctcaatgactgttgggggaaggggactagtggaccaggcttggccatgccaggccagcttgtggttcaccagggccttaggctcctgcttggggctggtggctcctgggaggcccccttctcttcagggacttttttgtttcacgtccttgtgtccaggcccggaggaggagagggagggaaggaccaaagggaggtcaggtcaagcccggggaaagtgccccctgttgtcttcctccagcaggactgaggcccagggaagaatagtcagcggggtctggggtgttgagggacagtaccccgcaagatgccattagctgcggtttgggggctgtcgggcgactgtgtgtgtgttgggagcaaccacagaaaaggctgatggccgggagcaggggtcgctgacatggaactgcctgagacttctggctggattgtttcccctccctcaagtcctccttccaggcctgacggactcagcagggtttttaaggacaaagctgtcggcggctccccacctgtctgactggctggttcctctgtctgccctgggctctttcactgctctggtgggcctgcgtgttcctggaccctcacgtggggcctgcgcccggggccgcctctggcggggtgctgctggggctttctccttcagaggcaggaggtgtggctgggtcctcaagggcccctggggtaggatgcgaggatggggttggggaagcttcatcacagggactgggcacagaactggcagcaggtgcaggggtctggacgttagtgtctgcctgtggctgggccacagaatctgactgtggctgggccatgaggttcagctgtggctgggctgtgggatccgactgtggctgggccgtagggttcagctgtggctgagctgtgggatccgatcgtggctggagtgtggggttcacctgaggctgggccacaggatccatctgtgactgggcctctgccatcggctctggcagagttggaccctcagaatctagctgggtctgtggctcagtgggcgtgaagctgcccggccgctcctcgcagagagctgccgcgaaggacgagagcacggagcgcagcagggtccggaggtcggcactggccatgaggcagaggaaggggctgaggcagctgttgagtaggatcaggtagtcggagtagaccagggcctcccagagcaggtagccagagtagacgtcccacaggaaggccaggtagagcagctgggccagctggtagggcagcctcaggaccacataggctgacagaatggtcctggccacacgggcgaagccccggcaggctgcgggctgctgttggcggtggcaggtgcgacaggctgtggcctgggtgagcacgtggcagacgagcagcaggaggaaaggcaggaagccccccaggacctccagcatcctcagcgacagctcctcgctgtcccagaagtccaggcagatgaccaggtcgtaccaccagacggcagcctcggggaagaccagccagggcacgctgaagagtgtggccagcacccagacaccggcgcagacccagaggggcaggcggactgggcggtgcccagggtaccagtgtgggcacagcgccagcaggcagcggtcgaggctgagggcggccagcaggaagaggccggaggagtaggacacgccccataggaagtagtagaagcggcaggcagctgtccccagcggccagtgtcccccatgccggatctctaggatctggaaggccgctgctgccaggaacaagaagtcagagagggccaggctgagcaggagcagcgccagacgcgtgccagctccatgccgggcctgggagccggccagccacgccatcaacccattggctggcagcccaaggagcagcagggcc

SEQ ID NO: 7695 - DNA, 2300 bp, Homo sapien
agcacggggggtgatgtgggaggaggtggaccttggggtcttagagtctgctctgggctagagaggccctggggaggagggtctgactgtccaggcccatcagggctgggggagggggtctggctggtcacttggccctactgggccagggttagggtttcccagcaagcagccccataaataattgatgtcctctcagcttgggtttcctgcccacccgccttagcgctgccgggtgccacaaagcaggccccagtgagggccggggggacagctggagtgctgggcaggcaggcacgccctgctcctgctccttccacccatcggcctctgcctcccaggtaagccaggcctcactggtcagggccccagtctcggggtgcctggggctctgatccaatagggaatggagacagcagagggggtcagcctgaggaggaaccctgagggtacggagggcaccaaactaaaggccaagtggctggagccgtgggccgtgggcaggggccagcccttcagggcatccgttccctccccagactataccaccacctgggctctcatcgccctcaaagggaaactccctccccgctgccagcggggaagggcgaggtggggctgcaggcctcttggatcccaggtctgggtgccctccaactcccctcaccctcaccatcccaccaccatcccactgcagagcccctccccctctctttagcagctccaggagacaaacaggggtcacctcctgcctgagctgtgggaagcgggagagggccgcggtggggtggaagatgctggagaggcaccaggggctcctaggatggccctcctgaccccaggctgtggggtcctgaggctcagagacctcatcctgagcccatgagtgacactcgctggaggggagggggttcccactgccccagactccctaccttcgggtcccctgggcccatgggaaccagagccctcccttcttggaatcctaaacactcgaaccccagaggagcaggcataaaggggccttgtgatgagcggaccaaacggtcttcaaactgtgttccctggaaccctggggggtaggggtactcttccctcccttaatttgagcacccccttttagtccatataggagttccactagaatactttttttttttttttttttgagacagagttttgctcttgttactcaggctggagtgcgatggcacgatcttggctcaccacaacctctgcctcccgggttcaagcgattctcctgagtagctgggattacaggcatgcgccaccacggccagccaattttgtatttttagtagagatggggtttctccatgttggtcaggctggtctcgaactcccaacctcaggtgatcctcccaaagtgctgggattacaggtgtgagccaccgtgcccggccttagaatactttacttacagacaaaattccatacctttaacaatgtttgaaagcctccgggttagtctatccggacccattgggattctacatggcagaagattaagtctgtctggacagtgtctcatgcctgtaatctcaacatttcaggaggccaaggtaggaggatcacttgagctcacgagttcaagaccagcctgggcaacacagtgagaccttgtttctactaaaaatttaaaaagtagtgggtgcacacctgtagtcccagctactagggaggctgagatgggagggtcgctggaacccaggaggtggaagctgcagggactgtgccactgcactcatcctgggcaatagagcaaggccctgtctctcaaaaaaaaaaaaagaaaagaaaagaaaagtctgggttgagccctggcacctcccttcctaccttcactgattctctgaaccttcctgtcctcgcctgtaaagtagattgtatgaggactccatgaggtcatccacttcaagtccttggcataggataattactcaaaaggtgatgacaatggcgcagggagggatggtgacttgcctggagatgcacagcaccgtctctcccatactcggtcattcacaccatcattgattcaccaggcacccactccgtgtccagcaggactctggggaccccaaatggacactaccatggaagctgacctgggtgccactggccacaggccccgcacagagcttgatgatgaggactcctacccccaaggtggctgggacacggtcttcctggtggccctgctgctccttgggctgccagccaatgggttgatggcgtggctggccggctcccaggcccggcatggagctggcacgcgt

SEQ ID NO: 7696 - DNA, 2300 bp, Homo sapien
cttggcctcctgaaatgttgagattacaggcatgagacactgtccagacagacttaatcttctgccatgtagaatcccaatgggtccggatagactaacccggaggctttcaaacattgttaaaggtatggaattttgtctgtaagtaaagtattctaaggccgggcacggtggctcacacctgtaatcccagcactttgggaggatcacctgaggttgggagttcgagaccagcctgaccaacatggagaaaccccatctctactaaaaatacaaaattggctggccgtggtggcgcatgcctgtaatcccagctactcaggagaatcgcttgaacccgggaggcagaggttgtggtgagccaagatcgtgccatcgcactccagcctgagtaacaagagcaaaactctgtctcaaaaaaaaaaaaaaaaaaagtattctagtggaactcctatatggactaaaagggggtgctcaaattaagggagggaagagtacccctaccccccagggttccagggaacacagtttgaagaccgtttggtccgctcatcacaaggcccctttatgcctgctcctctggggttcgagtgtttaggattccaagaagggagggctctggttcccatgggcccaggggacccgaaggtagggagtctggggcagtgggaaccccctcccctccagcgagtgtcactcatgggctcaggatgaggtctctgagcctcaggaccccacagcctggggtcaggagggccatcctaggagcccctggtgcctctccagcatcttccaccccaccgcggccctctcccgcttcccacagctcaggcaggaggtgacccctgtttgtctcctggagctgctaaagagagggggaggggctctgcagtgggatggtggtgggatggtgagggtgaggggagttggagggcacccagacctgggatccaagaggcctgcagccccacctcgcccttccccgctggcagcggggagggagtttccctttgagggcgatgagagcccaggtggtggtatagtctggggagggaacggatgccctgaagggctggcccctgcccacggcccacggctccagccacttggcctttagtttggtgccctccgtaccctcagggttcctcctcaggctgaccccctctgctgtctccattccctattggatcagagccccaggcaccccgagactggggccctgaccagtgaggcctggcttacctgggaggcagaggccgatgggtggaaggagcaggagcagggcgtgcctgcctgcccagcactccagctgtccccccggccctcactggggcctgctttgtggcacccggcagcgctaaggcgggtgggcaggaaacccaagctgagaggacatcaattatttatggggctgcttgctgggaaaccctaaccctggcccagtagggccaagtgaccagccagaccccctcccccagccctgatgggcctggacagtcagaccctcctccccagggcctctctagcccagagcagactctaagaccccaaggtccacctcctcccacatcaccccccgtgctcctcaaaacggcattcgaggcatctgtgatctggcctcttcctccatttcacacaccctctgctctggccaggatgtcacccatgggggggccccagtaggccactcgctcatcctttcccacctcccagccgttgtccgcatgcctcctgccacctgagatgccttccctggtcctctctgcctaacgaaggcctctgcccatgtcacacatgagctgagtcttctgcgctctagcattattccccatgttttatagatagggaaactgaggctgggaggggaatttgctggatcccccagctaataagtagcagatctggcatctgaggctcatggcagccaccacgtcctggtgccccttgcttctgaccaaggacagttctctggacccatctggctctgccctggccagccctggggcagaggactgggattagggccagggctgcctgcctcacttaccctaatccccctcagagcccgatcctaggctctcagctctaagagtgggggtgcataagcagctttatgggtcctgaaagccaagggtgcccaggggtgtggtgtctctgagccctgttatccctcccccatgaccacagagcaggcaagggggcagcagggcccaaatctggccattggccgtcagaagccccctgcgggggttgtgactcccaagagtgatgcagaggagcccccgttgaccaggaagagg

SEQ ID NO: 7697 - DNA, 2300 bp, Homo sapien
gtagacttgactcagctctgtacatgaggccataaaatgaacatgaggccgggtgtggtggctcatacccagcaccttgggaggccgaggtgggcagatcacgcctgtaatcctagctacaggggaggctgaggcaggagaatcgcttgaacccagggggcggaggttgcagcaagccgagatcttgccactgcactccagcccgggtgacggtgcgagactctgtctcaaaaataataataataataataataataataaggcagggcactgtggctcatgcctgtaatcccagcctcctcgggaggctgaggcaggagaatcacttgaacccaggaggtggaggttgcagtgagctgagatcgcactccagcttgggcaacagagcgagaccctgtgtcgaaaaaaacaaaaacaaaaaagaactcttgactaaggtccataaagctctcaaggctctggggcccatctactcctcccaggctcatcaagtcggcctgcccctttccttgctgctcagccacactggttttctcacattcttcctccacaggccaagctccttcccacctcctggcctttgaacgtgctgttccctggtgccaggaaaacactgaaccttgcttttctcacagctggctccttcatcatcggcattcctgctcaaatgtcacctcttggaaaggtcatctttgagtacgaaatctaaagtcagttttgcatcacacagcacttgaaactgtctcattttgcactgttttattcaccactgtatctatagtgcccaaaacagtgtttggccctaaatagatgcttaataaatacttgtggcagaaatgaatgaggggtttgccaaagtcccaagtacttacaagtggtagaatggggatttgaaaccaggtccacctaattcatagagtacttctgctcttccacccccaccgccccccaccacggttcattttttttttatggagtcttgctctgttgcccaggctggagtgcagtggtgtgatctccactcactacaacctctgcctccagggtacaagcgattctcctgcctcagcctcccaagtagctgggattacaggcactggtcaccgtgcccagctaatttttgtatttttagtagagactgggtttcaccatgttggccaggctggtctcaaactcctgacctcaagtgatccactctccttggcctcccaaagtgtgagccaccgtgccctgccaagagttcagattttattctaagtgcaatggaaaaccaagggaaggtttttttgtttgttttgttttgttttttgagacggagtcttgctctgtcgcccaggctggagtgcagtggctcaatctcggctcactgcaacatctgcctcccgggttcaagcaattcttctgcctcagcctcccaagtagctgggactataggcatgcactaccacgcccggctaatttttgtatttttagtaaagacggggtttcgccttttggccaggctggtcttgaactcctgacctcaagtgatccacccgcctcggcctcccaaagtgctgggattacaggagtgagccaccgagccaggccagcagcaaaatttttaaaaagggttttcagaataacacacgcagataaaaagatttgttttaaaagatcacttcggctgctgcgtggagactgactggaaattggaagacacataagctctctgagcctcggtttccacatttgcaaaaatggggagagcacccctccggtgcggggctgttgtgagtaaggtggggaaacagttcccaggagtctccttggcactcgaggaacaggctgcggtgcaaaaggccctgtcagggacctggaggttggggcgtggaagcccctccaagcccccgcacatacacgcctgggggatgtgtccgagcccggcacgggctgtcgcttgccatggcggccactgagtggcgtcacggggcgggcgcgctccgtctggaagaggctcccacccatcagcccgctcagggctcggcaactctggcctgcttagggcggacgggggcgggaccggcgcgtggggcggagccagggtcggaggggcggggcatgcgggggcggggcagcggcgacgctgggtgtgtgggcgcagatggcggcggcgcacggcgcctgagcgggccggggccatgagcgccgcccggccccagttcagcattgatgatgccttcgagctgtccctggaggacgggggccctgggcccgagtccagcggggtcgcgcgctttgggccgctgcacttcgagcgt

SEQ ID NO: 7698 - DNA, 2300 bp, Homo sapien
gagccgggattacaggcgtgagccaccacgcccggcaaaaaaattattcttaattgtggtaaaatacacataacataacataaaatttaccatctcaaccgttttgaagtgtatactcagtggcgttaagtatatgcacactgttatgcaaccaatttccagaacagtttcgtctttcaaaacagaaattctacactcatcaaagaacaagtctccatttcccacccccctgcccccagcccttggcaatcaccattctgctgtcatttttttttttttttgagatggagtcttgctctgtcgcccaggctggagtgcagtggcgcgatcttggttcaatgcaacttctgcctcctgggttcaagcgattctcctgccttagcctcccgagtagctgggattacaggcacgtgccaccatacccagctaatttttgtatttttcgtagagatggggtttctccatgttggccaggctggtctcaaactcctgacctcaggtgatctgcctgccttggcctccaaaagtgctgggattacaggtgtgagccaccgcgcccggccctgctttctgtctttgtgaatctgactactctaggtaccttacataagtagaataatacagtattttcctgtatgtgactggtactgttatttcacttagcatattgatgctttttttttttttttgagatggggtctcactctatcacccaggctggagtgcagtggtgcgatcttggctcactacaacctccatctcctgggctcaagcaatcctccagcctcagcctgctgagtagctgggaccacaggcgtgcaccaccacaccacctaattttttgtatttttggtgaagatggtattttgccatgttgtccaggctggtcttgaacttgtgagctcaaggagatccaggagatccacttgccttggcctcccaaagtgctggtattagaggcataagccaccacacctgccccatactgatgcatttttacatgacattagtgaattcaattagcctagtattttatttagaatgtttcatatcagctgggcgctgtggctcacgcctgtaatcccagcactttgggaggccgaggtgggcggatcacgaggtccggagattgagaccatcctggctaacacggtgaaaccctgtctctactaaaaatacaaaaaattagccgggcatggtggcgggcgcctgtagtcccagctgctcgggaggctgaggcaggagaatggcgtgaacccgggaggcagagcttgcagtgagctgaaattgtgccactgcactccagcgtgggtgacagagcgagactccgtctcaaaaaaagaaaaacaaaagttgttttagccccaaagtacctcatttctcttttcttttaatttaattttttttttttgttttgttttgagacagcatctcgctctgtcggctagcctggagtgcagtggcacgaacacggcccactgcagcctcgaactcctgggctcaagcgatcctctcgcctcggcctcccaaagtggtggggttacagggccaccgcgcccggcgctaaagtacctcatttctatcattcatcgattattccctaatattaattgggcacaactatgactcatttccgaccccgcaatgggctctcttggtctccttctccacctttctttccctcttcctctttttattttttgaaagaggaagatccaggatgcaagagtcccgacaatcatactagatatgcgaaagagaaaaagccggaagaaaatacacaaaaatcataacactttgagggtgtggcttacgggtgttttttttttttttcattttcctaactctgcagtgctgttatattccatccacaacttcaaacaaagtgccacacggccgcagtcccaatcaattcaatgacaattgttagggacgtcctcgtcccgcccggcccgcggaccccggcccttcctccttgacaggctggggtccagccccgagacattcctaggctccgcccccgagcagacgcgcgcgctcagccccagcgcagagaaccaatcaccatccgtttccacgctcagtcccttttggcttctgccctcaaccaaaatggcgctagctcggaagctgccgaggtgctaggagttgccgaagcaagtccggaagctaccgagcgagtccggaagttgccgaaagggagcagcggggaaggaggatggcggatatcatcgcaagactccgggaggacgggatccaaaaacgtgtgatacaggaaggccgaggagagctcccggact

SEQ ID NO: 7699 - DNA, 2300 bp, Homo sapien
cagaagtcagcaggaagccagccaaaagcaagaacaagcattggtccctgcttctggagtgatggggtggggacagtgctgagagttagggtgtgcagagagacaggaaaggcagtgggcgggggggagtcaggcaggaagacaaatgccccactttccactcccattcctggactgcactggccctgccctactttgtggctctgggtgggtggtgtccccaggggagccattatccaacctcaaggctgggcatgtagctgcggtggcagggaagcagggggagggggcagttctgacgcctgggcacctgcaggtctgcgtcgggtgatgctgcgggcccaccgccaggcctggtgctggcaggatgagtggacagagctgagcatggctgacatccgggcactggaagaggagactgctcgcatgctggcccagcgcatggccaagtgcaacacaggcagtgaggggtccgaggcccagccccccgggaaaccgagcaccgaggcccggtctgcggccagcaacactggcacccccgatgggcctgaggcccccccaggcccagatgcctcccccgatgccagctttgggaagcagtggtcctcatcctcccgttcctcctactcatcccaacatggaggtgaggctggggcacagggatgggaggaacggccctccccaggctgggctcctgggctgaggctgaggctgagctggcccggcaggggctgtgtctccccagagcttgtctgagtggcgcatgcagaacattgcccgagactctgagaacagctccgaggaagagttctttgatgcccacggtcagcactgaggccctttttgggagtggggatgtccccgagcagctcctcccaccccatgacacagccccctgtcccctcagaaggcttctcggacagtgaggaggtcttccccaaggagatgaccaagtggaactccaatgacttcattgatgcctttgcctccccagtggaggcagagggaacgccaggtaaagataccgcctaggacaccggcccccagcacccgtgtacagcaggtcatgagtttaatggcatcttaagatgagaggcaatctgaagaggtgctcattaaatacatagacgaataatgaatggtggatggatggatggatggatggatggatggatgggtggatggatggatgattagaatgtagtcatgattcagacatagcactaagaatgaaggaattaatttggactccctgaatgcttcacttgagaggtgatgtctatgctggctttggaggacttgggccagcactgtccagcagaacttctaggtccatgctgcccaaggcaataaccaccagccacactggctcccaggcactgaaaatggggttagtgtgactgaggaactgaggtttttatgtattatattttaattcatttaaatttaaatggccacttgtagctaatggccaccacattggacagggcagggttagagaagtttgccaggcaaacaggcattgtgtggagaggcagccctgactgcaataagaccagtaggagcaaaggcctggaaatacaaactgacctgggagagttggtgggaggagaagtttggaggaaggtagggactgggggcctcaggcagatgccagaactggggtgcctgaagtgccagatgaggggatcccagtggtcctctccgtccctctcactggcttcgttgccctgcagagcctggagccgaggcagctaaaggcattgaggatggggcccaagcacccagggactcagaggcgagtatggtcagccaccccatgtcaaagctccccctactcactggcccggccactgctgtgacacccactgcaccccattgttccccccagggcctggatggagccggggagctgggggctgaggcatgcgcagtccacgccctcttccttatcctgcacagcggcaacatcctggactcaggccctggagacgccaactccaagcaggcggatgtgcagacgctgagctccgccttcgaggccgtcacccgcatccacttccctgaggccttgggccacgtggcgctgcgactggtgccctgtccacccatctgcgccgccgcctatgcccttgtctccaagtactagccacgggtggaagggcagggaactcgtaggatcaggccagggagcggggcagggagcggggaaggggtcaggaagccagacacctgggtcggtcactggcatggctggacctgttctggagaatggctccatttcagttgcctcttggggc

SEQ ID NO: 7700 - DNA, 2300 bp, Homo sapien
tcagctaagcctgggtgggccaggcagagacaggggaagaggagactatggatggggagggtgtgattaaatgaggtttgacttgcctctgtaggccatcagcctttggtgggacctgggccctctccgccccagccgtggcgctgagagccctgggccttcctgtggtgccaccagggggcagcacagggcctggctgcttccacagcccttggcgctgtgggcagcctgggcctggagggcgcttcctctggattggcggtgatgcctggcagcatggaaatgccagttcacgtaagccactccctcacacgccctaatgccctgacaacaccccagcctctgaatcagccctgaaggtctctgacttctcagagagaaagggcactgctgcttccagcacttggcctcagtgtcaaggggaggggctggcggggtgctgccgtcactgccccagcaccttgtagcaggctgggtgggatcccatgaacccagccttggggtgcctcgtgaggcctttgcccagactccgggtggctgggtgaccggacttgtggacccggaaggcagaggtgggggaggctttgtggcaccatgcaggggctagcccagccactcacagtgacagcccgtttctgcctgggcgtgtagctgggtgaccatagaggcctggggccctggagccgagcccagccctaggtggaggcatgtcagagccaccagcttctggctagactggtggggaggcatttcctcaaccctgggtcccaaatctaaggactgcagagagtgagaagaggagagtgggcctgggaccccccatatcaaaccaccctgtgactgcacacaggagggctgggctagggtggagataggaactaagagtctttggggaccccaatcagcacagagggactaggaagagccagaatttaggcaatggcctttttcccactgcccgggggaaggaaggcaggggcctccctccctgcctcctccgctgcaggcggggctgcccggaccccgccggggtggggagggccagccgggcccaggaagggggcggggcggccgcagtgacgcggcgggcgtcggggagggactgcaggggcgccggcgggcggatcgagaggaaggtcggggccatgggccggcactgcgcctcgggagggtccggccaccgctggaacccgaggccggggctgggggcgctccgggctccgacccacgggccggccggccctgcccgggctgggtgaggggcgcccgcctcaagctagaggtgagccggggcgtcggcaggcgggccaagagcgcggcaggggaccgggacgccggcgagcagagggaagtggggacaacggggcctctcgcttgctcgcggggtgcgagtgggggatggaggggtgcctgcagcggaacctcggtgccagtctggggcgcaggtggacggagcgggtctccagggccatggcccgtgggataccaagtggagccactctggcctcagcctgaggagggctcaccccctgggaagaggacggagtggctgcctaggcgcgtggagagccggcgagggccaggggtccaggaaggatgctgggagggggaggtcgaggacccggctgcccaagaaggcagatctggagggcggaggagattaccggtcccggaaggtaggttcgggtgcagggcgtggggaaccctggcagagatgctgggcgcactgggccactccgcgcagagacactcggggaacaaagctctaggtggacgtccgagagtgggggacttgggaccccgccgactccgggaaggggatgcaaggggcgggtccccgaggggccggtcgcggaaggcgggcccggaaggaggggccccggggcttcgggggcgcgcccagagggatgccgtttcccggggttaggacgcggtcgcagcgggagaggtgaggtggccctcccgcccgccggccggagcctggcgctccggggggcccgcgtcagcgcgcggttgccatggcgacgggcgggcggggggcgggggctgcgcggaaaagaggtcagcgctcagcctcgctgcggctcccggccccggcggcgcgggcggcggtgctaggctcgcctctgcctccctcgtggcgggcccggacatggggtcccgtggcctgagtccctcggccggcgcgcagggctcggggccgcgcgcagcctccccgcactgactgtcgcgccgtgccctgcgccaggaggagcggaggccgcgcgcggcccgccgagcgccttcaggatgctcatcaa

SEQ ID NO: 7701 - DNA, 2300 bp, Homo sapien
gagcacctacacggacctgctgtcagtcatagaggagatgggcaaagagatccggcctacctatgctggcagcaagagcgccatggagcgcctgaagagaggtaagtgaggccaggccgccctgctcaggaaaccgacactggactatccttcatgagggaaggaaggacatctggaggccacctgagccaagcctagaggatgtccagtattactaccagagaggtgttttgaatcgaattgaaattgagtccatttccagggaagagcatgggaatttgtatttcaacagggcaaccttgaggattaaccaaacctctaatttcatctagccgtcattagatttgaatttcttttgccgaaagtggaaagggagtggggaggcaggggtcctcctctggagggcagtgggtggggctgtggagggttgctgagaccccaccccacccccaggtatcatccatgcccgggccctagtcagagagtgcctggcagagacagagcggaacgcccgcacgtaacaggaagcgcctcggcctcagcgtctggacctatccggccactgcagagcacccgcttctccctggccttcatcccgagttgcactaaccatcctgggcttcctgtcctgtgtcccttggtgggtcccctccaggaaccaaggagtggccctccaggtggcagcactaaggacacccccccacaacaagagttagcagcgaggtccccatgagtcccacccatgacctgccgacagtgttgcccaccggaacttttgtggcccctaccgctcagcccttcccagcacttctcccactttgtcccgagcctccttctcccccagcaggggcacaggcctggcacctccctgccttgtgtcctgagccatagtgactcttttatctgtgtgtcttttgctaaatatgccctttttatattaataaaagatgatttggagttgtgctctcagctctgagcctttctgggtctggttcttcagctaagcctgggtgggccaggcagagacaggggaagaggagactatggatggggagggtgtgattaaatgaggtttgacttgcctctgtaggccatcagcctttggtgggacctgggccctctccgccccagccgtggcgctgagagccctgggccttcctgtggtgccaccagggggcagcacagggcctggctgcttccacagcccttggcgctgtgggcagcctgggcctggagggcgcttcctctggattggcggtgatgcctggcagcatggaaatgccagttcacgtaagccactccctcacacgccctaatgccctgacaacaccccagcctctgaatcagccctgaaggtctctgacttctcagagagaaagggcactgctgcttccagcacttggcctcagtgtcaaggggaggggctggcggggtgctgccgtcactgccccagcaccttgtagcaggctgggtgggatcccatgaacccagccttggggtgcctcgtgaggcctttgcccagactccgggtggctgggtgaccggacttgtggacccggaaggcagaggtgggggaggctttgtggcaccatgcaggggctagcccagccactcacagtgacagcccgtttctgcctgggcgtgtagctgggtgaccatagaggcctggggccctggagccgagcccagccctaggtggaggcatgtcagagccaccagcttctggctagactggtggggaggcatttcctcaaccctgggtcccaaatctaaggactgcagagagtgagaagaggagagtgggcctgggaccccccatatcaaaccaccctgtgactgcacacaggagggctgggctagggtggagataggaactaagagtctttggggaccccaatcagcacagagggactaggaagagccagaatttaggcaatggcctttttcccactgcccgggggaaggaaggcaggggcctccctccctgcctcctccgctgcaggcggggctgcccggaccccgccggggtggggagggccagccgggcccaggaagggggcggggcggccgcagtgacgcggcgggcgtcggggagggactgcaggggcgccggcgggcggatcgagaggaaggtcggggccatgggccggcactgcgcctcgggagggtccggccaccgctggaacccgaggccggggctgggggcgctccgggctccgacccacgggccggccggccctgcccgggctgggtgaggggcgcccgcctcaagctagaggtgagccggggcgtcggcaggc

SEQ ID NO: 7702 - DNA, 2300 bp, Homo sapien
tgaataatccaccccttgattagcatatcatcaagaaataaccagaaaaatgagcaaccagtagcccttggggctgctctgtccgtagccattcttttattcctttactttcttaataaacttgctttcactttactctgtggactcaccctaaattatttcttgtgcaagatccaagaaccctctggtgggatatggatccagacccctttcctgtaacagaaggagttggggcttggtggtttccaaaggaggtataaccctcagtggctcctcttcacctactatccacagtagatttctctgaagcgcaccctcagtgccaccagtaggagcagaagaccttgggtgacctgatcaacaccttttctttttaacagtagttgagtctgaatatgtattagaaaactataaatactgagcacatgattaaatggacattatgccttttcctttctatttaagattttgtaaaagtgaattaattacaaggaaatgttaaatagatggcaaaactgatggagttttcctaatggctggagttagggaagcactggactccgtggtcaactcagcttccttacatccacgtcacctaaggtccccttcctgaccctgtggttatttccacggctccacctccacttcccagtgaactctccagcagaaaaaaaaaaggaaaaaaaaaaaaggctggttctcaaacacatgttgtgctctcccatttcccaagattttgcacatgacagtccctctacctggagtgtcccctcggtctccgcttccacccccacctactcaaatgccacctagtctgtagagatttctgtgatgccacccggcaggcccttcctctaagttccaatgcatcctgtcccgttatcccttgtggccattgacttactgcaatgtaaagaagacgttgcttccctgtctcagagtataaggcctccttgagtacagaggccatggcctgttcatttctgtaacctcagcgttcagcacaaggcatgggacggaggagggagtcagaacatggtttttgtgtgttttttttggggggggggtttgagaccgagtcttgccctgtcgctcaggctggagtgcaatggcacgatctcggctcactgcaacctctgttcaaacgattctcctgcctcagcctcccaagtagctgggattacaggcgcccgccaccacaccgctaatttttgtatttttagtagagatgggggtttcaccatgttggccaggctagtctcgaactcctgacctcgtgatccgcccgcctcggcctcccaaagtgctgggattacaggcgtgagccaccgcgctcagccagaacatgcttgttggatgaatgaatgaatgaatgaatgaatgactgtcctagagatgaagatctacaaagctgggagcatgaagatacacaaggccagagaagtttgagtttggagaaggagcctgggagaaagggttagggagtggaggagggtctgaggtctaactctgtggggagtgagacttgaggggaggggtctgagtggtggagtggaaaggtatgggggccctgtgggacaggaaggcggagaatgaaacaacaagcactttatgactattcatttaatccacacaacccaatgagatcgtcattttccccattttacggatggggaaactgaggcatactgaggtgagaaacttgcctgggggaaatcgctagtgggggtggtgctgagatttgaacccagacggttggctccagtcggtgctcttgaccagtttggtccggggcccggcacgcaagtaatcccgaaggtttgccctacggccattgtcactaacttaggcagcagcgcggggccttgggggtgcgggtaaaggggtctttgaggtcgcccttagacctgaggacgagccaagccgcaggaagaacggtacgtggcggcatccatgaggggcctgttgccatgggaacaaacgcaggcctcgggcgggcgcatgcgcagatcggggagcgggtgttgaaccggtgaaaggtgacgtaaaagcgcacggggtggggcgcagggctcgggacgtcaaagccctgcgtccttcggcccccagagcggagaagcgcgcaaggcaccggtggcagcggcgacggcagctgcgacagcaacccctgctgggccgaaactgggcagagcggagcagacgtctgaagcagcgcgagtgaggcgcgagggtagcgcccgcgcccgggaagacccctcggcgcgaaccggcagcccagccccgggtcccggttcccaagg

SEQ ID NO: 7703 - DNA, 2300 bp, Homo sapien
cctagtgggatctggttcccttagacaaaggccagtgtgggggacagatgaataaatcatgaggggcctggaatggagccggggcaggatgatgacctcattctgggagttgaagagcgggcagctgggtggggagtgggctggggtcatggcaaggaagcctgagaggccagcaggggctgcccggcccacctccaccccttttccttgagaagcaagaggttgaaggtcagcaggaccaggtggaggtcctggcagaacgcagggaggtgggcaatgcagagggaccctggggaggagagggggctagcacagagggaccctggggaggagggagggaaggagggggctagcacagagggaccctggggaggagggagggaaggagggggcagcacagagggaccctggggaggagggagggaggcagggaggtgggcagcacagacggaccctagggctctgggctggggagatggggaaggcctttccagaattctggagctctcctgggagcgggatggtggggagaataggaagagcaaggaaggacagacagaaagaccaatgcaagaaaggaccttgcagcaacagagggaaggagccagcagagagatgggctgagtgggtcagagacggcagagacaccactggatccagactgacagagatggcggcgagtcagaggggatggagacggggctgcaggcaaaacagacacagaggcagagggggcacagaggggcaggcggtgagatggaaactgagcaaggaggtgtgtggggcatcaggtgcgcgtgagccagagagatgcaggcagaacactgcgggggaggaggccaaaggcaggcaggagggccgaccactggggccacaaggatgatcaggtggagccccgggcacagtctgtgaccagcatgaggggcttcaccaggctgacagggccacacgaggggccacggggagctagggaggatacaagactctggggacacggggctctcccagtttatggaggaagggacagaaagaagagtagcagggacccaggccacacctgtggctgcccacaagaccactctcccgcaggactggggaggccggacggagcagcgtccctcagccaggaggaggtaccaagccctcatctccatggcccagccccagggcccagcagagggcagcctcccaacgggggaccccagcccctctgagggcactccaggaaccagccaggcccctggcagcccagcagccacccggcgacgagagcttctccgggagctcgaggcccaggtgcaggcagcctacgggcaggtaatgcgggcaggggtatgaggggaccaggaacaaagagcagggaccccacaccccaactgggggccccggaggacagacccaggacttagtccagggaggggaccaggaggcagagtccaatgggagactctctgaggtcggcagggccggggtggcttcccttcccaatctccaccctcaccgagccctgtcactgcccacagcacataggcggttcccttctgctcctcatccaagggcggggcaccagtccaggcagggggagccaagtgcaagcaattggggctaccccgaggtgaggagcccagggcccagctggggtcctggcagggagaggcaggggcttcctgggctgagccaagtggctgcctctttctgggaggctgtgtgggaaggcccgcgtgtccataccaaccggaatctgtgccattcggagggcccagcccaccctggcacactgcacgcctgccttcctcctcctgggacccaggccctgcttctgaagacattaaatctcccctgattgggagagattagaggcaggggttgggggagggtgctggagaaggggcgtctggaagaccctcaggaggcagtctggggaggctgtgctctccagggggccttgggcccaagtggctcccctcagcagcggagacgctcaaagataatcccggattaggacccaagccccaggcccaagtcccccgcctgcccacccgcccccgatcttccccacaaaaccccaggaaaatccccggcagtactcccaggctctcatcgggagcagctgggggctggcaggagtcctcaggcagcagcatccgccgaggcccacccgggccacccccggggttccaggcctggcatggttcagggcccatggggaactgtgccaagcggccctggcgccggggccctaaggtaggaggggtcaggggagaaacccaggccaggaggctggaatggaccctgagggt

SEQ ID NO: 7704 - DNA, 2300 bp, Homo sapien
tcattagtgattctagtttcgccgtgaccttctgccctgtgatcttttgtcgcccttgaagtatgtgatctctgtgacccacaccctgttcgtgcactccctcctctttgaaaattgctaataaaaactcgctggttttacggctcagggggcatcacggaacctgcggacatgtgatgtctcccctggacacccggctttaaaatgtctctcttttgtactctttccctttatttctcaggccagccgacacttagggaaaataggaaaggacccacgtgaaatattgggggctgaatttcccccgataataagtctcttaaaaaagacttttaaatgaaatttctttgttttttaacttttatttctgttttgggggtacatgtgaaggtttgttacataagtaaactcgtgtcttcggtgtttgttgtacagaatatttcatcacccaggtattatgccgagtacccaatagttctcttttctgctcctctccttcctcccatcctgcaccctggagtcaaccacagtgtctgttgtttccttgtttgtgttataagttctcatcatttagctcccacttacaagtgagaacatccagtatttggatttctgttcctgcattagtttgctaaggataatagcctctagctccatccatgttcccacaaaagacatgatctagttctttttaatggctgcattaaatgaagttttaaagatacaacataaacaccaacctcttccccaccacaaaaatcccttgctgaatttgattacacttaaattaacgagttttgtttcatgaaagactccttggacaaacttgacagttgatggaataggagaagctgtctgtcatgtctaaagccaacaagagatcaatatctagaataaatggagatctgcaaatcaacagaaagtaggcagcaaagccaaagaaaatagcctaaggcacagccactaaaaggaacgtgatcatgtcctttgcagggacatgggtggagctggaagccgttagcctcagcaaactcacacaggaacagaaaaccagcgagaccgcatggtctcacttataagtgggagctgaacaatgagaacacatggtcacatggcggcgatcaacacacactggtgcctgttgagcggggtgctggggagggagagtaccaggaagaatagctaagggatactgggcttaatacctgggtgatgggatgatctgtacagcaaaccatcatggcgcacacacctatgtaacaaacctgcacatcctctacatgtaccccagaacttcaaataaaagttggacggccaggcgtggtggctcacgcctgtaatcccagcactttgggaagccgaggcgtgcagatcacctaaggtcaggagttcgagaccagcccggccaacatggtgaaaccccgtctctactaaaaatacaaaaatcagccagatgtggcacgcacctataattccacctactcgggaggctgaagcagaattgcttgaacccgagaggcggaggttgcagtgagccgccgagatcgcgccactgcactccagcctgggccacagcgtgagactacgtcataaaataaaataaaataacacaaaataaaataaaataaaataaaataaaataaaataaaataaaataaaataaaataaaaaaataaaataaaataaaataaaataaagcaatttcctttcctctaagcggcctccacccctctcccctgccctgtgaagcgggtgtgcaagctccgggatcgcagcggtcttagggaatttccccccgcgatgtcccggcgcgccagttcgctgcgcacacttcgctgcggtcctcttcctgctgtctgtttactccctaggccccgctggggacctgggaaagagggaaaggcttccccggccagctgcgcggcgactccggggactccagggcgcccctctgcggccgacgcccggggtgcagcggccgccggggctggggccggcgggagtccgcgggaccctccagaagagcggccggcgccgtgactcagcactggggcggagcggggcgggaccacccttataaggctcggaggccgcgaggccttcgctggagtttcgccgccgcagtcttcgccaccagtgagtacgcgcggcccgcgtccccggggatggggctcagagctcccagcatggggccaacccgcagcatcaggcccgggctcccggcagggctcctcgcccacctcgagacccgggacgggggcctaggggacccaggacgtccccagtgccgttagcggctt

SEQ ID NO: 7705 - DNA, 2300 bp, Homo sapien
tcttggcttgtggcctggaggctggctggggaggctgatatacagagtgacacaggatgggatgggtgctgaggaggtgagagccaggacctgagatgctgcagagaaggctcctgggagatgacatcagagtggatctccttcttcgcttgagaagcctggcaagtaggtgctccagtgggtggggaccagtgggggatttgttgttaggagacctcaggccgagttctggcagttgtgtcatcctgggcaggccactcagcaatgctgataccctgcttctgaaaacagggctcatcattcctgaggctggagttttggaggattaaggaggtaacacatggcaagtgcttggcccagagcctggcactgaatgaacagaggatccttccctcactctccgttttccatcccccctcatgcccagcatctcctgtccccagcatccccaacctgcatctccctcagcctgtattcctttgacccagttagagacagatgaggaaggaatccacccgctgggctggctctgacctgccccccttcttctgccccaaagggagggatccgaggactcaggtctgagcccggattagctgtgtaatccccagctttgcctaggcaacctctttccctgaccaagagagggggcctgcggctggcagccaggactcctgggctctgggcctgatactactctatctgtctgggaaacctcagacagggaagagatttcttggtgcctctcttgggaatgtcactgacgtccacagtgactgtcacatgcgtgtcagttgttctgtgggtttgctgtgtgcggggcactgtggaaaggaagaaaggcctagattccagtccagctccaccactcagcagcttcatgcccacagacaaaggacaaaatccccctgagcctcagttttttcgtggacaaaatggagtgaacaccttgtggggctgctgtggggtatgtgagaaaatagctgcaaaggagttttgtaaacagcacgttttagagagatcaggaaggatgattacagcacaaaagaacagagatggttcctcaccatgaggactggaaaagagctggggagagcaggccaaaaaggtcactcttatcacgaggaccacagcagagggttccaggaaactgaaaaagacgagttcatcaggcttccaagacctcctgggaaggcaaaggacagagggacctcctcaggtcaggggaaaaccgagggagggggacagccacacaaacgccctaaagtctaatgacggcagaaaggggtcttgggggacgggggtggggttcacagcagtggcctgggcgtgatgaccctggcgaaggacggggtcgcagagcccttaaatcctggaccagtggctgattccaaaagcagcagggaccatgccaggattttgggcagaagcagaaagtgctggactctcctgacaagagctgagagaactcagcggcgccagcaagagtttgtgccgtgcactgaccatctgcatcctctctgcctcaccccagcctaggattccgtgacaggccctctgggaagaactccgcgaacaaccccctgccttggagtctgcaatccttcctcgagcacacggacgcccggggtggggaagcccacagtctggcagggctcgcactgggcagaataattgcaacgtagtcatgaggatcgggctatgacctgcctgacttttcactcctcccatgatacaccgatgcataccgcaggtgcacactaaacgccgaatctatagaaagtggaacacaccaggacccagcagaaggcgacatgcgaggtttgtttacttgtggcatcaaaggctgggagccggcgagctaaggagggagcgaaagagcgagcggtggggacagccaccgctaaatgccagcccggtggagggaggaaggcggaccccaggccggtgggaccacatctcccagaagccccggcgccaaggcactggcctctcagtcctcccccgaggaggcggggccgctggcgaagttgaaggggcgcagcgataccggtgcgcggcgctggcgtcgggcgcgtgacgtctttcctgcgcgccacctagcgtctctatcgcgccagttcctcagcctcagtgctatgaaggtgacagcgtgaggtgacccatctggcccgccgcgatgctggcaacacggcggctgctcggctggtcgcttcccgcgcgggtatctgtgcgtttcagcggcgacacggtgaggcccagcctggctggggccacgggtgtttggggccgggtgtcgc

SEQ ID NO: 7706 - DNA, 2300 bp, Homo sapien
ggggcctgcggctggcagccaggactcctgggctctgggcctgatactactctatctgtctgggaaacctcagacagggaagagatttcttggtgcctctcttgggaatgtcactgacgtccacagtgactgtcacatgcgtgtcagttgttctgtgggtttgctgtgtgcggggcactgtggaaaggaagaaaggcctagattccagtccagctccaccactcagcagcttcatgcccacagacaaaggacaaaatccccctgagcctcagttttttcgtggacaaaatggagtgaacaccttgtggggctgctgtggggtatgtgagaaaatagctgcaaaggagttttgtaaacagcacgttttagagagatcaggaaggatgattacagcacaaaagaacagagatggttcctcaccatgaggactggaaaagagctggggagagcaggccaaaaaggtcactcttatcacgaggaccacagcagagggttccaggaaactgaaaaagacgagttcatcaggcttccaagacctcctgggaaggcaaaggacagagggacctcctcaggtcaggggaaaaccgagggagggggacagccacacaaacgccctaaagtctaatgacggcagaaaggggtcttgggggacgggggtggggttcacagcagtggcctgggcgtgatgaccctggcgaaggacggggtcgcagagcccttaaatcctggaccagtggctgattccaaaagcagcagggaccatgccaggattttgggcagaagcagaaagtgctggactctcctgacaagagctgagagaactcagcggcgccagcaagagtttgtgccgtgcactgaccatctgcatcctctctgcctcaccccagcctaggattccgtgacaggccctctgggaagaactccgcgaacaaccccctgccttggagtctgcaatccttcctcgagcacacggacgcccggggtggggaagcccacagtctggcagggctcgcactgggcagaataattgcaacgtagtcatgaggatcgggctatgacctgcctgacttttcactcctcccatgatacaccgatgcataccgcaggtgcacactaaacgccgaatctatagaaagtggaacacaccaggacccagcagaaggcgacatgcgaggtttgtttacttgtggcatcaaaggctgggagccggcgagctaaggagggagcgaaagagcgagcggtggggacagccaccgctaaatgccagcccggtggagggaggaaggcggaccccaggccggtgggaccacatctcccagaagccccggcgccaaggcactggcctctcagtcctcccccgaggaggcggggccgctggcgaagttgaaggggcgcagcgataccggtgcgcggcgctggcgtcgggcgcgtgacgtctttcctgcgcgccacctagcgtctctatcgcgccagttcctcagcctcagtgctatgaaggtgacagcgtgaggtgacccatctggcccgccgcgatgctggcaacacggcggctgctcggctggtcgcttcccgcgcgggtatctgtgcgtttcagcggcgacacggtgaggcccagcctggctggggccacgggtgtttggggccgggtgtcgcggccgcgcccgtgcacgagcagtccctggggtctgtagtggcctctggagagcccttctccccaggccaggcgggaaggcccccgctccggcctggttgaagtaggggaacgggtcccaacgcggggccgactcccttgaccctctgacttgctggcttcccttgttttacagtcctcggcctggcggaagttttgcaggttgtgaagacccctagtctttcattctctccttgtcacagccttgtagggcgtgaaggggtcattgccccatttagggatgcgcacctcctgatttcccgtccactgctctgcgccctgaagtggctgaaaagtgctcttaaaaggatgggaatcccgtcgccctcagctggtgcgctctccactgggtcgtggggctcctcatttcatcctaagtgagcccctccatcacctgtgtgttaaggaggcatttctttcccatcagtaaacacatttcgcctcttcggccgaggtaggaatataaaaggcccctggcctacccaagttttggtccagcaggggagccaggccgggaaagggccaagctgccacactcggcttgtggggctgtgtggtgccgtgatgcagctgtgggtttggccaccgacagacctgggctcaaattgga

SEQ ID NO: 7707 - DNA, 2300 bp, Homo sapien
gaaagagcccaaaggcccagggaaaccccagccacccccaaggtctctcccacagccacatctgccccgcccccacacacacacctgccatctgagggcttattcatgaagctccacttgaggccagtggggaagccagcgcctccacggcccctcaaacccgatgtcttgatctcgcccaggatccagtcgggccccttcagcaggatctcctttgtcttgtaccagtcacctcgactcagggaacctttcagcctggacagaatagggaaggcaatgaaggggacaccttgctccgggacccaacacactaagggcactgtctcacctccagtcatggcggccgtacaggttggtgaaaatccggtcttcatccttcagcgagccaaatgaggttttcttgggtgctgtctagggagacaaagggtcaggaggcccagagtgctctggggccatgagggattgggccagaagctacagaatcttgggtctccctatttaggaggggctgggctagggctagggaagcatctatagcatcatagataccactgccacttagtaagcatttttttttttttgagacagactcttgctcttttgcctaggctggagtgcagtggcgtaatctcagctcactgcaaactccacctcccaggttcaaataattcttgtgcctcagcctctggatagctgggattacaggcactcaccaccacgcccgggtaatttttgcacttttagtagagacagggtttcaccatattggccaggctggtctcgaactcctgacctcaagcgatccgcccgcctcagcctcccaaagtgctgggattacaggcgtgagccaccgcgcccggccattagtaagcattttgtttagcaggtactggatggaagcattttacatccaaaatcccatttcatcctcataagaactctgataggaacgattttctctgtttcacagaggagaaaactgaggcttggagcaaaaggagcttatggaaggtctcacagtcaaaagcagcaggtccaatttgagcccaggtctgtcggtggccaaacccacagctgcatcacggcaccacacagccccacaagccgagtgtggcagcttggccctttcccggcctggctcccctgctggaccaaaacttgggtaggccaggggccttttatattcctacctcggccgaagaggcgaaatgtgtttactgatgggaaagaaatgcctccttaacacacaggtgatggaggggctcacttaggatgaaatgaggagccccacgacccagtggagagcgcaccagctgagggcgacgggattcccatccttttaagagcacttttcagccacttcagggcgcagagcagtggacgggaaatcaggaggtgcgcatccctaaatggggcaatgaccccttcacgccctacaaggctgtgacaaggagagaatgaaagactaggggtcttcacaacctgcaaaacttccgccaggccgaggactgtaaaacaagggaagccagcaagtcagagggtcaagggagtcggccccgcgttgggacccgttcccctacttcaaccaggccggagcgggggccttcccgcctggcctggggagaagggctctccagaggccactacagaccccagggactgctcgtgcacgggcgcggccgcgacacccggccccaaacacccgtggccccagccaggctgggcctcaccgtgtcgccgctgaaacgcacagatacccgcgcgggaagcgaccagccgagcagccgccgtgttgccagcatcgcggcgggccagatgggtcacctcacgctgtcaccttcatagcactgaggctgaggaactggcgcgatagagacgctaggtggcgcgcaggaaagacgtcacgcgcccgacgccagcgccgcgcaccggtatcgctgcgccccttcaacttcgccagcggccccgcctcctcgggggaggactgagaggccagtgccttggcgccggggcttctgggagatgtggtcccaccggcctggggtccgccttcctccctccaccgggctggcatttagcggtggctgtccccaccgctcgctctttcgctccctccttagctcgccggctcccagcctttgatgccacaagtaaacaaacctcgcatgtcgccttctgctgggtcctggtgtgttccactttctatagattcggcgtttagtgtgcacctgcggtatgcatcggtgtatcatgggaggagtgaaaagtcaggcaggtcatagcccgatcctcatgactac

SEQ ID NO: 7708 - DNA, 2300 bp, Homo sapien
cttgtcacagccttgtagggcgtgaaggggtcattgccccatttagggatgcgcacctcctgatttcccgtccactgctctgcgccctgaagtggctgaaaagtgctcttaaaaggatgggaatcccgtcgccctcagctggtgcgctctccactgggtcgtggggctcctcatttcatcctaagtgagcccctccatcacctgtgtgttaaggaggcatttctttcccatcagtaaacacatttcgcctcttcggccgaggtaggaatataaaaggcccctggcctacccaagttttggtccagcaggggagccaggccgggaaagggccaagctgccacactcggcttgtggggctgtgtggtgccgtgatgcagctgtgggtttggccaccgacagacctgggctcaaattggacctgctgcttttgactgtgagaccttccataagctccttttgctccaagcctcagttttctcctctgtgaaacagagaaaatcgttcctatcagagttcttatgaggatgaaatgggattttggatgtaaaatgcttccatccagtacctgctaaacaaaatgcttactaatggccgggcgcggtggctcacgcctgtaatcccagcactttgggaggctgaggcgggcggatcgcttgaggtcaggagttcgagaccagcctggccaatatggtgaaaccctgtctctactaaaagtgcaaaaattacccgggcgtggtggtgagtgcctgtaatcccagctatccagaggctgaggcacaagaattatttgaacctgggaggtggagtttgcagtgagctgagattacgccactgcactccagcctaggcaaaagagcaagagtctgtctcaaaaaaaaaaaaatgcttactaagtggcagtggtatctatgatgctatagatgcttccctagccctagcccagcccctcctaaatagggagacccaagattctgtagcttctggcccaatccctcatggccccagagcactctgggcctcctgaccctttgtctccctagacagcacccaagaaaacctcatttggctcgctgaaggatgaagaccggattttcaccaacctgtacggccgccatgactggaggtgagacagtgcccttagtgtgttgggtcccggagcaaggtgtccccttcattgccttccctattctgtccaggctgaaaggttccctgagtcgaggtgactggtacaagacaaaggagatcctgctgaaggggcccgactggatcctgggcgagatcaagacatcgggtttgaggggccgtggaggcgctggcttccccactggcctcaagtggagcttcatgaataagccctcagatggcaggtgtgtgtgtgggggcggggcagatgtggctgtgggagagaccttgggggtggctggggtttccctgggcctttgggctctttccttagaaacttagcatgaatgaggtgggcacatgttcccaggccttaaatggatgggacttactctgtggacttccacaggggagacttatgtagcagaatcaacacatgattttgactcaggcagacttagttcaaatcctagctctgcctcctaatcatagaggtttgggcaatttcccagcctttgtgaaccttagcttcctttttgtaaataggtacagtgatatcatgcaaggattaaagagataatgttcatacagcttttggcctgtatgctggttggcacataaagcaaatgataaatgtcacctgctttacctccttttgatggtagagcttgaggaatgctctttgtcaccaagagtagaatctggctctcaggggcagacacaaggagagatgtttggatgagctgaatgaagacctttcttgtggtcatagccacccaaagacagaataggcagtgagctccctgtcattggtggtgagcaagcagagcccctgggacatgttgggagggcagtaaaggattggctgtcagaggagacatctttgaggcctccctgggtggagtggggtggcatggagttgaagacccagtcctgatggccctgtagcctgtctgacctgtgggcccctgcaggcccaagtatctggtggtgaacgcagacgagggggagccgggcacctgcaaggaccgggagatcttacgccatgatcctcacaagctgctggaaggctgcctggtggggggccgggccatgggcgcccgcgctgcctatatctacatccgaggggaattctacaatgaggcctccaatctgcaggtgggtagggagagatgtag

SEQ ID NO: 7709 - DNA, 2300 bp, Homo sapien
tttaccttcccacaaacagcacataaggcttccctttcctccacatcctcacgagcatttgttgtctcccatggtttggtagtagcttttctaacaggtgtgagatggtatctcattgagattttaacttctatttccttcacgattagcgatgttgagcattttttcacgtgtcttttgagaaatgtatgttcaggtcctttgcccatgtttaaatggggatatttgtttcttgagttccttgtttcttttggatattagcccccttatcaggtgtatggtttgcaaagattttctcctatcctgtagtctctctcttcactttgttgtttcttttgctgtgcagaagctttttagtcgggtgctatcccatttgtctgtttttgcttttgatgcctttgcttttggggtcctatccaagaaatcattgcccagaccaatgtctagaactttccccatatgtttccttcaagtagtgttaccattgcaggttttttttttttttttttttcctttaagataggatctcactctgtcgcccaggctggagtgcagtggcacaatctcagttcactgcagcctctgccccctgggctctagcgatcttcccccctcagcttcttgagtagttgggactacagcgtgcaccaccatgcctggctaatttttttgtatttctgtacagatggggtttcactacattggccaggccggtcttgaactcctgaagtcacggtggcccgccttggccaaccaaagtgctgggattacaggcatgagccatgacgtctggctcacttcaggtttttacaggccattttgagttgatttttgtctaaagtgggaacctcaattgttctttgggaaccactgcttctcagtccagggagttccctcctacccaggcaagcatcccagattctatccatcaatgtactgtaaatccaactgagaggtgacagcgtgcgggcagtcctcatagccctcgctcgctcgctctcggcgcctcctctgcctgggctcccactttggcagcacttgaggagtgcttcagcccaccgctgcactgtgggagcccctttctaggctggccaaggccggagccggctccctcagcttgcagggaggtgtggagggagaggcgccgggaaccggggctgcgcgtggcgcttgcgggccagctggagttccgggtgggcgtgggcttggcgggccccgcactcgccgcagccagccggccctgccggccccgggcaatgaggggcttagcacccgggccagcggctgtggagggtgtactgggtcccccagcagtgccagcccaccggtgctgcgcttgatttctcgccgggccttagctgccttcctgcggggcagggctcaggacctgcagcccgccatgcctgagcctcccaccccctccgtgggctcctgtgtggcccgagcctccccgatgagcgccgccccctgctccatggcgcccagtcccatcgaccacccaaggggtgaggagtgcgggtgcatggcgcgggactggcaggcagctccatctgcagcaccggtgcaggatccactgggtgaagccagctgagctcctgagtctggtgaggatatggggaacctttgtatctagctcagggattgtaaatacaccaatcagcaccctgtgtctagctcagggtttgtgaatgcaccagtggacaatctgtatctagctactctggtggggccttggagaacctttatgtctagctcagggattgtaaatacaccaatcggcactctgtatctaactcaaggtttgtaaatacaccaatcagcaccctgtgtctagctcagggtttgtgaatgcaccaacggacactctgtatctagctaccctggtggggacttggagaaccgttgtgtcgacactctgtatctaactaatctggtggggacttggagaacctttgtgtctagctcagggattgtaaacgcaccaatcagcgccctgtcaaaacaaaccacttgtctctaccaatcagcaggacgtgggtggggccagataagagaataaaagcaggctgcccaagccagcagtggcaacccgcttgggtccccttccacactgtggaagctttgttctttcactctttgcaataaatcttgctactgttcactctttgggtccacactgcttttatgagctataacactcaccgcaaaggtctgcagcttcactcctgaagccagcgagaccacaagcccactgggaggaacgaacaactccaggcgcgcaatgaacaactccaggcgcg

SEQ ID NO: 7710 - DNA, 2300 bp, Homo sapien
gggttcgtggtctcgctggcttaggagtgaaactgcagaccttcgcggtgagtgttacagctcttaaggcggcgcgcctggagttgttcattgcgcgcctggagttgttcgttcctcccagtgggcttgtggtctcgctggcttcaggagtgaagctgcagacctttgcggtgagtgttatagctcataaaagcagtgtggacccaaagagtgaacagtagcaagatttattgcaaagagtgaaagaacaaagcttccacagtgtggaaggggacccaagcgggttgccactgctggcttgggcagcctgcttttattctcttatctggccccacccacgtcctgctgattggtagagacaagtggtttgttttgacagggcgctgattggtgcgtttacaatccctgagctagacacaaaggttctccaagtccccaccagattagttagatacagagtgtcgacacaacggttctccaagtccccaccagggtagctagatacagagtgtccgttggtgcattcacaaaccctgagctagacacagggtgctgattggtgtatttacaaaccttgagttagatacagagtgccgattggtgtatttacaatccctgagctagacataaaggttctccaaggccccaccagagtagctagatacagattgtccactggtgcattcacaaaccctgagctagacacagggtgctgattggtgtatttacaatccctgagctagatacaaaggttccccatatcctcaccagactcaggagctcagctggcttcacccagtggatcctgcaccggtgctgcagatggagctgcctgccagtcccgcgccatgcacccgcactcctcaccccttgggtggtcgatgggactgggcgccatggagcagggggcggcgctcatcggggaggctcgggccacacaggagcccacggagggggtgggaggctcaggcatggcgggctgcaggtcctgagccctgccccgcaggaaggcagctaaggcccggcgagaaatcaagcgcagcaccggtgggctggcactgctgggggacccagtacaccctccacagccgctggcccgggtgctaagcccctcattgcccggggccggcagggccggctggctgcggcgagtgcggggcccgccaagcccacgcccacccggaactccagctggcccgcaagcgccacgcgcagccccggttcccggcgcctctccctccacacctccctgcaagctgagggagccggctccggccttggccagcctagaaaggggctcccacagtgcagcggtgggctgaagcactcctcaagtgctgccaaagtgggagcccaggcagaggaggcgccgagagcgagcgagcgagggctatgaggactgcccgcacgctgtcacctctcagttggatttacagtacattgatggatagaatctgggatgcttgcctgggtaggagggaactccctggactgagaagcagtggttcccaaagaacaattgaggttcccactttagacaaaaatcaactcaaaatggcctgtaaaaacctgaagtgagccagacgtcatggctcatgcctgtaatcccagcactttggttggccaaggcgggccaccgtgacttcaggagttcaagaccggcctggccaatgtagtgaaaccccatctgtacagaaatacaaaaaaattagccaggcatggtggtgcacgctgtagtcccaactactcaagaagctgaggggggaagatcgctagagcccagggggcagaggctgcagtgaactgagattgtgccactgcactccagcctgggcgacagagtgagatcctatcttaaaggaaaaaaaaaaaaaaaaaaaacctgcaatggtaacactacttgaaggaaacatatggggaaagttctagacattggtctgggcaatgatttcttggataggaccccaaaagcaaaggcatcaaaagcaaaaacagacaaatgggatagcacccgactaaaaagcttctgcacagcaaaagaaacaacaaagtgaagagagagactacaggataggagaaaatctttgcaaaccatacacctgataagggggctaatatccaaaagaaacaaggaactcaagaaacaaatatccccatttaaacatgggcaaaggacctgaacatacatttctcaaaagacacgtgaaaaaatgctcaacatcgctaatcgtgaaggaaatagaagttaaaatctcaatgagataccatctcacacctgttagaaaagctactaccaaacc

SEQ ID NO: 7711 - DNA, 2300 bp, Homo sapien
ggcagagggaaaagcaaaggcgaaggctgagaggtaggtaacttgggaaggaggagcaggaagggaccagggcaggcctgggatgagggatgaggatgcgatgggaggcccagagtccactcatttcctccctcagaccccaacaaagcttcagcttccacctccaagacccctgcttggctccatcatcagctgctgcccccacctgaggtcctgctggccccggccacctacaggcctgtcacgtatcagagcctgtactctggagccccgagccacctagggatcccaaggacccgaccagcaccataccccctccccaacatccgggctgatagggatcaaggaggcctgcctctcccagctgggctggggctcctgtcccccactgtggtgtgcctggggcctggccaggactcccagtgatgccagaagccctggggggaagccctgctaccctggaccttacaccgggtgtgggaatcagcctctgccccgccccctccagccccatctctgtctcaaggagagcagggtaggtgaaagtctagagaaagaggctacctgcccagggtcacagcaaggctgggaccatggcaagcttggaaccaggacttctatctcccaaccccagcagcctgaatactgtgccctcttgctttgggggtaactcccgaaaaccctgccttacctctcccttccccctaacattaaactatttggcatgagtggtcagagcacttctgtcgtcgtggtcagggtgggtgggggcctcaggaactcccagacccatcatagtccccacatcagccctgtaggcatcccgaagctctgcccagtgccgtccgcatccctgggagcacacagtaatattaaaagtggtgactccagcccagtggcagggctgcacttgcccagatgaggatcgaaactggcgctcagagaggcgcgggacctgctcaacgtcacacagcagagcatggcggacacccgccaccccacgtttaaatgctgtgcgcaaggctggggtcatctggtccccaagcccagggtctggtggaagggcgcagaaccacggtggtcagtgaccacaggggccgaggtaggaaagggggagggatttgggaatccggtcaagactcaaggcaggaagggagaagagctctggacgctgggacaaggaggtcaaaggcctggggctggagtccgacggagccagaggggaagacaagactgggggcggcgcgcgccacccagcggtatcgggagggaggaccggagggagggctgggccggacgctcctctcgcgcaccgatcgacctcgggttcctggaggggcgtccccgtgggatcccggctccgtacatcctggagcccctaggggagggacggaccagtgggggccggcggggcctcatcagacaccccaacgccaggacccaacgggaccgaggacggtcgccgggcgcttcacggttcgcgtggtttcaggatctcggagaacacaaccggcaggtcctgcagctccgcgcccatctccctccccgcggccacacccccggccacggcccggccctgccggaagcacagtcctcctggccacgccccccagtccttcgtagcaaaagctccggtccaggccccgcccccagcccgccccaacctcgattgcctactaggccccgccgccctttggcagtaacgtccgagtccggctcccgcgcaggccccgccccgccccgccccgccgccctccgtccctcccatccgggggactcaacgcgtcccaccgaggccccgccttcaaacaggccccgccccctaacggaccccgtcccaccgaggacccgccttcaaacaggccccgcccccgaacagacccagtcccaccgaggccccgtctccgggaaggccccgcccacgaacagacccaccccactgaggccccccgacgccgctgccgctctgcagccccccaggcgggacgcgtcgcgcgggctgccccttctccctctcagctttcggagggacccgggctgagcgccccgccccgcctcgccccgcctcttccctcgcccgatcccgcgccctcagtgtcccggccgcgcaggacttgacatgctgcccgactgcctgtcggccgagggcgagctgcgctgccgccggctgctggcaggggccacggcccggctccgcgcgcggcccgcgtcggccgcggtgctcgtgccgctctgctcagtgcgtggggtcccggcgctgctgtacacgctgcggtccagccgcctgaccgggaggcaca

SEQ ID NO: 7712 - DNA, 2300 bp, Homo sapien
cagtgccactcccccagccctctacacccccaccctgcccatccatttccctgcggccacggctgccacgccacctcctggtattgagcagtgatatgagaaggtgtgaaggatacgggggcaccagggacaggctggcaggcaagatggatgagggggcagggggccagcaggcgcctcgggcaggcagggcgggcgggccagccggggaggggtgtgcagggaggcctgcctgtgtctgtgcgcgtgctgtgtggtaagtccatgtgcacagaagctgtacgtgtgtgcgccatgtggcgagtcagcaggctctgagttcatccgtgtgtctgcgtgcatgtgggttagcatgtcagtgtgctcgtgtgtgtgtgtgggaggggggttgtttcccatcacacagatcaaaatcgcacacacacacgtatcaggggccactacaatcccagcctggccctcccctgggtgtctcggtgaaggggagccaccagtactggaatggatcccccaactccctccatcatctccccacttcccacccaccatgccatggccagggcagatgactacaccttgttgtatagcctcaaggggctgctgggaccctccaactcacacagagcactcccatcttgcctggcagcaactccaaagtgctggcagccttttctcacacagccgggcatggggttgggccaggggccggccctcctccttttacatcccccagagccagcccaccgtctttgtgtggggtcccatccagctctgcaggctgagatgtgagacacaagggattgagccacaggcatccctgagctgcagctgcgcccagaacatagcgctcagggagaagcagccctgccgccccccagcccctccatgccccctcttaggaatcaaggccactgccaacccagcatccccaagacaggattctggaggaggtatggggggctccagccagacgacccactctgtgccattcagcaagagtcaaaaggccagcgagcactctcaaccaaggaactggcagcctctcagggggacctccaggttctgcctccctgcagagtgatccatgtgtcccctgaatgcccagcacaggctgtagacaacctggagagggtgcccggtcaggccagagagaacagacagacccacaggcagagcggacgcccacttctcacctgggccagcctcaccgtttccactcatgtccagatggggattccgtggacaccatcagccagggcagtgcccccagttccaggcgggatgggcttaccgctctccaggctgggctagaccatcacaggcggaagagattatgtgcttaggttaactggggaggctgaggcacggagactgtgggacctgccagcgttgcgcagctccctgagttcatccatgtgtctgtgcgtgtgggttcacgtgccacaggacctgggcttcccgccatccagtctggggctctatgctgactgcactcgttgctgctgcccccttgcgtttcctgctcacactgctcctgacaattgcgcatctgccggccggctggggccagcctcaggtcaggggtctgggtcttggtgggagggcacctcctccgccattcagcccgcaatctgctgctcccactgtgcctcccaacccccggggccccagcccctccagtcagccaggcctggacccctgcagatgcccagccgtcctcaagaaccactctcccaccccctcacccctgccacgcctgggcccatcgatcaggaatggctggggggctcttagctggggaagggaggaacttgaagagggaggacaaggagggaggaaggggggctctgcaacgtcagaaccttcccacctgccctcctcccgcacagccttggacagcacagcccgagagtggcttggagaagggccgctgcacgccccagagcctgcatctcaccttcggagaccaggggtccagctcgagtaggaagaccacgacctcaggacgtggacgaagggcgatcgaggaggcaaggaccgtcctgccgagagactacagcttgtgtgagcacctgagggctgagctgaggtgccgagtggacgagtggtgaccaccccttccagcaggcaggttcccagccccagccaagcagtgtttctccaggagccggacagcctctctgtctccatggcaggtaggctacgttctgaagcagaggtggcctcatgggtcaggctcaggttccagggtgggtgggcagggtgggaaccaagacagccccgctgaacccaggtccttc

SEQ ID NO: 7713 - DNA, 2300 bp, Homo sapien
ccgattgctcgttccttctccctcatggaattgaagttcatttatcttcatgcactccctgatcaatcaggaaaggctgtggctgacgtcagctccaggctcagcacagtctttatggggtgatcttatagcttagcagtgcaaccctgtggagtagaactgaacggagacttttgccagttgcaggaaatggtcattaaaaaataccagtttattcacagaataaaggtgcttcatgcagacatctgtccccagggtttcttctgcaaaatgctgatgctgctatcatgaataatgtcttcaaatattctcttaatgaggcagaacaagccggagctgggaatacatttgtcataatgtaaggaagcagatcatcatcagtgacagtgccaagtcttgaagattctctcctgggtcttcagactaatacacatttatctccctgggttgaagaagtactgtgggactatgatgtatacccacaaaaggatattgacaaagaagctctttatttatttatttatttatttatttatttatttatttatttattttcttttgagacaaggtctcactgtgttgtctagcctggaatgcagccatacgataacggctcactgtactcacggtacgattacctccaactccccgtgctcaagtgattctcccgcctcagcctcctgagtagctggggccacagctgtgtgtgccaccacctggctaatttttttttttttttttttttgagacagagtttcgctcttgtcgcccaggctgtagtgcaatggcatgatctcggctcactgcaacctctgcctcatgcctcagcctcccaagtagctgggattacaggcacccaccaccatgcctggataaattttgtatttttagtacagacggggttttgccatgttgcccaggctggtcttacactcctgacatcaggtgatccactcgcctcagcctcccaaagtgctgggattataggtgtgagccaccgcgcccaccctaattttttttttttttttggtagagacagggtctccctatgttgcccaggctggtcttgaacacctaggctcaagcaatctgccccccttggcctcccaaagtgttggggttacaggtgtgagccactgcacccagctgacaaagaagctcttgaacaaattcatttaatgagattctctagcactaaaatagtcctacctcattgtaatgttttgtagagtatcttataaaacaatgaaaaaaaaccagtattttaatacatatttttctgtatatttccttctagcctttgtacatatgatcacatatttgtaaaaagttgtatgtatatatatacaactttacccgctttgtgtgatgatatgacaaaaacatttatctgaaaaaagtatttttttcatcaaatggcagagctcctgtttctggtaacccggggtatggcaagtaggggctctgggagatggagcagctcagcctcctgtgaaaaattctgtttctctaaaaaagaacaaattctcatgctgggcgcggtggctcacgcctgtaatctcagcactttgggaggccgaggcgggcggatcacgaggtcaagagatcgagaccatcctggctaacacggtgaaaccccgtctctactaaaaatgcaaaaaattagccgggcgtggtggcgggcgcctgtggtcccagctactcaggaagctgaggcaggagaatggcgtgaacccgggaggtggagcttgcagtgagccgagatcgcgccactgcaccccagcttgggtgacagagccagactctgtctcaaaaaaaaaaaaacgaattcccaaaactagtcccactgttgtctacccagatccgggatccgggttgcccttggcctggccagagatgcctctcaatcccccacggcacgtagagccagacagaaaccgaaagcagaggtgccctgcgctgaagtctagagatcccactgctaggtccaaagaatttaccctttcagtcaacccacggggcaaagtccactttcttccctgaaggagcagcacagaacaaaagctccaggcagctgcttccgctgtttcgggggtagggcggagtgacagccccacgggccacgcagcaagcagaagatccccgggagtcaccctcaaccctctggggccacgtgggtgagttcgcccggggaaggtgccgcggcccactgctttaccttagtgagcctcaagaagttaggatcagaatcccagtcggccccatctgggtcgccagagttttgttacccacacaacggg

SEQ ID NO: 7714 - DNA, 2300 bp, Homo sapien
gaatgctcttttatatttcagtggtgtcagttgtaatatctcctgtttcatttctcagtgagtttattaggattttctctcttcttttcttggttaatcttgcaaatgatctatcaattttatttatcttttcaaagaacaagtttttgtttcatttaccttttgtatattttttctgtttcaatttcatttagttctgctctaatcttggttatttcctttcttctgcttggtttgggtttggattgttctcgttcctctgttccttgaggtgtgatcttagattgtctgtgctctttcagactttttgatgtaggcatttagggctatgaactttcctcttagcacagccttagctgtatcccagaggttttgataggttgtgtcactgttgtcattcagtttgaagaattttttaatttccatcttgattttgtttttgacccaatgctcattcaagagcaggttatttaatttccagttatttgcatggttttgaaggttctttttggagttgatttccagttttattccaccgtggtctaagaacatgcctgatataatttcatttttctcttgttgcccaggctggagtgcaatggtgtgctctcagctcactgcaacctctgcttcctaggttccagcaattctcctgcctcagcctcccgagtagctgggattacaggcacatgccaccacgcctggctaattttttgtatttttagtagagacagggtttcaccatgttggccaggctgttctggaactcctaacctcaagtgatccaccagcttcggcctcccaaagtgctgggattacaggcatgagccaccgcacccgacctattttacattttaacaattgctactgaggttgagcatattttaatttatttacgtctattcaggcttcttgtcagttcagtttaacaaaacaaaacaaaacagcttattgagatagcattcacatcccatacaactcacccatttacagtgtacaattcagtggtttggaggcagtgggcctccccagtggccataacccatctgctgctcttagatgggccttagcattctgccctgtattcccttccccatcccgaggtcccttcctggtgtcacattggcatttacatctttagctaccgaagattccagggccagggcttggtctcaggctgtggcctccgctgggctgtctccagtcacaaccaagggttatctcagatgtccctcctgcccacagggctgcacactctgccaagagactctctacagccctcagcagggcgtgtccttggtctcaggcttgggggaaggtggggtggggacagagtcaggccatccatgaaggacagtggcaggacctgagctcattctgctccctggaacctagaaggtgctcagcaaatacttgtggaaacattagcgggcaacattgaggggcactgattttgtgccaggagctgtgatctgccttttccattctcacgtctccctctgtgaccctctcaagaaccatggcaattaggtgttattgttacttccgaaaggctcagagacgttaagtaacctacccacggttgcacagtaaataaataaaccaatgaacaatgcgccatcctagagctacaggtgccgtcgcccatcaagggtctctctgcaaagatctgagccccttcctctgccctgagtatgccagctgggcacactgagagtggaaatagagccacagttgctcatcttgacctgtgaagcctgaagagtgaggacaggagaggagggagatgaagatttagcatagagaccctaggaggggccatggggggcatgggaccactgtggctggggcctgggaggacttcctggcgaaggcagcatttgccaccaggatcctgctgatattttcatcctgtgaccttcccctggggttcttttttcctgatcaggtaactccctgctagcccattccaggaaacacagagcaaagcctcagacagccttgacttgtctaacctgttcccaagccggctgtgcagtgtggtccctgggggcagggccctggaagaacagggcagacaccgagcagctataggtcctggcagtgagacaagggtaggcatgggaattgggaggtgcagccctgccccacgcctgttgggtaacactgagcatcaccccattgattaccccattgccaggcgtgggcacgggagttggtttgggagctgccagtctcctgggaggatcgcagtcagcagagcagggctgaggcctgggggtaggagcagagcctgcgca

SEQ ID NO: 7715 - DNA, 2300 bp, Homo sapien
gaaagatggatgtgaacaggcattcattaactttttttgttttggtttggttttttgagacgaggtctcactctgccacccaggctggagtgcagtggcatgatctcggctcactgcaacttctgcctcccgggctcaagaaatcctcccacttcagcctcccaagtacctgggaccataggtgtgcaccaccgtgcctggaaaatttttgtgtacaaacaaaaagccactttctggtctcggccgcagaagcgagatgacgaagggagcatcatcgtttggaaagcatcgcaataagacacacacgttgtgccgctgctgtggctctgaggcctaccaccttcagaagtcgacctgtggcaaatgtggctactctgccaagcgcaagagaaagtataactggagtgccaaggctaaaagatgaaaaaccaccagaactggtcgaatgaggcacctaaaaattgtataacacagattcaggcatggattccgtgaaggaacaacacctaaacccaagagggcagctgttgcagcatccagttcatcttaagaatgtcaacaattagtcatgcaataaatgttctggttttaaaaaataaaaaaataaaataaaataaaataaaagccaaaggtgaggttataaaattgactttatgtaaggagaccccttgaaactattgctacagaataaaagatgaaatgctcctgattattgtaaacacaaagttgcatgcaggattgtgtaaagacaatgccaggttggactgccagaatgagccaacagcgcgtgatgtgcttcccccggcagagagcctatgaatggatatgcagtcagggaggtttcacatcaccaagattcctatcccagaaaagcagatgttcatagctctgggaatggaatgcgacccttgtagagagcctataaatggacacatgaggggcccctgtccatatggataagatagggctaaaaatgccctcatcttgccatggctcttctaggcctctttagggttaaggcacactcccttctgagaatttctggtctaaccggttgtctagcttcacgtcctgtttctacagattgtttgtaaccagcttttgctgcaactgttaccgctgattaatatcttgctaatcataggttatggaaagcctgtgtttctgtttttaggctctgttagaaattactgatgcacacgctatattataaattcttatccctgtatactgtacttctgcatacagatgttatgttaaagaattacttcatccccatgtgaccatctcacctcataatcaaatgaccctaaatcccgcactaacctacccccgccctcactaaacttaataataaatgctggtatatccagtgcattgttggcactgcaggaccagaaggcagtgacccccccggacccagctttcactatcttgtgtgtgtttattatttttcgacctgccaatctgcctgggaacaaagagagagccccattgcattgcgggctgctggccagatcccgcaataactttatctatctttaatttctatgtgttgagctactgtaatcttggttttagttatagacttatagcaattaacttatagcaaaacataagcattactataaccttttaagctaaggaatttagatacttttgtggtgctgcagtgctttttgtggccttctagtaatttgttctaagatggctggtaaaacttttaaaaatatatatctatctgcataaatctcctaactaggagtattatgcccaggaggctttgtctaggaggatctttgtatcctctccgtaaaaattgtcttttaattctacaggaagcagaaaattctttgtggttgggaatggataaaaaagtgcctgtatggtttggctgtgtccccacccaaatctcatcttgaactgtggttcccataatccccatgtgtggtgggagtgacctggtgggaggtaatagaattatgggggcagtttgccccatgctaatctcgtgatagtgagtaagttctcacaagttctgatggtttgataaggggcttccctctgctcagctctcatttttccccttcctgccaccatgtgaagaaggatgtggttgcttccccttccaccataactgtaagtttcctgagacctccctagccatgctaaactgtgagtcaattaaacctctttcctttataaattacccagtctcaggtatgtctttattagcagtgtgagaacagactaatacagtgccacacattggctcagaagtcaaaagtccctttgtcctt

SEQ ID NO: 7716 - DNA, 2300 bp, Homo sapien
tggtgagatgagcttatgcctattgtgtgctgtgttctgaagttctaaagtgagaaagagggcatggcacctgccaaatcataggggccactattaacaccttcaccaggcactcaggacatgaacactcctgtcttggggccctgcagggtgactttacccccacagtgctgctatgaagagacaaggatcccccggggttcaccagctgggcagaggagatgccatgaccagacagggcacaacatgggttcaagatgcccaggttggactctgcccagaattggctatccttgagcaaaacggccaagagactgtggtgcagtatgaggctccagcccctgctacagacagagacaccgagccagcctctgccctgccagcagcaggcatgacctcggccactccacacccccaaggatgacgttcaaaactgttcacagcttcggcccatcagaacagacactgacatggatgcccggcaggactgcccatgtgtgctagctgtgtgtcactgtgtgtgcccatctgtggtcagggagcatcctggagctgaacatgggcccacccgctgccttctgcaaacagggccctgttccccagcagcccagacctggggcctggactctggtactgagcagactgggctggggctgcaggcctgctcctctctatacaaaggcccatgtctgtatctatgccgtggatgtacaacaggccacttgctcctaccatatgctccgtgaggcagagaccaaaatatctgctccaaatgtcacgaaaacaatgccagggtaagccctgtcccctggtatgaaaagggagaatccctgatgtgtttttcacactgtccctaaggggtgtccacagagccccacacctgccccgtgtagccacgagatttcacactgaccctccagtgttgatgcggccctgtgcccgccctggggtattaacggaatgtccatggcgtggaacccccacaactgtctccagggtgtccacaccctacccatctgtccccagtgtgtccatgagactttcctcccacccccggagtgtccacaggaagccccacctgcctctgccatgtccacaggaccctatgtgaccatgggaccccatatctgtctctgggatgtctatgcctagccaaccacccacagatagccataaagccccctgccccgccccctccagtgcccacagctatactcactgctgagtccagtattgttcagggcgctgcccacaccccaaagggcagctgccacacagaggatccagatgtgttgcaggacccgaggcacaggggcccagaaaaagaggatgaaggtgaggagcaggtgcacccctgctccagccatgaggggcaccgggcgtggcagccacaggcccagcaggcccaggagtgaggcggctgaggtgcccaggctgtaagccacgaggaggtaagccagccgctccagccccaccaagcacacgccatagccctgcggggggacaaggggtgagtgttgaagtccggaacagcccagaccccagtctcagccctccccgcattgcggggggtgcctcacccccctgcgataggtgccctaagagccaggggaggagaagggctgactcgtactccccgcatcgcggggggtgcctcacccccctgcgatgggggtcctaagagccagggggggaagaggggctggctcttactattcctgagggaatagtttagagggactcattccctgctatggtgggtgagatgtctatgaaaaggacaaccagtgggggagggtagcaaaattttgaagtagatttctgagaccccccagcacaaccaggaacagaaactccacactctgctgagcggatagtttgcacattggtctcctcccatctgcccagcgcactctcctgtttgtcctgaagaggaggaaaccaaacaaggctcccgaccgtccctcagcactcacttgaaggggtggtccgtccctccacacctgtgggtatttctagttgggtgggaagagactgagaaaagaaataagacacagagacaaagtatggagaaacaacagtgagcccaggggaccggcgctcagcataccaaggacctgcactggcacaggcctctgagttccctcagtttttattgatgattatttttattattttagcaaaaaggaatgtagtaggagggcagggtgataataaggagaaggtcagcaacgaagatgtgagcaatagaatctatgtcataatgaagttcacgggaaggtactatgactggacgtgtg

SEQ ID NO: 7717 - DNA, 2300 bp, Homo sapien
gccctcccatccaggtttccctaccaagtgaatttttttttttagagacaaggtctcttgcccaggctgtcctcgaactcctgggctcaagcagtcctcccatgtcagcctctagagtagctgggactattcggcacacaccaccaagcccaatgaagtgaatgttttatatgccagctggccggtattacaccattccatcccaaatctcccctccaaacttggtgaaaatcatctgaccatttttacagattagaacgaaagcaaacaagctctcactctgtctgcccccagcacgaggctgtccacacagagcctttggacgagctgtacgaggtgctggcggagaccctgatggccaaggagtccacccagggccaccggagctatttgctggtatgagaaggacaccctcctccccctcacagcccagatacccttcctgcacagacaaagtgaaaacgtgggtgtgggttcaaatcctgactcacccagtctgcagtcttagacatgaggtccatcaaccttctttagcctcagtttccctgtctgtaaatcaagcacttcaacaacaacagcatgtctcatggggttgttgggcatttgtccaataggtgacacactctacctgcttcacaaggacctggtgtccagtcctcaaagaatacttgacaggtccgggtgtggtggctcacacctgtaatcccagcactttgggaggctgaggcgggtggatccgaggtcaggagttcaagaccagcctggccaatatggtgaaaccctgtctctactaaaaatacaaaaattaggccgggcgtggtggctcatgcctgtaatcccagcactttgggaggctgaggcaggtggatcaccggaggtcaggagtttgagaccagcctggccaacatggtgaaactctgtctttactaaacatacaaaaattagcgggtgtggtagtgggtgcctctaatcccagctactcgggaggctgaggcaggagaatctcttgaacccaggaggtggaggttgtggtgagccaagatcacgccaatgcactcctgcctgggcaacaagagtgaaactctgtctcaaaaaaaagtagaaaaattagccagacatggtggcacatgcctgtagttgcacctaattaggcggctgaggcaggacaattgcttgaacccaggaggcagaggttgcagtgagccaagattgtgccactgactccagcctggggaacagagctcaaaaaaaaaataagataaaacatagatacagaaaaccacaaaggaaaaacatagcatattgaatcatcacaaggcagccaccccttcatagccacacccggcccctggccacaactgacctgtgctccatcaccagaattccattgtttcaggaatgttcaatgaatgaaatcctgtgtggcctgagatgagtgtctttcatgccatgtgacacccttgaggcctgtgcaagctgttggcatgtcaacagttagctgcttctctttgctgagtggcgattggtcctgtcatggtttattcagccatgtggtggatggctacttgtcttctaagccacttgccttctgatcgctggactgactctctctccctctcttggtgcagccctcaggaggctcagtcacactcttcaagaacacagccatcatctcccacggcatcacaggcctggtcacatgagatgctgccctctaccttgcagaatgggccatcgagaacccggcagccttctctcataggtgacctcggggtgcacggcagggcaccgaggcaggcttaccctggtgcagtcgcagacatggtcccctttcctcccaccaggatggtcctagagcttggcagtggcgccggcctcacaggcctggccatctgcaagatgtgccgcccctgggcatacatcttcagcgactgtcacagccgggtccttgagaagctctgagggaatgtccttctcagtggcctctcattagaggcagatatctctgccaacttagacagccccagggtgacagtggcccagctggactgggacgtcgcgacggtccgtcagcaatctgcaatccagccagatgttgtcattgcagcaggtaatgcccagccccgggcactctgtgcaggcggtgtccttgaagctctacccagctcttggctctgggaaaagggaacaatggacactgtcgggcatggacatgatggggcttccagaagagttactctgggcctccagggtgacgtcaaaggacaggggtgtctcttaaggtgaccttccagccacag

SEQ ID NO: 7718 - DNA, 2300 bp, Homo sapien
cacccagacccatctctggttacgacttgctgtggattctcaggtgactccatctcaggatacagggactgagagggtgtatgcaatatctcagacccagaaactgttgattctgtctaaaaacacagcaataaccacatcccaccctcttgatttaaatgaaagtgtttgggggaataaaagatgaaccttttttttttctttgtcagatcttgcgctcatttggttctggtggggaacaacagctgtgagagaacacgtgtattcaattagaattaatccccctctcttattctcacagctgagcaggactcaagtgcctctcatctgaaagaggtaataagatttaatctgtctcctcatctaccttctgcaagtatactgaacaaattagctctcgggactcttccaaatggagttttatgagggatttgctaaggtaaacgttttagactttgaacacagttcagatttcaggggcagtactgaaatctcaacacacaataactttgaactaaagacacgttcaactcaagacacaataactttgaactaaaataattatatttttgttgttttccactctgtccccacgtctatatcaccaccacccccaattccgccccccaggagctaactcctccttcctgtccctgcaagattaaaactcctcctggaagccccgctagctctgtctgctcgccttcgtggcagatatcgctattgtacttttatactcatttgtgtgataagtacttcaatgtccacttcttccacgaccccctgagcccctggagggcctggaccacacctagtttttctcactgttacatctcccttgccagacacatggtaggagcttcataagtatttggtgaacggatggcttgtttggtgacagtccaaaggctgggggacagagggaaagctccttcctatcgggctccagatgtgtggcgctgatggagaggaggctaggataacgcctccaggacagaagcgcgcacccctaaggcccctgccaaaaagaccttcctgaaggcggaggaactgcgagagtgcctacgttggcccaaggcctgacccgacgatcccggggaccctcgccctaaccggccccgcctcccgggcccctaacccggactcggccccgcccaaagctccggatcctggggcccgcccctggccccgcttcggcagaccgtgggctcgctcctgggcctgcctcaaaccctccgcaggtaacgcctcccgaacttgagccacactccaaacccctcctcaaacccctccccgtttctcacaccctggacccctcgctccgtctcggccccaccccaagcccagctccctctcggcccctgagcccagccccgacccgcctcccagtcccttggtccctaccgacacctgcccctccctaagctccgcctcccagggcccgcctcctgagcgcagcccgcagcccggactctgccccgcctcccggaccctgggcccctccccatgtcggcccgtcctaagctccgcctcccagagtccgagcagcgcctggccacgtgctacgacatagtcaacgccccgccctggccccgcctcctgagcccttctccgggtctgcccttagccccgccctaagacctgtctcctgggctctgctccgagtctcgcctcctgaacccaatcatcgtttacccccaccctaacgccccgcctccaggacccttatcctgcccccacgcaaggccccgactccaggacgcctccaacctggacgcttccgaagccccgcttccaggatcgccctgtcctggccccgccccaggacccgccaaccagaactctccccaggacctgccccaacgacgcttatcctggccctaccccaggcctcgccctcatgacgctcatcctggccccaccccaggtcccgcctcataacgctcatcctggccccgccctagagccgcccccacgactctcctcctcaccctacccccaggccccgccccctctctgcccccgcccactgccctgggcccgccccctcttcagtccaggcctggcttccgcccggtctccgggcaacgctgcggccccgcccacgtcatggcgcccgaggagaacgcggggaccgaactcttgctgcagagtttggagcgccgcttcctggcggcgcgtgcactgcgctccttcccctggcaggtgggcggcggggcgagcggagaggcccgcggggctcgcgggagtccaggggcagatgggatgggtctctgtgctgaagcccccggcgctcacgc

SEQ ID NO: 7719 - DNA, 2300 bp, Homo sapien
tatccaggtccatctcaagcacctaagaagttttggaattagagtttcttgtcagtcttcatggaacactcccctcttgcctgttcccaagcctaagatcaaggactactggccggtacaggatttgcgcttggttaatcaggctgcagtgactttacatccagcagtacctaacccgtacacattgctggggttgctgccagctgaggacagctgcttcacctgcttggacctgaaagatgctttctttagcatcagattagcccctgagagacagaagctgtttgcctttctctgtttgacttccggatctgggaagatccggagtcaggtgtcactactcagtacacttggaccgggcttccccaagggttcaagaactcccccaccatctttggggaggcattgcctcgagacctccagaggtttcccaccagagacctagactgcattttgctccagtacgttgatgatcttttgctgggacaccccacggcagtcgggtgcaccaaagaaacagatgccctactccggcatctggaggactgtgggtataagatgtccaagaaaaaagcttagatctgctgacagcaggtacattacttaggatttactatccgaaagggggagagcagcctaggatcagaaagaaagcaggtcatttgaaatctactggagcctaagaccagaaggcaggtgagagaattcctatgggctgtggggttttgcagactgtagatcccaaactttgcagtataagccaagcctttgtatgaggtcacaaaggggtggggcgggaacgttttgaatggggatcccagcaacagcaagcctttcatgagttaaaggaaaaacttatgtcagccccagccctgaagctacccgatctaacaaagccttttccattgtatgtgtcagagagagaaaagatggcagttggagttttaacccaaactgtggggccctggccgaggccggtggcctacctctctaaacaactagacggggtttctaaaggatggcccccatgtttgagggccttggcagcaactgccctgctagtacaagaagcagataagctgactcttggacaaaacctgaacataaaggcctcccatgctgtggtgactttaatgaatactaaaggacatcattggctaatgaatgctagactcactaagtactaaagtttgctctgtgaaaatccccatataaccattgaagtttgtaacaccctgaaccccgctaccttgctcccagtatcagagagccctgtcgagcatgactgtgtagaagtgttggactcagttgactctagcagacctaacctccaggaccagccttaggcatcagtagactgggaactatacgtggctgggagcagcttcatcaacccacaaggagagagatgtgcaagatatgcggtggtaactctagacactgttgctgaagccagatcgtttccccagggcacttcagctcagaaagctgaactcattgctttaattcgggccttagaactcaatgaagctaagaatgtcaacatttacactgactctcattaagccttttcaacccttcaagtgcgtggagcattatataaagaaaagggcctattgaactctgggggaaaagacataaaatatcaacaagaaatcttgcaattattaaaagccatatggagaccccacaaggtggcagttatgcgttgcagaggataccagcgagcttccaccttggtgggtttagggaattcccgcgctgacttagaggctcgaaaagcagcatctgcccccttccgggcatcagtcacagcccccatgctccctcaagtacctgatcttgtacctacttattctaaagaagaaaaggactttctccaggcagagagaggacaagtgatggaggaaggatgaattcggttaccggatgggagagtagctgtgccacagctgctaggagctgcagttgtactggctgtgcaagaagccacccatctaggccaggaatcacttgaaaagttgttaggctggtatttctacatctcgcatttgtcagctcttgccaaaacggtgacgcagtggtgtgttacctgccgacagcataaagcgaggcaaggtccagctattccacccggcatacaagcttatggagcagccccctttgaagatctccaggtggacttcacagagatgtcaaagtgtagaggtaacaagtatttactagttcttgggcgtacctactctgggtaggtggaggcttatccaacacgaactgagaaagttcgtgaagtaacccgt

SEQ ID NO: 7720 - DNA, 2300 bp, Homo sapien
aacttaactactgtgttggtggtttcgttttcggtagcaaatgccttagtctatctggagaaggtgtctactagtactagaaggtatttgtacttagcctggtgtggtttgacttctgtaaagtcaatttcttacttttttctcggcgagttttttcagagacagtggcctgggctgggtttaggactttgtttggcatttacttgggtgcaggttgtgcactggagagcggcttaatctgataggctttgaagacgggggatcttaaaatggctccggaggagctgaggtagctttgctctttttaagtgggtggtagactgcaggtgactgattaaagtttctttaagagttcaggatatgaagattctagagtcaggaagaatctactaactttcctgatttttattggctctgagatctgaagccagtttttttgttgttgttgttgttgagtatacgggattgtcaggcagatctggctgaggaaaggagactgtgggcagcaagtttagaggcgtgactgaaagttgcgctgcgacctgagctgctgaatcagctttctagttactatgggcaaagccgtgttttctttttgatgtcctttgcagtggatcacagctatctgctgaggtgagtagcctgctttcctggtagatggctttatgtacatgcacagtagcaaaggcgtacttgctgtcactgtaaatgttaatacgtttattctactttatcggagagcctgagtgagggcgatcaattcagccttttgtgctgaggtgttcgctggtaaagcttgagcttacaacacatctgtctccgtggtaacagctgcactggcttttaatacttcctgcttgaggaagctgctcctgtctgtgaacacggcggcatctgccttttccaggggcacatcttgaagatcagatgggccagtttcgatagtttctaacagttcttgacagtcatgagcaggaatagtgcagtctgggtcaggatgtagcgaagctggattgaaacactttgtgggagagaaagtcaaaccaggctgatctaacagtaaacttcgaaactgcaagatgcgagcatttgacatctatttgccagaagcacttcgtagtaaggtctttacagcatgaggagctgtaagggttaaattttggcttagagttaacttatcatcttcttggactaggcttgctgtagcctctatggctcgcagacaacttggccatctagaggccacaggatctagcctcttagataaataggccactgggcatctttagggtcttagagcctgagtcagcacctctttagcaactccttggcttttatggagatattagggagggctaaagcaggggcttcagttaatgctaaattaatgggctatttcattctgcacttcttggatagccgccactaagatttttgtttgtcttttgaatgatttatcagcggccttttcagctgcctgtgttgtttttgttttttaaccttttgatggtcaaaagctttttggactatttctaaaagctgactgatatttattctagcaaatctttctagtttttggagtttctttttaatatccggggctgtctgagccacaaatgctaaattaagagcacggctattttcgggagctgccgggtcaaaaggggtgtaaatccgataagcctcctggaggcgctctaaaaacgttcttggtgacttatcgggcctttggacaacgtcggtcgtcttagacaagtttatgggtttctgagcggctcttttaatacttgcgaggagataccggtgaaaatcgtctaaagctctctttctacttgaggaatttgggtcccagttaggccgggtagagggaaagacctcctcaaggaggtttctagcttcttcttccggtctattggctgatgtgaggaagtactttttggcttctttttggatacgttctttcttttcagaggtgaaaagggttaaaaggagctgttggcaatcatcttaggtgggcgggtgagtccagagtacagactctgtcagagaggtcaaagcctggggcttttcagagaagggaggattatgggttttctaattacataagtcagaagtagaaaaagggacacaaactaagaagggtgctgagcgctcgtcacctggagggacttgtgcctctctcagtggtagtagaggggctacttcttcctgccacggtcatgattgagaggcaacgggtggcgagtctacaggggacgtcgtcgagcagacatgggataactttaagggagaaggttggt

SEQ ID NO: 7721 - DNA, 2300 bp, Homo sapien
ttagaaacagaatgatcagatgttcccgcagttgcatttgtgggtacctaccaaaaagaattagaagccaggagtggaagacagatttgtgtacacccatattcatagcagcattattcacaacagccaaaatgtggaagcaacccaagggttcgtggacagatgaatgaaaaagcacactgcagttccttcatacaatggaggactattcagccttaaaaatgcaggcacttctggccggtgcggtggctcacgcctgtaatcgcagcgtcttggaagaccgaggtgggcggatcacctgaggtcaggaattcaagaccagcctggccatcttggtgaaaccccgtctctactgaaaatgcaaaaaatgagacaagcatggtggcgttgtacctatagtcccaactactcgggaggctgaggcacaagaatcgctggaacccgggaagcggaggttgcagtgagcccagattgtgccactgcactccagcctgtgcgacagagtgagactccatggaaacataaaacaaaacaaaacaaagtcaaacgaacaaacaaaaaacaaacaaacaaacaaaaaaacagagaggcacttctgaggcaggccgcaacatggatgaaccttgcaaacattatcctcagtgaaataaatgaatcccaaaaggataaacacgcccaggctcagtgacttgcacctgtaaccccagcactttgggaggctgagccaggcggatcacttcaggtcaggagttcaacaccagcctggccaatatggtctctatttaaaatacaacaattagctgggcgtggtggtgcacgcctgtaatcccagctactctggagactgagacagaagaatcgcttgaacccacgatgtggaggttgcagtgagccgagatcacgccactgcactccagcctgggtgacagagaaagactctgtctccaaaacaagaaaattaaacacggtttgattccacttatctatcaagtgtctagagtagttaaaatcatagagttgcaaactagaaagggggcccccaggggtgggcaagagagaggagtggagagcttggtgaatgggtgcaatttccattttgaaagataaaactgttccggagacgatgacggtgatggttgctaaacaatgtgaacgtacttaatgtcatgaaactgtaaactgaaaaagagtggaaactgtaaatgtttatactggccattctatatgaactaatatatatttataatttttcatatttatacgtggtatattttcccataataaaagatgaaaattaaagcagttggatgtttaaaaagaaaagaaagaagtgaagaatacacaccagctttctcctgattagaggaagagccccaaagcttctatggacactcacttttctcttcttcttgcattattatgaggaaatccttagtggttggggaacttgggtgactttggctaatgaggagctctgtgccttgagcccccaggccacagaatagtaaatagtcagtctgtgcctccagccctgcagtgtgaggttgcagtcctgtgggctccagagacatcacctgtatcaggaggctcatgtcttaccctgtcatcttgccagccttgaggacggagtctgagcctccatggtgcaccacacagggaggacagtggacctgttctccgtggtcatggcccagcagaggggaagggcagttcagtgagtgtaggcaaaagaaagagcgatcagactgttactgtgtctatgtagaaaggaaagacataagagactccattttgaaaaaggcctgtactttcaacaatttctttgctgagatgttgttaatctgtagctttgccccagtcactttgaacaaaccattttgacccaacctgaatttcacaaaagcatgtgttgtatgaaatcaaggtttaagggatctagggctgtgcaggacgtgccttgttaacaagatgtttgcaagcagtatacttggtaaaagtcatcgccattctctagtctcaataaaccaggggcacaatacactgtggaaagccacaggtagctctgcccttgaaagcgccgtattgtccaaggtttctccccatgtgatagtctgaaaagtggcctcgtgggaggagaaagacctgaccgtccacgagcctgacccccgtaaagggtctgtgctgaggtggattagtcaaagaggaaagcctcttgcagttgagagagaggaaggccgctgtctcctgcctgcccctgggaactgaatgtctcggtataaaacccgattgtacatttgttc

SEQ ID NO: 7722 - DNA, 2300 bp, Homo sapien
tcagcctcttagatagtctccaggctccccaagagcagctccataaaccacctaaaaaaaaaaatcctttctggagagaggaggtgtatcagtcagggtttagtgcctccagggctgttttttgttttttttgttttttgtttgtttgtttgtttgagaggtctcactctgtcacccacgctggaatgcagtggcacaatctcagctcactgcagcctcatcctcctgggctcaagcaattctcccacctcagcctcctgagtagctggggctacaggtgtccaccatcacaccaggctagtttttgtattttttgtagagatgggttgggggggggggtttgtctcactttgttgaggctggtcttgaactcctgagctcaagtgatcctccttggccagccaaagtgctgggattgcaggcgtgagccacagcgcccgaccctctccaggtgttttgagtaggagacattgagtgcagggaattggtggtacagcacaggtgatggaagagcccaggatgggcaaccatagcaaccgccacaacccccaggcccagaggaacaaggggaggaagagattgcaccaggccccagaagtttggggtccctcagggaaattgagaagctcggggggcccactcccagcactttgggggctaaggcgggtacatcacttgaggtcaggagttcgagaccagcctgggccaatatggtgaaaccccatctctactaaaaatacaaaaatcagctgggtgtaggggcacacgcctgtaattccagctactcacaaggctgagtcaggagaattgcactttctcatcatactgtgtaatgatgctggtgtctgccatctgagaacggcccccgccatagccatactctcccacctcctccctgcccctgcgcctcgggccctgccctctcttcggctcctttcctgtctcccacttccagccacccacctgcatgaatccacctgtctgttccccacatctgcacttgggcatcgtcacctggagaaagttctacctcctggaagcctgaagccactgcagattcacgcctccccccaccttcccagcaatccttgcggggtgggaggtgtttgtcatccagtcactcatgcacccatccagtcacaagtattgatcactcagtaggtgcccaatgccatcctctgcatttgggagaggatgtacctaaagagcagtgggtggaggggggtgcacagggagggcatggaaaaccagaagggaagtgaagggactgcattctctgcagggatggtctcttgttctgagagctgagtgggaaggaagccacctgggaggcgcagcaggaagagcattcaaaccagaaggaacccaggggagagaatctggatattttcaaaagtggccccgtggctccagccaggtcggtggtagccagtgctttggagtgtcggccccaccacaggctcccgctgcagcccgggatccagtgcccagcaggatgggggcaggtggctctgggccccactacatggttgtggcagggtcccccatgtagttcagtggggatcacaatctccacctcccaggacccactcaagctcccatttgcacagcccaaactggagcaggatggggacatgggaggtgggctctggctgtagcgtccggtggtgggaggtggggtccaggtggtgacgctactgtccctgcagtgctctttgatgagctgtaacagcaggcttggaggtggggctggggacgacccaggcaaccctgaggggagcttaagggagccaggcaaccctggcacttttccaaggctttgcattaactcaatagttccgccatggccccgggggtagtgccatgtatttctgttttaccgtcgaggaaacggaggaaaccgaggcacaaagaaatggagttaattcctaaagtcacagggccaggaggtggctgagtggggattcgaactcacaccccagagggcacacacaggcaggcccctgcacacacgcgcgcgcgcgcgcgcacacacacatacacacacacgtgtcctggaggaggcggcccgcagggcgggacagggcggggcgggggcaggtcccggccgccgggaggaagtggccgggcggtcgcagggactccggggcgaccgccgcgagtccgcagtagttcgggccatggaggcggagccgccgctctacccgatggcgggggctgcggggccgcagggcgacgaggacctgctcggggtcccggacgggcccgaggccccggtgagcggggacccggagtgcgag

SEQ ID NO: 7723 - DNA, 2300 bp, Homo sapien
agttctgtcccgggaggacaggcctcttcgggggcctcctcccaggttgctcctgcattcatgacaagttcggcccctgtgagttgggggaaattcttcaacagctccctggccagggaggggaccctcgggatcctgaaacacccctcccacctgccagtacccgccaagatgggtccctgatttgctgtgtggccttagaccagtggctgccctctctgggcctcactcccagctgagacctacaggctcagcccctgcccagccctgcctggcacccgctcaatctggctgagctccagagaatggcagggctgggctgtcacatgctgagccacgtgactggcagtggctgggggctccatcccacacagaggacaggggctctgcagtccttcacccccaccctaactatctaatcacgggccaccggtgtgggcatggtccagaagacctcaccgccctcccaggtaggcagggagctggcgggtggggggggccatgatgagcacctcccaggtgccacgttggcccagaggccccggggccgggagctacggaggcccagggcaccagggagatggtagcagcggcaggcccaggaaggggcatagaggaggctcttcctccacacctgtcaccctgtcccctgcctgtccacacccacagcagcttgcacatcatccccacagcacgctggctctgacaggtgtatccggggcgggctgggggcaggcagggacaggcttaggcacagctgcctgtgccgaacttgaggaagatcgggactacaggaaccaccaaggcgacacgtggcatcatgaccacggtcctaagcagagaggcaggcactcctcctgggaggcagaggggacatccgaaacgggtgcagccccagctctggagcaagaagctctgccacacacacgccccatgttcacatcccaccccctctctgcccccacttcctcgtttgtaaaatgttagatctgcagaaagacaggctctatgaatggggcggcccatggggtggtgtggaggaacacggaagcacagggcgctgggagaggagcaggcatgaggtatggtccctaagatggtatttctagactccagccacctttgggtctgacctctttgttttgcagaaggggaaactgagtcttgggtagggtgtagcaagacaagccacagacaaaacacctcagacactggattaaagaaggaagaggtttattcagctgggagcatcagcagacttgcgtcaagagccgagctccctgaaaaagacattcttggcctttttaaaggcttacaactttaaggggtccacgtgaaagggtcgtgataaatcgagcaagctcggggaacgtgaccgggggctgcatgcgtcagctaacagaacagaaagttttgcagtgctttctcatacaatgtctggaatttacagataacacaagtagtttaggtcaggggttgatattattatcacttttttttaactaccagggccaggtggtggcgccaaggtcttctggctatttctcttacttctgtttttttctaactttttgccttctctctttcctcctgtcttgtaaaccaggcaaggtggtaggaggagggcagcaggagtagtagtggtcttattccttaggggaggcattgagggaaggctgggagtggggggtcgagacttccttgctattctgggccataacattccacataatattataatagaatataattaatacaataatagttccccaccccacaccgggattcccagggcccactgccccactcctcctcctcaggctggccctcagctcagtgctcagccctgctgcacagcctctcctcctcctcctcaggctgcccctcagctcggagctcagccctgctgtgtggctctagcctggcgccctctgggcgttgacttcttctctgtggtctgggaggagatgtcgaggcccccgagggaggcggtggtgaaatcttggcttgcagcctccagcccgcccagagccagagtcaggcacgaggctagggcaactccgccccacccctcccccggggactggccctgcgttggacatttcttaacagcagggccaccaggcagagcgggacagccaggaggaagggcagcttggcagagcctcaggtagagtatcccggggaggctggggctgtagtgggccagcagtcgggccagagtccagctcagcaactccgggttacaggcagcccaggcgggcctagccaccggcagctgcactcagaggccactgtgt

SEQ ID NO: 7724 - DNA, 2300 bp, Homo sapien
agccagctcctggtctccacacacctgcagggcaggcatcagcctcacccactttcagatgcagaacctggttcagagaggtaacatgacgggcccagggccacacagcccggggacggtggaccagacagtcctctttgccacctgggccagttctcccatgtcctcctgggatccatgggtggccctgaggcctcgagcggagaagggtgaccggaaggggcaggcccagctctcacctgcagcgagggctcccacgaggggcaccagcgtcaggttcagcggatagttccagggcgcaatgatgaggaccaggccaaagggctccttccggatgaaggcggagtccagctgcgtggcctgggccgggagccggggatgaaattaagtgctcagcaccccggcccctcagcagccagctcccacccagaggggccaccctgtgggagcaaatatcccctgagccccctgcccgcctcagcccggccggctcaccaggttcttgggcacacgctcgtccttcatccaggcccggagttcctgagggccagggtgacctcgccctggctgatggcaacctcagacacctccgactcgaaggctgactgcaggaagtgggtggggtcagggtgggccaggattcccagagttggcaggagggcacagcctcctccaggcagggcctgcttccacaactcattcattcattttcattcattcgttcactcactcactccatgttcagtgcgtgcttcctgtgtgaggtgctgtctctgtgccaaacagagggaccggccctgaggccgaccttgcagggggcagtcgttccatgtgaaagtgagaacgctgacggctccattaggacgtggctgtgctagggaaatcatggagcagggtgggggtggagactgctggagcgtgtggctgtgggcgtgcacaggtgtgcacatgtatacatccacatgagcatgtgtgtgtgtgctgtttttacaaagcggtcagtgcaggtctccaggcggcggtcacattggagcagtgacctgaagtcaaggaacaagcaagtcgtgggtactgggaggcggcatactttgggcagaggccctggcggctgcaaaggccccgaggtggctgtgcgcttgctctgctcctgtttagcaagaagcagagtgggcaaggtgagggggccaggcagccaggcaaggactcctgagaagagcagggatgggatctgacttagggttttgtttttttttaatttcaaaaaaagtttgttttgattttttgcagagtgccttgctgtgttgcctaggtaggtcttgaactcctggcctcaaacaatcctcccacctcagtctcccaaagagcagggtggagattggtccacaggagacacaggcacagccacccctaggtaaatgctgtcagttcccacagcccaggggccagggccactgtcaggcttctaagcaggagtgaggagacccgaatcaatagggacattgtcctgctctcggctagccagtgctccctgccctctgcgccccaagggaggagagaccagccaggcagcaggctgcaggccgctggagaacaggtcagggacactggggccaggctggctccctggctgaggcagcgcctgaggttatggggtgcaggctctcccgggtcagggcagagggggacgggccagtggggtgctggatgggccagaggaccagcgaagcccagagaaggagatgccctgcctgaggtcactcagcgaaccaggggcaaggccagggctacagctgagccccaagagggaggaagacgccacgcccactggcacctcctagccactgaggctgggggaaggtgccttccacacggactttcccacagcctgtgctctggccccatgagcctggtggcctgcccgccacacctcctaggtcacctgggacctgactttgggagactgggctattttgagccaggttcaaactctggctctgctcttcctggctgcatgcccttgggcaagaacacactctctctgagcctcttctgggggccactgggtgtggttgcccaaccagattcaccaaagggttaactgagagggtgcacgtgacgctgggcagatgctgcctgctgagggtggggacaggggggtgaccaggtccagagggagggaccaggttgaatgttctgggctactgctgcctttgtagggccccgctcctgcagctgggatgggaaggcaggaggtggaatcagagccgaagggagaaaagggaccagacagacgtcaggtc

SEQ ID NO: 7725 - DNA, 2300 bp, Homo sapien
ctcctgcttagaagcctgacagtggccctggcccctgggctgtgggaactgacagcatttacctaggggtggctgtgcctgtgtctcctgtggaccaatctccaccctgctctttgggagactgaggtgggaggattgtttgaggccaggagttcaagacctacctaggcaacacagcaaggcactctgcaaaaaatcaaaacaaactttttttgaaattaaaaaaaaacaaaaccctaagtcagatcccatccctgctcttctcaggagtccttgcctggctgcctggccccctcaccttgcccactctgcttcttgctaaacaggagcagagcaagcgcacagccacctcggggcctttgcagccgccagggcctctgcccaaagtatgccgcctcccagtacccacgacttgcttgttccttgacttcaggtcactgctccaatgtgaccgccgcctggagacctgcactgaccgctttgtaaaaacagcacacacacacatgctcatgtggatgtatacatgtgcacacctgtgcacgcccacagccacacgctccagcagtctccacccccaccctgctccatgatttccctagcacagccacgtcctaatggagccgtcagcgttctcactttcacatggaacgactgccccctgcaaggtcggcctcagggccggtccctctgtttggcacagagacagcacctcacacaggaagcacgcactgaacatggagtgagtgagtgaacgaatgaatgaaaatgaatgaatgagttgtggaagcaggccctgcctggaggaggctgtgccctcctgccaactctgggaatcctggcccaccctgaccccacccacttcctgcagtcagccttcgagtcggaggtgtctgaggttgccatcagccagggcgaggtcaccctggccctcaggaactccgggcctggatgaaggacgagcgtgtgcccaagaacctggtgagccggccgggctgaggcgggcagggggctcaggggatatttgctcccacagggtggcccctctgggtgggagctggctgctgaggggccggggtgctgagcacttaatttcatccccggctcccggcccaggccacgcagctggactccgccttcatccggaaggagccctttggcctggtcctcatcattgcgccctggaactatccgctgaacctgacgctggtgcccctcgtgggagccctcgctgcaggtgagagctgggcctgccccttccggtcacccttctccgctcgaggcctcagggccacccatggatcccaggaggacatgggagaactggcccaggtggcaaagaggactgtctggtccaccgtccccgggctgtgtggccctgggcccgtcatgttacctctctgaaccaggttctgcatctgaaagtgggtgaggctgatgcctgccctgcaggtgtgtggagaccaggagctggctacgcctcctccagctctctccctgcactgccctgcagggaactgtgtggtgctgaagccatcggagattagcaagaacgtcgagaagatcctggccgaggtgctgccccaatacgtggaccaggtgagcagggctgccgggcaggtagagcgggaacaggcaaggctcaagggctgggcagcccctggcatggaagggcctgtcagtcagacccgagtccccacctcaatcctgcctcttctgagttgtgtaaacttgaccaagtcaccgcccctgtcagcctcagtttccctctgaggagcagcgagggcagcctgttgcccaggggttccgtgtctgcctccacctggccctggcatcagcccctccagcgccagctggactccaagctgggcctgccaatgccagccaaccttggggagctcccttctccccactttgcctccacccaaccctcctagagccctggctgggtcaggccaggcggggtggaggcagggcagggtccaggcagggcgggctgctcccttgtgttctcggagctggggtcccagaaggagcctcacccatcccgccttgcagagctgctttgctgtggtgctgggcgggccccaggagacggggcagctgctagagcacaggttcgactacatcttcttcacaggtgaggccgggacgagggtcgggacaggctggggtcggggaggacagctgctcaggggtcctgtccctaactctgggagtccacagggagactgaattctcctctctctctctctctggaccaggctgggagcagtcctggacccccaggaccccttaggaag

SEQ ID NO: 7726 - DNA, 2300 bp, Homo sapien
agacggggcagctgctagagcacaggttcgactacatcttcttcacaggtgaggccgggacgagggtcgggacaggctggggtcggggaggacagctgctcaggggtcctgtccctaactctgggagtccacagggagactgaattctcctctctctctctctctggaccaggctgggagcagtcctggacccccaggaccccttaggaagggatggagtcccatgtccagggccagcccactgtgccaaccacagcgtcaggaaccatagcctctgcccccactgtccccagaccctcatacgtgaccctgctgccccccaggctcttagacaccaccctactggtgcccacagccctctctgcaggcagatgagggactgggcctcagtgtcctgcccagggtcaccctgctggccaggatggggacaggctggaatgtgcacacaagcccttggagaaatccacgccagaggtcactttttttttctttttttttgagacagagtcttgctctgtcacccaggcagtggcacaatcttggcacaatcttggctcactgcaacctctgcgcctcctgggttcaagtgatgctcatgcctcagcttcccaagtagctggggtgacaggcatgtaccaccacgcccggctaattttttgtatttttagtaaagacagggtctcactctgttgctcaggctggtctcgaactcttggcctcaaccagtcctcctgccttggtctcctaaagtgcagggatcacaggcatgagccaccacacccggcttcgagtttttgagctagggaggggcagagggagcgagaggaagacagtggtgctggcaggcgagtctgcgccttacaggtcgaggcagtcgtggggaagggcctggcaggattgacctggccgcctcccagcaaaggcaaaggagccctggaaggaaccacagagcccaggaagcactgtgccaggatggggcaggggtgagagtagagaaggcacagtggctcctgccggctttaatccttgaccacaagggggagaaatgccagggccatccccacagacgcagcagcgtggtccccgagtcaggtctggagaggaggccttgaggcccagacagggctagggcagagaaggctgtgtgcatgcggagactgctgggcccctggaggccagcacagaggagaggtgaggccaagccaggcaggacatggggacgcctgcatcagcctgggacagtccacctcaagggtcagaaaaaaagggctgggcaggtggcagaacttccaggtttaggtttagagaagagagacctgaatgccgtagacagagctggactccatccttgggtgataagggatccccgaagtttccaaaggagatgggtggggaggggttccatgcagcattttgcaaagagtcccctgcagggtcagccagggtcacaagcagaggcgggaggagccaaggggtttggctcagcagggggaccctgggggccgatagcagccgtgcaccattccctcctgagactctgtgcttaggggctggtcctgatgaaggatgagcagggccctgggctgcagggtggcagtgaggaacaaggaaaggccaggcgagggctgctgcccgctgactccaccacctctccagggaggagcggggccgtgggctgggccatcccgcctggtccaggtcactgaacggccactctggtttccttccatgcccagggagccctcgtgtgggcaagattgttatgactgctgccgccaagcacctgacacctgtcaccctggagctggggggcaagaacccttgctacgtggacgacaactgcgacccccagaccgtggccaaccgcgtggcctggttccgctacttcaacgccggccagacctgcgtggcccccgactacgtcctatgcagccctgagatgcaggagaggctgctgcctgccctgcagagcaccatcacccgtttctatggcgacgacccccagagctccccaaacctgggccgcatcatcaaccagaaacagttccagcggctgcgggcattgctgggctgcggcgtgtggccattgggggccagagcgatgagagcgatcgctacatcggtgagtcctgctgcccctaccacagcccacctgggccaagacccctcctcactggagggcccaaggctgggccacaactctggacccgcgcctgaaacctggccccactgccagagcccggccttgagccacagctccagtgccatgattccgtctctgtgcttctaagtctgtggcc

SEQ ID NO: 7727 - DNA, 2300 bp, Homo sapien
attagcctggcgtggtggcgcatgcctgtaatcccagctactcaggaggctaaggcaggagaatcgcttgaacccgggaggtggaggttgccgtgagctgagattgcgtcactgaactccggcctgggtgacagaaggaggctctgccttaaaaaaaaaaaaaaaaaaaacctcctgggactgttgcaaggatgaaatgaaggattgagggattgagggattgctgagctggagctccaggtgtcctatctttctcagtggggtggcacggagcggggccgcctccctcttctctccaggcaggtggggctgtggttatgcgatagggtctcccttccctccagcccatgccagaggagcttgtaactctttatcctcatggtgcccactacgagtcatactcttccccatgctgctcatcctcctgggccccatccactcagccaaagcagaatgcagggtttcctgcctgacaacccttctcacctcccaagtcccacttttgaacaagctgatgattctgaaactggcccaatttcctaacaagccggatgcttgagaaacctacatttggacaatgagaggctgctcctgcggcctgcgggccacctcctcttccttggctcctgctttctttttagactatatcaacctacaactttagtcgggaagagggacaggggtggacctgagtttcgtctcctgtctctctggctgatgtcacctgaataaagccttcttccctggcaatacttacatctcagtgatttgctttctgtgcatctagcaacaggactctggaccaaggccctggcgttgggtaacaattctgtaatgctgcaggacttccccaatccacgcaggaatccccgcaggcatccacgcaggaatcacctgatgaagggccagggtcaggtgtgggccaccatcccaagacctcccttctctctagggccagcccctctcctctgagcacctgctgaccagcccaaagccctctccactcctcagcttgaactcccccagggtctccctgtggcccacaggtcctttggaggctcgggcatctgcatgcaaatcccaaaccactgtcccctttgcacacactgagcctgcccttgtcctcgtcctggtctaccatgcgtgtcctccctctgcacgggcatgggacatgccctctgcctccttcctgtcctggcctgcccaactcctacctaccctcagcgcagatcctcccaacacacacatgcaggcagcctcggggcctctgcgggtccctctaccacagcattcccggggaaaggcccggcgtggtggctcacgcctgtaatcccagcactttggcaggccgaggcaggaggatcgcctgagtccaggagttccagaccagcctgggcaacatggcgagaccccgtctctacaaaaaatacaaaaattagccgagcctggtggtggcaggcgactgtggttccagctgctcgggaggctgagaagtgaggatcacccgagcctgggaggtcgaggctgcagtgagccgagatcgcaccactgcattccagcctgagccacagagccagattgtctcaaaaaaagaaaaaaaaaaaaaaaaaaaaaaaaattcgctggtaggaaacataggctggttgagtacgggagtcatacagatcaggtggatcaggcggccgcacaccgcagctctacggcccgggaacgttactaaatactcccatgcctcagcttcccgccttaacgtggtaacacgttactgtagtttctccacgcagagctgctgtgaggattaaaagaggccgcgtgagttgagcatctcgtcgccattaccgtcatcacacgccccccacccaacccggcgggcccaccctctgcacccacggcgaaagcactctttctaaaccacgccccggatgtcccgcctccagcggctcggaggtcttcacttattggcctccccaaaccaacatggcggccccctacaaacttcaagcgccggtctctcctagccaatcaaaagaaagatatttctgaatcccgcctctttcagcagccttgctggccaatcagaccacaccatgaagcatcaatacagaaaagggggaacccgctggcccaatggcagcgtcctacagtgtagcctccgcctcccgattgactggcctgcttggcaaggcaagtagcggcggcgcttcaaggtgggtgttcacgttttggccgtgaaagtcgggcttgggcagcgtggcgtcgggggcgagtgtggtgtccccgttggcgccgccagctctgcg

SEQ ID NO: 7728 - DNA, 2300 bp, Homo sapien
ctctcccgggtgtcctggctggggcctgggcctcctgtctcccaagagccatccacttgtaagacgcttaggacttggagcctcccaagacctcaggctgaagaacagcaagtggcagaaactcaggccggggcatccttgctgggggtaggaggaagcctgcttggggtgacagtcacacgagggtgacacaggccctgctggccctgagctggcctgcgtccagccacatcctctttcctgtgttccctacgccagggtgctggcccggccactgctcaccacttcctgctttgctggcccagcgacacggtggggtttccctagggccacacacaagccccttgcccatataatggccaaaagcagcccccctgaacttgtgctaagtactgtggaaggatttcacttcatttgcagtgaggaaaccagctccgagaggtgaaagggcttgctcagggccatgcagggcacatcccataataaaactcagttcagagaccttgaccccccccatctaccatcatttccaaaagtgctttttacaaagcactactttgtaaaaagctacttcttcgaaagaacaagtttcctggcccagtgagtgttggaaatgctccagctgctgtgtgcctgctggcaggtactgcatggtagacattcaaggctctgagaaggcctgcagcaaaaacaccagcctctcccagcccattcccagggagcttttctcaggtctaacacctgggcctccttcctagaccaggcattgccatctaatgccaaagtggccaggctcccgcttgggccccacagcctgtggcactggggtgagaagtaactgcaggaggcgaggggaagcctggagcccgggaagtgtccacaggtctggcccgcagctcatcttggccactgatgaaaacaggtgttctttccaaaaacaaggcaggcgcaggactcctgaagcaccgccggtttagcttttcccagacgtaaccgccgtcagagcgtggcatggagcctgtagctgtgcactgaatacttctattccaagcgggtcagtctttccagctcaccgctgggttctttcccttaccgtggtctcccaggcacttactgctgagaccccactcaggctgtctggttgtatcaggccccgaccctgtcagaacaggcctatggcgcccaaccacaagtcccccaattttctgaggaaccacagctgagcttggctgtgactcagtttccaggcccggctctggggctccacttgtccacccctgccgcagccccacaggcctgtgctcgctgtgtggggcttagggatcaccagagctgaagggcccctggcctccagtgggaatgccccaggcctgtccaaagtgcaggcagctggacggtcgtgagtcccagcttccaggcactaggacctgatgacgcccatggtgctgacctggagcaaggtcacagtgacacccccctctaccccccgcggctgcagctgcaggtggagctgacagctggcctctggccccagggtatctcccagggcctgctgggtgcggggcgctgggcagaacaaggcagcatggcctggccctgtgtcctgctgccagtgaagcaggcccagagtggggcagccacccacccaagggccagagcggggcctctccagggtggtcaagagcaggaaggtgtaagcaccggcgggtttcactgccgcccaagggaggggtcccggaggtgggggagcatcctggggaccccaagcccatgagcctgcgaatgttggggtcccatcagccagaggcgcacaagcctcgaagtgagaggagagcagggtctcatctcctatcctgagctgggcctgagcggagctgcccctgcatcggggccagcatagacgcgcgcggttggcagtggtctgttatccgctcctttctccaggcctcctctccgggattaagcgcctcaggacccgtccgccaggccacagcctgggctcaacctctcccagacttcctggactccagtggagccttgggccgggggcggggcgtccctggcccctccccgtcgtcccgcctgcccggaaaggagtgagcggcgcctagtcccgggctggcgggagtgcagttctgagtcccgcccggcgtgcgcggagcggggcagccagcagcggaggcgcggcgcgcagcacacccggggtgagtgcccctgccggggtctgcggagccccagaatttcctgcccaccctcttccccctgccccggggaggagatcctggcgccccacccagttg

SEQ ID NO: 7729 - DNA, 2300 bp, Homo sapien
agccctgggcctaagtgcctgggccagtggggtcctgtctagggtgacggcagcccgagaggagggaggccagagtgaaggtgggggtggagccggtgtcactgggagacgctggaggtaggggcgggggtccccatgggcagagcaagccaggagagagcttgaggtcggcctgagggtgggcttcggggtctcccagtcccactgcttactttctgcgtgacctcagcaccgcatcaagcctgcccaggcctcagtttccacctctgtcagatgggggtggtaacagcagcttccaggattcagtgagtgaaggtgcacaggtgcccgtggttgggaactgtctgtggtctgcccctgactggcccccatccgtgtccacccacaggaccatgggctccatgttccggagcgaggaggtggccctggtccagctctttctgcccacagcggctgcctacacctgcgtgagtcggctgggcgagctgggcctcgtggagttcagagacgtgagttgggtgggcaggcgtgggaagggggctactgccaaggttagcccggaggccggtccaggatggggactgccccccctccgccatagggccctggccccatttgaaccccagcggcccctgccatgggcactgctcatgggaagcccgcagctgaggcccctgagctggctcctccccataccctcctggggcatggggtctggtctgtgctctgatctgcgtcttgtggctcccagggcactccacacctttctggaggaggcagctaaggcctggggagagtcaggcctgggctctagggtgaggagctccctgacccccttcccgggacactcacccctccgtgtggcacccacagctcaacgcctcggtgagcgccttccagagacgctttgtggttgatgttcggcgctgtgaggagctggagaagaccttcagtgagttggtcccaggcctacattccaggcaggcttcctggaggaggcatgggccaagtttgatctgaaaggaagagtctgggtttgccaggtggaaggcagagaagggaggtatatgcagggccctgcagggccaagacagagcagctgggatctgtgaagtgtgcttgcgaaggtggctgccttgtgtgggctgagcagagggcctagggcagggctggctggggaggcctcgaatacagcataagagcccaggacttcgtcctgtgggcgccaggaagccacaggggtttctaagcagggaagaggcacagacagctttctcctctacagctgggctggggtgggtggggcccaggatctagggtagggtacccctaaggagcaggcaaaagggacccctgccctgggcaacccctctcaggaggagcctgtgggggcaccaaggcaggggcatggggcaggcagggttttgtgtttgctggtgcagtttacagcttttcaatgatcaggcagacacaggactcacgccagctccggtcccaagccctgcagcgcaagggccggcctgtggggagacctcaggccctcttctgagtggtggccaagggactggggagggagagtgagcccagacctgagctcagggaggggagcacagcttctggatgaaagtttggccgggattttctggccacctccacctggtgaatccagcagctggtggccgatggagtttggggcagcaggtggggccctcaactgttgagacaacctcaactgcaccccactcccgttcctctgcgcccagccttcctgcaggaggaggtgcggcgggctgggctggtcctgcccccgccaaaggggaggctgccggcacccccaccccgggacctgctgcgcatccaggaggagacggagcgcctggcccaggagctgcgggatgtgcggggcaaccagcaggccctgcgggcccagctgcaccagctgcagctccacgccgccgtgctacgccagggccatgaacctcaggtcagctcccacccaggcaggagactggggggctggggaggggctgtccagcctagggctcatggtgcttctgggttcctagctggcagccgcccacacagatggggcctcagagaggacgcccctgctccaggcccccggggggccgcaccaggacctgagggtcaagtgagtgagggatgacctcatgccctttctggccagcccagaacccctggccagtcgctgggctgggccaggctgagctccgactccttgtccagtgctctccccaggctggccccgcctcctccttcaggcccggaacttcccacag

SEQ ID NO: 7730 - DNA, 2300 bp, Homo sapien
gtgttttaactcttaagtttctcctagaaaatgattaaacttatgtttatcggttttaagtcttgcttttaactgttttctcaacagttttcaaagcagggccctgaaacttccagattgtgcaaaggtctagaccactatttgtccatctctttagtcaagaggcctgtgggttgttcctattatttggggtctcctgtgacattttttggtagaatggctgtttaagtcactgtggcccctcatctttccacgcacttagcacagtcatctcctcgtggcctccagagtgctcacccccaacactaagtgtgatgtcacacctgcctacctgctgggcttcaccgcagcatacatcatctctttctgtttcttgaactggtggaaatagaaaaaaacagatggaggagaacccagacagaaagggtagcacacgggactcttgtgggccggggaccacaggatgaacagagagtagggttggaggatactagagcaggcactcctaaatttgagctttatcttcatgtggatgagccctcagggtattgtttgaggaggaacttggattcacagtgacttgggggcttggtacagcttagagatggtgacgtggctcacgctctctgatctgctcttttcacttctgtgtgacaggaggggatgggacaaggatgggatttgagaattctcttgctcaaggagtgagagcttcatcccgcctccagcaaagggctgcctcttggttgctatggtgtgcaccctcccttgtagcaagcttgctttcttttctgccagcatggccacccaggccttcacctgcaccctgtgaatgtgaatatattcaccttgtgaatatattatggccaagtggcatttacgtgtgccatggccaggccagctgtgtgtgttcacactcaccagtgcacctgtcactagcagatgagggaagggtgtgggagtggtattcccattgttcttagttagtcccgtggaatatagacccatgatttgccaacactaactaggtttgcatccacacaagttaaaatgtccatctggcatgaaatcatttcatcagtcctgtaactgatactgtatgtctcttatatgtttcttgcttttatcattccaggtttgcccttgcatctcatttcctctggggactgtggtccattgtacaagccaagatttcatctattgaatttgggtacatggtatgttttagcagcgtttttgtttttttttttcttcctactcccaggtaaaaatgctatagtatttgtgaatgttggcagcaaatgactgttccttacagagggttctctgtctccccaagtacccgaatgtggtgacctggtggcatcaggacagtgtggctcagcccaggaagccgggggagaagccgctgtcactgatgctgtggttgcctttggaggttgccctcacttccaggccagctgaccttgcctcccctgcttcagagaagtgcctgcaatcctgatggggaatgtaggcatctgcaccctcgaagtccagctctgacctcagtcccttctgacacgggacagtaagtgaagaagagtgggtggctcctgcctgtgctgtggaaggttttatttatcggttaccacttcattctccagcctgtagtgcccgactttgggttggaagctggtaattattgaattagacctcctgtttttcataggcatgtttgtaaccaagctaggctgtcatttaattttaaccttaagaattgtcagccgggtacggtggctcacgcctgtaatcccagcacttcgggaggctgaggtgggcagatcacctgaggtcaggagttcgagaccatcctggccaacgtggggaaaccccatctctactaaaaataccaaaattagcatgcatggtggcgggcgcctgtaatcccagctactcaagaggctgaggcaggagaaccgcttgaacccaggaggtggaggttgcagtgagctgaaatcatgccactgcactccagcctgggtgacagaacaagattctgtctcaaaaaaaaaaaaaaaaaaaaaaaaaaaaactgtcactgacatagaaatagaaagtatttttaaccttcagacaaacctttctgttgttccatagtgaatgaatgttggtgagttgtcttggggtgggggataacacaaatgtccacagtctggtgagctgccttcctttgggacagggatgggactagttcattttgacctcctcagtcttatactacaatgatttctacttctaggcagaaggtttggtaatgc

SEQ ID NO: 7731 - DNA, 2300 bp, Homo sapien
gcccggcgagacagagtcttgttatgttggccaggctggtctcaaactcctggctcaagtgatcctcctgccttggcctcccaaagtgctgggattacagccataagccaccatgcctggccttgaggcaacctcttcctcccacagggaactgtgatcccataaaaatgtctgaggcttttcctaacaaaagccagcagatgccagaaagagttatttcaaattatagagggccactccttactttagtgtcccttcctcctggccagatttctggcattcctttgagattaccagactggtgccaggggacagtgggacaaagggcttgtcacctgggcaggccattggcatggccccacctccctgtgagccggtatttttagagaaagtccttggctcctttatccaaacggcctccccagattgaagcccttggcttctcagcctttcaaacatccagtggccggcctccgtcccaggggccttggtctctcctacctccctgcaggtcaacttccaggcctgtcgccacagcagccttacaaaagtcccctttcatttttatccttaaataagaccattttgcgtggagcaagttcagccaagtacacactctaaaagatttttgcggccgggcgcggtggctcactcctgtaatcccagcactttgggaggccgaggcgggcggatcacgaggtcaggagatcgagaccatcctggctaacacgatgaaaccccgtctctactaaaaatacaaaaaaaaaaaaaaaaaaaaaaaaaaaattagccaggcgtcgtggcgggcgtctgtagtcctagctactcgggaggctgaggcagcagaatggcgtgaacccgggaggcggaggttgcagtgagccgagatcgtgccactgcactccagcctgggcgactgagcaagactccgtctcaaaaaaaaaaccaaaaaacatttttgcttctggaagactgtgaactccccacatagaagcatttcctgtgtatcaggcactggatttcctaagcccctggcagcccaggaaacctcctgtttcagctcatgtcccataaaatgggatccataatttttatatgtatcagcacctcacttctaggaaggacgggagcagtgagggacatggggcagtgtgtggcaaacggtagcaggggcccttgcccctctaccccggcaaaggtgcgttagtcacggtcacaaggctgtttcctgcgggggatggggaggcaggggcagcgtccacaacgccagtagccccgtggcacgcacctttggcctgtgctctgggcagttgcggcggccccatggcggggatgatgcccctccctcgacggtccctgggcctccagccctgaacttctaggcccgagcatcctcagtaccacggacagggaaactgaggctgcgggaggcgtgcagagggctgggccccggtagccggcgtgcagccgggcccagcctggcccaccgtgtggcctcgagcccgtcacctcttccctccttcagacctcggtttcttagtaattcttcgggctccgcgttggacagggcgagacgcgcctgtggcagcgctgggaaatgttacaaaatcacacccactgagccccaggaggaggctgctcgcccaaggtcacgcggagagggcagtagcctccagacacgtttcctgcctgcccctgccaggcccggcctctgatgtcacggggcttccgaggggtccaaggaaactttcagctcccaaagccaaccccggggtcctccgaggctcaggagcctccctcgctcggcccagtccggctccgtcccaccgcggaggcgctctcccggcgccccccgcgcctcgctcccctctcccccttccctgcgaccgccggggcgccccctcgacgccccgcccccttcgcccaggccccgctcacggaggccgcagcgctctgggttgggggcggcgccgcagccaatggggaggcggtgtggcgagggcggcggcggttatgatgcgccgggccggcggacggcggccaatcagtggcgagcgcgagggcgggctgtgacgcggccggcgctcctcgtgcggcggcggcagaggagcgagtgcagcggccagcagcacatccccgctccacagtcgccgcagtcgccgcagccgccgccgccgccccgcgcgcccaaccgccgcggccccctgccccgccggcctgccagtgagagagcggcgagggggcgcccggccggactctgagcctagtcctctcgcgctgcggccgcccgcgcctcctcg

SEQ ID NO: 7732 - DNA, 2300 bp, Homo sapien
agacagaggctatagtgagctgagatcgcgccactgcactccagcctgggcaatagagtgagactctatctcaaaattaagtcagagttgagcccagctaaaagggataaaagttacagatgaaagagaatatactactgtatcttctttcctatcatgcctgttccctatgttatctcccaggaaaaacatgtagctcctcatgtacccaccctctgatatttctaccacaaaaatttggggggtcagatatctgaaaatggataggtaaaagaactttattgccaggcctctggggtgagtgtgtgtacatgaaatgtgcttcatttacctcaggatgtattgagcctgctagttggattatgtggctccctgtgttgcagatgggtgtgtaggtttgagatctagagtcctagagctgtaccgtccggtacagtagccaccagcccttgagtccttgaaatgtagctagtctgaattgagaagcgctgtaagtgtgctatacacaccagatttcatattaaattttattcccattcatagttcttatattacctactgaaatcgtattttggatattgggttaaaatatattgttggctgggcatggtggctcatctgtaatcccagcactttgggaggctgaggtgggcggatcatgacgtcaagaaatcgagaccatcctggccaacacggtgaaactccatctctagtaaaaatacaaaaaaaaaaaatgagctaggtgtggtggcacacacctgtagtcccagctacttaggctgaggcaggagaatcacttgaactcaggaggcagaggttgcagtgagctgagatcacgccactgcactccagcctgggcaacagagcgagattccgtctcaaataaaataaaataaaataaattgttaaagtaatttcacctatattcacttaactttctcaatgtggctgctaaaaaatttaagattgaaaatttggcttgcattatattcctagcagatggtgtgctctaaagagtggcaccatgattccggatcctcataacccttactgccactggtccctgcctgcttcatccagcagtcagaaagtttaattcattgccgcaagtatttgagtactttctgcttgcaaaacaccacaccagggcattcagagacataggtggcatagtccctgtcctggttgagtttccattctcttgcaggaataagataggtacacaagtaaccatggcacaaggctgtggagctccagggtaggagagaagatagccaggtggggatcccagtgagctaactaaagtatagacagctaggccttttcagtttctgatatttattgtcaggattattttattaaaagaagccttactatatttaattactagtaatttttaacacatcacatattttaaataggaaacgaaatgacaaaatagaattactggtgggttgtattgccgaactttcagaaattgaggagaacatgctacttagacatggagaaaacgacttcagtgtcatgtactccacaaggaaaaactgtgctcaactctggctgggtcctgctgcgtttataaaccatggtaagctgtgtttccaaggtgttggcgctagtgttggccattcctgctaactgctagaatggccttgtcaacctcagtcaaacctttatcttcctttaaaggagaatttgaaatagaaatgtttccacaaacttattaaaataaatgtatattcctttagttgaacttgagacctaaactcctatcaaaagttgtaaagttatatggaaagcttatttcagatttctataattgttcgtgtttcagatcttatcaacagttaattgactttatcttttggacatttttcagattgcagacctaattgtaaggtaagcattaaaaaaattttcttcaagtattttgtttttgcttcaggtgtgagtttcttactgagttacttttattttagtttgtgtcaactggtcgagatacagcatgtgtgaaggctctaagagacattgaacctggagaagaaatttcttgttattatggagatgggttctttggagaaaataatgagttctgcgagtgttacacttgcgaaaggtaaggtattaagtaaaatgttcagcctaaacattttttgttaacaacctgattatggggattaaactcacattatctctttgttgtttaaatgcagagatagtctttatgttctttagcatagcggctggtgcagtgtgtatgaacaaagtcaaatgctgcacagctatttagggacattgga

SEQ ID NO: 7733 - DNA, 2300 bp, Homo sapien
ccagcctgggccacagagtgagactccatctcaaaaaaaaaaaaaaaaaacaactctaccccatcagttttcctacattaccagtatagcaatttcaccactagagttaacactgcttgtactcgttttgttctctgaatgcagtcatcaaagatgactttgacatgggtggttagaacatcaaggtgtgtttcgaagcctgttggaatacttagtttggggttttttctgactgtgtacataaagaatgtttttgtgtatggcatggttttgtttacatcatcatacttctgaaattcattgcctggcactcttccagcttgattttgcatgttttaaaaagattcttgtcattctaactctaaattaggtgtgctgtattctagagctttgattttgtgtctcccaaagttgacgactagtgtaagtctgaatcagacagcttttgtttgaatcgtctgctcacctcacagttaatgagataacagtgaaataaaaataattaaaataacagattgaaaaaagagaagttactgagataacagtgaaataaaaatattaaaataacagattgaaaaaagagaacttgcgtatccaggtgatcagtattacttgaatagtagtaatcaagactattgattgttgttctcttctcttagatctttgctctgataaccatggctgtttttagggtattagctctttctcaagatctgttaagatggatcagtggcgcaaggattgtggcagataacccattcattcttttgatttctttcagatttaggcctattaaaggaaggcaggaagaactaaaggaagtaattgaacgttttaagaaagatgaacacttggagaaagccttcaaatgtttgacttcaggcgaatgggcacggcactattttctcaacaagaataaaatgcaggagaaattattcaaagaacatgtaagtttattaagactgatgctgttaacctatttggataagaatagtgaagtaaattaaaaccctaaatgttagttaatactgaaattttaaatttatttttcataaaactaatcagtctgaagatcttgtaacacatacagtcatttggatgacagtccagagaaaaaactgggccaggctcagtggctcatgcttgtaatcccagcactttgtgggggctaagatgggagtattgcttgaggccaggacttcgagaccagcctgggcaacatagcaagactccatctctaaaaaaataagaataaaaaaattagctaggcatagtagtgtgtacctttgtagtttgtagttccggctactcaggaagcagagccagaagcattgcttgtgcccaagagttagaggctgctctgagctatgatcatgccactgcgctccagccctgggagacagagcaagaccctgtctctaaaaccaaaaaaggagagaaaactttgtcatatagaggtgaaattcattatgagccttaagggaaacaagccattaggtactcatacagagtgagtacccttaaccccaaaatttgaaatgctccaaaatctgaaactttttgaacaccgacctgacactcaaaggaaatgctcatgggaggattttgaattttttgtttagaggtgttcagctagttactgtaatgcaaatattgcaaaatgagaaaaattgtgacattcaaaactcttgagtaacaataaagtttgttacctaatgatcttactttttttgtttattttattgtttttttagaggcagaatcttgctctgtcacccaggctggagtgcagtggcctgattatggctcactgcagcttccatctcttgggctcaagtgattcttcctctcagcctcccacgtagctggcactaaaggtacatgccatcatgcttggctaatgtttttcgtagagacagggtctcgctatgttgctcaggctagatcttacatttttttcatcattgcgggtggtttgcttttataattgtaagaaagtctagcagggtataccatttaaagtcattatcaatttttttttcctgttttaggtatttatttatttgcgaatgtttgcaactgacagtggatttgaaatattgccatgtaatagatactcatcagaacaaaatggagccaaaatagttgcaacaaaagagtggtaactattctactagtataagcctttaatttaatttaaagttctcttctaaattattgttgaagtgctgagaaattcatggtaaggaatgaagccagagtttaccctgaagtagccaatgcatcgccgttgccttggc

SEQ ID NO: 7734 - DNA, 2300 bp, Homo sapien
ctcggacacattctagaaatgtgaggttaggtggttttgttgtcatgcagttgtcatagagtgtacttacacaaacctaggtagtctagcctactacacacctgggccattgctcctaggccactaacctgtacagcttgttactgtactgactactgtagtcactggtaacacaatattatttgttatctaaacatatataaacataaagatacagtaaaaatacagaataaaagattttaaaatggtacacctgtgaagggcacttcccatgaatggaacttgcaggatttgaagttgctctggatgagtcagtgagtgagtggtgagtaattgcgtagacctagtacatgtatactattgtagactttattaacaccgtacacttaggctacgctaaatttattttgaaatgtttcttcaataattaaccttagcttgtaactgttttactttataaagtttttttttctaaaaactttttgactcttttatggtaatacttggcttaaaatacaaacacatatagctatacaaaaatacattctggccacatacagtggctcacgcctataatcccagcactttcggaggccaaggcaggtggatcacttgaggttgggagttcgagaccagcctagccaacatggtaaaaccctgtctctactaaaaatacaaaaattagctgggtgtggtggtgcacgcctgtaatcccacctactcaggagactgaggcaggagaatcatttgaacctgggaggtggaggttgcaatgagaagagatggcaccactgcactctagccggggcgacagagcaaggccctgtctcaaataaatgaatgtatattctttcttagccaggcacagtggctcatgcctgtaatcccagcacttttggaggccaaggtggagggattgcttgaggccaggagtttgagaccagtctgggcaacatagtgagacctcgtctctacacacacacacacacacacacacacacacacacaaagttttaaaattaactggatgtggtggctcctgcctctagtcccagctacttgggaggctgagtgggaggattggttgagccctggaatttgaggttgcagtgagccataatcacaccactgcactccagcctgggccatagagtgagactgtctcaaaacacagacaaaaagacacaaaaatatattattattttcttttcttttttggaagacagggttgctctgtcacccaggctggagtacagtgttgcaatcatagcttcactgcaggcttgacctcccatctcagcctctcaagtagctggaaccacaggctcatgccactatgcctggctcacttttttattttctgtagaggcagggtcttgccatgttgcccaggctggtctcaacttctgggctcaagcagtccgcctgccatggccccccaaagtgctgggattacaggcatgagccactgtgctcagctatattctttttaaaatatctttattctataaccttttcctacttttatttttttaacttttttattaaaaactgagacacaggtcacaaacattagcttcagcccacacagggtcgggattatccatatcactgtcttctccctctgcatcttgtcccactggagcgtcttcaggggcagtagcatgcatggagctgtcatctcctgtgataacagtgccttcctctggaatatctcttgaataacctgcctggggctgttttatagttaacttaaaaaaaagtagaaggaatatactctaaaataacagtaaaaagtataatatagtaaatactaggcaatacgaattttatgaagtgtatgtccagctctgttataatcttatggaaccaccgttgtttatgtggtctgtcattgaccaaaacatcattatactgtgaatgactgtccttttaatattatatatctttctcaagggtctgtttagcatgatctttcatgtatttatctccccattttgttttgtttttcatattttgtttctgttaggagagaacattgaaagtattctctaagctatttgaagagagtgactaaatgcacctgggtcaggctgtctgtgggtatgaagtggttgggagaatccaagatcatggtggtgaatggcaggagaaatggaggcaagttgtctaatgaccatcagcagaatcaatcaaaattacagcacacggggaaggacaccctgaaggctggcaaaaatgcagtcgagaggaggtcgaacagatgtatgtacacacttaaaccttcaatgttctgattg

SEQ ID NO: 7735 - DNA, 2300 bp, Homo sapien
cagatgacgctgcttttagtgaaagggcagacaggagaagtgcttgggctgtgcccaccgcccacacccgaatcggcctccaaaaggaggaagctgctgatagggcaggtgaaggcagtgggaggagctctgttttgaagatgagacccgcttctgcctccgtcagccatgtgccctcagcgagtcaccgtgcctcagtttccctctgtggaaggcggtaatgagcatcatgtctaccagccaaagtcaaggtcgagaatgagggcaaacgagggaggcgctgtgcgtcagtgttacttggacttagtccagttcttgtgttgggtggtcgtccacagcctcgattcatcatcctttgtggaggatgatggccctggagccgcaggggaaaactaaggcaggctgcggctcttcctggcatctgactgagctgcctgccctgcccgcctcctctctgtggcaagggcagcctctctcccctcccagggctttgacactggctggtcccactacccgcccatatcctaggcaccccctttccccaacacgctccaattcacactccaggtctgcgcttccttgggcacctgccggcaccaagttccaggcatgtgcacgcctatgccaacctcaacttcttggaggtcctccgcacccgcttcctgatttattctgcatttttcacccgaatgctgaaagagggctctggctcaagccctgactagttgtcatagaggtcacggaactccctgtgcctcagtttccctaggtgtaaagtggcacccacatggcccccacctccgggggtcgtcctgacgcgtgagagggaggatgcgcggagaccctgggcagccccgcaggggccgggagcgcgctcatcgttctgttgtctggactacaagatcgatgcccaggcaagcttcgcagctccccggctcgcaggcggcccggtccctcaggatctccccgccagcccgggatccccgaggagggatcgcacggccagcgcgcagggcacacccggagtggagcggagcacggcgcggggcacatagtgggtgctgggggcggcggggcccgcggggggccaggccaaggcgcgcccgctctcctcctccctcgcatgctccgcgcaggaacgctcagcctgcccacacggtcttagggtgcatctgctgccagtgacccccattcccacaacaaaaacgctcgtctgcccggggccacctccctcggagcaactgggacgcgcggcgggaggggggggggtccccttccccagggctgcagtccgagaggctggctctagagccgtccctggtaggggcaggtgtgcaaagacccagggcccgggacagctgccgcggtcccgcggggaccgggaccggaatgcggtcgcgtaagggccgcaggggaccctaacgtggcgcccgcggggcgcgggcgacgccgcctcagccgcgatttaaagggcagcgagggcggagggatcccagccgcctaccggccggccgcgaatccctccgccacgaggggaggcgacggctcgctctgaatcgccctttgtccctccgccgtcgggagcgcccggcacagaactcgctccccgcgcgtgcccgcgtcccgcacagagccccgtggaagcgccgcggcggctgggcctggcgggaggcgcgcgcacactgtggcagctgcgccgcacggtgtccctccgccgtcgaggccgcggccttcttttcgtatccttccaccgtgcccgggcggggtccaggcggctcaccgggggcggcgacgcggcggcggtgcgggcggcagggcagcggggcgatgaggtgaggacgcccgggaaccggaggcggcaccgcgcggcgcacggacctgggacgcggagtcctgaagccggcggacggttttcgtacgggcggccgtgcgcgaggcgaggtgaggccccgggtggcggggcgcgggggcgggcgccgggggcgcagcgagccgaggccgggggcgcggggggcgcgacggcggcggcggcggccggttgggggcggggggctcggacgctgcggggactcatttttcccgtcagcggagggagcgagcggtgctgcggcccgcgccgccatcttggattttactctccatttttctctggaattatttttggtgattaattttctgggggggactgggacgcggggcccggcggcgcggccccgcatcgcagcggccgggcagcggggcctgggacgcgccccgaggaggagcggggcggcgcaggcggtgagtcgggggaggggcgg

SEQ ID NO: 7736 - DNA, 2300 bp, Homo sapien
tctggaaagctgggagtgggcaggacatcggctttgggggctctggagggctgctcaggcatagctggacttgggacctgagaccaaggtcgacttagaggcagatggtattcccctagtgagctcgcctcccataggcattcggtggtggtgggtggcaaaggcaggctcagtgtttctggggtgcaagttgagtatttggagccaggcactacgaaaatcttggaaagtttctgataaaccagaaaccaagaacaccaaagcaatcatttgttagttgcgtctgcaaagacgaacgtggcagagtggattctgctgccacagatgacgctgcttttagtgaaagggcagacaggagaagtgcttgggctgtgcccaccgcccacacccgaatcggcctccaaaaggaggaagctgctgatagggcaggtgaaggcagtgggaggagctctgttttgaagatgagacccgcttctgcctccgtcagccatgtgccctcagcgagtcaccgtgcctcagtttccctctgtggaaggcggtaatgagcatcatgtctaccagccaaagtcaaggtcgagaatgagggcaaacgagggaggcgctgtgcgtcagtgttacttggacttagtccagttcttgtgttgggtggtcgtccacagcctcgattcatcatcctttgtggaggatgatggccctggagccgcaggggaaaactaaggcaggctgcggctcttcctggcatctgactgagctgcctgccctgcccgcctcctctctgtggcaagggcagcctctctcccctcccagggctttgacactggctggtcccactacccgcccatatcctaggcaccccctttccccaacacgctccaattcacactccaggtctgcgcttccttgggcacctgccggcaccaagttccaggcatgtgcacgcctatgccaacctcaacttcttggaggtcctccgcacccgcttcctgatttattctgcatttttcacccgaatgctgaaagagggctctggctcaagccctgactagttgtcatagaggtcacggaactccctgtgcctcagtttccctaggtgtaaagtggcacccacatggcccccacctccgggggtcgtcctgacgcgtgagagggaggatgcgcggagaccctgggcagccccgcaggggccgggagcgcgctcatcgttctgttgtctggactacaagatcgatgcccaggcaagcttcgcagctccccggctcgcaggcggcccggtccctcaggatctccccgccagcccgggatccccgaggagggatcgcacggccagcgcgcagggcacacccggagtggagcggagcacggcgcggggcacatagtgggtgctgggggcggcggggcccgcggggggccaggccaaggcgcgcccgctctcctcctccctcgcatgctccgcgcaggaacgctcagcctgcccacacggtcttagggtgcatctgctgccagtgacccccattcccacaacaaaaacgctcgtctgcccggggccacctccctcggagcaactgggacgcgcggcgggaggggggggggtccccttccccagggctgcagtccgagaggctggctctagagccgtccctggtaggggcaggtgtgcaaagacccagggcccgggacagctgccgcggtcccgcggggaccgggaccggaatgcggtcgcgtaagggccgcaggggaccctaacgtggcgcccgcggggcgcgggcgacgccgcctcagccgcgatttaaagggcagcgagggcggagggatcccagccgcctaccggccggccgcgaatccctccgccacgaggggaggcgacggctcgctctgaatcgccctttgtccctccgccgtcgggagcgcccggcacagaactcgctccccgcgcgtgcccgcgtcccgcacagagccccgtggaagcgccgcggcggctgggcctggcgggaggcgcgcgcacactgtggcagctgcgccgcacggtgtccctccgccgtcgaggccgcggccttcttttcgtatccttccaccgtgcccgggcggggtccaggcggctcaccgggggcggcgacgcggcggcggtgcgggcggcagggcagcggggcgatgaggtgaggacgcccgggaaccggaggcggcaccgcgcggcgcacggacctgggacgcggagtcctgaagccggcggacggttttcgtacgggcggccgtgcgcgaggcgaggtgaggccccgggtggcggggcgcgggggcgggcgccg

SEQ ID NO: 7737 - DNA, 2300 bp, Homo sapien
tgacacccaggggcatagttgggggtgcctttgtcatggagtgtcacatggctcaagggagtatcctgttgcaccttccttgcagatcctatggggagctgacccctgaagaagggagctcccagtgccagcctaaccttccgtctttccatctgccctggtctccaacttaatacaaacttaattctctctcgctcattcccctcctgcccctggggtctcttttttcccatctattatggtctgagaccctgatctacccagtctccctgtaccacataataatgagaataactggtggggtcccgagacccacatcctaattttggcttgaagcctttgcaggggaaactgttattttaaatgttgttaatggtttgtccatcatgagtcaacttacatagatgaccacaggttcccgcatgggatcttgacatttagaatattctgttggaaagtggaggcaggaccatagcagagggatgaagtcataggacaatgaaggcctgttctcgactacacagtggccaattcctgtttctgtgggagtgaccaccagccccaccggctgggagggagtaagtggtgatggtatccagcagaagtttcctgagaaacccgtggagtgtcctgatatagccttgtggacctgctccgtgtgtgtgccctcacctttgtgtgtgtgattttgcatgtgtatgtgtgtgcctgtgtgagtgcacatgtgtggtggcatgtgtgcatgtgcagatggacatatgtgcagctgtgcgcacacaagcgtgtgtgactaagtgcatgtatgtgtggctgtgtgtgcacacgtgggcatctgtgttgggagcaggcccatggtggtccttgatatcaccacctactgataaccttcccatgataagaggtgacgagctgtttctgtaatctcctgagtacgcgttaaatattcatcaatgagagaagcatttgtgccggttgacatctttgcattatggctttgctcctggattcctccgaagttttggttggctcctaggaaaatgtctctcctgatatatagatcgtgtagtctctctaaattatggaaatcagcatgtgaaactgtatcaggtgggataactctgtgcctttctgcttagtggcttgaagtacttgaagaaaatatgctgttttctttccttggagcctttcagaaatgttttccaaaagtgatacatgcttgttaaaaaaaaaaaaagaaggaaagatatgaagtagagaatgaaaatcacaggtgaatccattccccagggatattcattaacattctagtgcaaatctttccagacccttgaataaatgtcccttttaacaaaaataggatcatggtccacacgttgctgtgtaacctgccgtgttcatttactgatgcatgctatatatcttcccatgtcaataagtagagagttgtgtatttttaacagttgccatagtattttatatatgaatggggccatacttgacagaactattccagttttttactctttctaaataatgctgtgagaaatatctttgtagatcatctttggacctctgtctgagtgcttccttaaaagaaactgcagtagaagttgctgcattggaagtcgttgttgttttttgttttgtttttttgagacgcagttttgctcttattgcccaggctagagtgcagtggctcaatctcggctcactgcaacctccaccttctggtttcaagcgattctcctgcctcagcctcccaagtcgctgggattacaggtgcccaccaccacgcccagctaatttttttgtatttttagtggagatggggtttcaccatgttggtcaggctggtctcgaactgctgacctcgtgatccactagcctcggcctcccaaagtgttgggattacaggcgtgagccaccgcacccagcctgcattggaagttttgacattgaaagctttgatccatgttgtcgttttcccagtggaatgaatgatctattgaattctgctctttttgtgcctccctcctcactggaattttccttcatgcctttcataaggaatgtggactttttttcaaactctagatgcgtctgttactagagtggagagtctaccttcgtctcacatgtgccacaaaggatggcatggcccgggagtgccccaccacgtggctttcaccccctgcaaagccagacttcgcccagcgacacagtgtcaagcccacagctctccaaggaggaagatggtccaggctgggagcatccccttagcagcagcctctggtaagtgt

SEQ ID NO: 7738 - DNA, 2300 bp, Homo sapien
ctgtagtcccagctactcgggaggctgaggcagaagaacggcgtgaacccgtgaggcggggcttacagtgagccgagatggcgccactgcactccagcctgggcgacagagcaagactccgtgtctaaaaaaaaaaaaaaaaagcaagcagatggaggtctagctgcccagctgctctagaggagaggctgtgtcttatgtttgtaatttcagccccagcagtaaaaattgtccctatgttgccaaagaggaaatgaaaacagagtcacagtcattgatttttttttttttttttttttttttttttagaaggagtctcgctctgtcgcccaggctggagtgcagtggtgagatctcggctcactgaagcctccccctcccaagttcaagcaattttcctgtctcagactcccgagtagctgggaatacaggcacacgccaccacgcctggctaatttttatatttttagtagagacgggtttcaccatatcggtcaggctggtctcaaactcctgacctcaggtgatccgcccgccttggcctcccaaaatgttgggattacaggcgtgagccaccgcgcccagcccagtcattgatttttgaaaagggcaggcaaagaactaaaatctgcctgccgattgtatattttcacttctggagtgagcctcaatactgtacttcatgttagatccgaactagttggaaaaattaaagcaaatacatagtgaaaggatctgatcttcacatgatccaaccggcgttgggtctcagcaaacccaactttgcaggttaaattccacacatgaactgtggttgaactggggatggtggtggtgacatcaaatcgcatttcaggtgctcccagagctcggagtggatggtagatcctgtctttgcccaatctcagctttctgtgtctcttagcttcctagccgaagaccccaaggcaggttataaaactggaaataaagtcttggtttgctcctgtgaaatcatccttcgcagacaggttttggtttggaccgggggatgcctgagggtcttatacagactgggattcagtcacagaactactaacttgcaaagcctatttctttctttcttttttttttttggagacagagtctcgctctgtcgcccaggctggagtgcagtggcacgatctctgctcacttcaacctccacctcccaggttcaagcaattctcctgcctcagcctcccgagtagctgggactacaggcgcacgccaccacgcccggctaattttttgtattttagtagacacagggtttcaccatgttgcccaggctggtctcgaactcctgagctcagataatccgcccgtctcggcctcccaaagtgctaggattacaggcaagagccaccgcgcctggcctgcaaagcctatttctaaccaaagtcaagtcccacacacttgcctctaaattgcgttttgctcctttgttatcccaggttttacaattacagagcacttgatgagcctgtttccacgtctgtaaaatgaggcgaagttcttcactgtgctattgcagaattaagccactggctctataggcaaagtgcttagcacgggcgtggcacgctgcgggtgcacagaaacgctcgctgccaccccacccttaactaccgggcaccccagcgccccgccaggggctgaagaaacgtgggaggaagcggaggaacgcgaagggcgtgtgcccgcgaaaggtctcacgaggcgtttcgaggtcgcctcttcaggctcggctgccgacaaggtgcctctgagctcacccagcccaacccgcgcaccccgggaccccaagacggcagcgggcacagctgggcagcagagacccgggaacacccacttccgccacagacctgctcaaaatagctccttctggcagcgcgcaagaagtggcccgagccggccccggggaggcggggcctgagagcagacaacccccccacttccggctcgcctccgttcgccacaggccccgccgcagccgctcttcgccccggccagcaggcccgccccgccctccgtgacgtcatttccggcgtttgggcggggcccgggcagggcgcgctgcccggagctgcctgggttgcgctgccggccacgtccccgcgccgggcctcaggctccttcctactgtccgagggccaccaggccgccgggggcctgctgcgcccgggtaaggggctcgcactgccgtccgggtagctgctgtcagggctccctgactggcttgggactgagagacagaggttggggggcaggaggagggt

SEQ ID NO: 7739 - DNA, 2300 bp, Homo sapien
tgggaggctgaggcaggagaattgcttgagcctgggaggcagaggttgtggtgagccaagattgccccactgcactccagcctgggcaacagagtgagatcccatctcaaaacaaaacaacaaaagctaactacttgagaggctgaggtgggaggattgcttgagcccaggagtttgaggttgcaatgagctacgatcacaccactacactccagcctgggccacagagtgagaccctgtctcaaaaaaaaaaaaaaaaaaaagagtcccagcagagaacagcaagcacaaaggccctgaggcaggagtgcacctggtgtgtttgagaacccacagagacaccactgtggctggagcagggtgagatgtgggaagggagtggctaaggaagctgagaggtcaaggaagaagtgtggttggagcaggccctgcaggtgccgaaggcttttgcttctttcctgagatggcagccctcacgagccctggagcttccctggctgccatgagatcaggtggaagggggtcgaggctgcaagtggggacgcatgagtgggtgacaggtggcagtagtagaagtgtaagaagagctgggagtctgggtctcttctatcttgaaaatagaaccccaggctgtgctggtagagctggatgcagggtggaagaagggaaaatatttttgctgcttaaatcctagcctggcttcccattgctcgtggggtgcattctcgattcctcttccccgcctgaggtctgacatgtgctggccctggctggcctctcctgtaccttctaccaccagctccagctcatggcctgatgtggttcctcccccgaatccagcgaccaggctgccctctgccccagcgcctcctccgtggatgtctgctcttcctgaactgccctcccaccggacggctgctccttggtagcagctcaagtgtccttccttccctaagccagtttccccaaacactgcagcacaacgcccttcatttctcatggcattcttcatggcctgtcaatggggcttttgttgttttaattttccgtcttcttgtttttgttggtcttcctagaatataaaccccatgagggcagaggcgttcagcctgactccagcctggcaaagctgtcacaaatctggaggaacacacacgttcacgggcactcagttctgtgaggtactgcaagccctctctgaacctgcaaggtggccattgctgtccccactttacaaaggaggaaagagtgcgcggagaggttctacttagacccgccaagggcacagtcgttctagaaagtagcagactgggagttccaacttgggcttgctggttccagagccccttctgtgccccttccaggctgtgcctgggtgagattcttctcctaccagcacgtcttcttcctggagggttcagtggctgagctgacaccggtgggcaagaggccctggcgggcttgttgaaggactcaaaggtggcgtctgggagcctggcgggactttctccctgtcagcctagaggcacttttagaggagtgtgtctgtttcgcagtcttcgtgtctcataattcataactaaggtagagggtacacatttagtttacagtaaaacctcaaacccacctccactcccagccggccacttctctccctgttcccttctctgccctccacaggtgagaacaagtgtccggggccgccccgtggggccccaggctgcccgccctgaaactgcctcgctgtgtgcccttgggcaaccccgccctgctccgtgcctcagtttccccactcatagaggctccacaggtgacacacctggctccgggccccgatcggccgccgggccccgcggggcggaaaccccgcgccaagcctcccggaggcacctccagggcagggcggggagcgcggggaggggccgcggggacctgcgccgctggggccgcctggccgccggccggctccggggggcgcccgcgggagggcgcggccggtgcggggggcgcgggtggcggcggcggggggcggagacgcggcgcggcttccgctcccgcgcgcccagctccctcctccccgtcgtcctggtccgcggcgcccgaggggggaggcggaggcgccgggagccgcgcgaggagccgccgccgccgcgccatggagcccgagtgagcgcggcgcgggcccgtccggccgccggacaacatggaggcagcgccgcccgggccgccgtggccgctgctgctgctgctgctgctgctgctggcgctgtgcggctgcccggcccccgccgcgggtaggt

SEQ ID NO: 7740 - DNA, 2300 bp, Homo sapien
cgcctgtaatcccagcactttgggaggctaaggtgggtggatcacctgaggtcaggagttcaagaccagcctggtcaacatggtgaaacccccatctctactaaaaatacaaaaattagtgggacatggtggcatgcacctgtaattacagctactggggaggctgaggcagggagaattgcttgaacccaggaggcagaggttgcagtgagctgagatcgccccattgtactccagcctgggcgacagagcaagactccatctcaaaaaaaaaaaaaaaaaaagtccagtacaactacaatatcataatcttatgagaccagtcttttttgtttttatttatttatttattttttgagacagagtttcgctctgtcgtcgagtctagagttcagtggtgcaatctcggctcactgcaagctccgccttccgggttcacgccattctcctgcctcagcctcctgagtagctgggactacaggcgcccgccactgcgcccggctattttttttttctttttgtatttttagtagagacggggtttcaccgtgttagccaggatggtctcgatctcctgacctcgtgatccacccgcctccgcctcccaaagtgctgggattacaggcgtgaccgcgccgtgacctcctgtggattttcatgggactctgagaggcgcctcaaatccattttggaataaggcaggttattagcatggggtctaaccgtgggctgtctcggtgtcctgggctggctcttggggcgggggtcctgatgtccgggacctcggtcctacctgggaggcacagatatggcggggaacgggaagcccgggggagcatttagaagctcgtgtgcacagggaaaccctgtctctacaaaaaaattaaattagcggggcccagtggtgcgtgcctatggtcccagctactcgggaggctgaggtggggggactgcttgagcccaggaggtggaggctgcagtgagtcatgatcaccccactgcactccagcctggacaacagagcaagaccttgtctcaaaaaagaccccaggccaggcgcggtggctcacccctataacccctgcactttgggaggctgaggtgggcggatcacctgaggtcaggagttcgagaccagcctggccaacatggtgaaacacccgtctcttctaaaaatacaaaaattagccgggcatggtggcgtgcacttgtaatcccagctacacgggaggctgagacagaactgcttgaacctgggaggcggaggttgcaatgagctgaggtcgcaccactgcactccagcctgggggacaacagggaaactccgtctcaaacaaaaccaaaccccaaaagttctcgtctaagtccttctcccaggacaagggcacttatctcttggcggtgcgtcacaggtagggatattccgcgatccctcaccttgaccccgctacgaggacagccacctctttcaggtaaagagatcgcaatgggaaatcattctgataaaaattcccctgtggagaatgcaggcatcgatcccgttacctctcacatactaaacgaacgctcctccacttaagctgattccctagcccggcctaacctttgcagccggcgcatattgtggctcacgtcaccaccggtgtcccccgccgcccccgccccgcccggccagctcgccaccctattggatccctcacggctccggctccacggccatgatgggcttggctcaatttagttttaaaaagcattggccactcggattggtggtccgaagcgtccgtcaagcggaggacctgctgttgctacggcgtagggggtcccagccaggtttctccccgtttctgatttgtttctcaggctccggggtcctagaggttccggatccgtcaagtccatgggaaaagaatgcgcccctcgcgcttgactgacgaggcttgcgggccaatcggaatgtagtcaaaggagccgctaggcgatccaataggtagtagggggcgggagagaggggccaatgagcctggagctgggggcgggggcagggccgcgattggctgagaggcggccagagggcgggcgggggggaactcaaggcctgcttgatacgtccgccattttgggcgcttcgctgatggtgtcggtgagcgcgtttcccgcctgagcgcaactagcggcgggtcgtgggcacctccaggtaatgggggtaggggaggcgccggagcaggccgcggcgcggggtgtgcgaggcgcgcgggcaggcgcggggcccctccacctggcctcagcggctcagggag

SEQ ID NO: 7741 - DNA, 2300 bp, Homo sapien
atctataaggttaccaccttaagtatcttggccaagccgtataaaattggcagtagtcatccatttttacctacagacatgatagttctctatggttcagcctaatatctacaaaggagttggtttaagggcaattcaaagtttgtcctgaagctgggagaatctccttgtgtgtctctaggttgcaggttagatgggagagcgagcacagcagaggagctgtgcaggaagagacatgcaatggaggctcctctctctcacagaaatacattttctgtgatagtagagcgaaaccctttcactctgatccattcagaaacttttcatacctggactttattaaagggactgtcacttccccattatccctctttgggagaatgcaaggtatgctcctttgcagtagttgttactgttagcagagttgacattgtggacacatccagtgcagacatggattgggaatgtgggagcccctgcttagaaggtgctctcaacctagctggggtgataagccctcctcctgtgggcaggggagtgtggttctaggagcaggtttccctgtgatgacagtgtggcctgtgcaggccgtggagagccatgacaggagtgtggcctgccccgttgacagggaggagtttccatgaatgaggcttactccttgctaggttcatgttcttgagcagaggaacttgattgctcaatgggctaggaagaggattgctcagtaggggctgtctgaagggcccaggagaaattgataatggagaagtccaattctgcaacaagttttttgagaaggacactgcattgtggacatgagtaccttctctgcatgacttagaagaaagttaattttggtttttggacagtcctgttgacacttctgttttgtattaagtgatgaattccatgttaaaattatactggccagttgatagttaccaaggaaatgctaggctcctgattccagtcagtgggtttggatatcctaatctgtgctctcctctcttctagaatatgagtgttctgcctgtattgggagcacattgctcagtctttgagttatgctcagtttcttaatccagagaataaaatgtgtttgggtgctgagattttagagcttttctgtaaggtcaatacactgagagaaggcttaatatttcttatccattggcattttccagaaaactgtatttgcttttactttttttttttttttttgagacggagtttcgcttttgttgcccaggctggagtgcaatggtgccatctcggctcaccgccacctctgcctcccaggttcaagcgattctcctgcctcagcctcccgagtagctgggattacaggcatgcgccaccacgcctggctaattttgtgtttttagtagagatggggtttctccatgttggtcacactgggctcgaactcctgacctcaggtgatctgcctgcctcagtctcccaaagtgctgggattacaggtgtgagccactgcacccagctgtactttcacttttttttaattcaaaaaaagtatgtgcatccttctatgctgataagagtgtattttggggatacacgttgagtatcccttatctgaaatgcttggaaccagaggtattttggatttcagtttttttcagattttggaatacctgtatttgcattatactggttgggcatcctggacctagaaatctgaaatgttccagtgagtatttcctttgagtgtcatgttttaaattttggagcattttcgatttgggatgctcaatctgtattttttcccaactattttagaaatttttcctcatcagaaccttgacgacatctccctgcacatagcagtaatgtactgtgcactattataaagctcattcacctgacaaaatacaatacttgtgatgtgatctctcttggccttgaccttttgcgcactgaagcttatggccagtgttaatttgttatttcttaaataactttccctttcatttttaaattataaatttaacttctaacatgttttatggttaaaattgtacttttttcctttagcgacattcaaatgcatcacaatcactttgtgaaattgttcgcctgagcagagaccagatgttacaaattcagaacagtacagagcccgaccccctgcttgccactctagaaaagtatgtgtaaaactctgttcttgttcttctttcatattgatgctgttccatgtgttaccattgtgagtgattggtaagtgttccttatgtgggaatcatgtgccttgaaaataaccttgggtgggtgag

SEQ ID NO: 7742 - DNA, 2300 bp, Homo sapien
tgttgactgaggctgccatataatcttttacaatttcacacccctccctgaccatgctgcatggtcatattctggcaccttccattcctttgtttttcttttcttttctgtccatcgtcattttcttcagtgccttcagggtttaaaatgattgtttaaaagtccgcagtatttaccgagtgtttcatcacttcatcctatcaggaatctgagtatttgtcctttacctcttgtcagggctgagggaggaagacggcatggttacatgggacacctaacgaggatagctaactgtatcgtgcacagcactgacaagggccccaacagtgcattagtgcagcagcttatcaaaggtaagttatttgtgaaatttgaattacatttttgttgggttgcaggaaggatttaagggtcaagtagaaatgcatgtagcatttttaatagtgatttgtgggacttctttatatttggcaaattatgtatttgaatgaggttcttgagaatgtgtttgaacagtgttgttttttggttgtatttatgttcatgtagttacagaccattccataagcattggcaggcttggctggattcagcatataagagtcacctattgtcattcttaaagagcattgcttggtgaatcatgcttttgagtattgtgagtgtgaagtactcatatgctagcagttgagccacttcagctataattttgccttttattttctgaaggcctctatatagcctctgaattaagtttctttaactggaatattagggcatttatcagcatttctttgatgtcgctgtcactaaaatgaggggtattggcttctaaaggactctttctgtatagcatttcagtttaatcagcccaagcttatttggaagaaactatatggatgcttttttacactggccccaagccatgagccttcttctaaaatgagagaactgtgtactctgggtttttgtaccaacaggattaccaatcctgagacctattctgaatgtgaacagtctttaacatccatggtacagaatttgttcagttaaaatcatttcccagtgggtcttccattttttcttaagaatgtttgtttgttcaagaggctattccctgttgaatgtgcactaaaaccacagttgtcaccagggatggaaaaagtggtgtgtgcccacttctaattttgcttcttgagagaggcataagaggtataagcctcttccttgggccatttcaccacacagtttatctttatgtcctaactaagaagaaatggccatgtgatatgactgagtttttagatcagactttcctttatggaagctgcttgccaggtggtacatgtgtacacttctgtgagtgtgcacacatgcatggctgttttaaaccagaattatcagatgactagttaggcctctaaaattacgtcatggtttgattttctcagaaaagcagttgtttatccttttctttaacatttctctagaaggtagaatttcactattacctgtgtatccacgttggcccatgacacaaatatttaggaaacatgatcttagagcaatttgaaaagccatactaggttctgtggaacattcattggccagctgccaatgagagcatttcaagaaagtgtgcaggagctgtcatttgcagcattttctagacttaacttgaccatggaaaaagatccccctacccccgacacgttaaacacctaccacctttctcagaaaagcttgttggaaacacactttccaggttaagcttctaccagagcattttcagaaacttgttaagttcacaagctaccttagggctcttggcctcatcaagcctataccattgggtagggggattctggttcctgaaagtccatgggatttgggcctatggaaggtttaataattccatttctctaagagcactgggctggctgtcacccagtttctcagctgatagggcctgctcaccattgatgaaccaggtgagtaggcccacttttatattacctgcttactttatttgtctccgtggaggtcattgtggtgataatgcttttttgcttttctcactctgaagatcttcccgacgaagtcagggaacgatgggagacgttctgcacaagctccttaggagaaactaacaagaggaacacggtagatctagtaggttttacaaggttacatttttattctttcagtgctcttagcctttgcccatttattcagaaagatgtaaaagatcttccatttacctcagtaactgtgagccaaagataaattcttatctcttt

SEQ ID NO: 7743 - DNA, 2300 bp, Homo sapien
tcaggaagtagccagtccctagggggcactgttgagcagctctcacagcttcctgccttggcttgctattaggctgcacgggccgtggcggtggcccaccatggctcattgtgagccctcgtgcctgcaagcagcccttttcccagagcgctctggtattgtcccaggaagcacctggacaatgggctctccctccactgaggcacctgtagagtactgaaatagtccacccagttggccatgaacctgagtgctgtacattggtccacccctagaatgaagcttgatgatatcaaatgtaaattatcaaggtaattttgtacctgttgaaatacagctttaagaaaaagaacaccttactagtaataatgataaacttggaacttcggctgtcaatttagtctagatttggttaaatttaggcatttggaaagtggattcctttatttctcatgatatctggttccagggtcatacctgttctggggagagttttcttacattattttgtttgtttgaccgacagctcacgtgcgtacgaagccatttcattcacaaaactaacttacaacagcccttgccaagctcttagcttgcagaatttacccacttcatatgaacttttcaaagtggaagaataattactcttttctgattgacaagcttccagtacatttttctttgcatgtttaaaccaatcatggatcattttgaaaataaatacactccaaagcacttcttaaaattttgagaatgcaaaaaaggtcttggttaatttattagagtttcatcatagcctccattaagatcagaatattagtttgtagacttgaacttcaagttctcattcacgtttgaggttgggcatcatgttgataaagtccccgaatgtagagagctcagggcagataatttaaccaggtaacccagccacgtcaccagtggggagtgcctccaggcgtttgtgccctgcccatttgcttctccctttagccttgtctggtctcctaaagtctggtgtttgactccccacctccctgattctgccttatagagtttggagggtgaggcccccatggaggtctggagaattcagactgactgccgcatatgggctctgaaacactgactcatcatttcccactacctcacatcacatacgggcttgctggtaggcaattaggccacatttagttgaccagtagtttctgttgcctgggtggcattactgttaagagatttgcttaaagtggttggctcacttctcagtgacttgaacagtttctgactttggccaggatgacagtactaggaaagtgtgctttttaaaaataattatacagctatattgtgctttccagatataggtttctcagagttcaaagcactttttatatacctttaaataggatacaataacagtcttcacttacatatatttgtaagttttggtagctttattagtaaaaatgagatttgaaatgtgaagttctttgctagaagctgtaattgacttagaactaatgaggattacatctgatcattttccttttttctgtgcattattgcatggaagttactagtgtctgtgtcagttgctatgtatctctccagatggatgaatagataaatatatatctgtatatgtattctgtatgtacatgtatgtatgtatacattcatatttagtatttgcattctatttttgaagcatttaaaatataacaacattttggggaatatttcttcccctttacacccaggagaatcacattaggatcactagaggtataacagttttgagagagctggctgcgatggcatgcacctgtagtctggctgctctggaggctgaggtaggaggattactaggaggtaggagtctaggagtttgagtctagcctggacaacatggcaagaccctgtctcttaaaaaaaatttttttttggaggggaaaaataaaacaattgggagggaacttttccctcacgtgaccacatttctgatctgtagataaactcagagcgtggttcatgctgcttactcaacagaatcacttcatggttctttaccagatctttgaggtactgagcatctgttttgcctcataaaagataaagctgcagttcagaagaactgatttctttttgatgtaattaatattaatgctggctgtcattgtccattcataggtccagaactcagctcagcagcccaggacttgtccctacccttctgctttcagccagacccccgtgctcagccttggtttacactccatgccttaccaagtggccat

SEQ ID NO: 7744 - DNA, 2300 bp, Homo sapien
atagaagagatttataaacaaaatattttgaggtagatattatagctcattgacacagagtttaagaaaaaaaatgaaggcagctggtatttgaatattggatgatgattctcacaggagacacggttatgccacagacacccagtatctgctgtggtctttggaagcagtaaattctcaataatttgttgaaccacagccagtggagcctgttgtttgtcacaggttgcagtttgcagtatgtgagaagctaaaatatttttacagcacgctcttaattgtgctataaacatgccgtatgggcacagtggaatggaggtgccgctgtaaacagcaagagttgaaggctgttacgtgccttgagaattggctcattttaactcaaaaagagcaagaacacaagatattctgtccataccccaggagcattctactcaggctaggatccaccacctcacaccagaccctgcaggtccctgtttggtgtctcgacattcacgtgcctggactcttgcttcatcttcctagttaggatctgtaatctctttacagtctgtattgcatgcttggactagtgattgagtggaacaaatattttaagaatcataagatagcccctcctcttcaaacttatgtttaataagcaatgaattcttttactccctccttgcttttctagatgatatcttgttaacagcataagatttcatgggtgtctatgtattttgtgtatgagtttgactatccctggagaaaactcaagtgtctgacagcttttgtatacttcatgttttgacttggttctttgcaaataacctttttcttggttatattagtatggcccatggaactatggttgttaccatagatgttaaaaatcttttataggaaggattcaagggtgtcccaaaggctttatgtctcagaaggcttctattgcagccctcctatcctacataaattcattaataccaagggagctggcatcatttaatataagaaggttgtttctgtttgttttttatttatagagattttgatgatagtgtaaatatcttaaatttggaaactttcataaatacggtttctgtgagctgatagtaattaatgcttcctacacttttattttgtttttttacagtgtttcttttgatcgagtatcagacatcaactttactctcaatacaaatgaaagtgtaagtataaactctgttgtgagcagtgtggcacatgagaggttaaaaattgggtgagtccctgtgtggatgccacatgctgggacccctgtgctctagagccctaatcctaaattggtgttacatacttcactctgtcccacggcctacctggcacccgtgggcatgtgatttttgcagccctggtttatgacttggtggagctaataagaccagggtcacttgtgattgcagcgtagacacttgacttcaaagagaaggctgcagtttgacaccaacccactgcctttgactcctttgtattgccaggagagaaatgtggactgggtcagggcaagcccctcgttactaggcatttctgtggaaacaccgagacagtcgtgtcacctgaatggagacagtttattgattttatgttgactagcatgagagaccactggcttatttgctgatggagtaaggtaggaactgctgatttgagccattgaaggttatcactgctcagctggactagtaaaagcaaataagtacggttgcttttccttgctaggacagacctgggaccgcatctccaggacaggggaggctcctgggattacaatgatgctttgatgagatgaaagaggatatggtctatgcttctttttgctagtctttttagggaaacccagtctttttttaggggaattcttgttacggacacagaaactaatgttaggtgtttatattttattttggtgtatgtgataggcaccatattgtaaagcagtgaaaaaatgcaatttacattggtaatgcttaagagaagataacttgactttaaatttattttgttgtttttttcctctcatttttatttagggaaatattgccttgtttgaagcatgttgtaaggaaagaatacaacagtttgatgatggtggctctgatgaggaagatatatgggaggaaaagcacatcgcattcacaccagaatcccaaagacgatccaggtgaaagatagttggttatagttgtaattatagccaacctgtaaagaaaatgattatcatgagacatacattgtgtcatcaccaaacatacatgttaacccagaaaccagtg

SEQ ID NO: 7745 - DNA, 2300 bp, Homo sapien
ttaaatacaaagaaacaagtatatatgaaaacacaaaaaagaacaagatatgttaacactaagaaaaagccagaaggtctgtattaatctcaaaagatttcaaaggaaagggataaagaaagtgatataatgataaaggggtcaattcattaagaggacatagcaactttaaatgtttacacaacctaataactgcattctagcctaagcgatatagacccccgtctcttaaaaaagggggagagagagagagagagagagagagaggagagaggagagagagagagagagagaaaaagagagagagagtgagagagagagtgagagagagagagagtgagttaaatatgactgggcatggtggctcatgcctacaatcccagcactttgggaggccaaggcaggaggctctcttgagcccaggagttcgagaccagctcgaggaacatagggagaccccatctctatttttttaaaaaaagaaaaaatttaaatatgtagggacaaatctcacaaaacatgtccaagacctgtatgctgaaaagcctaaagcatagctgagataaagacaacttggtaaatgtttataagtaggaagactcagtattataatactaagctgccagctctcctccccaggttgaatctatagattcaacacaaacaaaatccttccagccttttttgtagctattaacaagctgcttcttaaattcatatggaaatgaaaaggatctagaatagccaaagcaactcttatagagaacaacaaaattggaggacaaacactaccttattttaaaattcaatagttaaaacagtatgatatgggcaagaaggtagggcatagatcagtggaacagaatagagagcccataaatacaggcctacgcatatatggacaactgacttttgatagaggcgaaaggcaattcagtgaagaaaggatagtcttttcaacaaatggtgctggaaccatcaggcatccatattcaaaaaagtgaactgattcgtacctcttactatataatacattaactcaaaatggatcttagacccaaatgtgaaacattaaactataaaacttctacaagaaaacttagaaaatcattgtgaccttgagttagacaaagatttcttagatgtatcaccaaaaacacaatacataaaaataatttttttttttttttttttttttttttttttggagacggagttttgttcttcttgtccaggctggagtgcagtggcgtgatctcagctcactgcagcctctgcctcccaggttcaggtgattctcctgcctcagcctctggagtagctggaattacaggtgcccgccaccacacccagctaatttttgtatttttagtagagatggggttttgccatgttggccaggctggtctcaaactcctgacctcaggtggtctgcccgcctcagcctcccaaagtgctgggattacaggcgtgagccaccatgcccatccataaaagaatgattttagtaagccgaacatcatcaaaatttaaaattttcactcttcaaatgacacttttaatagaatgaaacgacaaaccatgcactgggagaaaacatttgcaaatgacacattagataaaagacttgtgtatagagttaagaaatctctttactcaagaaaaagacaattcagtttttaaaaagcacaaaagtgtgaaaagacagttaagatataagatggcaaataagcatttaaaaagatgctcaacctccttggtcattaggaaagtacaaatgaacaccacagtgaaatgaacacctccaccccttcgagaaggtggttcttagattgtggcctccactttaagcagagcccatgtgttcctgtggtggaggcttagtgtgaggttgggcagcacgcacgcaaagctgagtcttcccgggcatcctgaccacgtggtgctcagacagatgtgatcctgctgaagcaccacaggaccttttgttgctggatgactgttagaattttctggatttagctggtggctgataagcagtgttaaatacttgggtcttgtttttccttagctcggggagtacagacagtgaggaaagtacagactctgaagaagaagatggagcaaagcaagacttgtttgaacccagcagtgccaacacggaggataaaatggaggtggacctgagtgaacgtaagtggattcattcttcagatcagctgccctgtgttggaattaggtattgtgaacaattggcaaaggagcagttcacagcatctgagatgatatctgaaggaaag

SEQ ID NO: 7746 - DNA, 2300 bp, Homo sapien
atttccttttgttcgaaggccgaatgacattctggaatctttggttcttttagcaggctgggtatggttaagtgacagggagggaaacacacttggctggactgcgtgccgctgctgctgtgactgtgggcctgggtgtagggataagcagcgaggaggcgagcaccctggatgaggttcgcgtttacctacctcccggggttaagtgtggcagggaaccaggcctcctgcttctctgttccttgggaaagacagcttttgcatcttcagatctctggagacacaagtgggtagggttggggaagattctctctcagggcttcagggctacagggttgccccagagagcctctgccattccaccagtctctgtggcttctgttggaggttttgtggacattcagaatcatttaaaatgttacacggactctgaggagctcatctgggaaagactatctcaaagagataacagaaaagtcatttgtgtgtaatataatttagttgtagagtagaactcagatagaatgattccagagctttgcatagagtgggcaggcaaaaataactgtcaagttgactttttggaggtttcaggtgagattttcaaacattcaagcatttattccttcttggtgtcagtggagccctgtgacactcacacaggtaggtgggcaagaagcatggagcgcaccctaattaaatgcctactctgtgcaggccctcctgtgatctttgctaagtgaatagtcattatgaaatcaaacagatgaagtcagatatcttggggaaagtcacagtcaagtctgtctttaaactcagaacatttctattctacacgggtacttcttaatcttagtcacttgtgtctgggttaagcccttaaataacttataccagtttccctagcattccttcctgcaacctagagattcctaattatgataatatccctgatggaatgcagtggttcccacatctggcttgtccccagcaaagaattgaggattcagcactctgtgaaggaaaagcatggtgtgcagttagagcagatccacagtgacctgacttcatcagaagggacacatgtctgaggaggtgacatttaaggagagacctgcagattagacccaaacttggccagcaggcagcatagtaagaagagccccacagaccgtaagtgtgctcaagcaagtcctgccgcttcagcctctgaggccagacctggttctgcaggacttaggaagcctaactgcagtgcactgcagggagcccgcagaatgggcgaagtgcagtcagacccggactgggaagcattaaggttatttctagtttattggagttgaataatcaacatgttctttttttagaaaaataacctttttacttttgaataatttagatttatagaaacattgccaagatagtaagtctccatatatccttcacttagcttccccaagtatgaatacagccatggtacatttgtcaaaactaagaaattaacattaatccctctttgtgcatgtagctttgaatctctgtgtagtatttcttttggaacagttgttagaaatgggaggtttgaggccaggcgcggtggctcacgcctgtaatcccagcactttgggaggccaaggcgggcggttcacgaggtcgggatattgagaccatcctggctaacacagtgaaacctgtctctactaaaaatacaaaaaattagccaggcgtgatggcgggtgccagtaatcccagctactcaggaggctgaggcaggagaatggcgtgaacccgggaggcggagcttgcagtgagcggagatcgtgccactgcactccagcctgggcgacagagcgagactccatctcaaaaaaataataataaaaagaaatgggaggtttgagaatgtgggatcattgttagagtgccctccaggtggctgtgccctgtccgctcctgccctcattggtgagagtgtctttctcccacagctccagtctcttttgctaatgtgtttttgataaataccttgtggtacatgaaacgactgaagtgttttccaaatagaatttctcccctctttttagcacccaactggtcagctaactttgatgtcccaatggaaacaacccacggtgctccattggattctgtgggatctgatgtctggagcacagaggagccgatgccaactaaagagacgggctgggcttctttttcagagttcacgtcttccctgaggtgagcgaacatgtgctgtctctacacccttccacgggggacctgggaatggtcaggtgttt

SEQ ID NO: 7747 - DNA, 2300 bp, Homo sapien
aaaggagaaggctggaattgactaagatgtgctatgcactgggctggatttgttctcagcagaaagcaagaaagagctctgggatggtagcagggctcccactaccaccgggggccaaaggttgcagtatttctcaggtagccaagaggcacccatgagcccagcccctgcccactccctgatgtcatctagacacaaggacatggggcatgagaggacatcattgtcacttctctgcagagtcacaggaacgtgccctctgctcctccgcctctcggctgtccttctgcccacggctggcccagactctcatggcgactcactgtctcccacgcccccactcccggcaggaaaccacttcagggtttactgtgggctccgaaatcagcctgtgagtcctagttagggtcccctgtgcctgactctcctctccccaggctgcaagaaatagggatgaccagaagtcaaactgtgcccttgggaacaccccacccctcaccactgtcgtgccaggagtctgttcctaagacccctccccaagtcctgtctcctcctcttcctcccataaaccacagcagacactcagccaccaggctgcagccctgcaccttctccagcagccgctggccttcgccagagttcttgaaagcccagttgtccttccccagccacgtggaggcagacggatctctcctgggggcagcctgtagctgtctgtgcaaaggttcccaagactaaagtgtagaggacaggtaagatgacactgtcatgatcatcattcgtcctgtgccctgtggacatcaacccacagatgtgacatcaacccatctgatattgagcccagtgggtggggagatcctaacccagctgctgctgttgaggacttgggtggtgtctggccagtgggaggggaggtcaggcgagttttcagcagatgaccccgtgctcttcggaagcccggaggtgccacactgtacaagtgtgatgcctgggatcctgtgctcccctgatgcctgggaatggggtgaaggaacagcctaggcttgggttctctcctgggttgtttcgggacttggccccagctcaggaagggtttgtggaggagccaaggagggccttgttcctgtgggatgtctttgccttgggcacaaggacagcctcttgctgctgctctgcccaccgcccaccccttggcggcctctgggagtctgggctgctctccctctggacctaaccagttgcccaatggctggacctgcttaaagctccctcttacaactggaccaggcagccaggggaggcactgagaggccgagcttctgagctggtgcctgtggatgctcgacggtcccgcagctcccacaatgggatggccaagcagaccctgagatccacagcccccctttagtgaaacaggagggaggtcgctgggcacagggagccgggaacgcctgccctccccgccatcgacggctcccgaggcctgaaccttcgctccagccccagcacaagccggccagggcgcagggccaagtgttgcccgccattccccgggtaccccatgacctcccagctggggctggctcggactgaggagtcgtccctgcccgtcaccctctggggtctccagtgctgcggagctcagctggcttttgcagcggtaggggctgggaggagaagctgcagggagaccgcaggcgtgggacgttgtggggggtcaggcttgctctggggctgggaccccggggggagcagtggggttgacgccacagcgatgacttgggccacgggtctgggggctctcccgcggggcgattgggctctgtctttcgggattagggtctctcccacagggtttggggttctctctgcagatttgggggagtctctcccgcgggatgagggggggctctccgccgcacccgcctatgatggcccagaggacccgagctcgggtcactcccgtcgccctcggggctcggcgagggtgcaggaggcgggcgctgagccggtgacgcgactccgggcggctcccgggtgcgccgcatatatagcagcggcggcggtggcggcggccacaccgggcggcggacacgtggagggacccggcccgcgccttctgcccctgctgccggccgcgccatgcggtgagcgccccaggccgccagagcccacccgacccggcccgacgcccggacctgccgcccagacccgccaccgcacccggaccccgacgctccgaacccgggcgcagccgcagctcaaggtactactggcgccgggccgaccctgcgcccccg

SEQ ID NO: 7748 - DNA, 2300 bp, Homo sapien
ttcacctcctcttgattaaacagtgatatctattgactccttaaagatgaaatagctcattccccacccaaaatttgagactttcattgtatttgtgagtttttttttttttttctgagagggagcctttctctgttggtcaggctggagtacagtgacacaatctcagctcactgcaacccccatctcccaggttcaagcctcagccttctatgtagctgggactacaggcgtgcgccactacgcccagctagtttttgtattttttagtagagacggagtttcactatatgttggccaggctggtctcgaactcctgacctcaggtgatccacccgcctcggcctcccaaagtgctgggattacagacgtgagccaccacgcccagccgtatttgttacttctatttcgggaccaactccatcagttgcacctgtaagctgcgtcaccaaggaccgggagtgggtgcaaggctgggaacgtgcggtgcaagcccctgccctctgtccacccgcagcgtcccaggccgggatctgtcttgagagctcgagtgtagaaaaatgttttattttattttatttatttttttgagacggagtctagctctgtggcacaggctggagtgcagtggcgggatctcggctcactgcaacctccacctcccgggctcaagcgattctcctgcctcagccttccaagtagctgggattacaggcgcgtgccaccacggccagctaatttttgtatttttagtagagacggggtttcaccatgttgcccaggctggttttgaactcctgacctcaagtaatccgcctgcctcggcctcccaaagtgctgggactacaggcgtgagcaaccacgcctggccagaaaaatataactgaagcccaaggtcagaagccaagctaggcagtcccacttagcgctgcccgagttgatggggacctcagtttccccacctgagcctggatcggctgaacctgggagtgcctcccctgacccgctctggcaacagcggcagtccaggccccgcccctcgcgactctgtctcctcccgccccagaccacgcccaccacacctccctggccccgcctttacctccccgccccgacctcgactccgccccacgcccaggccccgcccactgcccgggcgcctcttcccctccccccaggttcctgtccctcacccttcccccttctccaaccgccaacggccgcctgcgcctgaggcccggcccacgccccatcccgctcgctccacgctgcggcagccccggcggccccaggtgcgtccctccgaggaggaatgacggggcggtccccgggctgggcctcggctctgcaggcggggatgggggctgccgggccgggtcgggcccctgcgggtgggcggagggcggcgggccgtgggcgaggccgcccctcacctggtcgcacctcacctggccccccctcccctggctgctcctcacctgaccccctcctcggccgcccctcacctggccccctcccctgggcgcccctcacctgacccccaccccggccggcccctctcctggccgccccttacctggtcgcccctcccctgactccctcccctggtcgctcctcacctggccgcccctcacctggccccctcccctggccgcccctcccctggtcgcccctcccgtgaccccctccccggccgcccctcccctggtcgccgctcacctgaccgcctcccctggtcgctcctcacctggccgcccctcacctggccgcccctcacctaatcgcccctcatctggtcgcccctcccctgaccccctcacctggtcgcccttccccgggcccctcacctggccctccctcaccaggccgccccctcccctagccgcccctcacctggtcccctcccctggccgcccctcccttggctgcccctcccttggctgtcccctttcctggccgcccctcccctcgtcctctcctctggctgcctctcacctggccgcgtgttgcaggtgcgcggcccccgccatcccgccccgccgccctgcgccatggaggagggccctctgccgggcgggctgcccagccccgaggatgcgatggtgacggagctcttaagccccgagggtccgttcgcttcggagaacatcggcctgaaggcccccgtgaagtacgaggaggacgagttccacgtcttcaaagaagcgtacctgggcccggcggaccccaaggaacccgtcctgcacgcgttcaaccccgcgctgggcgccgactgcaagggccaggtcaaggcgaagctc

SEQ ID NO: 7749 - DNA, 2300 bp, Homo sapien
attgggagggggtggtagctggcagggaggttgacccacttagagtgggttgagctgagacctgagagactcgacggagccagcccggccagtgcagcagggcagcaagcatctaggagcagcaggtgcagagcctccaggcttgattgcaacccgtgggtgacccccacaggtggctgtgtatgcctggcatgatgctactcagtagacgtctgattctgattagtaaacgaatgaacggtgcaaccttgtgggttactctctcgcttgggccactcaagctatgcataattcttgggctcttcgatttattatttttattattttttctgcttctgtgagtgttttttgttgttgttgtttttgtttgtttgatttttgagatggagtttcaatctttttgcccaggctaaagtacaatggtgcaatctcagctcactgcaacctccgcctcccaggttcaagcaattctcctgcctcagcctcacaaatagctgggattgcaggtgtgcaccaccatgcctagctaattttgtatttttagtagagacagggtttcaccatgttagtcaggctggtcttgaactcctgactttaagtgatctgaccaccttggcctcccagagtgctgggattacaggcatgagccaccacgcccagccccaggcaaaattttcttgatttttgaatgttaaatgtacaactaaatagtacacggtgttgctgtgccttgggtactaccctttaaaaatttagaaaagtatttaatttttaaaagtgagattagaaagctgatgttttacattctttatttttaccaaaacagtacctgagtagacagtacctgaggctgtctccccagcacccactcccaccagtccctctacaccctttgcagttttcgccatcacttgaattaaactttcacctcctcttgattaaacagtgatatctattgactccttaaagatgaaatagctcattccccacccaaaatttgagactttcattgtatttgtgagtttttttttttttttctgagagggagcctttctctgttggtcaggctggagtacagtgacacaatctcagctcactgcaacccccatctcccaggttcaagcctcagccttctatgtagctgggactacaggcgtgcgccactacgcccagctagtttttgtattttttagtagagacggagtttcactatatgttggccaggctggtctcgaactcctgacctcaggtgatccacccgcctcggcctcccaaagtgctgggattacagacgtgagccaccacgcccagccgtatttgttacttctatttcgggaccaactccatcagttgcacctgtaagctgcgtcaccaaggaccgggagtgggtgcaaggctgggaacgtgcggtgcaagcccctgccctctgtccacccgcagcgtcccaggccgggatctgtcttgagagctcgagtgtagaaaaatgttttattttattttatttatttttttgagacggagtctagctctgtggcacaggctggagtgcagtggcgggatctcggctcactgcaacctccacctcccgggctcaagcgattctcctgcctcagccttccaagtagctgggattacaggcgcgtgccaccacggccagctaatttttgtatttttagtagagacggggtttcaccatgttgcccaggctggttttgaactcctgacctcaagtaatccgcctgcctcggcctcccaaagtgctgggactacaggcgtgagcaaccacgcctggccagaaaaatataactgaagcccaaggtcagaagccaagctaggcagtcccacttagcgctgcccgagttgatggggacctcagtttccccacctgagcctggatcggctgaacctgggagtgcctcccctgacccgctctggcaacagcggcagtccaggccccgcccctcgcgactctgtctcctcccgccccagaccacgcccaccacacctccctggccccgcctttacctccccgccccgacctcgactccgccccacgcccaggccccgcccactgcccgggcgcctcttcccctccccccaggttcctgtccctcacccttcccccttctccaaccgccaacggccgcctgcgcctgaggcccggcccacgccccatcccgctcgctccacgctgcggcagccccggcggccccaggtgcgtccctccgaggaggaatgacggggcggtccccgggctgggcctcggctctgcaggcggggatgggggctgccgggccggg

SEQ ID NO: 7750 - DNA, 2300 bp, Homo sapien
attttactatgttggccaggctggtctcgagctcctgacctcaagtgatctgcccaccttggcctcccaaagtactgggattacaggcacaagctaccatacctggcccaccccatctctcctcttctgtgcccacgcttgcaaatcagggctgatgacggcccctgttccactggcaggatggggtgagcaagagatgcttgaccttcagtgacctctgtctgtgttgcgtagctcggggttccacttcagctcattcagggcatgattttctgtctcattcacgggcattttactttgaataagcctcaagatgcttgacacctgccccctcccccttttttttggagacagagtctcactctcttgcccaggctggaatgcagtggcaccgtcctagctcactgcaaccttgaattcctgggcccgagtgatcctcctgccttagcctcccaagtagttggggccacaggtgtgcaccactatgcctgcaaatactttcttgtagagacagggtcttgccatgttgcccaggctggtcttgaactcctgggctcaagcagtcctcctgattcagcctcccaaagtgctggggttacaggcataagccaccgtgcccagctacagctggcccttttaagggagtggggtcttacttttcaatgtacagggagggactatagagagattactgttgcaccaagctttgttttttacagcagacaaacaacttgtcggattaaaatatgtcatgacaaattgtggggttagcaacagttttactttttgttgctgggggaaacagcatctcacccaggctggaatgcagtggtgtgatcatggctcactgcagctttgaactcctgggcccaagtgatcctcacacctcaaccttccaagtagctgggatcacaggcacatgccaccgcacccagctaatttttgtattttttttttttttttttgcagagatggggggtctcactctgttgcccagggtggtcttgaactggtcaagattgcttgggctcaagcactcttcatacctcagcctctcaaagtgctgggattacaggtgtgagctaccacacctgaccactgttactttctgtaagagcttgcttaggtgtgtagcagaagcttttgagtgtctttttaaacaattgctctctgtgtttccacctctgagcatttgttcaaccaaagtagcacatgtaaaaggacgaggcggggtgggggctggaaaccctgaacctggggcactggccttagcctggttccgtgacctattccagcccctcgttcccatcctgctgcctgagcacctgcccagccccagcacccagctctcagcatgactctgccccatctcatggtcaccatcgcaggtcatcaaaacttacttaggtcagaacagatcttttattaagggccaaataatagataagagacattcttgaaatttccttgttaacttttcttgtcaactctagaatttattttaaattctaaaaatttaatggtgattttctggtgatgcaggatttgggacacttttaaagctaataaaggaagaaaaagtttaattgttaaattatcattaccctatgacaccatttagcattgaagggagtttacctgtctaaggactgccaagaccaacttgggggaagagtctaaactttttcttttttttttttgagatagggtctcactctgttgcccaggctgggttgcagtggcatgatcatggctcactgcagccgcaaccttctgggctcaagcgatcctcccaacctcagccccccaggtagctgggaccacagacatgcaccaccatgtccagctaatttttgtcttgtttttttttgtagagatggggtttcaccatgttgtttaggctggtcttgaactcctgagctcaagcaatccactggccttgacctcccaaagtgctgggattacaagcatgagccaccatgcccagcctaaaaccttttcaatgtgttagaacttttcctaaggcacaagtgaggcaaacataggctttgattaatatgttttaacttgggtgatttttttttcccccaataatcccagtatctacagtcggtgaggcctcttatgaaggaagaagacttcaaacggatgacagcacttgctcaagattttgctgtcggtcttggaccaagattacagtggtatttgaagttaaaatcctggtgggctacaaattacgtaagtctgtatacacagtttttcttgatgaaatttttccgtatgaagacgctaattttgag

SEQ ID NO: 7751 - DNA, 2300 bp, Homo sapien
ggcgcggggccaatcccagctgggcgcgcaccggggcgctgagcgagggaggaaatgaccttggagcggggacctgtcggtggctgaggttccagggaaaggagggaagggcatttgcggtgagaatgacagtccagcttccgtagtgcaaaccgcgaaggcccacgtgcaaggagagcctcacgcgcgagagccgcccgggctcgtggggtgcagccgcgcgtcaggaacgtgtgccctggcccagcccactggcctcttggggcggtgaaatctgcgggggtcgagtgcctgggctcactggtggtccagacaagcgcaagcagggggacaaacccccaacttctaacctcaaagaaatgcaaattaaaaggagagatgagagattcttccctcccccacccctccttttaggattggcaaagattaaaataatccataatcggagacagggccccgcttgcacgcgcgggtggcagtggaagttggtaaacttttcggcatggtagcttggcctgtgtcaccaaaatgtcgcacgtgcctggttgcttcccctccagggatctatcctacaggataatcaggagctccaggaggtacatcgacggccaacgcagcttttatttatacctgcaatggtggggtggggggcggggaggaggccctaattgtccaatgggggccgcgtaaatggatcacagcatagtcaaaggaaatcttatgcagccttgggaaggccggtggtcatctccgtcccccagcagagacctgtctacgacgtaagccaagtgaaaacaaaacagccttacagacagcttgcatcctagccttcctttaaaacagcgagcccgggaaccgcagggagagttaactgcagcggtggtggggggcgggatcaaaggagaactttcattttctcttctaaattcttctgcggtaacaactaaatgatacagaaagaaggatggttgcaaacatggattttttcataactagaagaagtggtcgaacttaaaaagagcagggttcataaaagaggtttaaaagagtctttgttcataacatcggtgcatttatggagcacctgctgtatgcagagccgccagctcgcgcctggaagcattgcgggcaaagataggggaggggtggctcccggtcaggaagacccccttggccctcctgttacgcttggggcccctctccctccccctcaaccccctgggtcccctgcagctgcgctcgccctagactcctgggaccggtggatgttcagttcccgctcccggcccctctcccgagctccagcacaagggtctctcggtcgctctgccctggcctccagctactcctctcccagcacctattatgttcttgacgctggaagaattattttagtaaatctcaccaaagccccccaagtgaggcatttttatcctagctagatgaggaggagccacgctgcctctggatcgcgatgactgccactcgtggtataaggtctgatttggggcatgggctgtggaatcagatctggacccaatgtccgatctatcacttccccgcgcttttttttttagagacggggtctcgctacgttgcccaggctggcctcgaactcctggcttcaagcgacttcccgcctcccgagtagctgggattacaggcgcgccccaccactccctgtggatcggttgcttctcagctcggtgatgtggggtaacttatttcctggcccgcgacccttgtctgcatgaaagagtcaggggtgaataccatcagggggtgcctggagcattacacggggcaatgccgatagataagtcgcgaggatcagccaggcacggagctaagcgattttatgcgcacggcctccacgagatggctcgttttacggatgaggaaactgaggctcggagggtgaggaatctcgtcctagaccccattccggcagaggtcgaggacgcgagcacccgctcgagcctcagtttccctcccctcctagccccgcggacgccccgccccgccgaggccccgggcccgccctccgcgcgccgggagtcacccgcctgcaggcgccgcagccggacccgcctcagccaatccgctgctgccggcgtcgggtgcgctcggcctcgcccgcggccctccttccccggctcccgctcgccgctcgttcactccaccgccgccgccgccgccgccgctgccgctgccgctgccgcacctccgtagctgactcggtgaggcccggtcgcccgcggtggggagggtggcggggcggccctgcgggctgcgggggc

SEQ ID NO: 7752 - DNA, 2300 bp, Homo sapien
aaggcctcattaggcgcatcagctgcgaagtgaagagtcacagatcccttagtgtagactgtgtgctccgagaaagggtggggccgactaagactagtggtgatctgcatatggctaataggagctgccctacagctcagagttgcagcaggaataaggacctctccaaagccaagcagcatctgaaaacccccataataggagacagtgtggttggtcgaaacgagaggaagagtgagtaggcaagagtgaatgtgctgcgttgtaaagggaggaatgggaggaaagtcatcaaaacatcaaaacttactctgtgggagtgcatgttacggaaccttaagaaaggttttgcaggggattatagagttaaccccctcagaggttgagaactctgggtgaattagaattgccctcttctggtgttggatggctgaccgaaggaactacagacagggaacaattggccatgtatttaaggtggtgacaagggttggagaacagccagtgtacctggatcaatttctttatattgactcatagttaaatataatatagccaaacccagcattgatccaggcctgtttaacagcttattgcaaaaaaaaccaaaagtgaaaataagagcagctttgccggcagacacagagttaaaagggaatcccagagacagcaagagaagccagttttacaggagccaccaaaggtaacagaaattcttcctccatatatcccagcctacccccgctttaccgaggccgacagcccccccaggaaccagattcaggagctaacatgccccaggtctcacctcgaaggggaggatcagagccttgagaggccaggaaggaggtcaagatagtcaagtgggccatctcagatctggccgtgctggagctatgcaaatgcctctcagggggacacgaggacctatctattatgatgaccaggatcccaactaggacccagaggatgaaactcagcttcagcgtttgcagaggtaccaagaggcacttctgcaggggctacgagttggtagaaggaaagcaatgaatataaagaagatttcagaagtgcttcaaggagctgatgagagcctaagtcagttttataagagactctgtgaagcattccggctttgtaccccatttaactgtgaggctgctgaacatcagcctatggggaatacttcattcgtagggcaagcccagggtgacatcaagtggaagctgcaggcatgaataccacccagtccataaaagtggccaccacggtgtatgttaactgtgaccaaggaacaaaacgggaaagagcaaaagccacaagcgcggcagctaagcacgcccaccattaagttcctctccccagcccggctctatctggaaaaagaaggggccagggacttggcgccaggagaagagcaaaggaaaaggaaaggagaaagtaacagtaagtgtgagaagggaaagaagaaagtaaaaaggaaatcagaaaaaaacaggagagacaggcggcagtgcacgggggcggggcccgtgccgttgtccggccccaccggctggccgcaagagcagaactcaggaaagaaaaaggaaagtaaattgaaggcttaagaaaaaggccaatctgttgtcaacagctcttatggaaagggagattagcaatgtgagaggacgtggatgcggacgtagacgtggaaaaaagtcaagttaggaatggattcaagagccagacaaggtgggcgcctgtgatcccagctactcgggaggctgaggcaggggaatggcgtgaacccgggaggcggagtttgcagtgagccgagatcgcgccactgcactccagcctgggagacacagcgagactccgtctcaaaaaaaaaaaaaagaaaagaaaaagaaaaagaaagagattaatgtgcgcgatgcaaaaagaaaggacactggaaggatgagtgttcagaaggcaatgagggaaatagccaagaccacgagacaaagaggccatcggccaagggctgccgcaccttggggaaccaaatactgatctgatcaggctggcaggagccgaaggacgtaaggaacaggacagaccgggaaccttctcattaggcacccaggggcccatggtcacattagaagttaaaggcagcaggattctgctgtatctggattccaatttctcactgatggctaagccactagatggagttacaaaaggggaagaaaaagaacccctcctctgggaaacagcaggagaaggagccctgcctggtgaaaacttgcttatagacttcacagaacctc

SEQ ID NO: 7753 - DNA, 2300 bp, Homo sapien
tatctatctgccttagccactcgtgtctgacgagcacctcacacctccagaggctcctcatttcttcccatgcctgcttctcccacactcctccctctcacatgagggcaacttcatcctcccagttgctcaggccccaaacctccatcagttttgactcttctctcgcacactactcagtcaacccattggcaaatccatcccactattaaaaacttagcaggcttctgtacctaatttgcttctagctttgtttttgggtccccagggaacaaacagtctccttcctctcccacaggatttcctttaggtagtcctagagactgtgactgtgtacttccatcacgtctcctttgctcactcttcaaggccccagctgctcactgttttggtcaccttgtctctactcgcttcactgtgtgtctttctctcctaatgcgtgagtctgtacttgaacatagcattggaggggtggtttcatgtaggtaggtagaatggagtaagtcccactgcttttgtaaaaactttcctgcctacttaaacctaagttttattatggaaaatgtcaagcatacaaaagtaaagagaacagaatagtgaactctctcaattatccctttccaggttcaacagttaccaactcatggccaattttggcatctacattgcctctggcccaactctgtgattattattaatttcttaatagactttattttttagcacagttttagtttcacaccaaaattgagtggaaggtacagagagttcccatatgtcccctgtccatgtgcccacagcttcctatcaacatccctcaccagagtggtacaatctttacaattgatgaacctacattgacacatcattgttatccaaagtccatagtctacattaggggttcacccttggtagtgtacattctatggatttggacaaacttataatgacatgtatctaccattatatcatacagaatagtttcactgccctaaaaatcctctgagctccacctatttatccttttctcccccaatcctcttaccccccatgtaactttttactgtctccttagatttgccttttccagaatgtcatagtgggaaacatacaagatgtccccttttcaggttggcttcttttacttagtaacatgtatgtaagtttcctccatgtctcttcatgactcatttctttttattgctgcataatattctactgtatggatgtcctacagtttatgtaaccattcatctcctgaaggacatctgggttgcttccaagttttgggaattatggtactattcttttaatatcgtccaatatagagttagatccagttttccatttttgggggtcatggtgagacatgaaacccaggtttaaaacatacataaacactcatgcacacaaatacacactccaaccattttcaagcagagatttatagagtttttaacggacataacctttttggagcctcgtatcagcccagcgccttaaatacggctgtttcttttgcagaatgagttcagattaggcgaggatatccatcaccatttttcagaccagctcgcagcctgggggcagtggttcaagcacaggctttggagccgaaatgactgcgcctgaagtactcttcttccacttccccgctgtgtgaccctgggcacgttacctagctcctctgagcctcactcttctcccccataacatagggcctataccaaagttcaagggctattgtcagtattcaggctactaactgaaggaatcaaaatctgaacctgggttcccccgactccaaaacccgtgctatattcaccacaaatgcgatcaacacacaaggcaccaggtcggacccaggcacatacgtggcgagaccgcagggagcagcgctcgctctgcgtcctcccttcctcccatatcccaggtctcacctgctccgggccccgaaggtctcaggatgctgtggctgcacgcggacgccagccgccctaaggtgaccgtcagggaagatgctgccatggccgcagcctcggccggaaacggaaacgacgcgaaccgcgtgcgtaacgcacgggcccggcggggaacaccggtccgctgtaacaccggcccggcgcagaagcgggacgtcggcttctaggggcccaggccggcggcggcgatggcctcggcagctgtggagagcttcgtgaccaagcaactggacctgctggagcttgagagagacgcggaggtggaggagcgcaggtacgggaggccgccggcgccgctccctcgcggtcggtcccgcc

SEQ ID NO: 7754 - DNA, 2300 bp, Homo sapien
gaattggctccactcccaatcccgctcctcctacatccccctagggcagttaatgccacaacccttctctcagttacctgagacagatctttcaatcagcattcccctctctcctcccatctgtcactaagtcctatcaggcccctcccatttctacctggacttctctgcctctcatcctggctgccacagccccggttcaaatccacatcactgctcacctggactaaacagagcctctcaactaccttacctctggcctctccacgtccaatcaaaagcaggagacccaagaaatcctcctaaaatgcaaagctattcgcctccctcacctgcttaaccccgctgatggcccatccttcatacacagaacagaagactagctccttagccaggcccttcccaggctcgccctgccagtctgctcagcatcctcagaaagagccactgccatgggggctgactctgtccttggcaccacgctgagcacctgactgacaggggatcgtttcattctcagagcaagcctgtgaggtgggaatcatcccagttttacagatgaagtaagtaaggctcagagacagaacctgcaaagtcacacagccataaatgaaacagctgggattctaagaaactcaacataactgcaaaagctctccattgccatgatcaaaagcatctcagacaaatcctacccacatatggctgactgcaaactctggaagcagactgcctgacagcaaatcgggctacactgtgtcaccccggggcaagttacttaacccctctctgtctccatctccttagacggaaaatgacagtaacagaaacctacactgcggccgggcacggtggctcacgcctgtaatcccaacactttgggaggccaaggcgggcagaccacgaggtcaggagatcgagaccatcctggccaacatggtgaaaccctgtctctactaaaaatacaaaaaattagcaggacgtggtggcgcgcctgtagtcccagccactcaggaggctgaggcaggagaatcgcttgaacccgggagatggaagctgcagtaagccgagatcgtgccactgcactccagcctgggcgacagagagagactctgtctaaaaaaaaaaaaaagaaaaagaaaaaaaagaaacttacactgtagggttggcatgggatgaggtgtaaaagaattaacgcatggaaagtacgtaagtgttagctctgattgttttggacaagtaaatagtcccattcggaaacaagcccggctctcacatggctccccacacctctcaggacggctccccaccctactccgcacccaccagcttaactccaattttccttcaggcaccactccctccttgaagccaccatgaccctccccagggaagggccttcctcctccaggctctttccccgcgacacgcacgcagccggccctggacgcactggaggggaagggactctctgcttatgcccagcccgccgctggccggatcgggggcagccagtgcacctgactcatgctgccggggcctgactgagaatgggcgcaaaccatgtttactgaatgaataagggaaagggctgctaactcgctgcgggtggaactggggtcggggccagggcccaggagtgtaagcttagtggggggtctcgggtcgggaaatcaaagtgcttcttaagggtccccaaacggaacgcgctgcccaggaagtgatgagactgacaactcgggaggtggccaagcaggggacggacgatccctgcccctgactcgaagggtcggagacgaaattcccgccccagactatgaggccgagcccctcggagactctgcccgggacacggcgggaccgaccgcgagggagcggcgccggcggcctcccgtacctgcgctcctccacctccgcgtctctctcaagctccagcaggtccagttgcttggtcacgaagctctccacagctgccgaggccatcgccgccgccggcctgggcccctagaagccgacgtcccgcttctgcgccgggccggtgttacagcggaccggtgttccccgccgggcccgtgcgttacgcacgcggttcgcgtcgtttccgtttccggccgaggctgcggccatggcagcatcttccctgacggtcaccttagggcggctggcgtccgcgtgcagccacagcatcctgagaccttcggggcccggagcaggtgagacctgggatatgggaggaagggaggacgcagagcgagcgctgctccctgcggtctcgccacgtatgtgcctgggtccgacct

SEQ ID NO: 7755 - DNA, 2300 bp, Homo sapien
gaatgaaacacttctgagactcctgcatcctggccctcacttccaccgggggaagattgatttcttcagatttcggttgccttttgaaacacttctctgtttcactgtgggtgtgtagaagctatgaactcggaactttcgttgttttccgaggaccggaagaagatgtgcaagaaatcctgtcgagtagaatctcatcacaggggcgtgggcagcccaggagttggcgggtatgtagagagaggtgtcaaaaatagtaattgagagtgagctttgggaggaagatgttggaaataaagatggtggaagaaagaggagtgctgaggaaaggtgctctgaaagatcgtcctggtgggagacacatggggatctagagtggaaatgttacgggatctctggggtgttgatttttctggctggaaacctctgcggccgcagcacctttgcctcagttcttgtcctgcatccaggaagaatgaggtacgcagattagtgaagggtgaagaacagttttatttagtgttagaacagctcagagtagtgggtagctcctctctgtaggcaggtcatccgtcgagtgttcagctgtcagcagaggaggccctggagagggtggctcctctctgcaggcaagtcacttggacatctctgcaggtctctgaagctctcagcagagagcatagatcctctctgccctctccgtcctctggctgtcctctcgccttctctgactgagcccagggcttttatggacctcaagagggaaggaaggatgtgccaattggtccatgggtggccatgggcgggcctggaataggtaccatgagtcctcactctggtccacaggactggcagcccagctgccagccttcaggcccttcctggccttccactgtccccttccactcaggactctgtctgcctcccgctgccattcatggccctggggcttggctccaatcccactctgagatccgagtgggtgctgggagctgagagaggccaggcagtggaagcagacacccatgaccctgcagggatggtgtgggggttgtccttcctggggcgcctgagggtgcaggctgcagagtgggagggcagctacagctgcacccaagagctcccgacccaccacctcagaagaggccaggctcctgcttgttcccggctcctgcctgcttcgtggagcaggaagcccaggtctgcagccacagatctggcggctgcagctgcacgcggaaaggcagatcctacctgttcccggctcccctaagagcaccgggagacgcagatccacagctgcagtttgggcggctgtagccccgcccttctggagcaggaggcctgggtctgtagctgtgaccctgtgtctgggctgcagcggccactctacctcagaaggggcggggctcccactggcttcatggagtgtgcagccacagccagggttccctgctgcagccggcatgatggcagcagccactgccatcagaacctccctgggagcagggaggacaggcgtgggaggacgcttattcagtggcttcttccagggagaggttctcgagatgtccttaaaggaggtcttcatcctctggaaagcctttgggtggaggaagtttggaactgtgcccttgagcagggaccctgttgtgtaggagggagtaggatggtttcgggggaagacgttgggtggcgttccctgcagagagtaggatggttttgggggaagacgttgggtggcgttccctggagagagtaggatggttttgggggaagacgttgggtggtgttccctggagagagtaggatggtttcggggaaaacattgggtggcattccctggagacagtaggatggtttcggggaaaacattgggtggcgttccctggagagagtaggatggtttcgggggaagacgttgggtggcattccctggagagagtagaatggtttcgggggaagacgttgggtggcgttccctgcagagagtaggatggtttttgggggaggacgttgggtgacgttgcgctgagtgttttgggtttgcagttggtactgatcatcgcgtcctgtcctcattttgttggaattaaaaatacgttaatcacagaggtctggtaagtttccagagggaaggtctctgaagtggagctgggtactgccccagggttttggtggggttggtgagccgtagtggtgcagagggtgggctctggcaccaggtggcccgggcaggtcctggctctgcagctcacccgggcagctgtgggctggcagcctcctctgtctcacccttc

SEQ ID NO: 7756 - DNA, 2300 bp, Homo sapien
acatctctgcaggtctctgaagctctcagcagagagcatagatcctctctgccctctccgtcctctggctgtcctctcgccttctctgactgagcccagggcttttatggacctcaagagggaaggaaggatgtgccaattggtccatgggtggccatgggcgggcctggaataggtaccatgagtcctcactctggtccacaggactggcagcccagctgccagccttcaggcccttcctggccttccactgtccccttccactcaggactctgtctgcctcccgctgccattcatggccctggggcttggctccaatcccactctgagatccgagtgggtgctgggagctgagagaggccaggcagtggaagcagacacccatgaccctgcagggatggtgtgggggttgtccttcctggggcgcctgagggtgcaggctgcagagtgggagggcagctacagctgcacccaagagctcccgacccaccacctcagaagaggccaggctcctgcttgttcccggctcctgcctgcttcgtggagcaggaagcccaggtctgcagccacagatctggcggctgcagctgcacgcggaaaggcagatcctacctgttcccggctcccctaagagcaccgggagacgcagatccacagctgcagtttgggcggctgtagccccgcccttctggagcaggaggcctgggtctgtagctgtgaccctgtgtctgggctgcagcggccactctacctcagaaggggcggggctcccactggcttcatggagtgtgcagccacagccagggttccctgctgcagccggcatgatggcagcagccactgccatcagaacctccctgggagcagggaggacaggcgtgggaggacgcttattcagtggcttcttccagggagaggttctcgagatgtccttaaaggaggtcttcatcctctggaaagcctttgggtggaggaagtttggaactgtgcccttgagcagggaccctgttgtgtaggagggagtaggatggtttcgggggaagacgttgggtggcgttccctgcagagagtaggatggttttgggggaagacgttgggtggcgttccctggagagagtaggatggttttgggggaagacgttgggtggtgttccctggagagagtaggatggtttcggggaaaacattgggtggcattccctggagacagtaggatggtttcggggaaaacattgggtggcgttccctggagagagtaggatggtttcgggggaagacgttgggtggcattccctggagagagtagaatggtttcgggggaagacgttgggtggcgttccctgcagagagtaggatggtttttgggggaggacgttgggtgacgttgcgctgagtgttttgggtttgcagttggtactgatcatcgcgtcctgtcctcattttgttggaattaaaaatacgttaatcacagaggtctggtaagtttccagagggaaggtctctgaagtggagctgggtactgccccagggttttggtggggttggtgagccgtagtggtgcagagggtgggctctggcaccaggtggcccgggcaggtcctggctctgcagctcacccgggcagctgtgggctggcagcctcctctgtctcacccttcttacatgtaatatgggagtcataacagtagccacctcatgaggttgttataaggatgaagggagttaatccacatctggcacacccagcagtgcctggcgcctgggcagtgctcagccgctgcagccgttcttggtgggagtggacttgactgctcacagttggagcatgttggagtgtgttcgttccctgttatggctgtgacaaatgaccacaagcttagtggctgacaacaacagattttctgacctccagaaacgacaatctgggggtcagatgtccaaaatcagactcaccggcttaaaatcaaggtgtgggtggggttgcttcttctggaggatccaggggaaaacccatctcctggtcttttccggctcctagaggccactgcttgacttgttgccctttcctctgtctatgaagccagccgtgttacgtcttcaaatctctcccctcggtgaccttctctgactgaccctcgcatgcccccttataagacccttgggttatcacctgggtcatccagggtcgcctccccatcccaggatccttaacttcatctcagctgcagcgtccctgttgtcctgtaagggaacattcacgggccttggcgattggatgtaggtgcctttggggctgtgat

SEQ ID NO: 7757 - DNA, 2300 bp, Homo sapien
ataaaatgacatagcagaaagacatatttaaaaaaaaaaacaaaacaaaacactgtgttaatgttgtaggaactgagagacaaaccaatgacacagaatgaagaatgaaattaaaaacccagtcccatgtgtaaatgagaacttaataagtcaatagggaaaggacagactgtttaggagacagtgttaggaaagctgatccatactatggaggaaaaatcaagctcataaaaaatagattccagttggatccaagaacaaaatctgaatgggaaaaactataaaagtaatagaagaaaatagaaaagactacattttttatccagggagacagaatactttcagatttagaagacacaaaatttcagagaaaaaaattctgaagagttggctataccaaaatttaggatgtcttccaaccaaagttcacaatagataaagttgccataaaaaacagagcgttctcagagaaaagtatctgcaatgtctaaatccaggaaggcattaatacctagaaatacaagcaactcttgcaaatcagaaaggaaaagaaaagaaacccaattgaaaaatggacaacaggtgtgaacagacaatttgaagaaggggaactccaaatggctaacagatatatgaattgatgctcaaactcactgtaatcacagaaatgcaagttaaaacatctacagtatatcactttgcaaccatcaggttggcaaaagttagaaaaacaaataacaccaagtgttggtgagagaatgggaaaacgtaaacattcctattctgctggtacaggtgaaacctgaagcagccactcagaaaaagaattaccaggcaatatttagtgagactaaatgtgcatatgttctatgaccgagcaatcctcctccaagaatgtatcccagaaaaatattgagtcaagtccaatgggtacatgcatgaggatgtccaacacagtgttttggtgataatgggaattttgaagcaagctgaggatccacagtaaggaatggataacagatcaatgtgcatgatgacattttaaaccacaacttttgcatacagccacctggatatatcctacaaacatattgtcaagtgaaaaataaaaaacccatcattaattctaaatcacaacatttacgtaaatttaaaacacaatgggcaaccactccatcttgaaagatattgaggtgtccaaggatttgcgtgaaacaggttggatggatgcaagcggcaggaggaaaaaggcagctaagatgggatggggaaggaaacttgaataaatggagggtttttaatgggctgatgctcatggtgtgtcttaaactaaggagtgtagttaattctacactttgccctgaggtctaatttttttttttttttaagagacagcatctcgctctgtcttccaggctggggtgcagtggcgggaccatggctcactacaacctcaatgtgccaggctcaagcgatcctcccgccttggcctctcaagtaggtgggaccacaggtgtgtgccaccatgcctggctaattaaaaaaaaaaattgtagagatgagatcttgctatgtggcccaggctggtctcaaactcctggcctcaagcaaaccccaaagtgctggggttacaggcatgcaccaccacgcccagccctaaggtctattgtttttttaattaactcacagggtttgacaattacaggagaaaaaaaaaatgatttcaaatgtttctatcaaatagtttttctacatctattgataataatgatttttctataatagatgtagaaaaagcatttgataaaattcaatacctctccatgatttaaaaaataattcaaagcaagatagaagagaattttttaacctgataaagggtatttataacagctttgtagctataaaggtgaccctggaggcagatctgggctgagtgagtcacaggagtgggggaaggttaagcctcccggtcatggtctgttacataaagaacctggaggggagagctctgaagctggaaattcgaggggcacccaggggtcccccgtggtcccagcaacacagaatttcacattggtacatcttcctctcgtagggatgaaccagactttgaatagcagtgggaccgtggagtcagccctaaactattccagagggagcacagtgcacacggcctacctggtgctgagctccctggccatgttcacctgcctgtgcgggatggcaggcaacagcatggtgatctggctgctgggctttcgaatgcacaggaaccccttctgcatctatatcctcaa

SEQ ID NO: 7758 - DNA, 2300 bp, Homo sapien
ggtttcccagcaatcggtcccagaaggaggagcaggggaagagggatcattcctggcagggggaacctgctggaggaggagggctttggctgagccgcggtttgtaacatgctaaggcatctggcctttcccctacatgtgcctgggaggcaggacagcccggtcatcagcatcactgtcaccaccacttaccctgccagcccgcctacacccatcatctggtttggtcctcatgaccagctatgggccaggtatcctcatgcccctttgatgggcgctcctgggcttagagggtgaggtcacctgcccaaaggcacacccatagccacaccatgccctgcagccttgcagatttgtgtttcgagcagctgccgtagggagggactgctggcatagagaggggaagctgcacccaccctagggctgccaatgggaggcctggggtagggggtgaccctgctggaggctggtccaccttggccggccagacctcatgggtctgcctgccttgggtcctctggaattgatcccggtcccccaacctgagcttcaccccttggaggaagcttctccccgtgaagccctgtgccccttccccgcagagaagcatctattattattccctgctgtactgggggggtaaactgaggctgtgagcggagaagggccttgctgggcacagcccaggtcgcaggctgccgggcccctcctctcccaaggggagagctgggcatcctgctcagctcaactccccggaaattctttcctctgcgccgcgcgggtccgcccggcctcagccagccacgtgcccccgcccgccgcgcactcctcccgcccgggggcgggccgtactcctggcctccgcgcccaccattggctagaagaggtggccgtctgcgcgtgtggcccgccccctctttaaccctgggcctcccggagctggtggcgcaagtgtggccccaggggccgctcccaggacccttcccacccagtggcctggctcccctcggccccgcgctgccagaccgcgccgctctgcgccttcaaagggcgtttgtgagcacctgtgcctggcctacggctgactcagcctggggtcttcggggtgtcccagggtgggggcaccttgtgtgccggagtgagccagtgcattgtgatgtgtgtgcagtgggcttgcagatggctggtgctgcgacctgtatcttaagtctccctccttggactccagttgggccattgtcccgttgccacagacaggccgtaacttctccacgctctggggcctgtctgagctttcctgccctgcaaccccagacctatcacctgccctcatccttccgggcgcctggtaagagccccccaagctctctccattgcccctactctttttggtggcccttctggacacccaccacccctaggtctgggcccccagccttgtttccagagatgtcctgactcacaggagcctcatccattcaccctggccaggctagaccccagccacaccaactagtgccccaaaggcagtgggctgggctcccccctacgctgcaggtgggcatgcagtgggggcccccagctcccctctctaccatctgcgtccctccattatgtgggtgtccctgtgcatttgtccttgtcctgccagggacaacctgaaaagcgatttcacgcatgcacagaaagatctagaagccagcagaccccagatgggccatattaaaggacatgtgtgtgacacgtggatggggcgtgcgtgtcagtacatgtgtatgtgtgttcctctgggtgggatctgggctgctatgacagaactagtttccactgaagctgacccaaaaagctgccagcacagctcacacctgaccctcccctcggagcaagcccaagggtggcctggccacctgtcagcctcctgcagccttgcccgcaggaagctcctcctctcccttcactccatcccaccatgacccagccccgacgccgctggggctgtcccagcccctctccttagccgcttgtgccgccatcagaggggcctgtctcgctcccccagacacagagcctctgttttcctcactccgggtctggagtcccctgcttaacagcttggattgaagaggcttgtctggggggactgagaccttgcagatcattccaggagccgcctccatccaaggccaacagcttcatcaggccgcaggcctgggagaaggtgggactgcagttgcccaacatcctgtggctgcccacacggacaccccatgtgcaccccagggctgagagcagggggagcc

SEQ ID NO: 7759 - DNA, 2300 bp, Homo sapien
gggaggactcctgacggcaagtggtggctgtttagaaagtgaaggctggacgagcagggaccatgccccattctcagcatcagccagagccctgagccttgcagggagggcctggcaccagcgggacacctggagcagggagcggcgttgctgaggtgcatgaagagctctttctcccggctcctcccggcatccaatccctccttgctataaccctgtgggtcattatcttttcccatctgacagctgaggaaaccaaggtccccagtgggaaggaaactgtccacggtcacccaagcctggaggcagcacaggaactccttgcactgggcctctgggcaccaccccacacacacagcccaccactcccccagggggtggggagagacccccagggtggctgctacagactgcatgtttgtggccccaccccctgccctgctgccccactgccctgaattcatgtgttgacatctaatctcctgtgtgaggtggggtgtttgggagatgagcaggttatgagggtggggcctcataatggcattaatgcccgagtaaaagaggccccattgagctccttcgcctgcctgaaaggggtcaccacatggggactcagtgagaggctgggtcctcaccagacgctgaatctgtggaggccttgatcttggccttccagcccccggagccatgggaaacaaacgcctgctccgataagcccctggtctgcggtactgcaacagagcagccggacacaccaagcccacgggaaggggactccacaaactcaggccaggacgaccttcccgtttacaagcgcctctcgcttattttgagagaaacagatttccataccaaataaggcggtggacttcagagcctctgcccacttcacacaattccttttaagtgtccaaacgcaattacacttggaactcgccgggattcagcctcccccggcctccccatgtaaacaagcgttccagctgggccccagctggctgccctggagaggaggggacgggtcaccaccctgcctgctgcctccagcctctctctcagcctcaggcatggcccgtgagcctccaggatcccagagtccctcctcaccccatccctgaaaaacggaccccaggaggccagctgagccgcgcagggagcagtgcgagagtccctcttccacgctgaggttcgcacatggccaggacaagcaggaggcaggcagctcccagcgcaggtgcaggggcagctccgcttctcatttcccttcaagatgcccacagaggcacatctctcccagtctgggcactacactcctgcagggaaagttcagaattccctcgggcttcctggaccctgagaaagttggcccagggtaggaggggagccttctcatcaccccctcctcctggccaccctgctggctcccgcacccccgactctgcacccccacccctaccaatgctcagtgccccaggcatgaacgcgttccaggacccccccccaccgcccgcctccaggggctcaatggggaagggggacctgactcatcctcccgctgagcagcgcaggcaccaggcaccacagcccgccaatttccagcttgcttgccgagcgccgtgattttccacttgcgccatctgattgctattagggctggggaaaagggaattcctggttccataagcccccagggggcccaggccgagtccggggtgggaagggggaggggtgccgcttgggcggtgctgaccacctctgccagttctgcactgcccctccatggagccctcgccctgctgccccccactgctctgtatcagcccctgagtaaattaaaacaacggggtggggactagcccctcctgggccagcctgccccgaaatgcccactgggggcagaccaaagacgccaggcaagtgtacagccggtgctccctctcctgggcagccctgccgagcagcagaatgtgagggagatgaacagctggactcgggctgcagtgctcgggccaacgtgacgtcaccaggcggagagatgagttcccggtggggctctggggggggctcctgagcggggcattccttcctgaagcctcatccccgctcagccctgctcagcccctcctcctactcccctccccctccccctcctgccgggccaggaattgggtttggggcgggttctgcttccaaagccatctcttccagcaggagagggctctactctgagctcctattttccaaggctccgggccgcgctcggcgctggcctgctgccccggcgggtccgccggccggag

SEQ ID NO: 7760 - DNA, 2300 bp, Homo sapien
tgtatagcatcattaatatatttaatatcaatgagctgtacacttcaatatagttatgtgaactaaaaatatctgagacaggtctcgatctatttagtaagtttattttgccaaggttaaggagtgcctgggaggcaggtctatgccttccttcaaggatgatttgtaggacttcaatatttaaaggggaaactggccaggtgctgtggcggaggttgctgagtgacctgagatcgcaccactgcactctagcctgggcaacgaagcaagactctgtctcaaaaaaaaaaaaaaaaaaaaaaaagggaaagggtggatattgggaaagagggagaaattttaaaaatatgtggagagataagagacaaaggttgcattcttgtgagtctttgatcagactttcactgaaatacacaatttacaggttgcgggggtagaggaatagtcacttatgccttagtctggctcggtgaatctgcacttttataccagaggaagcaatcaggtgagcagagggatgacttagagttccatcctttgtttggaacctgtgaagatcagttgtcaatgtacattgttagggtaaaattcaacaaaactgttttagggtaaagatcttgggtgcccacgaaaaatttcctagcgggcaaattgtgagggaggtatgtagctttttaaatcttcgtagctattttattaaagaagaaaaggcgaggcagtttgcccaacgcagttcccagcttgacttttccctttggcttagtgattttggagtcctgagatttattttcctttcacagttatgatggtaaattttatatttattttaaaccctcccccctccccaaaagagggggaaaaagtaaagaggtatggcagaaggggaagtcacagagattggaagcgtcttgcagcacctttttttttgagatggagtctcgctctgttgccaggctggagtgcagtggcgcaatctcagctcactgcaatttccgcctcccgggttcaagcgattcccctgcctcagcctccgagtagctgggactatagacacgtgccaccacgtctggctaactttttgtatttcagtagagacggggcttcaccatgttggccaggatggtctcgatctcctgacctcgtgatccacctgcctcggtctcccaaagggctgggattacaggcgtcttgctgcatctcgaagcgtcttcagcgtgctcttgcttgctggctctgatgatggaggtgttcaagccatcgtggaaggaatgcagtggcctctaggagtgagaatgacaccagccaacatccagcaagaagacgtggacttcagtcctaggcccatggagacaattctgttaacatcctggatgagcctggaagtgggctttccccagagtctgcagataagagcccacggcagctgacattttgactctagcctcgtgaggccctgagacaggaggtttcctgccccgcaggactgaaagatgatgaatgggagttattttatattttcagattgtggtaattagtcactgtagcaatagaaaacgaatacaaggtctttatgcattaatgttgaaaacactttttatatacgttgtaaatattttttaagtgtgtcatatgtttttaaacttttcccttaatgatattgaatcctcctaatttcaccatcagagggtaaactccagttccattctggggggagtcctttgcagtcaccccgtgtactcaatactcacatgcatcagaatcaccccgaatgcttgttaaaacacagattcctgggtcctccccgcagagttgctgatttagtaggtttaagggcccaagaatttgcatttctaaaatgtttccaggtgatgctgaagcttctggccggaaagacatcctttgagaacatatttcctccccagccctcggcccttaagccccagaacgctgccccgccctgggtggaacgaagctgagctccaccctagaggggcggggccctttagctccgccccactcaggagaaccccacccctccctccccgttctcattggctgggactgcagggatcccctgcgccacagtgccgtgcgcgcgtcagcaaaaacgccagggacggggtctccgcgcctgcgcagtgaagctgggcgccttcggggcttgagcttctgagggtcgggtccagcgcgtgggctgctggatggcggaaccccaggcggagtcggagcccctgctgggcggggcccgcggcggtggcggcgactggccggcggggctgaccacttaccgcagcatccaa

SEQ ID NO: 7761 - DNA, 2300 bp, Homo sapien
cctccctggtaactggcctggagcccagcgctcaatgagctgcacatggaacagaaccgagagctcaactagctgcagagaagctgagttaagcctgtgtctgttgatggccacttggccactggattcaaggcaggatgtgctggcaccttgggactgccctcaccatcagtcctgccttgcccagagggctgggccaggagaagccggccagtgcaggggccagccagaaagcatgtcctggggaatggctgaagaaactaaggatatgtacccaaagaagagaagacctgggagaagattctatctacccagaaatggtggttgagcacctactgtgttccaggtactgttctcaaatgagcaagacagagagcaagacagacagatggcctgcccttgtgggcttgcattctagacaataaataaaaacagaaccagacaatccaattaataaaaaatagaaccagacaatataataaataaaaaatagaactagataatccaattaaaaatagaaccagacaatccaataaatagatacataaagcaacatcagctggtactaagttctataatgaaaaataaaggcaggctagcagaagaatagagagtgctgagccaggccaggttggcagggttgagggggtggtttggtgtcaaggaaggcatttcccagcagatgacacttgggcagacacttgaaggaaaagagtaagccatcatctgggtatgtaagtggtttgctaaccctgccctgcctgtgcacatgccaaagggaactacatttcccagagtcctttgccctctggcttctgggtacgttcagcaaatgggaggctccagggtaagagtggaggctgggaggaagcagaatctcagctactttctcccctctctccctgctccctgtggcagccccagcaggttggtgtgggacacaataccaccatgatgcaaatgctctaaggtgaagcaaggttccatttctcctcaactgacttctctctccttcctgaccttgggactcctttttcctcaactccatcttcctttgctccattggctcataagtgagaaggagctgattggctgactgggggagccaaagattcccaacaggcatttgcctaagcgtctgcccttaaaatcactcaagcatctgatgtgttcatcttcttcttttccaaacctgacatctcattaaaaaaaaacaaaaaaaacacaacaaaatgatgccaccacgtgactgtatggtcaacagcctagttgaagaatctcagacctccctgagatgcacgccagccccagagatgggcagtagactcatctctcctccaatcagaaccatggtgcacccagtgcatttgggggacccatttggacagtccagggctgtgtgtgctgtagagatgggggcaacactccccatccctgtcgtggctaattttatgtgtcaacatgtgatatggttcggctctgtgtccccaccttaatctcaccttcaattgtgataatccccatatgtcatgggagggacctggtgggaggtaattgaatcatgggggcaggcttttcccatgttggtctcatgatagtgaataagtctcacaagatctgatggttttacaaaggggaatgcccctgcacatgctccctcttgcctgccgccatgcaagatgtgactttgctcctcctttgccttctgccatgataatgaggcctctccagccacgtgcaactgtaagtccatcaaacctctttttctttatacattacccagtcttgggtactgtctttattagcagcatgaacatagactaatgcaacctggatgggacacagggtgcccagatatttggtcaagcatgattccaggtgtttctgcgagggtgttttggatgagatgaacatttaaactgaaggatgttcagtaaagcaatgtgccctccctaatgtgggtgggccttacccaatcagtggaaggcctgattagaacccaaatgcaagagagaattctgctgcagaaggccttcaggctccatctgtgaggtcagctccacctgcttctaccacagacagccttcagactagaaccatggcatcggttctcctcactctccagcctgttggctcatcctgtggattttggacttgccagttccaacatggttcaagccaattccttatcacaaatctctgtctgtatatcagcacatcctgtgggttcagcttctcttgagaacactgaccaatccaatcaccgttactcccgatgacttgtaggtgaagccccttaa

SEQ ID NO: 7762 - DNA, 2300 bp, Homo sapien
catcatgatttaacaggtgggctggcaatctgaatgttgaagacagagggagaaaatcaacctggggcagtcagatttctacagtcctccccagcaggacccaggtgggctactgggagtcccagaagcagatatcagcccaaaagatgagctttgataattagagtgaggctatggtgagactgagtgacactgcggggtgccaaaataatctagggttgttggaatgctgacagcagacaaaagtaagataaggtatctcctgacaccacctccttccatctgctctcagacggggctctttggagaggatctgccaggaagaactgaggtcttatgccacctccacctctacgtaacctcaaacaggcgtcatcttgtctcctggcctcagtttcctcatctgtaaaacggggacacatcaggatctgccctcagcaagttgctgagtgcctgccctgagcagccggtaggtggcgctgatgggctggtggttgggttgggggaggctcgcatagggtctctggaggtcccagtagggcactggggagacctcccctgattccctggaggcagagcagagctcttgtctttgcaggagctgcagattctgccttgggtatcttagaagctttgtacaggcatctccagctcagtgggaaccaaatgccatcctatctccccacctcactggtgtcaccatcttcctgggagctgtctggataaccctctccctggccctcacctttaatttgtccctgagtcccatcagggtcaccctccatcccactgccatcttcctgggagctgtctggataaccctctccctggccctcacctttaatttgtccctgagtcctatcaatcagggtcaccctccatcccaccaccatctcccacctgagtgagaatgggaacctcctctcccactccctccaattcccctccactacagctgggggaggcttctaaaatgccaaatatagcccagtttctgcaacttgcagggtccccagccctcgggagaaagtccaaacccctgacaaagcctgtgaagccccctgaggccctgtgggtctggggctagctctgggctgcagccctgtctctggtcatagtccagcatccaccacggtccaggtgcactgagctgccggccctctctcccctccgctggctccttcctcctgactgcccgtctttccctggcctctctatgcttcccgctggcattgacgacagtgtcctggagagctgggcagggagggctgccttgggttcctactgtgtgctccacctagtgctggtcttggcccttagcaagtgctcagtacacccgtgtggaattgggcggtgagggtaaagggaggaggagggaagggccaagagctccctgtgctcaatgaagagagggacttgagcaagtactcatttttagtacttcccaagatgtgtacaagaggcctggggccagcagaactccttgcccctgcccatccccctccagtctatggggtccacccccagctgcccagctgtgaggcctccatggctcagctcctcatctattaagtgaggacagcagtcgtccccctcacagcgaggccacgtgggttacataactttttcttagggtgcctggcctgcaagaaacccctaagaatgttctatattcctaggcccactgttattcttaatattacccaggaaagggtggtgaagcgagtaaataaatgaataggtgaatgaataaatgaatgaatgaatggcaccctagccccactgtcttctgggtggcttcaggatccttgaggaggttggccgtgtaggttcccctcaggtaggacctaggtgagctggggagtcttaactcacccagggcaggccttaaggttgggcacacccatgtgtgggctctgccctggccttaaccgagagagggaaatgttgacggggaagaaagccctgcccaccaggcagccccacccacctgggctagccccactcacaagcagccccacccacctgggttagtcccacccaccaggcagctccgcctaccttggctatccccctctgagttcttgccttgattctcctgttactgtcccgcgaacccacatccctacaaagcaggaaagtatgcttgggagaggccaagtgagtggggaatcagcccaaagccaggcgtccagggtctccctcacctgaagctgactttttccccaccttggacagagggcgggagatgccatccccactgaacccagtgctttcaccagccatattagctcccactc

SEQ ID NO: 7763 - DNA, 2300 bp, Homo sapien
tcctcctgcctcggcctcccaaagtgctgggattaaaggcgtgagacactgcacccggccaaaggtcttgttattattatctttttgaaggctatttaacaacacagggctgggcttatgataagacatttaacgaaccaaatatcatacgagatagacagatagattaataggttacctctgtgtggagtaacaggccatttcaatttttaaatgatcctctggctggcagcagagctggggagcgcaaggcggtgctcattaatagcagttggggccgggcgcggtggctcacgcctgtaatcccagcactttgggaggctgaggtgggcggatcacgaggtcaggagattgagaccatcctggctaacacggtgaaaccccgtctctactaaaatacaaaaaattagctgggcgtggtggcaggcgcctgtagtcccagctactctactcgggaggctgaggcaggagaatggcatgaacccaggaggtggagcttgcagtgagccgagatctcgccactgcactccagcctgggtgacagagcaagactccatctcaaaaaaaaaaaaaaaaaaaaaatagttggctgactgaatgaatgactgaatgaatgaacgagtactttgctgtacttcctggatttcctacactgaagtgtagtaaagaaaaaagatttttaatataaagaagaaggcactccccgaactcatcaataaccctgtgtgcaatgttaagggcccatcctcttgctttcctcagaaacacagaggcacctcccataggaatcaacgtgtaaaatttgcaaaccctttaatccagaaatcctccctccaggaacttagcccacagcgctattcgcatgcgtgttaaaggacacgtgtccaaggtggctccgtacagagtcgctgataagaggagaactgggaacagcactcacgtccatcaacatgagaatggtccctaaaatgatgatgcaaccatgcaggggatgctgccaggcaatggagattatgccctgctttctgtttttattgacatgcaaagatgacctcgctgtaccaatctgtgagcaaaacaggtttcaggaaagcaggtctagaacaatcccattttttaagcagccaatgtatatctccatgtgtctctaggcatgggcagctgcccacggggtcacctctagccctccaagtagtgttgggtggtgatggccgtgttctcccctgcacacatggcatgggttgccagcttggtcgtacccattgcaccactctactggcctcacccctgcccagtagagaccagcagctccttccacagagacagcatgaggcccagagagggagtgtgtgactccaagtcagatttcccaatacctgcatgctcttacctcggccctaaggcaggcccagaggtgatgtgaggattcacaaccagacactggaacactgagatattttttaaaaatgtgtttgggccgggcgtggcagctcaaacctgtaattccagcactttgggaggccgaggcaggtagatcacctgaggtcaagagttcaagaccagcctggccaacctggcaaaaccccgtctctactaaaaaatacaaaaattagctgggcatggtggtgggcatctgtaatcccagctactaaggaggctgaggcaggagaatcgcttgaacctaggaggcggaggctgcagtgagccgagatgtcaccactgtactccagcctgggtgacagaaagactccatctcaaaaaaaaaaaaaaaaaaatgtgtttggtatggtttcatttggctgtgtccctacccaaatctcatcttgaattgtagctcccataattcccatgtgtcatgggaggtacctggtgggaggcaatcgaatcatggaggcaggtctttcctgtgctgtttttgtgatagtgagtaaatctcacaagatccaatgattttataaaggggagtgggagtttccctgcacgcactctcttgtctgctgccatgtaagatgtgcttttgctcctccttgccttccaccatgatggtgaggcctctgcagccacgtgcaactgtgagtccattaaacctccttcctttataaattacccagtatcaggtattgtctttattagcagcgtgagaacagactaatacagtacactacaatttagacttctagtgactatacctggagccccctgttctccacctctctctcacaggtacacacacaaccatccacttattgaagaggatgagcaagggcacagcctcaagcccactgcctgtgtttgaattc

SEQ ID NO: 7764 - DNA, 2300 bp, Homo sapien
ccccattggcaggaccctgccagtggcctgccgtgtgtctctgtgtcctgggtctctcagtggtgtggcagtcctcggctggatggcatccaaagtcctttccatttccaaccaggttgaacagcgtaggtggcttcctttgagttgagtcgcctggccagggtaagacagcggtgagggcccagccaggtcccatctgtaagtcggaagcaggtgggagggtgaaattcctggcccagccctggggtgagtctccttacggatgcaccaaatggaacaagccatgagaactgccatgcaatggttggggtccttcggggagaactgccgtaaacacctgcttgggatctaaagcagactgtgggtctcgggtgaacagaaggcatgcctctcactctgcctcgagcatgtgcaagcttcaggatcttcacagtgacactagggacggggacctttggaatagtattatgagacctgaaaaaaataacatgtgggtgtcagacccatgccagggctgagtggatcattagataatcattatcatcatttttgtcattgttatctccatcctggcaactccaactggatgctcttattattaatattattttgcattgagtattaattattaatattattaactgactaatattaattatgtaaacattattatgcattgttaatattattaatattcatatttattattaatattattttgcaaggacaaatgataattgtatattaatattattttgcattgacaaatggtgattgtatgttaatattattttgcattgacaagtagtaattgtatattaacattattttgcactgacaaatggtaattgtatatttatgtgatgcgttgatacctgtgagcaaggagatggatatgttaatagcttgattgaatcattccctattgtatgtgtttatcaaaacattacactgcaccccactggacccttgaatctcatcatctgatggtgggcttcgttcaggccaacagagaagagtggggtggctgcttctggaagcctttcttctgatgattgtagggggaattctcctagcagccctctttctcattcttagaatatgtctgagttctgaaagcaatgtggcaaggctgaggagaatcctttgagggcccaactgtcctgacttcaaggtcctaacacctccttagagttgacttaagtacacacaaagatctgtgcacagatgtgtgtagagtctgtattcttaaataccccagactagaaacaacccaaatgtctttcagctgaggaatgatgaacaaactgtggtacatccattcagtggaatactactgagccatgaaaaagaacaagccaaatggatggtccaaaatgcatcgtgctaagaagccgactcaaagtctgcacactgtatgattccatttatgtgatgttctggaaaaggcaagactgtaggggcaggaaacgggttctgtgtttcccaggagcaggaggagggggagcagagtgagaagttttttgtgctgatgaggctgtcctggatctcagttgtggcaaagggatcaaacacagctgtgtttgtcaaactcacataactgtacactttaaaagggtgaattttattgcatgcaaatcttaccctaataaaaatgtttaaaataataacatcatatgaatttgttgacaaaaaaaaaggtgcatgtaaaaaacatttgtctttatcttaggggttttggttgcaagtaacagaagccctaacccttctgcaaaactgggaacatgctggcttatgtaacaagagaacccagctgtaaaccttaggcaccacacgactgagaaggtgacaatgatggcatgacaacaccatctctgtgcatctgctgtctctatgctgacttcactttcaggccaacgcgagggacttttgtgattctgatgggaagaaagagtctatgttcagacccactctggccgaaatcccaggtagaactctcattggtctagcttgggtcatgtggccatccctgggccaatcagagggaagaatattttttcctgttagaaagggatgagctcgcaagtcatgggaagactcacaggaagctgaaatgcatattgctagatagaagaaccaatccgaaaaggctactttctctatgattccaactacgtgactttctggaaaaggcaaaactatggagatggtaaaaaggtcagtggttgccaggggttagcggggagggagggatggacaggaggagcacaggatgcttagggcagtgaaactcttctgta

SEQ ID NO: 7765 - DNA, 2300 bp, Homo sapien
cctggacggctctttacgctcgctaaccgggcttgcaattttgcgctcgtccctgagccgggaaatcaacgaagttcctagtcgagatctgcccggtccgcctagtaacagcgccgcgcccccattggctcatgctaattccagtttcctctgtcttgcgcccgggatgggggggtgaagctccctcctggacccagagccggttgtgccggagtgggcgagcctctttatgccctgctgcccctagccgacttcggcccgcttcgcgcctcgggctgggccagggcgcacgcggggctcggggcccctcgccccacgggatgggagaggccgggtgatagctccgggccccataaatcatccaggcggccgccgggtcgggattttatgaatgaaaaagcagctgggccgcccttgtgcgcgggctgatgctctgaggcttggctatgcgggggccaacgcgattgtgggtgctcggggagtgggggggggcacgaccgtaggtgctccctgctggggcaacccatcgctccccatgcggaatccgggggtaattacccccccaggacccggaatattagtaatcctaattcccggcgggggagggggcgcgggaggaattcaccctgaaaggtgggggtggggggggtcgcatcttgctgtgagcaccctggcgaaggggagagggctttttctatcagttttctttgagcttttactgttaagagggtacggtggtttgatgacactgaactatattcaaaaggaagtaaatgaacagttttcttaatttggggcaggtactgtaaaaataaaaacaaaagttaagacagtaaaatgtccttttattttttaatgcaccaaagagacagaacctgtaattttaaaaactgtgtattttaatttacatctgcttaagtttgcgataatattggggaccctctcatgtaaccacgaacacctatcgattttgctaaaaatcagatcagtacactcgtttgtttaattgataattgttctgaattatgccggctcctgccagccccctcacgctcacgaattcagtcccagggcaaattctaaaggtgaagggacgtctacacccccaacaaaaccaattaggaaccttcggtggtcttgtcccaggcagaggggactaatatttccagcaatttaatttcttttttaattaaaaaaaatgagtcagaatggagatcactgtttctcagctttccattcagaggtgtgtttctcccggttaaattgccggcacgggaagggagggggtgcagttggggacccccgcaaggaccgactggtcaaggtaggaaggcagcccgaagagtctccaggctagaaggacaagatgaaggaaatgctggccaccatcttgggctgctgctggaattttcgggcatttattttattttattttttgagcgagcgcatgctaagctgaaatccctttaacttttagggttacccccttgggcatttgcaacgacgcccctgtgcgccggaatgaaacttgcacaggggttgtgtgcccggtcctccccgtccttgcatgctaaattagttcttgcaatttacacgtgttaatgaaaatgaaagaagatgcagtcgctgagattctttggccgtctgtccgcccgtgggtgccctcgtggcgttcttggaaatgcgcccattctgccggcttggatatggggtgtcgccgcgccccagtcaccccttctcgtggtctccccaggctgcgtgtggcctgccggccttcctagttgtcccctactgcagagccacctccacctcaccccctaaatcccgggggacccactcgaggcggacggggccccctgcacccctcttccctggcggggagaaaggctgcagcggggcgatttgcatttctatgaaaaccggactacaggggcaactccgccgcagggcaggcgcggcgcctcagggatggcttttgggctctgcccctcgctgctcccggcgtttggcgcccgcgccccctccccctgcgcccgcccccgcccccctcccgctcccattctctgccgggctttgatctttgcttaacaacagtaacgtcacacggactacaggggagttttgttgaagttgcaaagtcctggagcctccagagggctgtcggcgcagtagcagcgagcagcagagtccgcacgctccggcgaggggcagaagagcgcgagggagcgcggggcagcagaagcgagagccgagcgcggacccagccaggacccacagccctccccagctgcccaggaaga

SEQ ID NO: 7766 - DNA, 2300 bp, Homo sapien
cgtgaatccgggaggcagagcttgcagtgagccgagagcaggccactgcactccagcctgggcgagagtgagactccgtctcaaaaaaaaaaaaagaaaacacacacaagctgtaatagttaagtgtctttgaaaaccaaatgacacagtgcccatatcaaactgacttaatgaaggacaatgattggcttctggaacaaaagggggatgacttcaggagaggcttgatccagcagtttgtctggagacccattccctgctttccctcagggctggccttacgctcagcctcccctgtgaggtcctgggagcagctcagtcttcccttagggctgcaggggggcagtgccacccctgggcttgtgtttccctgctgggaatcctaaggaagggggaagcattatctttttcagaagctccagaaaatgtctcctcaagactcaatggctctatttgatttctcacccatccattaacttgctgctcttctggtgggtgtggatgtgcagttgggtttcagcctatgaagacctggcctggagctggggatgggttcggtcccactcaaaccacagatctgggaatggtggttccctggagcaaagtctgggtgctgtcaacaccaggagggggcatccgtggtgtcaagaagacccagaactgtctacttaatgtgccaaaggagggaagtaagatcggctttggtgccaccacccaggcggccgccgtggcatggaggcctgtgcttccagacctgggcagtgcatggaatgctgatggtgattatgcggatgcgccgaggggatgatggcgttccctgagtgatcactgcaccccaagctcggtgctcagcagtgcttcacacacattgagccatagaatcctcagcaccccagaaagaattcagttattgacagagatttatggagcccccgttctgtgctggtcgttgtcgtgagtaggagatggagacgactccccatcatgggctgtgttcttgcaggatttccccatgttataggtgtgaacattgaggcccagagaaatgaggccgcacagctggaaagctgcagatccgagatccaaccccagggccttttactccaaaacgtgtgtgcttaatgtgtgcctatacatgccggtgagttttctttttaaacagctggtcaccctcagatgtccactgccggcctgtttggctgcccttctccaggccagcagccaagacacagtgccgcccgcaggggcaacctactgggagcctcgaaacaggtggagctggcgaagcagggccctgagctgtgtgcgtggggcctggctgcaaatggcccaatgaagcctccgtgcatttccctttttgaagcttgagccttttcttctccatgaggctgacccaccaggctggcttggtcacacactagctgtgcagtcctggctcagttactttacctctctgggcctcggtttactcatctacaacaggggtcggcaaactaccaccctcagcctgaatccagtctgctgcctatttttgtaaataaagctttattggcacacagccatgctcactcattcacagagcggctgcagctgcttttgcacagggcaagagaacctgtggcccacaaagcctgaagcctctctctgtggccctttccagaaaacctgccaatccctgacctagcagatgggatgattgtgtgcgggagagtgtaggctctgggagggcagggctgtgtctgtggctgccaccagagtgtcccctccctgtcaccaacccatggggtcgttgcaaaactcagagagaaactgtgttcggtgttgagcacaaggcacacagtgcgtgctcagtaacctccagctgcgattcctcccgtgattaaacaaaggcaaggaggactgcctcgacaggctcagagggcccagggtctggaataggagctgatcctcgggttagaccactcagctcttaaagtggctgccggttgagaggcttgtctcagctgccgctaggtgcaaattaaaaggattaatggacaccgccgtctttgaaaggctcaaggcccaccgaagccccttcagcagagggctctgcattctctcttccccagccctccttgtgtgccctcgtgagtggcggtgacaatgctcccggatgtgggccccaaggccagcggccccagagctgcccgcccacccgtccgcctgctattgtctgctcaggcctggcggtgtggcgctgggcttgtggggccctggcgggcaggggactgtgggaacggattagaggtcctgggctt

SEQ ID NO: 7767 - DNA, 2300 bp, Homo sapien
aggaccccagggcggggcttcagtcgaggccggccccgcccaccgctgcagccgcgcatgcgccatgtacaggctgctttgggccctcccgcgtgccgttcttacccggcctgccccgcgccgccgcttccggaagtgggtctcgtctcctcccaagcggagcatttgtgcctgaagctgccgggtctgctacggcaccgcggggctgcagaaacccgggggccaagggcgggctgcttgccgctatggctggcagtcaggacatattcgatgccatcgtgatggcggatgagaggtgggtggtgaggccgggcccgcaccccgccctgtctggtcgtctcccagcggcttcgccgccggctgcggcccagggcggctgctggagcctggcgtcccttgggcgtgcgcattggggagcgcctggtggccgtggacgcagggacaagtgtgggcctgatgctctggtcctcttctcctggcccgctccggcggggcacgtgcccagctgctcttccagacccgccttccctgtcagggctgccccaaacatctgctcagcctggtggttcccctcctccgaggccgcctcgtcctctgggaggacagacctttgccatctgggagctgcctttttttctggttccttaatcataggacatacggcagtattcatggatgtgctgatagatgtacccgaccacaccccttttccctccagagcccctggggagcccctcgtgctgcgacagtgggggagctgtgagttgcctcctggctgacttccagtgcccggcccagaggacgcgtccatagatgttagttaagaaagcggccgaacatttagcagtcaggcgctgacgtttatttagctcgcgctgtgagtcagacactgagctaaacgttccaccctggttatctacttcagccctacttagtaagtggatcctattattcttcggaatttacagactaggaggcacagtcactttccagggtcacacaactattaagtggggagctatgcaccctgcttcatggggcgctgcagcccactccttgcatgtttggtgactgcaggttaagatagtggcagttccactgttgggcctcagggtcagtgctactccgggtaccagtcggagaacattttgtggtgatctgatgccatttctctctgttgccctacccatgtgatgtcaaaccctgtgtatgttgcagttttttggaagcggttgacttgggctagtgctacttgaacactcacagaactttggccccctaactctggctgcaaaccagacttatctaggagactttgaaaagtagattccgggccagatgcggtggctgacgcctgtaatcccagcactttgggaggccgaggcgggcggatcacgaggtcaggagatccagaccatcctagctaacatggtgaaaccccgtctctactaaaaatacaaaaaattagccggatgtggtggtgggcgcctgtagtctcagctacttgggaggctgaggcaggagagcgtgaacccgggaagcagagcttgcagtgagccgagatcgcaccactgcactccagcctgggcgacaaagcgagactccatctcaagaaaagaaaagtggattgcaggccaggtgcggtggccctcacttgtaatcccaacacttggagcggccaaagctggaggatcgcttgagcccaggagtttgaggctatagtgagctgtgatcataccactgcactccaggcagggcaacagagaccctgtctcaaaaaaaaaaaaaaaaaaaaggaagaaagaaaagtagattccagggccttgctccagacgtactgaatctctgggggtgaggcttttgagttaatatctttgaattttccttgtgtgtttctagtaccctatcaggtttgggaatccctaatttagccctttgttgtagatgaagaaactgggctacaagaggtacagtgacttccagaggcaaataggaagtggtagatctgggactggaatctgtgtcttctgacttgaattttaggcttttcctcctttactctggtttgtcttactgggtccgggtaatacaagagagagaagtttttctggagaaagtattctttctcctgttgatttgatgaagcatgcttcttcttcacaggtttcatggggaagggtatcgggaaggctatgaagaaggcagtagtttgggtgtgatggagggaaggcagcatggcacgctgcatggagccaaaatcgggtctgaggtaagtgggaacccccatctggagatgaagc

SEQ ID NO: 7768 - DNA, 2300 bp, Homo sapien
agtagcgcgatctcggctcattgcaagctccacttcccaggttcatgccattctcctgcctcagcctcccaagtagctgggactacaggtacacgtcaccatgccccactaattttttttttttgtattttttggtagagacggggtttcaccatgttagccaggatggtctcgatctcctgacctcatgatccgcccgcctcggcctcccaaagtgctgggattacaggcaaaatgtgctttattcatttatttatttagagatggagttttgctcttgttgcccaggctggggtgcaatggtgtgatctcggctcactgcaacctctgtctcctgggttctcctgcctcagcctcccgagtagctgggcttacaggcatgcaccaccacgccaggctaattttgtagttttagtacagacggggtttctccatgttggtcaggctggtctcgaactccctaactctggttatccacctgcctgggcctcccaaagtgctgggattacaggcgtgagccaccgtgcccagccaatgtgcttaatttttttaagttaactctttaactcatctggaattattttgatgaatggtgtgaggcataaatggaaccaagcttttcccaaacaaccaattttccattatagttattagttaatatttcctttctccaattaatttgtaattcttctttttaccacatgagaaggctttacatctatgagagtccattgtctgggccatttactttatttcactggtctgccacttcttgaaccaacataccacaatatttatattgacactttatcttttcatatctgatatgaaaatcatttttttctaaaacatcttagttatttttattagtttattcatacggatgaaaaagtttaggattttgacacattttaccagatctcatggaattttctttggtactgcacttgttcagttccccaatcctcaatcatggtagagctgtagttttccttatatgggtcctgctcaaattgttagaaattcttatttctaagaaatgtattatgactatcataaggcgattttcccatcaccacccctgctcaggttactaccaattattgttggaataacagaaagtgtttttttccctattcatcatacacatagctacttgctgcgattatggattctgagaacgtcttaggtgactatttgggttttccacgtgggccatcatatctgcaaatagtagtatttctgcctttttttttttttttttttttttttggtatttccacttcttgcttcatgttttactgcattggccagggctggtagaaagatgttcagtggtcacgtgaggttttactactgactttattaggaatgcttctggtgtttctcatctgagttccgttgtcgcttagactttgaaatccctttttaaaaatcgtgttcagaaagcacatctcatggaaatgacaaatatgagaactaaaaccgacaaatttctgcccaaaatcccacatgcagagcctcctggcctggagcctcctgaggcgtcggttctttgatgacttcccatttcttttccctttttttttttttttttgacggagtctggctctgtcgccagtctggagtgcagtggtgcgatctcggctcactgcaacctccgcctcccagcttccagtgattctcctgcctcagcctcccgagtagctgggattacaggcgcctgccaccatgcccggctaatttttgtattttcagtaaagacgaggtttcaccatgttggccaggctggtctcgaactcccgaactcaggtgatccgcgcgcctcggcctcccaaagtgctgggatgacaggcgtgagccaccgcgccagctgatgacttcccatttcttccttggttctttcggagccactttgggaaattcggttctatctgcagtggtaaaatacaggtcggctctccacgcgcgcggccaatggacgctcccagcgcggacagacaggccctttgctggagctgggcagggcgaaaggaccccagggcggggcttcagtcgaggccggccccgcccaccgctgcagccgcgcatgcgccatgtacaggctgctttgggccctcccgcgtgccgttcttacccggcctgccccgcgccgccgcttccggaagtgggtctcgtctcctcccaagcggagcatttgtgcctgaagctgccgggtctgctacggcaccgcggggctgcagaaacccgggggccaagggcgggctgcttgccgctatggctggcagtcaggacatatt

SEQ ID NO: 7769 - DNA, 2300 bp, Homo sapien
cgcagcacagcctggatttacgagccccactgtttgggttcaaattccaacttcaccactaacagagtgtgcgaccttgggttactcggccacttttctggggccatttccctcctgctccatgggggagggaggaatagaatactgtgggggctcttgtggagatttgagctgagaacctccatgaagcgctcagaacaggggctgggggacagcagccgccttcctcatttccccacctccctgatcgcatcagccactctcttccccatgtccctggaaggggctgcagaggggtaggggtggaaccagaggctgccatcgcccccacccggtttgggtcgtgtcccccagtgcagcctctgccatcgccctcaagagcatttatcacgcatttaccacggatctttaaaacgaaagctgcaggggagggtaattaagtttaataggagccgccgtcgatttaaagccacaggggggaagtaattagatttaacagaagccacggctttctgaaccaagacacacagcgtgggggtccctggtctagaaagccttcgggatgatgtctttttgtaaagactttcctggtgacatttgctgcgccctcagtcattaacgccagtcactgactggggaatgaatgtggcctctgctcattgaaattcattaggcctggcatttctctcgctgtctctcctgtttgccctccccatcgcctttgcgctgggccaggagggctctgcccccaaaaccagcctcctggggccccacatccaggagctgggggtttggaagaataacaagaaataattagagttaaaccaaagccccgtaggaggacccctttattccccgcctgggtattctctggatgtcgttttctttattggcaggaaccgcttcatggagcggcccccatttctttcctcacctggcacctgcccggacgccaggggcgcccatcaccgttcctgggccccttcccgacccctccccaccaggtaaggcgctctcgacctccccgaccgtgctgttcctcctgaccccgtgcgcagggactcggggactcaaaaaccagacccccgacacaagacagctcaaaaaacgggaaacggaggcccaggcctccctccctgcgcccctgcctccaccaccctccagccgagaagctggggttcaccaatcccgcagctggcccgcccaccctgcccgagagcctccttcccagtgccccctttcaggttgcatctcgcgcacagccgcggggccggggcgagcgcggagcaggcaggggcgcggggccaggagcgcaaagcccaggcggacgccgaggctgcggcgccacctacagtccgcgcggcttccattgtttccccgccggccgagagcgcgcccggccccccgtcggggggcaatttacccggataaaaggggcggggcaggaattgcaagaagatgaagctgaaagaacctgagactgtcggaactgccggggaaaattctacgggacggctttgacgtcagatgtgcggggctgcgaaagtcgggggagggagtgcgagtgggcttttaaggggaagggcactaaggccgaggtgaggcttttcccgacagagggtgaagggggcaaaactcggtgccccccaacctctggccccggggttcctgaccccgcccccgctagtgccccacgccgagtgcatccactgggagcctgaggcctgggggaagggccccagttgtcgattgctttacaaagtcaaactctcccagccaagaacctcggggccgctgcgcggtggggaggagttccccgaaacccggccgctaagcgaggcctcctcctcccgcagatccgaacggcctgggcggggtcaccccggctgggacaagaagccgccgcctgcctgcccgggcccggggagggggctggggctggggccggaggcggggtgtgagtgggtgtgtgcggggggcggaggcttgatgcaatcccgataagaaatgctcgggtgtcttgggcacctacccgtggggcccgtaaggcgctactatataaggctgccggcccggagccgccgcgccgtcagagcaggagcgctgcgtccaggatctagggccacgaccatcccaacccggcactcacagccccgcagcgcatcccggtcgccgcccagcctcccgcacccccatcgccggagctgcgccgagagccccagggaggtgccatgcggagcgggtgtgtggtggtccacgtatggatcctggccggcctctggctggccgtggccgggcgc

SEQ ID NO: 7770 - DNA, 2300 bp, Homo sapien
tgctacccattgcccatgccattcaatgaatgaaaccccacctgggcgattcagccggcttagccacccaggggcaaatcaaacacaacctgaaaagcaaagtcagcccaatgcagcacacaggtggcttcagaggtcccggtgtgcacagaacagagtgggaggaggacctcagcccttgccacacctctgctctcgccaggagagccccttgctggccagcactgccttgtcctctgcaggcttggctccctctaaccacacacaccagggagcccagcaaacacccaagatcgtgtgcctggcccacctggggcaaaccctcgaggcccggcagtccatctctgtaaccgtcagctacctcacatgagcaggatccatcccctaagctctcagagcattgctgtgcctgtgagatggccggcacacagctgacctcaaggcctgccatcaacaccttcatgagtgctacatcccaggccctctctgtcccctcttccttgtcaccctcaggacaagcctgagagcaagctgagagggcaatgggtcagcggtccacgacctacccagggagtggccgggtgtgatccatgctacagtgggtctgaccccggagcccctgtcccgggataagacgcagcacagcctggatttacgagccccactgtttgggttcaaattccaacttcaccactaacagagtgtgcgaccttgggttactcggccacttttctggggccatttccctcctgctccatgggggagggaggaatagaatactgtgggggctcttgtggagatttgagctgagaacctccatgaagcgctcagaacaggggctgggggacagcagccgccttcctcatttccccacctccctgatcgcatcagccactctcttccccatgtccctggaaggggctgcagaggggtaggggtggaaccagaggctgccatcgcccccacccggtttgggtcgtgtcccccagtgcagcctctgccatcgccctcaagagcatttatcacgcatttaccacggatctttaaaacgaaagctgcaggggagggtaattaagtttaataggagccgccgtcgatttaaagccacaggggggaagtaattagatttaacagaagccacggctttctgaaccaagacacacagcgtgggggtccctggtctagaaagccttcgggatgatgtctttttgtaaagactttcctggtgacatttgctgcgccctcagtcattaacgccagtcactgactggggaatgaatgtggcctctgctcattgaaattcattaggcctggcatttctctcgctgtctctcctgtttgccctccccatcgcctttgcgctgggccaggagggctctgcccccaaaaccagcctcctggggccccacatccaggagctgggggtttggaagaataacaagaaataattagagttaaaccaaagccccgtaggaggacccctttattccccgcctgggtattctctggatgtcgttttctttattggcaggaaccgcttcatggagcggcccccatttctttcctcacctggcacctgcccggacgccaggggcgcccatcaccgttcctgggccccttcccgacccctccccaccaggtaaggcgctctcgacctccccgaccgtgctgttcctcctgaccccgtgcgcagggactcggggactcaaaaaccagacccccgacacaagacagctcaaaaaacgggaaacggaggcccaggcctccctccctgcgcccctgcctccaccaccctccagccgagaagctggggttcaccaatcccgcagctggcccgcccaccctgcccgagagcctccttcccagtgccccctttcaggttgcatctcgcgcacagccgcggggccggggcgagcgcggagcaggcaggggcgcggggccaggagcgcaaagcccaggcggacgccgaggctgcggcgccacctacagtccgcgcggcttccattgtttccccgccggccgagagcgcgcccggccccccgtcggggggcaatttacccggataaaaggggcggggcaggaattgcaagaagatgaagctgaaagaacctgagactgtcggaactgccggggaaaattctacgggacggctttgacgtcagatgtgcggggctgcgaaagtcgggggagggagtgcgagtgggcttttaaggggaagggcactaaggccgaggtgaggcttttcccgacagagggtgaagggggcaaaactcggtgccccccaacctctggccccgggg

SEQ ID NO: 7771 - DNA, 2300 bp, Homo sapien
cgcggtcagcatggcgggaacacaggagcagaaaggaagcaggtgggaagccaggtcaagggccaggggcacggaaaggggtcagatgcagataagtgagtgcttcctggtgcatccttcatccgcaattcttccttacctgtgcttttgttgcctccattgcacagctgaggaggccagggcctgcggaggttgagagtgtgctcagggagcacccggagcaaagtggaagccagattccagatcagttctgctgggaattcccagctcccaaaagccctgctggctgtcagtccccagtcaccacaagcacctatcctgtgtgggtgggcctgcagttctgggagatatatcagctgcctgcagcgtcctttgctgaactcacagcaaataggagagacagggaggggtccttgggaagccctaaattgagcttgctgtgggagtcctgggaagaaaggagcctcatcctatcaaaagccgggggaagacatcagagtccctctgctcaggtcagctggcacaggtgggtctccaggcctgggtctcacttccccagagggtgtgttcggttggccccaggctgagggaggaaagcccacctcccatgtcattttgcaaatggggagtcagggacctagagatggaaagacaacacagcaagtgagggatgggttctaggtcccctgcaccctgcaccctgcaccctggccaacgatgtctatttggcaccagatctgcaggctcatctgggggaccccaggacccagaggcagccgggttgcatctcgaagctgtgagctgcagcccaggaaggtccaggtctgggtggcgctgcccaagcaggctgcaggcccaaggaggaacaaagatcctctcaaggggtgcggagctgaggttccggtcctgccaaagccacttgatgacccccaagtgcccccctttctgcacctcagagaagagccctcaagcctcccaggtcccctccaggggcacgaataagccccagcagggttctgaaggggtcccaggaatctccctgtggggatgcggtggaggtggaggaggctgcggtggcctggggacatctctggtcacaggtgctggtggtatgagagatggggtaggcaccaagccccctgcagctgtggctaggcgggcctgcaggaagggccaggcaggctcctcagggaccacaaagaacaggggttttcacacctaggtgggcctgcatctagctaggacagtccccatcaggccataatgggcacagtgggaggtagaaccatgagtgagagaggggaggcttccagaggcctggcctgggtccctgctagattgagggctctggctatggtacatggatatttctgctgtggaatcaaaggagcaggggatgctgaatatcccctctggccctatgccctgctacctgtcctttcacggaagggtgtgtgtgtagggggtgcaggaccaggcctccctgggtgcatctctgccaccttgccctttggctcaggtggacctccaccaggtattcagaactccagcccagaaacgcgccaagcctgtggggccaagacctagggggtgggggtggcctccctcccgcctgtagccaaagggtcctcccttgcccagccaggccccggtgtcgcttactgctcttatccacccctccttcccaggccggtcctcaaggccccagcaaaggaaccaagttcccgtgagcctccgaaaggcgaagggcaggcagcagccgctggcttctgcgcccactaggagcttcggatgcccgagttagggctgcgccaaggcggccggagcagagagggagacggggacggggacaggcagggacaaagtgcaagaggcaaaactggctgaaaagcagaagtgtaggagccgccaaggggcgggacgaacaggtccgtgggccgggcggagccaagggtgggggccggggtccctccaggtggcactcgcggcgctagtccccagcctcctcccttcccccggccctgattggcaggcggcctgcgaccagccgcgaacgccacagcgccccgggcgcccaggagaacgcgaacggccccccgcgggagcgggcgagtaggagggggcgccgggctatatatatagcggctcggcctcgggcgggcctggcgctcagggaggcgcgcactgctcctcagagtcccagctccagccgcgcgctttccgcccggctcgccgctccatgcagccggggtagagcccggcgcccgggggccccgtcgcttgcctcccgcacctcctcg

SEQ ID NO: 7772 - DNA, 2300 bp, Homo sapien
atggtgaaaccctgtctctactaaaaatataaaaattagccagtcatggtggtgtgcccctgtaatcccagctactcagaggctgaggcaggagaatcgcttgaacccaggaggcggaggttgcagtgagccgagatcgcaccactgcactccagcttgggtgacagagcgagacttaatctcaaaacaaacaaacaaacaaatgaatttcttatgactgttagcattaaatggttttgttctggattttactttaaacaacttttactaatacatagttaatcaaaatgccatgaatgtaatatcacataattgataagtaaagagcacaaataaaattctggtagaaatgaatcttttttttttttcctgagatggagtctcactgtcgcccaggatggagtgcagtggtgcgatctcggctcactgcaagctctgcctcccaggttcacgccattctcctgcctcagcctcccgaggagctgggactacaagcacccgccaccacacctggctaatttttcgtatttttagtagagacggggtttcaccatgttagccaggatgtcttgatctcctgacctcgtgatccgcctgcctcggcctcccaaagtgctgggattacaggcgtgagccaccgcacctggccgaaatgaatcttttaatgtgacctaggacagggctttaaaaaaaaatttcatatgaccactacttattgctagaataatatggcgtttggcctcaatttcattcccattttctatttctgttgatggcaaagccaagaagccttgtcctcaggtggaagacacagaattgaagtttcgttatggtgatgtcactcaaggatttgaacactcgccaaggtatacactcaatcacctggtttatataaaaaatggtgtctcctgcttgatctgctgacaccatcaacagctctttttttttttttttaattctttgagacagggtctccctccgaacccaggctggagtacggtggcacaatctcccctcacttcagcctcaacttccctggctcaagcaatcctcccacctcagcctcccaagaagctgggactataggcatgtgccactatgcccagctaaattttttttgtttttggtagagttgggatctcactgtgttgcccaggctggtcggcagctcctctcttaattccttgatagcaaagactcaccagtcattggagctgcactttctcaacttcgggaaattttatccaaaggttttatttgtttgtttgcttgtttgtttgctttgagacagagtctcactctgtcacccaggctggagtgcagtggtgcaatctcagctcactgcaacctctgccgcccaggttcaagggattctcctgcctcagcctcccaagtagctgggattacaggcacctgcaaccctgcacagctaatttttgtagttttatagagatagggtttcaccatcttggccaggccagtctcgaaatcctgaccttgtgatccaccagcctcggactcccaaaatgctgggattacaggcgtgagccaccatgcccagcccaaaggtcttttttgccaagaacaattaattataccagttacttttttacttggaggagacttattaaacctgatataatgaaaatggggaagactgggaatgaaactgttgctaatttcaacatggcttcgccagtactatagtgatacaaagcttccaatgcattgcgggtttatatctatttctttccgaaccttgcagctgcagacacaacctaggcaacacttagacagctttccccgtatagccacagaatcagtaaagccagttttctcagtgacagccatgtgccacttaccattggaagacctcggattgtattttccaattcaaacaagtgagttaatctgcgtctccagagtataccccctgcttctgatttctgactctatgaagtaggaggagatgcagacatgaagagaaaaggccagatccctgcctggagctgggcacctggcgacttctaggctcaccaggatttttgcctcctttcctgggcctctctctccaaactgtggccttgagaccacaagtagcccaggacggctttgaatgtggcccaacacaaattcataaactttcttaaaacattttgagattatctttttgcaatttttttttttttttagtttatcagttatcattgttgttagtgcatttgatgtgtggcccaagccaattcttcttccagtgtggcccagggaatccaaaagattggacacccagccgggattgg

SEQ ID NO: 7773 - DNA, 2300 bp, Homo sapien
gtatgcactgagtggctggtgtgtcaggttctccctaggagctggaaacctcttgcccatcccctgagcttccctcctatagaggggtcacctttggactcctgcttcagggcagcagcccctgccctcatcttgggttctcgggcacacggcaacctggcagtgggcagggctggagaccagagcccgggagtttccctgggaactgctgggggccccaggtgtagagcaggaggggcatggacacccagattgccttggtcagatttttctggctcctcccagtcctccagagggggtcctgccaaggaggcagccggagccttgacaggaaagggcatcggaagtcccctggccccagcaggctgctcttgctctctctctcttaaaacattattgtgtcctctctcctctctctgtcagactgtgccccctgactgcacccctctctgaatttcttgtgcaccccccacccccgccactacatctcctctcttcttggccaggtgtcaggaggtagcagagctaaggcatttagagcagcgacctccttcctgtgcctcttccatgcctcttagggagcccaggtgaccacacatcccagcccaggcctgcacagggctgcactggacaagctctcctcttgctgctgtcctttggggctttcctgtcaccagcctctgacccctgtaacacagtctccatcaagagtctgaggctccagtagttcagtggctggcctctggcctgttcaaggactctcacaagctggccctggggcagcggctaggagaccctgactaagactgaggtgctcggggatggcttgggggcgccctccttcaggatggccacctggaccctgtgcacgctggagtgggctcacagaggacacactgccctgtgtgtattgggccatgggagctggacacgtcccaggggtgtgtgctcactgccacagctcatggtgccctgcacacttgcctgaccccaaaccctgatgcagatggcaggctggggaatgtcagcccacccaactcaccccagagcccctggtcaacttggagccaaagctgtggcctagacccctggactccacagcgtgccctcctctggggcagggttgagagaagcaaatcccctgtgctggcccctgcttcctgctggccccaggaccctgggggacagaggaccaggaagcaagagaaatgggtggggacatggcttttcccgatactttttgaagcccctcttcactgggccccctgagatacaccttgacccccacacagtccaggggaccacctgggcatctgcactgattcagatcctccaggccaggactcccccacacccattcccagcttctaccgggttcctcttgtcatcacccacccgctgtggctaccagactccctgtgcttttctctgggtgttctccgcggctctgtcttctttccatctcccctgcctcctctttttggcgatctctgtcattcacattttccatgtctttcccgtcctttcctcctccgtttctgtctgtctctatctgcatctctttctctctagggctctctgtcggcgcccacttctctggctctcgcgtccctcctcccgcctccccaggcccctctctggaccgtcactgggacgggatcctccgaggcctgccagacgagagctaaccccaccactccgggtgcccagttggtgtgcgcaaaaggagatagcatctccagacccggcctgccccgcgccttgcaaggctgaggacagcgccactgctcctgcaggaagcgccgggcgcagacacaaacccggagctccccacgcgtgcccgcgccccggagcctccctgccgccgccctccgcggtccccttcattatgcgccgcctttaatgggcgtttgtcagctcgacttccccgcaagttgttttcacggacatcagtcatcggcggcggccccattgtgcagggggattgatggggagcgggagggggtgacagggcctggggcggcctcctcaaggcctcggtctataattttcggaggcataattggtctgggggagggggcgggggaggggcgggtaggggacctttcagagccaggagggctttcgggggcgtggggcgcgctgcggagcggagccgcggctcgacggcggtgcgctggcggcgagtgtatgcagacggcgcccggcccgaaccccgagccccgcggggctccccacccgccggcctcccgcccctcccgcgcctccgcctggggaccacgtcggccttttgttggcga

SEQ ID NO: 7774 - DNA, 2300 bp, Homo sapien
cctgtaatccaagctattcgggagactgaggcaggacaattgcttaaacctagggggtggaggttgcagtgagcggagattgcgccactgcactccagcctgggcaccagagggagactccgtctcaaaaaaaaaaaaaaaaaaaaaacacccacgattccttgtccccttggagctgctgtccagcgagggaggggcaggcagaccatcgacaaaacagaagcaaatgacacggcaggtgggatgctcagaggtggttaagccccacggggtagaggggtttggacatggctggaaggtgggaacagcagtttctcatggtggccagtacagaccttgctctgtggggggcccttcatgactgcttgatataaggaaactttgggaagacttagacaaccaggctccatttttatacaaataaaaggatttttggtcacatgagttaggaaaacagcagtgccggtcatgatccctggacaccccggacagactggcctccccgctggggggctgctttttcaagtttgttttgggcccctttgcatgggcctgggagtggggacaggcacttccttggctggactagcagcatccatgggcctggctggcagcaaccaggccggggcagagtgtccctcctggggctgactggtctatgactgtggtcaggttgtgccaggacagcctccggggtgctttgctccaccgtggagttacggtgatggagctggcagcatccctgccgctgaagggggtctaatctccacgggagaccagacgtctctgctgtgccgtcattcagggaggccaaagtcagggctgccacccaccccgcccccgccaccaaatcaccaaggagaggaggactccatgtgccctcaacacattgcagacatttggcaaatgtttgtgggggtgattgtcccaggagactgttgggcatggctgactcatctatcagaatggaactttctagagactgatgatgggtgccaggcacaggcctcctccccctctgtccctgcaaccctgcagggtgtctttggacaagtcatgtgggctctgggacccctgtttccaactcagtcccaataagaagacaggctgttgagatgttaagagtgggccccaaacaccaagcatggggtcccttgggaatgcaagctcagggcctgggacccttagtgcccacgagggcagctcggcatctgaccccctgcttgtaatcactgtttattatcacagctgtcacagacttggccatctgctccagtgacctccaaacctgtcactctttcattcacacaatggacattcattcattcattcattcagcgacacttctatgtgccagacacagaaccggggctgggtcacggaataaacaatgcaaacaagtccctgctctactcccacagagcttaccttccagcggggaggcagagcaaaaccaggagccagaaaggcaaaccgatgcatacacaggaatatcagatggtgatgactgctgtggaggacggaagcaggaagaggggacggcgggctagcgagtgtgggggcaggcgtggggagacacgacgtgggtggccgtggaaggcccttccggggaagtgacatctgagcagagatcttctccccaggagccagccctgacaagactggggaggaacattgcaggcagcggcacagccaggtgaaggccttgaggctgggaagagttgtgtgtgctggggacaagaactgaggtcagccaggctggggcaccctccagctagggggacgacgggggacaagggcagagaggaggttgggagggccaggccaactagggggacgacgggggacaagggcagagaggaagttgggagggccaggccaactagagggacgacgggggacaagggcagagaggaagttgggaaggccaggcctgcagggccttcaggccaggagggcactgggatcctctgctgggaggaggggctggaaaggtggcccccacaggggaccgatgctgtctgaactgtgaggtcacaatgatcccggggctgctcctggattcagcgagctgggggtagtgcccaggaaacacattttagtcaaggcccccaggtatctggcacaaccccggcaatatgcaaagcctcctctaatgatggttgaatccaggagaccccaaccgctgtgatggaaacctcgccacctccagaggcagccgatgactcctggggcagccccacccggctcaaaggcaacctgctccacagagccagccccatccctaggcttggagccaa

SEQ ID NO: 7775 - DNA, 2300 bp, Homo sapien
agatgccctgagcctggctacagtataaatcacagaaactagaggttaagcactgtttcttgagtaaagccgcaaggggtgctgttggggagaaggtggggccaccttgcctaggagatggccccccagcaggcagcccccaagccccagagccctctcaggccagaaatgtcacttcccaaacctttgggagcaccagtgtgtccagatttggccaagtatatttttactcttttttttttttcatgcaaactgcacctcatagagctctggaaggtctgttggcactcgaacacaaatttgaaaagacagtacattagtattacacaatgttggttgtttaccaacaaagataagtggatggagttacataatcctctgtacatgcgtgtgggattctcccagccctggacacttgaacttttaaggagcagaggctgtggagcactgttcctggcatggatttggccagcctggggcacttctccaaaccctctctcgctgtccaaggtgcagacaaagggtcctttagggccactcagtgcccgttggcaccaccagcctgagaaccaaatagccttcctgcaccgccccaagttcaaggaagtcacagacttgtgcctaaatgggagagtctcactgaggcaccaggaaagggtaggtcatgacaagatgacattagtagtgacaacagtcaccattgctaagcctggcagcttcaggcacgcttaaaactcccatgagaaggcagaggctctgaggcccaggaggctctgaggccaaggaggctggcacaaggtcacaaggctggaaggtgccagagctggagctagaccccaccccttctctccaaccctatcctagctgactccaggttccatgcttggaaccatggcacgctgacgacatcgtggcctttaaagacaattttctaatcacttctgtaggccttgaatgttccccagtggccatttaacaagcaattattgagcatcggctgtgtgaacctggtagacaacccactgtaaaatgagacggaataaatgaagtgctagttggggttcaggcaggttctttggatagacaggaaggcctgcatatttgggtgggaaggggacagtaggggagaatccagcaggacttcctgcaggaggtgctatctgatgcacaccgtgaagaactcataggatgtgagaggcagagggacactttatttccactggatgtggtggccagcatggcccctggggcttaacctgagtatggtcgtcccctggggacctgccttattctccttaggggaagaagacttgaagatctgcagtgtgccagacccctgctaggtccgggggtaagagagatcaaagccaccatcccccccgctccgcccctccagaaagcaggacagccttgcccagcagtggggaaagctctgcaggagccccgccccacctcagaggatgcggactggtccttggccctcctaagcctgagtgtcctctgcaaaatgaggacccgcattccaaccttgcaggtgcggggttaaatgagatgatacacactcacgccctacatcagggacgctgcacgcacctgggcacagaacactaagcactccgtaaactcgggggcaccggtaacatcagtgggctccagggagatgactgccccgggagagactcccccaggagcgcgggcagctggagggggcgggtcggcaggaaccaggcaagctccccggaggaggtgagtgctgagtgacagcaggagtttgccagggtggagggaaaggggcagagatccagactccaatctcagaagcttcactccccccggaggcggaggtgacgcgccacagaagcgcctgccactcggggactttatttcaggtggggctattgaaagttcccccctttcacacccggtatgaaaaccctcaaaaatccaaaggggcactttccctggataaaaataaaacttggaggggcccgcaggaatggaatactttttcttcctgtgtttaaatttctacggaaaatctgaccggcgcggccaccgcccctgccataggcgggcggagagcgcttatatctttaaggcaaaggcgggccggctggcgtccaagttcctgaccaggcgcgggccggcccgcgggaccagcagccgggtggcggcgcgatcggccccgagaggctcaggcgccccccgcatcgagcgcgcgggccgggcgggccagggcggcgggcggagcgggaggcggccacgtccccggcgggcctgggcgcggggaggcccggccc

SEQ ID NO: 7776 - DNA, 2300 bp, Homo sapien
cttagggatatggagagacaaaaacacgaagctgtgtgcctggggtcacacagctggtgagtggcagagctggtgtttgaacacaggtaggaggatgcccactcttgatcaggccccagtgctgtctctccctccaccatgcatgggaagttagatgatgtttctgctctcccaaagactgtaggcccctgagggtaggtgtgtcccttgataggcccccagtggacagatgatgggggttcgtattgaacctggtagccttccctgtttcaacttgatagaggatttttggccactccttagtgtaatttccctgctttctggcttggagggatccctgtggaatttcctccctgtctctaaggatttgtttgctattatcattatccctgccaaccaggagtgtttatggagccccaaccaggttctcagtccctgtgtactgaggtcaggttggagctctgtcctaacacatctctagacagtccctggccaggcctccggggtcctgccatccagctttggggctaatttgcaagttaagaacttgtgggtagatggctcagaggcagtcccagcacagagagacctgcagaggccagaggggctggccaccttcagatcccagaggatgctggatttgccctgtgccctgaaaaccaggttgaattacaaagggctgagaaggacagaaagggcgtacagggagggacacagtgtctgcaaaggcaaggaggagggactggggaaggcctgggggagggggagaggagactggggaaggcagtatggggaggagatgaggaggaatagccgaagccctcaggcgcacctgggactcaggcaggtgtgccctccgacccctcgagaccctgcattcacctgctgggcactggcacattccctgcacatgggcttctgtcttccaagagcagcttccggtcgggctcttttgccccctcagccatggggagagaaaagcacctttagtcaccagctccctgtaaccctgcccttgtttgacctccctgagatgttgaggggaaagcgtatctgccattgggtggccatcagggtgacggggatggctcccaggtgcctggccccagaattagatggagcgtccatcctggcacgttctggtcagtgtgtgctgagcttagcagagaccatcatcccctcagtgaagcctcccgctgctccgcatttagcagaaaccaaccctggggctcagagtgtccagagcctcccccaggccttgcagctggagaggggccaagcctagatgtagacccaggtctggctgactacacggcctgccatgaagccagtgccctgtcctgggctggcctcacctgctgccccacactgtccagacatacctgtggcctggtgttgcccaaacctcccgactagcctgtgcttatctgctgtctctactggccctgcttaaccactgccccaggctgggacagaactgaggcctgctaaattgctgcactctccccatgcccctcagcaccagagacagagccctgcactggggtcagccagcaggagtctggtactcagggccactgagctgggcagctcacccgtgggagcctcagtttcctccaggtcaaatggacctaactatagtaaccccctcatagggtcagcttgtggggactcagcgagatgacatacctgggccgagaaacagcgtcacccttagtcgcggctcctactaaggggggccgcaccttgggcgtgcagatgggacttgaggctgagctcagcctcccgcctgcgctgtaacccgggctctcctgccctgctgggcctcagtttcctccttggcgaattgagaagaatagctctttcgtgcttctcctgcagaaggaatgcaggccccccgtgctggctacagacttgcgatactggggtcttccgtgaaccccgtccttcatggggctgggcatgggaacccactgccctcaaaagccagccctcccccacccttccccctgagccctcccaagccacccacccacatgggcgtggtcgtggcccctaagcaccctcagactttgtcacagagggcaaggtgggcggggcacgcacactgagtccaggtcctcctgaaggtcaccagcacagcggggccctgtgttactgtagagagaagtcagttgcttagtttcagcctcctgccggcaccagatgctgaccaggccctcccaggtggtgagcaatgctgtttccaggagaggcatcctagggccagagaggccaaggtgccagggacatggccccaa

SEQ ID NO: 7777 - DNA, 2300 bp, Homo sapien
tgaaatctgaccaggccaccctgccctattcaaggcactggcttcatgtttatccaacctgtccaccagccaagctggggctgtgcatggctcaggacccaacttctatctaaacaagaaattaacctggcagccaaactttcgctgttattctctattccctgcccagaaagcccagcctggccgggcagagacagagggctgggaggagacagtcagggtgaccttgtccagacaactactcctcatgaccaccacctgagactggcaggcagccagcaggaggtcggtgcaggtcgtaccagcacggggggttctgagccactgctgggacagacagatctggggcagggaggagggcatctctctcccagagaccctggaggccagtttctaaatggccaacatgctccaaagaaactgataattcatagctttggccttggttagtcaggcctaatagtcatcaaaatccaacagcctgcagggttggctgaggttctaggcaaagccgtggagaactgacagcccttccccactcctctcctccacaccattcaatctgtcctggcattggggtggtccagtgtgcaagtggataggagtcagagaacagcagtactcgatagggagaggcccactgtgctggtcttggattttagacctttggcctgtgggcgctggggagccatagaaggttgtggagctaggttgaggatgtggtgagatccgttccagaaggatcactgccagtggccagctgtgggagggtaaatgactggtggatgagggctggtggcagtggtcataaacatgggccataactgcatgtggaagggaggaggtggttacaggagaatcagcaaggtcagaaccgattagatctgagggatgatggggagggagccattgagaacagcctagtgggcgattccttccttcattcagcagggatgtattgggcacctgctgggtgggagaaaagaggcactgaggacatttataatccggcaggtggggagaggcaagctgagctagaagacagagccaccgggagggtggtggcctcaaggcctggttgttaaggggaccctggacctattccaatctgaaggggacaagtgcttctgggaaaaggaacagccagggcggaggccctgtggctgcaggagtgagtttggaaagtgagagaggcagccagggggcggggttgttgggacaggtgggtccagtggaggcggcggggcggggaagcggtcagatggcctgggccagggggaactggaaggacgctggccttgcctgagagagtggaggcagaattggcatgctctgaaatgcacgtctgcatagcacgaccagttcttctcaccccagtttacagatggaaaaactgaggccgggagtggtgatgtcgctggtccaaaatcacacagctgcaaatggcagagctggcgccaggttccaggcagacagactcccaagccggagctgctgaggccaccaaacaaaacacgtcactagtcaaggggcaggcagccgggggggaatcccttcagcagggctctgcccaggcaccaggaacccagagcccgatgatggccgcctcctgccaccgtggggaatggatcccaaggcccgccccaccaccaccacccctgatcccccagagtcctagaacattcagggctgtgtcccagagtggtgctgttccaactcagctctcagcacgaggggaccgtaaatccaccaggcagggtacgtggcacagctgtgacacaggacaccagcactaggcccaggagggcacggcagtgctttgctggggccaactgccatgactcccacgttgggaggtgaaagatgggaactgcaggtgcacctgtttctccctgagaagctcaagcctttgacagtgttgagaatccggagctgggtcaaccctccctgaataaatgccattgtctttccttggaagatagcaccaaggaggtcttcatgcgtaacgtgtgaccaggtcctctccagccacagcagactgtttctgctcgtggaaggtgccttaagtaactgctcaccccccttcttgtctctgcaataggtctatgagatcttgaagagaacgacgtgtacaaaggccaagtacagcatgggtaagcacgtttttggggcttgagatcagcattggtttccaagtcggaatctcacctccgagtcatctctgtgggaggcaggcagccggcttggggtgtttaagagggttttgatttaagcctgtgtaacagttccagacaagaggg

SEQ ID NO: 7778 - DNA, 2300 bp, Homo sapien
ggggatgaccaaaaaccctaaaggtaagaagccgtacagcgtctggcccatttagatcaattccaggtcaaatcacaaagagctcacattccataacctgccagaagcttctttcccatccccacgttcacagcccacacagcccactctcaagaagtgtttatgggatgaatgaatgatgtcacggaggctcagtccccgcagctctgcgttccggggagcaacctcggagtgccacattgtcaccaaccccactgcttcctccccctcagctcctgtacgaagagtgggcacgctatggagttttctataagtaccagcccatcgacctggtcaggtaagaacgcgccacagcctgcgggaatcaagtccctactccgatggcagtcggataacatccctgtgggtttcaaccgctctgaatgttcagtacccgggaacgtgtttgaactcaaagagcttgtgtaggaagacccaaaatgtccctgcagggctgagagcctgggccagcattagatgaagcagtttattcaaattccctggaggtcgggcccttttcagtcacatttaccatctcctaaattcactgcctggcctggcctcactgggcggcgggagggttttccggatttgagacgtggaggggaaggaaagagctgcctcaaatgtggaaggatttcttctctcccaagaggatctctgtcctcacagggcaggaaggaggggccgaccaggttaggcaacttgcccgccagagctcgactggtagaaatccattcaagccatcaaactgccaaccacgcttaatatgaggagcaattggttttcttggcacctcccggccaaggttctttccagtccttatgctgaacagggcttggaatggagcccacagcctcaggggaagtaggcccacagccatcagcatgggccatcgcacacggaaaagcgcccaccttcccaaggcaccacagagaagtggggaccgggcgcggtggctcacgcctgtaatcgcagcactttgggaggctgaggcaggtggattacttgaggtcaggagttcgagaccagcctggccaacatggtgaaaccccgtctctacccaaaatacaaaagttagctggcagtgatggtgcatgcctatagtcccagctactagggaggctgaggcaggagaatcgcttgaacccgagaggcggaggttgcagtgagccgagatcgcgccactgcactgcagcctgggcgacagagcaagactccatctcaaaataaataaataaataaataaatgcaatgggcgtggtggcaagcatctgtagtcccagctactcaggaggctgaggcaggagaatcgcttgaacctgagaggcggaggttgcagtgagccgagattgtgccactgcgctccagcctgggcaacaggagcaaaactctatctcaaaaaaaaaaaaaaagaaagaaaggaaaagaaaaagaaagagaagaggctgggcacggtggctcacgcctgtaatcccagcactttgggaggccgaagggggcggatcacgaggtcaggacattgagaccatcctggctaacacggcgaaactccatctctactaaaaatacaaaaaattagccgggcgtggtggcgggctcctgtagtcccagctactcgggaggctgaggcaggagaatggcgtgaacgcgggaggtggagcttgcagtgagccgagatagcgccactgcactccagcctgggcaacagagcgagactccatctcaaaaaaaaacaaaaaaagagagaagaggggagggcttcagaaaagcagagagcacccccaacctgatggggcggcccaggaccccactctctgcttctgggatgagggaaccagtgcccctggtttgagttgctcttgctggggagggcctgtgacatgtttccctgctagtattgaatgacagtgggcttgactctgctctgctcccctggtgtaggaagtattttggggagaagatcggcctgtacttcgcctggctgggcgtgtacacccagatgctcatccctgcctccatcgtgggaatcattgtcttcctgtacggatgcgccaccatggatgaaaacatccccaggtaggcggcagcccacccccaccaccccgcagtacacagaggagccctctcctgccatcccagctgcacaattcattgggacactggcctctcacaccaattcctgtacacatgaaacctcacgccaagccacgagccgtcaggaggaaaggacatggttcgaagccatctaggagtctggg

SEQ ID NO: 7779 - DNA, 2300 bp, Homo sapien
agaccctgtctcaataaataaataaacaaaataaaactgtaactcagtgttcatagcagcattattcacaacagccaaaaagtggaagcaaaggcaatgtccatcctccgatgaatggatagacacactgtggcacccaaacacccagacagtggaatagtatgcatccataaaaaggaaggaggctgggcacagtggctcacgcctgtaatcccaacactttgggagggtgaggcaagaggatcacttgaggccaggagtttgagaccaggctggccaacatggcaaagccctgtctctactaaaaatacaaaaattagcctggcatagtggcacacacctacaatcccagctagtcaggaggctaaggcacaagaaacgagagtcgcttgagcccgggaggcagaggctgcaatgagccgagattgtgccactgcactccagcctggacaaaagagtgacactctgtctcaaagaaaaaaaaggaatgaagtactcatatgttctacatcatggatgaaccttgaaaatgatgctgaaaacagccagacacaaaatgccacatactgtatggttctgtacacatggaatgtccagaattggcaaatccatagattttaaaaagtagattcggcagggcacagtggctcacgcctgtaatcccagcactttgggaggctgaggctcacttgaggtcaggagttcaagaccagcctggccaacatggtgaaaccctgtctctactaaaatacaaaaattagctaggcatggtggcaggcacctgtaatcccagctactcaggagactgaagcaggagaattgtttgaacccgggaggtaaaggttgcagtgagcccagatcgcaccactgcactccagcctggccatagagcgagactctgtctcaaaacagcaaaaaaaaaaaaaaaaagaaagaaagaaaaaaaaagtagattcgtggttggtgggggaggggaggagtacatgctaatgggtttcttcttggggtgatgaaaatgtcctaaagttagacagcagtaagggttgcacaaccttgtgactacactaaaaaccactgaagtataactttaaaagggtgaattgaatggtatgtgaattatatctcaagaaaacaaactcagctggcatcagcccctgccccaccctgtggtaaagctgggtccttgttggctggtgagggctctcctaatctgcaccccctcctcacctccagacccacggcattgctgctcctggaaccccagccgtcccctgtgctctgctcttctgttctccgtgtgcccagctcttccccccacacctaggtacccggcccctcccagccttcacctgcgcctttacagaggccccatcagaccaccgggccccccaccctccacacgcccaccccgtgaagagactccctttcccctggctcttctgaatttctggcatactatacgatttccttatttttccttatttttattttttaatagagacggggtctcactatgttacccaggctggtctcgaaccccttgtctcaatcaatcctgcctcagcctcccaaagtgcgggcattgcaggctgagccaccacggccgccacgaccttctcttctggagcgtgtcgcttttgtaattatgatgtaaactccgggcacgcggggaccctcgcgcttcgctcactaatttgtccccagaccctactacctggcacagtaggcgctcaatactgttgattgaataaacgactgctactttggaaatcatgtattatttaaatcacatgtttaaacgcacataaacttctgagtagtgttttctgcacacacaagatgtctccaggggcaccaaagaatgcattttccacgtttgtccctaaacgttaatgcataagtaaccttggtcaccaacagatgtgagggcacgtgacgttcgggctgcgccctccccgccccggccctgcacacagtagggccgcaccgcgctttgcaaacaggtggactcggcagaggcgcgaccgccctcaccgcagagagctgggccacctgcaggctctcaggacacccaaggccccacctcccacccggaaaagagacgatacgccgggcgcaggcgcagaagccgcgcccgtccgcggcgccgccagccagggcggaaacggctgcggcttcgctagggacgcatgcgcgggtcccttagttttcgcgagataacggtcgaaaacgcgctcttgtcgatttcctgtagtgaatcaggcaccggagtgcaggttcgggggtggaatccttgggcc

SEQ ID NO: 7780 - DNA, 2300 bp, Homo sapien
cctcgacctctcaggctcaagcgatcctcccacctcaatcccccaagtacctgggactacaggtgtggcccaccttgctggactaatttttaattttttgtatagacatgggtctcgatatattgcccaggctcaagcaatcctcccacgttggccccccagcgtgctgggattacagacgtgagccactgcacctggccaatgttttttttttttttttttttctgagacagagcctcgctttgtctcccagcctggagcgcagtggcatgatctcctcattgcaacctccacctcccaggttcaagctattcttccacctcagcctcctgagtagctgggattacagatgcccgccaccacacccggctaatttttgtatttttagtagggatagggtttcaccatgttggccaggctggttttgaactcctgacctcaagtgatctgcccacctgggtctcccaaagtgctgggattacaggcttgagccaccgcacccggcctcacctggccatttttacacttttaaaatagcaagaaactaggggcaaaaagtacatattcatatctatgtgtagtcagtcaataaatatttattgaatgaacgaataaattaatggaaggtgttccagatcctggtaggcgagagtcagtcggagggagtgcttgttcttggtgcactcacaatggagaatcaaggaattcaccttggacgggctcatttctccctctcctaggccccgtgcagcctcttctcagacttactagttctgaggggctcctggctgcctcacaccaacagcagtggccagtggacactggcgatggtgtcctgacattttggtttgtgaagagtttgtgctccgagtcaaatcctgggaggagtggggagggcatccgctttaattaattagaggtgtctctattcatctccgtatctgcaacatctagcacaagacttggcccatagtagatgtttaaaaattcttgctgaggccgggcgcagtggctcacgcctgtaatcccaacactttgggaggctgaggcgggcagaccacctgaggtcaggagttcgagaccagctcgaccaacatgtagaaatcccgtctctactaaaaatacaaaattatctggacttggtggcgtgcgcctgtaatcccagctacacgggaggttgaggcaggagaatcacttgaacccgggaggcagaggttgcagtgagccgagatggcgccattgcactccagcctgggtgacaagagtgaaacaacgtctggaaaaaaaaaaaaacttgcggaaaagatgaaatgaccaagactcgcgcagtgctgcccgtcaggctctcaactagtcgctcttcacatctgattcatgtcttaaagcagcctcgcaggtaggtctgcatcattttcccatcctacatcggaggcgctgaagcccaggcgggtttcccgagtcgcccgggcccacgctgcagagtgaaagccacagcggcaaagcctgcactctggacgctgcgccgggacgtccccaggtgcggcaggcagcgctccgtaagtgggtcctggcgggaactccgtccttctgaacccagatcaggcccagggagaccgtaggggcgccgcggcgggcggggtctgggtcctcggtggtgactgaagcctcggttcgctcttctgcaaggtgcgaatccagagcctccagctcgggagggacctgacgtgccggacgcgtccagctcagaactcgaggcgcggtagacactcagcaaaggcctccggcgtccctgcagccgtggggggaaactggggacgcccggaggaagacgctgacccggcgagcacctgagcgcccacctgtggctcatcccggagaccgccccctcccccgcgacccgggcggggcctggggggcgtggctcccgtctcgctcagccaatcagtgccccggggccgcctcccgccccctcctgaggagacagcgcttgcgtactcgggccaaggtgctcctcgggccccgcccccggggcggtgctgacgctcgcgccgacgcgctcgacgtcgggcacgtagacgccggcgccgcgcagccgggcccgctcctcctccgctccgccagtgtccggccgcgggccggccttagtgactggggcggcgggccccggggccgcggcgtggggcgggcaggcggacgccggccgcgggctgctttcgtcggctcccaagctctcccggagcgagcagccgcccgcgagccgccgcggagcctcctcgcccgctcccgccggcgagcaaggt

SEQ ID NO: 7781 - DNA, 2300 bp, Homo sapien
aggctgtacctcactgtgctgccttccttccgctttccgcctccagctctgggttgggatgccagcctggtatgtggctgcctgccgagcaaacgtgaaaagcggggccatcatgtcggccctgtccgacacagagatccagcgtgagattggcatcagcaaccccctgcacaggctgaagctgaggctggccatccaggagatcatgtcgctgaccagcccgtctgccccgcccacatctagaacggtacgttcagagacaacccctgcattctttggaaacagggaatgcctctctgaaggtatcactgccctgtttacattgcttctccagttccttaacagcatatgaagtatagttctaattcaaaattttagcatcacatacattagaacttttaattttggggaattggatggtcaaaagaaactttattaaatgcttttatgaaagattggctagaatggcttcatagtataaaaatatgagcttttttaaacatagaaaagcaattacaaatttaaatatggaaatatgaaatacgaaaataccaaaaaaaattggtagagatgggggtctcgctgtgttgcccaggctggtcttgcactcctgggctccaagcagtcctcccacctcagccttccaatgtgctgggattacaggcgtgagccaccacacccagctgagtttatcaaaattgaatcagtctaagggcctcttgaaggaaaaagttaatattttaaggacacattttataattaaatgttttgaatttcatttttcagttttcatgattcaaactgagtaattaacatttgtactatatataaagatatttgctaagccaattatagtgtatttttaaatgttactggaatataatatacatatagagaaatgcacgtatgagtgaacagttaaatgaatctgtaaagtcagcatcccctgtgtggtccacacctacattgaaaaatgggatctgaccagggctctggaggcctcctgctccttctgaggcactgccccttccctagggatgagtgcctggctcctggtgccatagactgctctgttagtttcgttcttcatgtgtataaacaagatcatgtagtattcactctcttgtgtctggcttctttcacttaatgttatgtctgtgaattcatccgtatcattccatgtgtaagtagcatcttgagtaaaatttttctgtctagttcagaggactggctcttccaggcttcttagaagcacccatttatttatttatttaagttttttattttttggaggcaaggtcttactctgtcacccaggctggagtgcagtggctcaatcgtagctcactgcagcctcaacctcttgggctcaagcgatcctcccacctcagcctcccaagtagttgggactacaggtgtgcaccaccacacccagctaatttctaaaaacttcttagagacagggtcttgctgtgttgaccaggctggtctggaactcctggcctccagtagtcctcctgcctcagagtccctgagtgctgaaattacaggtgtgagccaccatgcccagccagaagcatccattgaaatataggtgacatactagtaagagatacttgttatcccaccgtcaaaactgatccctaaggaatttttgtattttttgtagagatgggtctcactttgttgcctaggctggtctggaactcctgggctcaagcgatcctcctgcctcagactcccaagtagctgtgactacaggcatgcacagccatgcttggaaaaggtccctaaagaattctaatcctcccttccccatcattccagtttgcggacattttttaaaataaaaactaaaggggaaaataaagatgagatcactggttgccttgtaaccagtgttttactgtatttgatttatttggcctgtaggtgttttccatttggggagctaaagaccctgggagctcaggatttcaagcagttcacaaatctgcaaatgttcatccaacatgagctgtacttatacagtttctctccatgtgggaagtccctcaaagtccttaagaagggttatcctacttgaaaaagaagaactatgttaataaaaacaagaatggttattgggagataagggcaggccaactccagatttataaagttgagactttttacactggctggattcccagtctctgcttttagtctcctcaggagaaaacaaattcttgttgcaatgaagagcctcacacatttctccaaggagcacgtcagcgctggatttagggctcccagttacc

SEQ ID NO: 7782 - DNA, 2300 bp, Homo sapien
ctgcatcttttgagatgatatggttttttttcaatctcttcatatggtgagtttcattgatttttcttttcaaatgttgaatcaacttatgtttctagaataataagccatacttgtcatgatatcttattgttttaatatgttgttgacttggcaatattttgttacatatttttggatctgcctgagggctactgatctatagttttgttacatctttggttttgctctcaggatgatgctggcctcatagaatgagataaggtgtttcaaacttttttggaacacttcgtgtagaatcgtggttatttatttatttatttatgttgataaatgtttggtagaattcaccagtgaagctatcttgggtagagattttcttttttgtatgttagaagatttatgattacaacttcaggttctaatagagatacgtgttacctgtttctgagaagctttggtagtttatcttttaagaaatttgtccatttcatctaagttgcttaaaattgttcacagtattcccttattctttcaatgtctattgaatctatattgatgtcccctctttgttgtcattttgtgtttgtttttgagacaaggtctcgctgtgttgcccaggctggtctcagacacctggactcaagccatcctcctgcttcagcctcctgagtagctgaagttaccgacatggccaccatgcctggctgccctcttttactctttttttttttttctttttttgagatggggcctcgctctgctgcccaggctggagtgcagtggctcaatctcagctcactgcacctccgcctcctggttcaagcaattttcatgcctcagcctcccaagtagctgggattacaggcatgtgccaccatgcctagctaatttttgtacttttagtagagaagaggtttcgccatgttggccaggctggtcccctctttcattcttgatagtggtgatttatatcttctgttttgtcttatctagtccggctagggtttgttaatttgattgatatttatgaagtactagattttcatttcactggtttatttgctgttatttttctgttttctgtttcattgatttctgcttttttaccttgttccttctgcttgccgtggatttcattcgttcttctagtttaagttttaattttttttaattttgagacagagtctcgctctatctcccaggctggagtgcagtggcatgatcttggctcactgcaacctccacctcctgggttcaagccattctcctgcctcagcctcctgagtagctggaactgcaggcatgtaccaccatgcccagctaatttttgtatctttagtagagatgggatttcactatgttggcgaggctggtgtcggaactcctgaccaaaggtgatccgcctgcctcggcctcccagagtgctaggattacaggtgtgagccactgcaccaggctagtttaagtttttaaaagcagactcttggatcactgattttcgaggtctttctcattgataatcctttgtcgtgatttttgctctcacggtattgttttaactgtttcccacaatttttgaattttttaaaaattttctttaaattaaaaatattttctggtggggcagcagtggctcacgcctgtaatcctagcggtttgggaggccaaggtgggtggtggatcacttgaggtcaggagtttgagaccagtctgcccaacatgttgaaaccccgtctgtactaaaaatacaaaaattagtcaggtgtggtggcttgtgcttgtaatcccagatactcgggaggctgaggccggagaatgacttgaaccctggaggcgaggttgcagtgatccgaggtcgcgctactgcactccagcctgggcgacagagggagcaatttccccttgtaatttcttgctgtgaattatttagaagtatgctaatttttaaatatttagtagggggttctagatagctttttattattgatttctaatttctgttgaagtcaagagaatgtaccttgatttcagtctctttaagtatgttgagatttgtctgtctttgagaatatactatacagacattaaaagcatatatattctgttgttgggtggcatgttctatattctgttgttgggtagagtgttctatattctgttgtttggtggattgttctatattctgttgttgagtggcgtgttctatgttctcttgttgggtggcgtgttctgtattctcttgttgggtggcgtgttctatcttctgttgttgggtggcgtgttctacattccattgt

SEQ ID NO: 7783 - DNA, 2300 bp, Homo sapien
ttgcactccagcctgggcaacaagaggggaactccatctcaaaaaaaaaaaaattagctgagtgtggtggcacgtgcctgtagttccagctacagctacttgggaggctgaggtgggaggatcacttgagcccaggagatcgaggctgcagtgagccttgattgcaccactgcactccagcccctgtctctaaagattaaacaaacaaacaaaaaaaaacagtcagcaatgtaaaaaaaaaaattttttttttcagagatggggtctatattgcccaggctggtcttgaactcctgggctcaagcaatcctctggccttgccgctcaaagtgctggtattacaagcctggccaacaatccttgtgcacagaaaatgcaaattagctgtgtccagttaaatgcaattgacctttgcactagagatagagcagtttttgcaaattcatttcagcattcgtcttccgttttttttttttttgacacagggtttctgttgcccgtgccggagcggtccttttgcctcagcctccagaatagctgggaccacaggtaaacgtcaccatgcctggctaatttttttcttaaaaaaaattttttttttttggtagagacagggtcttgccatgctgcccaggctggtctcaaattcctgacctccagcaatcctcctgccttggcctcccaaagtgttgggattacaggcgcgaggcactgcatctggccaaattctttaaacaatttgtaacaacttatgatgtattcattatcgagttaaataaaatatttgacgtgttcattttatatgtgtatgaaggtcatgattttacctttaaaaaaatggtcaacacctgacatttccttccgccacccgcacttccaattcatcctcacatctgacagtttagctttctaaatgcctcttgcatctatccacttctccccatcttacctgccaccagcggtctgcccgaattggctacattaggctctacctggcccttctcccatccatcttccacacagcagccagagtgatctcattacaattcaaacttcattatgtcttatttatttatttagcgatggcgggcgggggcgagggtctcactatgctgaccaggctggtctcgaactcctggccttaggcgatcctcccatgtcagcctcccaaagtgttatgattacaggcgtgggccactgcgcctggcccaaacttcatgatgtctcttatcagcttaacttcctccgaggacttcccgtgtctcccagaataaagaccgaggtcttcgctgtgctctatcggcctctgcatgacctggcccctctcacaccacagctccgctgcaccactagccctctaccatgctgagctgagcctcctccagttcccctgctgcaagaccgttcctgccttgggacctctgttggccctgctgttggaacctgctgttggcctgcctggaaaattcttccctccttaccttgtttactcttatagggccttcacatcttggctaacatgtgaatcgcccaaagaaacctctggtctcccaggggttcaggtcctaccgtctccccaatacgatgttatgaaactctcacttcttggcatttatctcatttcccaggtgagtacccatgtggtttaacgcttgactcaccttctaggctgctatgtccctgtggccggggctcgcgtccctggcacgcatgtggccctttcttggaggggaggtgcatggtgagcggacgaggacggctgagggcgcgcgcggagggaggatggagagatgaagaggctccccgctcccggactcagggcacgtgcgtctcctcggctggcttccttcccccggccccgggcagcgccgcggatcctgagaccccgccgcgggctgtgtgctgctcagcgcccatcctctgcgcgcgcaacgctacttccgggcgagctctgcagactcgccacaggccgggctagcgcttagccagctgcgggcggacccccgggactcttgcgggccaagacgcgggaggaggcggggcagggggcggggtcgcgcggggacccggatgcggccccgcccccgccctcggaaccggaagtagagcctggtgcctgggagcggctggcgcggcggaatccagggccgacccgggccggaccgaccccaggcggcggtgagcgagcgcggcgtccgcccggggtgcaggccgggctctgcttcttccctcctgtggcgtcgcctggccgcgaaaggggaaggaagcggcggccgcagcggtctcaccgctcttccgct

SEQ ID NO: 7784 - DNA, 2300 bp, Homo sapien
gctacttgggaggctgaggtgggaggatcgcttaaggccagcagttcaaggttgcagtgtgctagatggcacctgtgaagagcctctgcactccagcctgggtgacagggtctcgctctgtcacccaggctggagtacagtggtgcgatcgagctcaatgcagcctccaactcctgggcttgagatcctctgcctcagcgccccaagtagctaggacaacaggtgcaagccaacatgcccagcgaatttctttttttgtagacacaaggtctccctgtgttgcccaggctagtctggaactcctggcctcaaacgatcctctcaccttgacctcccaaagtgcagggattacaggtgtgagccaccgcacccctgccccaggtcaaaagaaatttcttttcagtaagatatagcagaaggttagcttctagttctaggggacctaatatcaaaacaaccctgcctccccaactttttattgagtcccacttaaaagactcttccttgttccttgagtatctggcgaatacttctctaaccagaggagaaacaggactgactcagtgctctggagccagtgactcacccacacggtcaaacacgtgaatggagacaggggcaggcggccagcccctcctgcgccacggccttgggcccggccgggcttgagggctggatcatgcctgaaggacctagtgggtgaagtccccccgacagagcctgcgcagccaagtcaacactgagcccaaagggagcgcatgggattccagggagcgctcaccggatgcctccggagcttccttcagcagaaaatgaattcctccccaaggggccccaaacgtccacagattccagcgggaggaagccctgtcccttctcacccaaggccttccagcttcagggatcaggcatcccttagactatccaggtgatggaaacgtaacagaaagccccaaagcaccgttctggtgattttaaacacaccccgaaggagggacggttccaaatttagagcctcacgactagctgcagccgcgcctcgctgcctccactgacctgattgcaaaacctccgctcaggtgcaggccgggcggatccccagctgctccgccacgtcccacagcgagcccctcaaagtcgcgcaccccaaccgccttgaccccgcggaccccatcccttttccctgcgcctggatcccttcccctggagccccaatcccctcccctcggaccctatacctttcctccgagccccgaccccttcccctcgaaccccaattcccttccctcggaccccatcccagtagctctgcgcctggaccccttcccgtcagaccccaatctcctcccctcggacctcatccctttccctctgcacccagacacctccctctcagacccctcgccctttccttgagaccccccacacccaccttccttggcccctcgaaccccggccccctccgctcagacccccgaaccccacaggcccagcccctctccctcgggccctaataccctccccctcggagcccatccccctctcctattccctcggacccaagacccctcccagcctggcccctctcctgccctggagccccccggcgcccagggaccctcccctcagagctgataccccaatttggcccctttctaaccttcctccgcggaccccagccccaagccctccgtgcccccttgccccctgcccggcctccttgggcccagacccgtcctcgtggccctcgcggacccccggccctcgccctgccccgccccaggccgggaaagcctcgccactctgccccggcccccgaaaccgcaagcggaagagcggtgagaccgctgcggccgccgcttccttcccctttcgcggccaggcgacgccacaggagggaagaagcagagcccggcctgcaccccgggcggacgccgcgctcgctcaccgccgcctggggtcggtccggcccgggtcggccctggattccgccgcgccagccgctcccaggcaccaggctctacttccggttccgagggcgggggcggggccgcatccgggtccccgcgcgaccccgccccctgccccgcctcctcccgcgtcttggcccgcaagagtcccgggggtccgcccgcagctggctaagcgctagcccggcctgtggcgagtctgcagagctcgcccggaagtagcgttgcgcgcgcagaggatgggcgctgagcagcacacagcccgcggcggggtctcaggatccgcggcgctgcccggggccgggggaaggaagccagccgaggagacgc

SEQ ID NO: 7785 - DNA, 2300 bp, Homo sapien
gaagccgcatgcgtgggagcttccatggggtcctgtctggcttagtcacgatgctgaggtcatagactaggttatttcctgccactctccaaggagggcctcttcatggatgttatctaaagtattaccaaagatccggaagggaagagtagattgagtgaatcatatgcgtttaactgtattgaaaacatactttccacctgtgacctgcactacctgttaatgatgggttctggcctttcattgtgcatgtagactatgtgaaagggtttggaggaaaatttggtgtgcagacagacagacaagacaaatgtgcccttggctgggatcaccaggagaaattgcagctgcatgaatcccaaaaaggtacattcactctgcctgtatgcgagatggttttagaagtttgtttttgttccttgcggggtcagttggtatgtgttgtgtctgcgtgtgcctgctgcacattgttttgtcttcactgtttgaagttgtcctgtgtgcccccccaatcccccagttccctccagctagtgtagtcacaaaccctccctgctgacacggggtggtaccccagagagctgggtttacctggaagtgggttgcacgggccaagcctgcagcagggggctgggtttacccaggagtggggacatgggtcaagcctgcagcggggggctgggtttacccgggagtgggggcatgtgtcaggcctgcagcggggggctgggtttacccgggagtggggacatgggccaagcctgcagtgctcctcatccaggcttcttgtctataaagtgggccacggtttttggcaggagatacttacttttgaaccgaaagtgttttcttgttggaatgggtgccccttccctggaaaaaggagcctgagggggctgaaagcctctcagtgtgacccagccctgagagaagcaggagcggggctaatggggctgcagcgccctccgaatctgcagggtctctcctcccgtgtacacagatacgcacactcgtctgcagtgtgcgtaggacgctaagaatgaactgcacagccgggagtgcctttactgaattatttgaagtacagttcttaggctgttccagatcttcgctgaatgttcagattttaagttcattctttaacgttgacctctggagccaccttctggcgctgagcctgggagtaggatctcaaaggccctaagctcaggagagcccttgctttctggaaactgtgtttgatttttgcgcatgctcatgcaattctaacccaactgtgtttcctcttttggttgttttccccaccgttgcttgtggattttcagattataagactggttttggaggcaaattcggtgttcagtcggagaggcaggactccgctgctgtggggtttgattacaaggagaagctggccaagcacgagtcccagcaaggcacagttgccaccagcctcctaccctccccccgaccctcctgtgcggccacttctagcacagacttcagggctcaccgtcagcacctgcaacacagtcctcctgtgtcaccacttgtcagctgtcaggctgttcggcactttaaacccatttctagtagagcgacactgattttgagtggttcactttcttccctgtgaacttgtgatctgtgtatggcaggatgcgccagttagtgtgtgggtgccatctttctaacccggtgacccatccagtctctggactggggcatctccggtctccagcagcattctgcccgaggctgttctgctgttattggtgactgccgtgagccactgagtcaggccttccagatgaggagagaggtgttggttcaaccaaaccactggccatttgaccaggggcttcgtagcagcaagggccaggagacaggcgtgttctgtgtggtttctgtgtttcatttgtggtggtgtttttggccggggttgggaggttttttgtttgttctgtttgatgacaccatatgtgtgtaacatctccacacagagccacacagtatgtacgtgaagccagctctgcatccttccttagagcagttatgttgttaccttcaaaatttggacttggttattagaacctgaacacataattggaaaaacagtaattccctaaccttgcagggaagactctaggctttccacctgcagcgttagaaacacacagcagtgttcaggtgtgggcaggtagacacacctggggtggtcccgcagactgcatggagatggcagtggctctccgtggcatcactgctgcatgacagtgtgactttcatgtggatctgtg

SEQ ID NO: 7786 - DNA, 2300 bp, Homo sapien
ttttaagcctggagttgattccagcctgggagggaaacgccaacacttggagagggatggtttcaggcatgtgcgcgccacagctcacgtgctcactgcagcctgaattcagtggggaaacgcgccccgggcaccctccctcctctgtcagtgttccaagccacccccacatcccagcaccggaagagcctggcccctccttccatctagagagccttgggtgtgttctccgctgagccacaccctgtcccctgccccaccaactaaaacacaccacccaggctgctgccgaaaaggctgggagaggggcagcgagccagactgaaaccgcctctttcgaactctctgaagggtttggtcagttctctgtcatttaacctagtgcttggtgatgaggacacagaatagagtgtggctctgctgctggcctcccgggtctccaggcctgatggagtgggacacacggacgtccagcaggttccggcctggcgggagagggaggtctggatcacaggctgcgggccaccgtgaccctgggggccgcatgtggtgggaagggcagcgggatgagctggcaaacactggggactccagctcccctaagggcctccgaactgctgccacagccgctactgctaggtgcactctgacatcagctccaagccggggagagggggtgctgccgtcaggaaggtgccacctgggccagaggcacgggacaccagggagcacctgctgcagagctggatgatcctggtgccctctaatgccctgactccaataagcctatctctgggcctcagtttccccaagtgtgcaatgaagggcctggccatccagacccccagcagatccggccccctgacatccattctagtccccttcctcactatgaggaccctaatattgtcttggcagttaacagacccagctacaaaaccccttttctcagtttcccctggctgctaggagtgaccaggagaccccagggtgcttatcaatgagacaggagaggacatcgtctgtgggcttccagagaggggcagacagcatgcacactgcttttgctcctggccctggtccgggagatgcactaccgtgggctttggcccccactcagcttgccctatgctagaaggttccctgatggcagtggggtgaggtgggctgcagagcccacgcttagagcaagagaaaggtcagccatcctgctgggctggcactgaccttgcaggtgccctgaggccagacggcaggcagcagcgatgccccaggtcccaggccccagaaggctggtcagcccccaggacaggaaccaggccacggctgaggactgtgagggtggcagacagaaggacaatcagacccaggctgcccaggcagaggcggggccaggaagagatctgcggacaaagtggcatctctaggcctctggaaattgtgtgtgatttcaagcaaagagacggtagtggttgaattttgtccccctaaaatccacgtctatgtagaacctcagagtgtgaccttctttggaagtaaggttgctggagatgcaatcacttgggatgaggtcatcctggaataagtgggccctaagtccactggttggtgcccttataaggagggaaaatacagacacacagagacatggccacgtgcagatggaagcagagactgggggatgtggccacaagccaaagaacacctggactccccagaagctgaaagagacaaggaagggtcctcccctagagcactggagggagagggccctgccgacaccttgacattggtctctgcctccagaactgtgaggggagacacttctgttgttcaagccccagctggtggctttgaaccctttgtgagagcagccccaggacaccagcacaaagggtgagcatgtaggaggccagtgtggtgacctgcgcatcctgtggtccctccctccggcgcccaacgcatcctcaggactagccggggcctggggaccggacagggagcaactggcagcagagggtgatgacagagcctgcattccggaatctgacccacaaagggctgtggcattcataggagaagccacggaagaccggcaggaatgacagaagcagcagcgagagcccttcagaggaccgcgaaacgcgaactcccaccccagcaaaccaccaaggggaagaggcgggcccccatccaggaggccttaggaacaggagagctgacttttctaaagcaaataaggtccaggttgcctaaaacaggggagggtagcctaaggctctcccagactcatgacaact

SEQ ID NO: 7787 - DNA, 2300 bp, Homo sapien
ggtttgttcttacccactcttgctgtgcagggaaactgaggtttagagagccccatcattttctaaaggtcacaataaccatgtgacctcacccccaggctcccagggtcctggacctctgaccctgtgtcagcccttgtttggtggccctgagcagggtaagtgggcttccagggatgagccaagaggggctcacagttgtgaccgagttccccagagtggacctccctgcacttagcaggctgtctctggggagggggcaaggtaaggaaggtcaggggccagaacccccctcccagctgctgacaacgggagtgaccagtcacctggattgtcctggtcttcggctgtgaagctatcattcatgctgggctattcctggaagacagggtcaccccagcatgcctccatgcacgaccctctgatgctgtcgggggtgggtgcgtggagtggtgagaagagcacgcgttccctagctgggtcctccgatctctctgagcctcaccagcctcatctgtaaaatgggaggatcgaggggccgctgctcgtcccttgtccaggatactgagccctgtcatccacgtttgccccgtccctcctcctccccagggccccccaatccggggtggctgtgctgtcaccagctggctgcacctggggccctgtgcttcctgtagaccgtgaacctggtgctggtgccaggcagagctgacccgcactcctctgggaccaagagtccgtcagcacatggccttgtttgaaatttgcatccctgggactgcccctgtgcgacgggggcctggtgggttcctcatgacccatctgcagctttttccggctgggccgctggcctggtgtcctttctcctcacccccgaggctcacacacagccccgcaagaccctgtagaggcctccctccacgctgcctccctcccttccccgctcccctccacagaggccttcccagctccccactaacttccgggcagcagcagagtcctacggggcgggggggtgccggtagccttcatctcactccccttctgcccccgcaggccacccagaaggtgggggtggaggacagttcagccgcagcctggaggctcactgagcagggcaccgtcccacacactctgggtgcctcgggggctggatgtcatgtggcgagtgccagcaggaaaagcgagaggacactgtggccactagagcaaagttggagcttttttggtttctttccttaaaaaaaaaaaatgccatggctagaggcaagcagttgtggctttagctttgtcatctcaaaggggcagccacataccccctccagttccccagcaatgaattcatcatccccagagggggctggtgtcctcaggggctttaacaccgaaatgtcctgagtcctctgccagggagcccccacccctccccgaccggccaccggccaccttccaaggctgcaagggaccggggggacgctggagggggggatgcagagagagccccagccgctccccctccccgccctctcccagcccagcctgcggatgctcgcgcgggatgacgcccaggcagccgccgggcgcactgtgggctcgtcagatgattgtgggggctcctgcctgccgcacaccgccggcgccgggacgggagagggagggggcgctggatgcgacgcgcaggtccctgcgtctctggtgcctgctgccggctcgtgcggggagcagataggatttgattttattttaaacccccttcaaggaaaagcaaaacaaaactgctgcctcatttctcctctggctgattttcccgggcttccctggaagatgcgtgtggtcgggacaagccggaggagctcattcccgacgccgccgctgctgaggccgccgctgccgccgccgccgttcgggccacttactttctttgccctgggcggcgtcctggccagccccccttgagcctccagctcagccatccctcaggcagccgccccaccatgtatgactccttcctccggctggctccggctctgcctgcccccaccctgcaagtctcattgtgccacgctcgcctatcccggtagccacccccctcttccttcgctcctcctgcaccctcgctgcctcctttcctccatgctgcctggatctggcgagctggggtgattaattggctatgatgatgaacgtccccggcggaggagcggccgcggtgatgatgacgggctacaataatggtcgctgtccccggaattctctctacagtgactgcattattgaggagaagacggtggtcctgcaga

SEQ ID NO: 7788 - DNA, 2300 bp, Homo sapien
ttgagcgtcactgagtctccccgagagttccctgcgctttgatgagtcctctgggctcacgtggctgagcacacgaccagccgggtcccccagccttggaggagctccctgtacacaccaatacggacacggtggcatccccgtctcagcctcccagcgctcgccagccagggcaggcagccaggccagcacatggcaatgaactagacactcaccatctggaaagcttctggcccccctggctggtccacccggaggacacatcgtcaggcctcccgaagtgggggaaagctttgtgcatccgaggagggttcttctggaagctgttcagccttgctcagagtgtccgaggaggtgcatgaactctgtgggacacactggtggctctgacctcagaaccgtttcttaatgcaagtcttagaaatggctttgactcagttttatgagtcggtgatgcatggtagggtgagaatgtcaccccggcagagttttgacatggctcatgagttgtgtgagttaaataagagatgaagtttatcgttatttctgggtttttgtggggttttttgtttgtttttggagacagtcttgctctatccccaggctgatgtgcagtggtgcaatcatagctcattggagcattgaacttctaggctcaagcaatcctcctgcctcagcctcctgagtagctgggaccacaggcgcacgaccacacccggctaatgtttttaaattatttttcatggaaacggggtctcactgtgttgcccaggctggtctcaaattcctgggctcaagcaattcaaccgcctccaccttccgaagcactgggattacaggcgtgagccaccgcacccggccaagagatgctgttcgggtgctcagctgatatagggcgtacactcagtgattctgtggcagtctctgctctccctaaagccagaggccctcaccgaggcatgccgcagtcccgtccctggtacgccttcagggaaaggctcctggggggcccccagccttcttgttctcacaccgccatttttattgacacaaagtgtgtcaaccatatggaattaaactttagtgctctggttgctttttcctcgtcttgtctcgtctttctctggttgtgtgtgtgtgtgtgtgtgtgtgtgtgtgtgtgtgtgttttaaatttctgaagcagttctcttagcaaccagaaaaaaaaaaaaaaaaaacacacacacacacacagcacactaaattacagcccagcagaggcatccggcaacagaaccttgcccctggatgctccacgtagcttcaggaagctccttctcctggtgtagaaataactcactgtccacctgccacagggcaccagcctgcatccacttctctgtgtttgctttataaatctgactttctccatgtagggcttccaaggggcagctttcctcttttctcttcttctgttgggttggaaatgctgaggaaatgcctaaagtgaccctgaagagctcgcttttatcagctgcctggaatcggggccatccttggcagggtctcagtttaattgtctttttatctctctctttaaaaaaaaaaaaaaaaaagtaggagggggtggagtcctgttttttccagggtaattacctcgatgggtggggagccagagaagtcatgggcacttgtgtctgattcttttgaacagaaatataggtcgtgttcagaaattccagaatgctggccatgtctgcccggggaacgtgggtctggtgtgaagcttatctggtacttgtacgcttccctcccccttgtctgtcttaccacatctgctagctgacaaacaaacttggctttttctttaaaaaaatttttttttaaaaaaatagaaaagcacagtgcagtatatttaggcacaggcgcatggagcgcccagcaccagcccgagtttccttggataactggggctcgagctcactcatgcctcccggcgtctcccagctgccagctcgaggacgcctgatccgcgttaaccctccgcggtgcctcttcctcaatgccctgagcacaaaagcagagtagcccggctcacatgacgcgcgccgcgagaggtagccgggtttgagagcagcccgtctacgtgcagttggttcccagctgacagacagaatatggggtgggctttgtcaccagcacgctgggtctggcatgcccagctatgctcggaagtgcaccgtgcccagacacccgccacctctccccgggtcccagctgctctagcaccgaggggccgggctgcacgcctgtccttcc

SEQ ID NO: 7789 - DNA, 2300 bp, Homo sapien
gaaatgcgagcatgcatttatagttttagaaatacacgcaaggggcctggcgcgatggctcatgcctgtagtccctgcactttggaaggctgaggtgggaggatcacttgggcccaggaccaggtgttcaagaccaacctgggcaacatggcaaaatcccatctctatttaaacaaacaaacaaaaaagaaataaaagaaaatgtgtatgtgaatcataccacaaagccccttcattccaaattctttctgcaggagccgcgtgcatctcaggggatactctcttcccaggagccagggaaaggacatccctcgacctgctgggcacacggggagcagcgctggcctttccgggcccccttgtgggagggaagcattccgacctgccccctctgcaggcactgtcagtccaagctggcagccaccaacaggcattttaatcaggcccaggttagtaaatcctgccacttccctgagggttttaaccctgcagttggaaggtcatgtttaacagcaagacctactattatgcctctgtttccatgtgaaaataaatgagtcccacacctagtaatggttttgctcctccagtctgtcctcttaaaaatgggtcgtgaaggactaatgcttttaaaacactataaaacaaggtctgtaatggctctgatgcctcaaaagtgtattaagatgaaaatttatgttttcctacaccacatggcattgaaatacaagctctaaaataagaggcagaattattgtgtgttctgacaaaaaatccccagccctacctgcacctgaacttgcatcaaaacatgatttccatcaaaattcccatcaaaagtcttatttggtataaagcagtctttttgggttaattttttttttaaaccatgcaaacatccatgtcagagttaattgcactgagttggcctcctctacgagccagttaactctgtagctcagggcctggggtttgtttctttgactcctctgggcaggtgcaaatatagcaacctacagttgcctctgcaggctgcagggtttgtgccttgagacaatcccagcagatgctgacctcaggccacaaaagaaaggcagggaataagccagacctcagggagctcagagctagacaataaataagcacaggaataaatgagtgatccaactgggaggagaaccaaaagaacaaagcagagatgtgatcagttagaagaggagcagagcccaatttggatagggtggtctcggaatagtgggacacaggtgcagccaaaatgcagagagcagggggcaggggcaaaaaaaaaaaagtgaaaacctgggaaggatcctgtcgcactgggtctcccaggccagggggaatctggtgtggagcccaacctggatggactccatgaggtgacacctctccccacgatgcggctgtctctgtttcagctgatctaagcaccagacactgaactgatggcacacctgcccagtgcccaggtgccagctccccgaacacagcctgacctcatcccagttcatccagattcctgctgcaaacctgctgcgattaagtgtctcagggggagggtgtgtgacacaatctgatttatggtctttgttgaaagatccctcttcgagctcctggggtggagactgggttgtaggtgaaaggagtagaatgtggagcctggctgggaagctactacactggtctgtgtagtctctggaatgggcttgagtagagacaatggaaatggaaagaagtgcaatacgtcagttggtatttggagcctggactggactggctgatggacaggactagactggctgatggactggactggctgatagactggactggctgatggacatgactggactggctgatggactggacgggctgatggactggactgctgatggactggactggctgatggactggactggactggctgatggactggactggctgatagactggactggctgatggacaggactgtggatgatactcaggcttccggcttgagtggatcatgaacaaagagggaaatctatgtgcttggggtgggggtggggagcttggttttggacacattgcacattttggatcctttgggattcccccacgggagtagtcaactgggcagcaggacacagtctagagtctagtaaactggaggtaagaatttgggaggaggagacatgggtgtggggctgattttgctgaagtgcccgtcttggggctcttggtctcagcaggagacaagccgccttacctcagtgattcagggactcagggac

SEQ ID NO: 7790 - DNA, 2300 bp, Homo sapien
agatgttgatacacgtatgcaatgtgtaatgatcaaattagggaaattagtgtatccatcacctgtaaccttgattttctttgttttgggatcataagagatttttacagacttgaaggatgttgcttcatcggagcacaaggctgaactggatatctctaaacagacacaaagaaactggggcgtaagcaggatgctgtccttaaaatgccgaatgtcggggctctcacacagcgctcttgttggctaacagatcagaaagactggagggggatggcccaaggggtgtccacttgggtggaaggctggcagaggcctgcgtccctagggaagtatttcttggagatagcataatggcatcggtcttaaaccttgcatggagatagccgaaaaatgttcacaattgaactgtgaccagctgcctggtctatctgcagcagtggttctagaaacctaggaaggggtgttccaggggtgggaatctggtgagaggagggaaatatcctgaggataggtctttgagctgggtttgcagggtaaatacaccactttattcagatgacttgccttctttggtggggagggtactgatggactgttatggaaaggtagagcccccacccccactccctgcaacccaggtcttgcatctgccaccggccaacccaaagaacatccgattgtcctgctcacacctctcccaggcaccccagcttccatgccaaacaaaggatgcctgcaggatcctgtcagggcgtccttcttcctgttttggggattattattttttgattgattgactcctttattcattcaacaaatattttatcaagtgtatgcttaaggaagcagcgacgagaaagacatttacataaggcagctgccctcaaggagttacaatatttattccatgtgtgtcctgaaatattcaggccccaaacacaacttttttttttttaacctaagtgcttttaaagacttctttgaaatgtgggacaattatgcaagctgaaaaaaaaaagtatctagagcaaatatttaactttgcctttggtatgttgaagtcaccagcccatgcaaacctctcaggcatgtcctgtaagatagactgacttacacacacacacacacacacactcactctatgtagggggcacagttaggggtttgcataatgccgggctccagggttctggagacagttctactccacagcttggactctgatccccacccacaccttccagaatactggaaaactcagaacacagagacctcaagagcttactcagaaacacgcagctcgtactgggggagactcccagtgaatgattaaggccttgagaaaatctatcagccgatggctcacacggcggccacagctccaagctcaggacccgcccctttgggcttccgcaaacctagcaatccggagtcctggataataacaggattcctggagtctccggagggtgcctttggcctctgggattcacccgagccgttggcttttgctccccccaccccaccccctggcttttcttggcttggagggcagctggcggagataccgttgtgcacccctgggcggaaggcgccccagaactggtggcctgggcagcagacgccggcgtatcacccgggtacaaagttttcgtttgctctgcaaacgttttgatgtgcaggcagcctctatttccaaatcctattattataaatactctgtggcgggagccagctgcgttcgggataaccgtgcagaccgaaccggactttacaaaaatcagggactttctcgtccgccggctttggccagggagggggaggtccgtgagccacgcagcccggggcggggcagaggcggccagggcgccccgcggtctcccggggttgccacaacagaccccacgcgcacgcccgagccgcagccgcgggcgggagcggggtcggggcgggggactgaggtccgcggcgtgggcgggggtgggggtccaggtcgggtcgcccgcgggtcctgggccgcacgcgtcctttcggcggcgagagggcccctcccccaccctcgccggagccagctcccgcgccgggcggggccgggtccttccccaccccctgcacctgagccgcggcggcggctcctgagctccggcggggctgggcgcggcgccgctcgggttcccgcggccgatccaggtgtgcgcggacgctggcgctcccggggggctcggacccgcccccgactcgccgagccaggtgaggcggcggccggggacgcagggcgcgggccggggaggacggga

SEQ ID NO: 7791 - DNA, 2300 bp, Homo sapien
agccagcatccttattgcccagcactagagtccttgtgctgaagcacgaagctgttaagttctgtctcccaccacactctttcctttcttttttttatttttgagatggagtctttctctgtcacccaggctggaatgcaatggcacgatcttggctcactgcaacctccacctcccaggttcagatgattctcctgcctcagcctcccgagtagctgggactacaggtgcatgtcaccacacccggctatttttttttttttttgtattttttagtagagatggagtttcaccatgttggccaggctggtctcgaactcctgacctcaggtactctgcccgcctcatcctccgaaagtgctgggattataggcatgagccatggcacccggccactctttccttcctttacgaggcaggatcttgctccattgcttaggctggagtgcagtggtgtgatcatggctcactgtagccttggcctcaaactcctgggctcaagggatcctcccgcctcagcctcctgagtagcttggactacaggtgtgtgccaccacactcagataactttttaattttttgtagaatcatggttttgctatattgcccagggtggtcttgaattcctggcttcaagggattctcctaccttggcctcccaaagtgctgggattacagaagtgaaccacagcaccctgcccacactcatgcttatagccttctgtctcgtttttttctgatagaattctaacagtcccaaagctctgtcctacagacccttagcacctagagcagcaaatttggaggaaaaagagggtttcccagttgagtcccagtgatgacagtcaacatctggttggccatcacgtgatgttcacggaggtggcattaggaactggtccctgacatatggaagtgaggatgttaaagtccactactccagcagggtgtggtggcgggcacccatagtcccagctactggggaggctgaggcaggagaatcgcttgaggccaggagtttgtgtacggcctgggcaacacagcaagattccatctgagatttgttttcacgtgaacgactccacggaggccctctgcgttcacttgccgactggcagagacagtgccatcatgcctctcagtcaggcttcagcagtcctgactaccttctgtttgcacagcctcaactgtcaggttgaaatgtgcggcgtctccacgctgagctgccccgtgtccttctacagctgcctattgctgtcgtttcagcccaggtaaatgtcccgcccatgtaagtgagctgcaccttcctctgcccttgccttgtcccagccagacgacctggaccctccttctgcctgctccacacatgtggctacctctccagtatccccaggatacctcccacgcctcccctgctcacagctgagggcagggatgctccatacttcgagctctcttcagcctcccagtttcttggccatcccggcaaaagtcttagggccgctgttgtccttggtaggacagatcgctggaaggtcacacactccaaaacaaccataaggatggtgatagataaagtagaaacacgagcataaaagcaaaaaggtaatattctggggctgctgctgccagggactgatgcccacacagggcggggcccctaagatcacggctgtgttacagcacattgccattattgcgcatgatggtggcctgagctacccagaagaggccacctgacacccagcatccctgctcaggaaggcaggcagttttgtaatgccctttagagatcttggtgcatttaaaaacatcctgctctacttagtttttgttaaccggattattcagttatagggaatgattcattctctaatgaaaagagcagaagggttgtgggtgggttgcattataggtgattttcaaagagttctttgtttcagtagctctggtttggcctagatgttttcactgtttaagtctttcagaatcttttttttttttaatttttaaataggaagtgagaacatccccgagcaagaccaacaattgctgaataaacacaaacccccttgagaatcacgccgacaggtgctatctcttcacctggggattgcaaaggtgagagaggaggccagtgcctccctgtgtctggagaatcatataggggttgctctgggagttttaagtttctcctgagtgaaagttagtggttttacatgttctcttgatgctactttttacctcttcctccggctactaaaaaagctttccttgtaggtgaaaatggaaccgaatta

SEQ ID NO: 7792 - DNA, 2300 bp, Homo sapien
aaataaataaatttattatgtcaagagggaagttaagtcctagaaactgggtcacatagcatgtttgtaattttgtcttttagattataggctgtttttctttatcattcatgttttataaatgactaggagagaccacagaccaggcctgctccccttttaattactgatctttattatagattgtctcttattatcccgtacttagaccagactcctacatcttcagtgtaaaatgttaaatataccttccacctaaaaaagaccacctcagctggtcagattataactttatgcataaaaagatgttaaaattctgttaaacttccctaaaatttgtctacataaatgatcccaaacatctacagttcaaaatactgatttccattctttaaaatctgtgcttcccaggcagcctgtcctcaaactttatacacttaaataaactctctttaagctaaattctgacctgtttggttatttcaggttgacagccttctaacaagataaaacatgctctatgtagtatattatcctgccaaaaaaagtgcatagcctgaatgcacagtgtggctccctgattagatcctggggtttaaaaaagggctgtagggcagagcttcacacctgtagtcccagcactgtaggaggccacagtgggtggatcgcttgagcccaggagttcgagaccagcttggggaacatagtgagacccccccccccacccatctctaccaaaaaaaaaatagcgtgtggtggtgtgctcttgtagtcccagctactcaggagggtgagggaagagaatcgcttgagcccagcagttcaaggctgcagtgagctgtgatcgtgccactacactccagcctgtgtgacagagacccccgtcttaacaaagcaaaacaaaacaacaataacaaaagggctgtaaagggcattattgggacaaccgcgggaaactggagatggaaaatagataacagcattgaactgatgtggtcattgtattttggtaatataggaggttcttgttcttaaggagttggataccgaagtatttgggaggggggtatcacggtatctgcagctaatggtgggggctgagtggggaggaaaaaagaaaaatacacatatataaacacagagggagagaaatgaaacgtggccagctgctcacccctgctgaacctaggaatctgcgtgctcactttacgttcaacttgtttgtatgctgaacatttttcaaaacaaaaaggtgcagggaaaaaagaaaacatgatgtctctctgagggccacagagacgtggcaaccagatcgctctgacagtaaggcctgttacccgagctgttgggtgtggggtcagcagacaccttcagctgccccctcctccagggctgcctcgccccaggtcatgccctcgcaacgtggcccgtgcgtccggctcgcactgtggctcagcttctccctttgcccagtcctgctgctccctcccctcccgtcctcgcacaggtgtgcccccctaataagcaggccacccagactccatctcgggtcactttggcggtctcccagcggcgagccttccctgacacccatgtgtttacctgatcgtttatggaggatcctcttcgccccgggacgtgagccctaggaccaagaactgtgtctgttttgctccttgcggtgcaccggcgcctggacatacgctccatcaatgtgcgtcgcgagccgctgaagccccatttgccgagggggaaactgaggcacgatgatccaggtgatgagcctggcgcgttctccgcgcggcccacgtggccactccgccacgccccacccccagctggtcagctgggatcccgaagaagcgccagaggctgcgcccacccactagggcccgggcgggccggtggggcggcagggcggggcctgggccgtcaatctcgagtccggccgctgccgaatggcgggcgcggtgggcccggagtcagctcaggctcctcgaccaatcacggggcgcggagccgccgggcgtgcagggtccgcctccgattggcaggcaatcgctgacatcatccgggggcgggcgcccctgccctgcgggtgactccgacccctggctagagggtaggcggcgtggagcagcgcgcgcaagcgaggccaggggaaggtgggcgcaggtgaggggccgaggtgtgcgcaggtgagtggccaaggtgtgcgcaggtgaggccaggggaaggtgtgcgcagtggggggcgcttgcccaggtgagcaggtgcccactcacagggcgagggtgggg

SEQ ID NO: 7793 - DNA, 2300 bp, Homo sapien
cagccattgttggcaggagataatttgagcagatcgtgtggatttcagaagcatgaaaactactgtgaggattaaataagttagcatgtataacattctggtgcttttgtggagtttccaaattgtcatgaacaagcactactttatagacaggaaaaaaagtgattcaaaatgtgaaaacgggtatatgtacataaggtaaaaataaaatcctaagccccccattgaccaaagggaccttctcctgaccaaggggacaccagaaaaacctcaacactgaattcccagacatgatgggatgggaggtcagatgcgcctggtaatagccccctgtttcagagtttggacaccacaactggccggcattcatgttaaaacagagatcgtaagactgacagaacggactctgtggcaataagataccaaattataaacaggacccaaagccatgctaggcgagggtaagtcaggcaacccacacttagagaataaactatattctaagagccacaaggctttctgtttctctattagccaaacacacactagccttgggatagggaatattaaaacaattgcagctccactaggtgccaactaactgactctgtttcaccagccatagcagctgtgattggacaagagactgatttcagtgactttctcctaataagagaccaccgaccagctgaccatgccgaccagctgacccgttaatagagagagatgatgcacctgcatgcctttgtgtcctgaaaagacgttttgccataaaggccctaattgtaagatgtgtaaatgttaagtctccaccccaaagtgaacatgggtcatatattacatgctttgctcaataagagggcatgtgtcaggaccaccttcatgaatattcatagctcctcctgttacctgttgaatatgtatgtttagccaatcccttcagcatagcgctcctgccccaacccctcctccttggacgtgcctgtctctggccttggctggagacagattcccagcctcagacagatggccgccaccttgcaggctacgaccgtttacaagaaataaagccttctctttttccaaatttgtgaattgtgtgtttttaaactaacatgaatgacagaaggaaggatggcctcttcaagcaacgatgatgaggcagttatttatatgggggaaaaatggattctaccgtgggtggactaaagaggaaatgtgaaaaaataaaaagtgagaaaccgctggtagtgaatcggtgcaagcgccctggagaagagacttggcaatatttagtaaagtcaaacagcacgaaccctactactctgcaaagctgctgcaggaactggcggaacgaggtcacgaaggaaaccttgccggaaaggaaattgcagcagtgcctgtgtgcgtgcgtctgttggcaaaacgctgctaataacgtcaatgcccatccgctattgaataaacctgctttactgccactatggaataccaaactgcagaaaaataattaaaagaacgtatctcatattacaggggaaaaaatcaagttgcagaagcacattcaagtgcagttcctgtagtttcagaaaaggcaaacagtgcgctacctgagctacttacacacgtggtacaggagtgaaaggggcaggagagggttcccaagaattcagcgccatccgcccagggtggcgggattcccagcacggagaatcgattgctatcgtctgctgtcccgcgggcacgatggagcgctcctaccgtactctccacttttggtgtatttggaacgtttcatgccgtattaaaataaaacatggctaagctggatgtggggtggcggtgtgggataaaatagaggggtgctgcagctgggcggtgagccccctgcacctgtgcacctgaacgggtttgcccgcaagggccgggccggggccggggcctgggacgtgggtggagccggggcgggggcggggcccttcgcggtgccgtgaacgctgaggccacctcgctgcgcaggcgcggtcgtgagctcctcagacggggcggggcgatccgtaggcagggcctgacgccgcagtcctccttggccggagcctcaacggatgggcggggagggggcggggccgggcaacccggaaggtccggcgtcccagccgcctacctcgctgggaccctggtcttgctgtcccccgctggcctcctgcccaagcgactgcggccaggatgggccggaaggtgaccgtggccacctgcgcactcaaccagtgggccctggacttcgagggcaatttgcaaag

SEQ ID NO: 7794 - DNA, 2300 bp, Homo sapien
tggagccggggcgggggcggggcccttcgcggtgccgtgaacgctgaggccacctcgctgcgcaggcgcggtcgtgagctcctcagacggggcggggcgatccgtaggcagggcctgacgccgcagtcctccttggccggagcctcaacggatgggcggggagggggcggggccgggcaacccggaaggtccggcgtcccagccgcctacctcgctgggaccctggtcttgctgtcccccgctggcctcctgcccaagcgactgcggccaggatgggccggaaggtgaccgtggccacctgcgcactcaaccagtgggccctggacttcgagggcaatttgcaaagaattttaaagagtgagtctggggcggcgggggcaccggtttggggtggcgcacgggcaccgtggctgggcccaggcttgcccgtggcgtgctcacagccttgccctgggaaactctcggccctgggcatgggatcaggtgagataatgggcaatgaccccgccagtggtacgtgctcaggtcctcgtcgggaagtgagtgtttatagttcccggggacgagcgatatacaaggcacggttaagaaaagtctggcggcttaggcgggaggcctggggatggacccgtgttctgatatctctggggtcccgtggttgggactgagctgcccattctcggagatatctaagttgaacagaatggctgcgcactggcggggatggtgtgcagaggccagagattgatggtctctggtccccgtgggccttcctggtgggagaaggcgtcccagaaagggaagtagaaaaagacgcctgtcatcccagcattttgggggggccggagggggtggaagtcacctgaggtcaggagttcaagaccagcctggccatcatggtgaaacaccgtctctactaaaaatacaaaaatcagccgggcgtggtggcctcgaagatagggtgtggttgttgaaaggtcaccatctaattttcgttcatatggacgcaccgtggaggatgaaaagttaaactattacacctgcacctaaatgggcaagcctgcaggtgtagtcaggttgcagcttgtcttgcactggtctgctgactgcaagagcctttgccaggaacaatagaaacagaatgtttcaagagatggcatctaatcagtatgtgccctggattattattatgattattattatttgacatggactgtcactctgttgccctggctggagtgcagtggtgtcatcttggctcactgcagtctctgcctcctgggctcaagcgattctcctgcctcagcctcctgagtagctgggattacaggcgtctgccaccatgcatggccaatttctgtatttttagtagagacaaggtttcaccatggtggccatgctggcctcgaactcctgacctcaagtgatccacctgccttggcctcccaaagtgctgggattccaggcatgagccaccgcagccagtggttttttatttttattttttaaatatcaacctgctttcacctcatttgctcagagcaaatctagttgaactgaagaaggcttggccaaaactaagtttccactctgccagcctctcctccctaggtgcttgttggaagctgctgcccaagaccagtaagccgatggtgcctgacagtggcaccactgctggatcgtaatcctctaagtcctttttcctctagatggtgttgggcatttccttgttaataaactaccagggtctgacttcttcctcttcctccgcctcctccatggtgctaagggtcagacctgcaagccctccctgtttctcatttcctgcagatataagcaggtatatgcaagtataagcaggtgcaggcgtactcgtgtatacaggtgtatacaggtgtatgctgccctctgctgccatgctgtcaacaggaagcctgactgcatcccgtctgggaaggcacagagcatttttgtttgttgtttgtttttttttttatcctacctactgcagcaggttgtttcatctgtctttgagtgtataggtgctgaaattgctccattttctttttctctctgtacttacaggtattgaaattgccaaaaacagaggagcaagatacaggcttggaccagagctggaaatatggtgagaacagacacagacaccctggggtcgtcagctagcgataccagcatcagttttccccagctgagaaggcaaggaaggagcagggacagtcctgagagctgtggacacgccacacccactgttgggcctggttaatgccattgaacacctg

SEQ ID NO: 7795 - DNA, 2300 bp, Homo sapien
cctggacatgcctgggggagggttctctgtgcagagaccgagctcctggctctcccctgtaagccgggtgcttagtgagggcccctgtggagaagcccccgggggtcccgcctgctcctggctctcccctgtaagccgggcgcttagtgagggcccctgtggagaagcccccgggggtcccgcctgctcctggctctcccctgtaagccgggtgcttagtgagggcccctgtggagaagcccccaggggtcccgcctgctctgatggcctcaaatttacctggttggtgaggggggacctcccgccctcgggtctggagacagctgaaccccgacacacagcacatagtagtggacggatgaggttgagggcagcttacgagtcctgcgttcccacagtgcgggaggagggctccgtgccacgcagggccaggtgggagtgtgctcaggaacagaggggacggcccccgctgtgggaggcgggctctgtggtgatgagaggatgggtgccgcctggcccctgcgggtgggtgtcgttggtttgtttgaattccgagggctggcagggaaccaaagccactcctttgaaattagcaggctccatggcccctgagacaggtccagggatcccatgtatggtgaggccgttcaaggccctgtctgtcttccttgggtgttgaggccacatatactcatctgaggccttatgccacgctgcccctgagtcctgggaagcagaagtggagaccccaggacactctggtcagggaggctttgttctgtggggatctctgagcacacagcggccagctgcgtgagggagggccctgggggagctgtgagttacaggtcggaagcgccattgctatcccgaagcgacacagatatgtgggtgctccgaggaaggagatgacagagaacaaagctaagaaccctgcttggcacattcctcaccagcaactgagctgccgcttggaatggggttcaggaccttgttggggccccagattcctttgggaagctgatgaaagctctgcacattctgcggctaaagatgcgcattagcacagggcaaggcttcccaggtaatcgttatcgccatggaggcaaacttcctccacagagaagggaccacagttggaaagtccttggggaggtttgggccactctccctttcggttgtttgtttgtttttgagatggagtcttgctctgtcacccaggctggagtgcagtggcgcaatcttggctcgctgcaacctccgccccatgttaaagcaattctgcctcagcctcccaagtagctgggactacagacccatgctgccatgcccagctaatttttttgtatttacttagtagagacagggtttcactgtgttgccccggctggtcgcaaactcctgagctcaggcaatccacgcacctcagcctcccaaagtgctgggattacaggtgtgagccaccgcacccggcctctctttctgtttttgaagcaaacaagaaaaaatgggctattattgccacaaatggaaacaaatcccaagtgcacaaatacaacaaaaagtaacttttagttctgccccaagccggcgtgggtgggagcgtctccactctcgggctcagaccacacgcgggtccacagcactgcctcccacacacagcattgcctgactcgtctttggacccgacggccttccactctgctcttgttgggaatgggcattaaagcagcggattcaccgaggcaggcggtagcaccggaggcgagttctgcagctggctttgcaggagcagggcgagcttgtgtcctggcgtcgccgactctgcgaggctgtctgagcagttcattgctttgctcccgctgcgttcccatcctcatgattctgtctggtgctttctgcacagcataggtgtggtcagcacggaggcggttacaaaaccaaaccagtttcatagtggaccaagtgaacttcaccctgaacaagaattccacggtcttttcaggggtttcttgcacgggggcaggcaagggtgtggccgtctcgactccaggccctgctttccacatgacagtgtccccagaggcctccttgcgcttcatcattaaccgcgacagagctggaagggctttgaagagaaggattaagttcctgctgatgggaagtgtggtcctctccccgttcacgtcagagccacaggcacattggtggtcgtgttgattggcaggtgtgttggcaatcaatcacctgccccaggacccccgcaggttcccggccccacatcaagccaccaaatcgga

SEQ ID NO: 7796 - DNA, 2300 bp, Homo sapien
cgtgtgcctggagtcaggccgccgtgcggcaggctgttaacctagcctcggggagagtgggatggagccaccttctcatggaacgatcctcgccttccctcatctccattgttttatggcttcacacggaccgtggctttctgcatggaagcttggtggccagggtgctgtcactttgggaagcagccagagaaccacaggatgcgtgaatcggtctccttgtcttcatgggcatctccggccaggtatggccccctgttacggcggtaggagcaaggggcgcgcaaggtggccacggccatcctgtgaaccgccgcagtggtgcaggtgctgttcccgctgtcccacactcgtgtttagcaaggcaacactcaggaacacaatttgataaagatattttttcatgaaggaataacccctatgagttaaaacctcatttctgcatataccgcaattggcagaacccctaccatagccgggttcaaaggcagggcagtgtcacctcctgtgacacaggcagcacgtccaggccaagaccctggtgtggatgccggggctgcggctccgcctctgccctcccccagctccatcctcctttgtgttggcctcagtctcaggttgcttctccagctccgccctcctctgtgttggcctgtctcagattgcctctcctcgtgggcatgggatgtttgccccagctccagccatcccatcttcacacagccacatgcagaggcagcaaagtggccttggctccttgcgtgtctttttgatgagaggggtgttcccagaagtcgctggcagaggcttactgacactggggtgtcttactgacaggggtgtgtcttactgacatgggggtgtcttactgacatgggggtgtcttactgacaggggtgtcttactgacaggggtgtgtcttactgacggggtgtgtcttattgacagggtggtgtcttgtgctgtgattagtgggtcactggcaagtgtctgaatgaagtggaggttccggtggcaacagtgacggggaagggctatgggtccgcctcaatgtcatctgccccatccctgggcctccaggaatccagggtctcagcccctgctttagaaggtgtgacaacacctttgacagtggccaaattacacgtgggagttgaacaaacgggaaatcacgggttctctttgaaatttccttctccaggaagtcctgacggccacgctggatctggaggacgtccggagctacagggcggagatttcatctcgaaacctggcggtgagtgctccagtagacacctgtgtgggatgctcatcaaagacgtggaaagtggccccattcgtgcgggcctggtggaggccgtgagggtgcagtgcctgaaaagtctgacagggaagttccggacttcccgagcgtggaaaggggctggtgccgcagacagaacctgcttccatctgttccccgtcatcctctgcttgggccaggccctgagctggggtgagctggggacaggcaggcagagaggctgacgagacagtcagcgtgctaggggctgccacacaaggaagacccaagcagccttggagcccaggaaggcctcaaggtgaggggtggcaagcgtggtaggaacaggcacacagtgtgcagccgaggctggtccccacttcggcagttggaggcaaggtccaaggcacaagtgagcctgtgtctgagaccctgggatgcaagtaacgcccctcctgcagcccgaggtcctgctgctggtaacctggagctctgcgtttctgcaggacatcgtcacaaataggatgtccaactgagcagctgtcatgagacagtgatttttgcaaacattgaagaagtgtgatgctcataacagagcggactcttctgctgttgattgattgagacagggtctcattccatcgcccaggcttgagtgcagtggtaccatcacagctcaccgcagcctggacctctggggctcaagtgatcctcccacctcagcctcctgagtagctgagacaacagacacacaccaccatgcccaactaatttttgattttttttaatttttttttttttttagagacagagtctcactatgttgcctaggatggtcttgaactcctgggctaaagcaatcctcttgcctcggcctcccaaagtgttggaattacaggcgtgaactaccgtgcccagcctttttttcatagcagttttattaagttgtatttgccataccacccaatgtatccatttaagcacctgattcagtggtttttcatgtactcatggagtt

SEQ ID NO: 7797 - DNA, 2300 bp, Homo sapien
tacagcaacatgctgtgcacgtgtgtagcctaggagctcaggctgtaccatggagcacaggtgcataggaggctagaccatctggatgtgtgtaagtgccttgaggatgttcacacgacgcagtggcctgtctatgtgtttctcagaacgtatccctgtcattcagtgatgcgcgcctgtctttcttgatgatccaaaaatttcttttgttttgttttgttttgtttctgagatggagttttgctcttgttgccaaggctgcctggagtgcagtggtgcgatctcggctcactgaaacctccgcctcccgggttcaagcaagcaattctcctgcctcagcctcccgagtagctgggatttacagacatgcacctccacgcctggctaattttgtatttttagtagagacggggtttttccatgttggtcaggctggtgtcgaactcccgacctcaggtgatccacccacctcggcctcccaaagtgctgggactacaggcgtgagccaccgcgtctggccaatccattgatttctataaggtctgtaaggtgtctgtctttcattactgattttagttgagtcttcactcttttttcttggtcattttagctaaaggtttgtcaatttttttttttaatctttccaagcataactttttgttttgttgattttctctattgtctttcattaatttccctctgatctctgtcatttccttcctcgtgctggctttgggtttcatttgctcttctttttctagtatctcaaggtggaaagttaggttgttgatttgagatcttttttcttttttaaggtaggtgtttatagctacaaatttccctcctagcactgcattcagtgcctcccacatgttttggtctgttgtgtcttcatttcatttatcaaagtattttctgattcccttggtgacttcctccttgatccattgattatttaggagtatgctctttaatttccacgtatgcatgaatttccaaaatttctgttactgaatttgtacttttattccaatgtggtgagaaagcaactttgtatgacttcaacatttaaagttgtctgaggcttctctcgtggctcagcagatggtctgacctgggaagcgtcccgtgtgcccttgggaggaaggtgggttccgctgccgctgggtgcagtgccctgcaggtgtgtgccaggtctccctggttgacagagttgttcgtatcttctgtttccttgttgatttttcatcttagttgttctgtccattattgaaagtggggtattgaagtctccagctattattgttgaattgaaggaattaaatgttacactggaaaatgctcacttcatgggaaagaaaccagccaagcagccacttgtgcgcaacccgtcaggtgctggggaccctgtggtgagcaacacagacgtggccactgcagtgaaaacacttagcgtcccctggagggacggacaagaaggcccagcggtggctctggccatactgtctgatgatggccctggggtgtggtaggaatgagagggaatgggagcagatcttgaacaatggaaagggcctgggttgtatgagcctcggggtaaaatcggctcctctgagcctggcttgaagcatttgttgcctggcgctgtgatagtgataccagcggcaccctgtggcctccaacatggcccagatttcagtgagccctcggccctcttcttctctgagtcccccacacttcagggcacgggctcaggaggacagcagacaggctgcatctgctccatgagccacaccttccatggatgatttgtggagctactgtcactaatgacccagtggcgtaaaacaacaggaattgcttccctcacagttccagaggccagggtctgaaatcaaggtgttggcagagtcctggtccctccgaaggctctagggcagtggtccccagtcttcttggcaccaggaactggtttcgtggaagacaatgttttccacaaacagagggttggagatggctttgggttgaaactgttccacctcagatcatcaggtggtagattctcataaggagcatgcaacctagatccctcgcttgcacagttcacaacagggctcgcgctcctatgagaatctgtgccaccgaggatctgacgggaggcggagttcaggcggtgatgctcactcgcccctcccctcacctcctgctctgggatccagatcctgacaggccagggaccagtacctatccatggcctgggggttggtgacccctgctctaggggatcctttcttgcctct

SEQ ID NO: 7798 - DNA, 2300 bp, Homo sapien
tatctagtggaagaaatttctaagcagcaaacattcaagctgtggcctgactgaatctaacatcgtattctcacatgcaagagcacataaatgaattaaagttggaatttatatttaaaagggaatcaaagtgtaaaagtttggaaactttgcagcatggccatgtggcagagaatgaaaaagcattatcaggagaggaatccaagcaggctatagagcaaccacctgctagagatattagcatgactcaaaaaacaaacaaaaaaacccaagtgctaatagccaacacaattggaaaagacttcaaatgcatttcaaaagtgtttgagacagcccctctcatcactgacctagaggtctaggaggacaccatggtttcaggggctcaccccaggccctcactgccctgcatagccttggagcactgctccccacacataggctactccagctccagcctcagctcaaaagaccccaaatgtaactctggcttcagagggtgcaagccataagccttggtagctcccatgtggtgttaagcctgtaggtgcgtagaatacaagagtgaaggaggcttgggatcctctacctagattgcagaggatttatgagaaagcctgggcactcaggcagaagcctgctgcaggggcagagcccgcacagaggatatatactagggcagtgtagaggggaaatgtggagtaggaggcccacacagagtccccactggggcattgcttaattgagctgtggggaggaggacaccatcctccaggccccagaatggtagagccactggcagcttacatcttgagcatggagaagctgcaggcacacaactccaacccatgagagcagctgcagggtgcgaaccttgcaaagccacaagggtggagttccccaaggccttaggagcccacccctcactccagtgtaccctggatgtgggactgggagtccaaggacattattttggagctttaagatttaatggctgccctgctggatttcagacatgcatggggtctgtagccccttcctttgggctgatttctcccttttggaatgggaatgtttacccaatgcctccaccctcatgtatcttcaaagtaaataatgtgttttgattttcacaagttcattggtggaagggacttggacttgggactttggacttgatgttggaatgagtcaagacattgagaggactgttgggaagagatgattctattctgcaatgtaaggacatgagatttgaggggtcaaggggataatgatacagttgggatgtcccctccaaatctcttgtcgaaatgtaatccccagtgttgaaggaggggcctgcaaggaggtgtttaggtcatgggggcggatccctcatgactggcttagcgccatctccttggtgatgagtgtgttcactcagatctggttgttcgcaagtgtgtggcccctcctcaccccttgctcccactctcacgatgtggtgagcctgctcctgcttcaccttccaccatgaggaaaagctccctgagggcctgcccagaagctgagcagaggtgggtgccatgcttgtgcagcctgcagaaccatgagccattctaacctttcctttataaattacccagcttcaagtatttctttagagcaatgcaaaactgagaatggcatgagtaaaatataaagaccatggataattttgaaatctaaaaatgtgaaattaatattcctgggggagtcaacacaggaaagatgagagcacgtgggcaaaggctgttgcccattggtcacatgtggtcagcagagagcaggtgaccagcaccctggagctttgcgggaagcaccagacagcctggagctgaggtttcaattgtaggggccaaaacaaatagggaaaaagacaaatttagtaaacaaagaaagtagatgctcaactgagccaggaggaagtcactagcaaagaggaaaaaaaatagagctctggaaaaatagcgtaaacagtcacaaggaagcgaccctgtattgtgcctgacctctggacaggtatataaagagcccgggctcagggggctccacacctgcacctccctctcacctgctcctctacctgctccaccctcaatccaccagaaccatgggctgctgtggctgttccgaaggctgtggctccggctgtgggggctgtggctccggctgtgggggctgtggctctggctgtgggggatgtggctccagctgctgtgtgcccgtctgctgctgcaagcccgtgtgctgctgtgtgccagcctgttcctgctcca

SEQ ID NO: 7799 - DNA, 2300 bp, Homo sapien
gacccaagaagtccagctggcctcatgtctcagtttctcctcttatcaatattcatgtccctcccacagcttattgaatatgcatattcagccacccccactcagtgtagatctctgctttattcttccctccctccaagtgtctgtttccagcttcctaccagaggctgcgcctcccaaccagtcagaacagccacactcagcccgcagcactttatgagaagtaaagcgctcctttccaaattgacgacctcgtccttcttcagttaacacctccctctctcaatgacgatgatggagcatgtccaggtgttggtgacacagctacatggctgcgtgtgggataaagtcgctgccccttcagaactcacacccccctggagtgggacacacacctctaagaacaaacaaggatgagagcagagccagcttggcatcgtgggaatcaataaatgaaacagaaagtgcaaggtggtgggggtagctatctcgggacggggtgtcagaggtggatctgagttgggcagacaggagggacgcagtccagggcggtcctgggtgagtctgttccatgtaaggaactgccagcacacaggtcgtaaggaggagtgcggtgtggccccggcaccaatccagggctggatgaagaatgattgaggcagtctgaagatgacaccaagtcattctcctcccacggagaggtggactttctcttctctctgcaatctgggctggcctcagtgacttgaggagggagaaatactctaggattcctaggctgggtcataaggcaccttctagcctctgctcgagtgacctcctaggaagtacagctgccctgagcccaccatgctgtgaggaagcccaagccagccgtgggaagaggccgtgaggtgggggaggggagggagatctgtccggcctcacctgttgtagccatcccataggtgtgtgaacacagcatcttggacaagccagccccagctgacataatttacagaaaaaccaaggaaccctgcagacagccggaactgaggtcccaaaatacagcccagccaagccatgctgccatcgttagccattggtaccttcccaattgagaccccacaaatcatgcggcctgtgccaccatccagtgccggatctgaactactgatccactgagctttgggctgattggttctgcaacgatgggtggccaaggccacggtcaaatccagctggagaggtggatggggccagtgtcaggggtttggatttcaccccaagtcagctgaggcacactggaatgtcgtaagcctgcacatccactcatcacacattttaaccgcatctgagtgtggaccgtaccgatgggttcctgcacctgcagcctccacaccattgctggtgccctgcctcctagctggagtatccttcctgtctcttggctgctctttgtacccatcatggtccccctaccaccctccaagttctgctccaagctttgttttcctccaagagaagaacctgtccagacaatagtttcaaagcagcgggaagctctgctcacgtgtccccaaggaccatgctgtgtgaaattcccttctgtaatcacagagcccattgccctggcctattcctggtccaggaatagggaggaggtagacagaggatgcctccttccccactgctgagaaccctgccatcctcagccacagttgccacagagaagataccacatccctgggggaatcagcaggaatcaggtagagagtggcactgctctggggagggagggcgtctcacagcatcaaacgtcaaaaacccacaacattgacccagtcctgccaagacggaaccctgcatgagcatgggggatggggagttggggtgttgcaaaagacgcaatacatgaatgatctcaggtaattctcaggcaacccccggaggctggtgttgctagcacccctctgcaggagaagaagctggggctcgggagctgactggatctgctcaaaggcccaggaagaataagagttaggaactgggacagaccttgaggaagctgcacttcctcctgaggtgagccagcgttggagctgtttttcctttcagtatgaattccacaaggaaatcatctcaggaggaagggctcatacttggatccagaaaatatcaacatagccaaagaaaaacaatcaagacatacctccaggagctgtgtaacagcaaccggaaagagaaacaatggtgtgttcctatgtgggatataaagagccggggctcagggggctccacacctgcacctccttctcacc

SEQ ID NO: 7800 - DNA, 2300 bp, Homo sapien
tttccatgttttccattcatctgttgacaagcacttaggtgctttcatatcatggctatcgtgagcagtgctgtgataaacatggggtgcagatatctcttcaacacactgatttcttttcctttggatacacaccccatagtgggattgctgggttagctctatttttagctttttgaggaatctccatacagttttccttagtggttgtacaacttcccactaacagcatacgagttccctttcttcacttcctctgcaggatttatttttgcctttttgataatggccattctgtgggatgagaggacacctcattgtggttttgacttgcgtgtccctgatgatgaatgatgctgagcattccttcaagctcttgttggtcatttgtacgtcttctttcagaaatgtcggttcagctccctctgcagtcacgcctgagaaccacaagtgagacacggggagaattgcattggtctgaagccgcctggagaaccgtcctgtggggtagtgagtggggggtactaaagggcatgaggttatgaaattttctacaactgattatggtgataggtacacggctctgtgaatatactaaaagcattgaattgtataccttaaatgggagaattgtgtggtatatgaacgatatgtcaataaagctgttaacaaaacaagaagaggtatcagagaggttggggatcagtgaagccgtggttgtatcaatgcaccaagagttctggtggaatgaaagcactggagaaagtgagctagaaagaggagggtggctggaagcgggtgcatgggacacaccccactggggtgccctgtgaagaacaagggcacagatatcaccacaggggtgaggggtggggaaggatcttttacttgtgtaaatgatccccacaggggcactgcttaactgagcagtgggaaggaggacaccatcctccagcccccagaatggtagagcaactgacagcttgcatcttgagcatggagaagctgcaggcacccaactccaacccatgagagcagctgcagggggtgaaccctgcaaagtcacgagggtggagttccccaaggccttaggagtccacccctcactccagtgtaccctggatgtgggactgggagtccaaggacattattttggagctttaagatttaatggctgccctgctggatttcagacatgcatggggtccgtagccccttcctttgggctgacttctcccttttggaatgggaatgtttacccaatgcttctaccctcattgcatcttgtaagtaaataatgtattttgattttcacaggttcataggtagaaggaacttggacttgggacttcagacttgatgttggaatgagtcaagacattgagaggactgttgagaagagatgatcctattttgtgatgtaaggacatgagatttgaggggtcagggggataatgacatagttgggctgtcccctccaaatctcttgtcgaaatgtaatccccagtgttgaaggaggggcctgcaaggaggtgtttaggtcatgggggcggatccctcataactggcttagcgccatctccttggcgatgagtgtgttcactcagatctggttgttcgcaagtgtgtggcccctcctcaccccttgctcccattctcaccatgtggcgtgcctactcctgcttcgccttccaccatgaggaaaacctccctgagggcctccccagaagctgagcagaggtgggtgccatgcttgtgcagcctgcagaaccatgagccattctaacctctttcctttataaattacccagcctcaagtatttctttagagcaatgcaaagaatggtctaacacacccagaaagctgagactggtatgagtaaaatataaagaccatggataacttttgaaatctgaaaatgtaaaattaatattactgggggagttaacacaggaaagatgagagcatgtgggcagaggctgttgcccattggtcacatgtggtcagcagagagcaggtgaccagcaccctggagctttgcaagaagtaccagacagcctggagttgaggttttaattataggggccaaaacaaacggggaaaaagacaaatttagcatacaaagaaagtagatgctcaactgagccaggaggaagtcactagcaaaaaggaaaaaaacagagctctggaaaaataatgtaaacagtcacaagaaagggaccctgtgtcctgcctgacatctggacaggtatataaagagcccgggctcagggagctccacacctgcacctccctctca

SEQ ID NO: 7801 - DNA, 2300 bp, Homo sapien
gatgtgtacactccctagggatattgttcctaatatagagggacggagaggatgatatcactcccaatatagccgggagtgtacaccccttgtgtgacattgctcctaaagggcagcgggggagaggaagatattacagccaatatcgcagggggtgtacacccccttgtgacattcttccttctatcctgggagggagaggaagatactagcggcaatgtcgcaggggctgtacacacccactgtgatattgttccgaatatccggagggggagaaaatgatgttacttccaatatcgcggggggtgtacatcctcctgtgatattgtttcttatattcagggggagaggatgacattactcccaatatcgcaggggttgtacacacctcctgtgatacggggagtaagagccagcccctctcccccctggctcttaggagccccatcgcaggggggtgagaccccacccggggtacggggagtaaaaaccagaccctatcctcccctggctcttagccgccacactaagggctccaacatgttccctcacacactcaacagagaaggaacctgtggctcagatgggagactccctgtccaaggccacagagtctggccccagggaccactagaggcttcaagaaccaaactcacatgagggcagagaggagagatggggccagtttagggctgggagaatccatagagcgatgctgaggcaggcatggagcctggaggtacggacgagggtctcgccaaagtcaggggtagagaggctgtggagagtgaggaatggtgtggaccagccccgggcctgctggggtgcagctgggggctccatggccctcccacggcccccacttgtcctcacccaaccgttcagagctcttcatggcgggggtgtccctctcttctggccacaagaggagcgggtggaggaacggcaccttcaggccttgtagggggtctgcccctccaccagcctgtttctcgtgggcatcgcagctgaggctgtagcagggaaagggtagtaaccgagcgtacctggcctccaaccaccacttccaaggcccctactgggcacagggtgaccccaccgtggctcggaagtggaccctgtccgactcggggatggtcgctggagggccgagggcccctggagggtgtgcctcgggagtctgtctcgccctctggacccatgggggaccagcaacgccgtcacaccctcctctgtctctgccagccgctccgccgctcccttctcctggctggggctggcaaaggcaggcaggtatgggggggcggggcctcaggagggaggaagggctggtgggcggggcctacggacacctcgccccgcccccagtagggcgccgcactccccacaccctgcggtccccctaggtcagggcctgtcaccaccgcgcccagaggccgggccagccgggcgtgcatcccaggggcgctccgtcccccgcggcctgggactccccagtcaggacagtacaaaatctctttattgctcattttctgtaaaaaatcgtggctctcggcggaccctggggataggaggtgcaaagcgcgctcacacgcggcccgggtccgccgccgagagctggggggatctggagcggagccgggtcgcaagaagaccctgaccctgctccggcgctggggcgcgtgctaagggcccgctgggtttcagctgtattttcgaaccgctgtgcttggccgaggggttcccaaagctccactccgccttggagggggctgcggaagcccggaggtgacctgggctctgggaggggcgtccccaacgtgggggacgggagacaggggcctttgaagacagcgcgggactcggagggggtccccccgacctaagaagtggtaaactaaggccggcgaggagggaggctgagtccgtggaccaggcggcccctcactgctcctctggccagtcgcccccctgcgcctgttcctacgggcagggccggcggccgagtccagcctgctcgggaccaggcctggtccccgcgggcggcgcctcctcctccgcgccgtccccatgctcgccctccgcgtcgctctcgtccgagttgtcctcctccaagtagcggtaactgcgcaccttgtgctggggccacgggatgcggggctggcgcacgccccgccgcagcttctgctccatccgcaggtaggagaccgcggccgccaccagcgtcaccagcagcaccgccagcttagcctgggggtaaggagagggatgccagggagccgcggccgcctcgccccgca

SEQ ID NO: 7802 - DNA, 2300 bp, Homo sapien
ctggcccagttctgaagccaaccttccttaaccacccagacccatccctggttaggacttgctgtggattctcaggtgactccatctcaggatacagggactgagagggtgtatgcaacatctcagacccagaaactgttgattctgtctaaaaacacagcaataaccacatcccaccctcttgatttaaatgaaagtgtttgggggaataaaagatgaaccttttttttttctttgtcagatcttgcgctcatttggttctggtggggaacaacagctgtgagagaacacgtgtattcaattagaattaattcccctctcttattctcacagctgagcagggctcaagtgcctctcatctgaaagaggtaataagatttaatctgtctcctcatctaccttctgcaagtatacttaaaaaattagctctcgggactcttccaaatggagttttatgagggatttgctaaggtaaacgttttagactttgaacacagttcagatttcaggggcagtactgaaatctgaactgtgttgctaactgccctgcctttcaactcaagacacaataactttgaactaaaataattatatttttgttgttttccactctgaccccacgtctatatcaccaccacccccaatcccgccccccaggagctaactcctccttcctgtccctgcaagatcaaaactcctcctggaagccccgctagctctgtctgctcgccttcgtggcagatatcactattgtacttttatactcatttgtgtgataagtacttcaatgtccacttcttccacgagcccctgagcccctggagggcctggaccacacctagtttttctcactgttacatatcccttgccagacacatggtagacgcttaataagtatttggtgaacgaatggcttgtttggtgacagtccaaaggctaggggacagagggaaagctccctcctatcgggccccagacgggtggcgctgatggagaggaggctaggataaggcctccaggaccgaagcgcgcacccataaggcccctgccaaaaagaccttcctgaaggcggaggaactgtgagagtgcctacgttggcccaaggcctgacccgacgatcccggggaccctagccctaacggccccgcctcctgggccccaaacccggactcggccccgcccgaagctccggatcctggggcccgaccatggccccgagtcggcagaccgtggactcgctcctgggcctgcctcaaaccctccgcaggtaacgcctcccgaacttgagccacactccaatcccctcctcaaacccctccccgtttctcacaccttggacccctcgctccgtctcggcccagccccaagcccagctccctctccgcccctgagcccagccccgacccgcctcccagtctcttggtccctcccgacaccggcccctccctaagctccgcctcccagggcccgcctcctgagcgcagcccgcagcccggactcggccccgcctcccggaccctgggcccctccccacgtcggcccgtcctaagctccgcctcccagagtccgagcagcgcctggccacgtgctacgacatagccaacgccccgccctggccccgcctcctgagcgcttctcctggtctggtcttagccccgccccaagacctgtctcctggactctgctccgagtctcgcctcctgaacccaatcattgtttatccccaccctaacgcccgcctccgggaatcttatcctgcccccatgcaaggccccgcctccaggacgcctccaacctggacgcttccgaagccccacttccaggatcgccctgtcctggccccgccccaggacccaccaacctgaactctcccgaggacctgccccaacgacacttatcctggccctaccccaggcctcgccctcataatgctcatcctagccccaccccaagccccggcctcataactctcatcctggccccgccctagagccacccccacgactctacctccaggccccgccccctctctgccccggtgcactgccctgggcccgccccctcttcagtccaggcccggcttccgcccggtctcccggcaaggctgaggccccgcccccgtcatggcgcccgaggagaacgcggggagcgaactcttgctgcagagtttcaagcgccgcttcctggcagcgcgcgccctgcgctccttccgctggcaggtgggcggcggggctagcggagaggtccgcggggctcgcgggagtccaggggcagacgggatgggtctccgtgctgaagcc

SEQ ID NO: 7803 - DNA, 2300 bp, Homo sapien
tttgtattttctgtgaataaacattcagccaagcaccaggcctgatgttcacaagaaaacacagtgataaaatgctgctaaaatggaaaataagagaggaaagccttcataagctaaataagaagggaaagtctttccaagggcaatgaattctcttggaataccaaatacgtcttactggagaagttatgcaatgaaaaatcatgagaaatcctttcttcatagagcaacacttgtggcacatgtgagatttctcactggacaaaacatggttagcatcttgaaaggagaaaattctttagtggtaattcatttcttagttgacactaagtttctcacattgaggagctatcaaacttgaaaatcactgtgaagaaacctgatagatttcttatcagaaaagtgagtcaagaaggtggacctctagaaaaaactcttaacacatactttagcaaaataattcagaaatttgagaaaatatctattcataaaaatgtggcatgtagatgcataatagcaaagtgaccagggaaaaaattgaatgcagaattatataagaaatctcattaaacttttccaaaagatcaatacttacaaatattgaaagaatacaatctgttgttgaaaaaacttagtatgttggcaaagcccttgtttcatttatgcagccctaacaaatcgatttgcatctgcaccccttgggtgagattcttggtcgagattctaccccaacttctgagtctccccagtcttcaacagctctttcctcacagctcacctccctttacttcaacgtccactaaaatcacttgtttccatccaaccctcgagttgacacaccagggatcttcagccccacttgctagatttctcagtgtgtcattgcatagatttagcagggaaatggaggctgtatcaaagacacttagtatatgcatttgggtgtccccagccctttcctctgtctctgagcagttacctgggatcagagaataagggagctcttctcttctatccctcagaaggctcttgaaattttgtccctggagcctctctaactggaagtagaagttcatctcataacaccccacattttattcaggtaagtcctgagttattacacagagatagacacagctgtgctccttttactgcagtccagaagataaaacaccagcatgataaaacagccgaacctgtcagctaccttgcaagtctttcctatatttgattcaatgtacttttcccgaagcaaaatgaaagttctcacagaggggccctcctctgccttgtcctcagaattggaaaatgtattgtccgtgaaggagcctcaccactgaacctaaaactcaagagaaaatgtttcctgaatatcaagtgggatgacttgaaattttgccaaacaggcacaatcttaatacgatcggccttactaaggctaaatggccttatccatggttgaaattgacacatcattatactttaaaaactccacaaatgattgattttactctgcagccagggtttatgtcaactgtgaggataatgagcaagaaattcaagcccttggcaaactggttggagaggcaaggactgtgtccaggcagacagagctcatataattatttattgtttaatctatttaattaaatatgtaatttacccacaaactgtagctgacattatatgtactcctgagccacattaagatgtactatttgtgctgtgaaattctatgggatttgacaaatgcatggtggcagatctccagccattattaaagcgtaacacagaatgcttctcttattcaagctcgtcttccctccacatagagggaatcaatcgacttttgtatactgatttttgtatttgcttctttatttccatcttctttaattaaagcacaagatatcgtactcaatttccatttgatcttccaaaaggaaagtactgaataatccacacctgaatttcagtgattcagactcaggtctaccgctaaggccaaacgtcctgtgctgccacctcatggccggcagagggcaatgaaacccatctttccggccatgcagggcgcatgagcagtctgcctccctcggcgggccgggtctccagggaggacctgatttttcttcacccatagttagggaggcgcaatcgccctggctttggggctggggcctccggggaggttccggtaggggcgttggagaggccgctctttttgcaaggcccgagacggcgggccctgcgcaggccgccctattccgcgccctcagggcgtcagtatccgcctgagg

SEQ ID NO: 7804 - DNA, 2300 bp, Homo sapien
ttgcagacagagtcttgttcactcagtgctcaatgttgcccaggctggagtgcagtggcgtgatctcggctcactacaacctccacctccaagccgcctgccttggcctcccaaagtgccaagattgcagcctctgcccagccaccaccccgtctgggaagtgaggagtgtctctgtctggccgcccatcatctgggatgtgaggaacccctctgcccggctgcccagtctgggaagtgaggagtgcctctccccggccgccatcccgtctaggaagtgaggagcgtctctgcccagccgcccatgtctgagatgtggggagcacctctgccccgccaccccgtctggcatgtgaggagcacctctgcccggcagccgccccatccgggaagtgaggagcgtctccgcccggcagccggcccgtccgggaggtggggggcagcccccacccatccagcctccccgtccgggagggaggcggggggcagccccgggggcagcccccgcccggccagccgccccgtccgggagggaggtggggggccgcctccgcccggccgccgccccgtctgggaggtggggggcgcctctgcccggccgccccttctgggaagtgaggagcccctctgcccggccgccaccccgtctgggaggtgtacccaacagctcattgagaatgggccatgatgacgatggcggttttgtcgaatagaaaagggggaaatgtggggaaaagatagagaaatcagattgttgctgtgtctgtgtagaaagaagtagatttaggagactccattttgttctgtactaagaaaaattcttctgcattgggatgctgttgatctatgaccttacccccaacccggtgctctctgaaacatgttttgtgtccactcagggttaaatggattaagggcggtgcaagatgtgctttgttaaacagatgcttgaaggcagcatgctcgttaagagtcatcaccactccctaatctcaagtaaccagggacacaaacactgcggaaggccgcagggtcctctgcctaggaaaaccagagacctttgttcacttgtttatctgctgaccttccttccactactgtcctatgaccctgccaaatccccctctgcaagaaacacccaagaatgatcaataaaaacaacaacaacaaacaacaaaaaatactagaccaattttaaaaaaaataaaaatatcatgagatggaactaagcatctgtattgcaaagtaactctcccagttgattttctgcatagtaatgattgagaatcccctgatctagatccaacagatctcgacctttatagacgctatcaaggaagcacctaaggaagacaattttcctgactatatccatacctccagttagtaatagatctagagatctagaatccaaatccagacctcctgcctccatgtgcggtggtctttcactgttgttttgttccacttggtgaagaggatttgagaataaatagccacatgattcaactccctcctcagttctgagtaatatagtcttgtcctagcaagcaagaagctcatacagtagtggatgaggcaaatatacattcactaatctaacatacaaggcagtaagtactgtaacataaacaaagcactttggactttcagaccaggagaaagtggggtgattaattcttagcagggcaagtaaagtctgggaagtgttcactaacaaaatgtctggtcattaatgaaaccaactggtttctcaacacagtctaatttattgtaacaatataaatggttgtttgttcataaactttcatcttttgccaaaatgtttgtagcttatgtccccatttaacaaggttttatggccaaaactgtgcacccacatcatactaatgaactggctgtccaataaaaaaaggactctcagtcttcccataaaagcaattttgcatgcatagaacacgtctatctatgaatatgcctaatgaggtacacaaagactcttattatccaaacagagacattccactggtgctagacagccacagatggaagttttctctgcctcctggaaatgaagacaaacttttttctttcttcagccatgaggattgctgtcctcctcttcgccattttcttctttatgagccaagttctaccaggtaacaaaataaacttggtaagagtagagtgcctaacaccttacagggattcaatactcaaagagaaatcaccatcacctataaccagaaaagggggtctcataggaaatctggaagactcattggctgagaggcctgcagc

SEQ ID NO: 7805 - DNA, 2300 bp, Homo sapien
taaaataaaagacaaataattatacctaaaaggctgggtacagtggctcacgcctgtaatctcaacactttgggaggcggaggctcaggaggattgcttgaacccaggagttcaagaccagcaacatagtgggaccccatctccacaaaatatttttaaaaattagccaggtgtggtggcacatgcctatagtcccaggtactcacaaggttgaggtgggagaattgcttgagcctgggagatgagactacagtgagcagttatcacgccactgcactccagcctgggcgacagagccggaccctgtatcactcaggctgggcacagtggttcacacctgtaatcccagcactttgggaggccgaggcgggtggatcacttaaggtcaggagttcgagaccatggccatgaccccatctctgctaaaaatatgaaatttccccaggcgtggtggcgcgtacgtagtcccagctatttgggaggctgagacatgagaatcgtttgaacccagtaggcggaggctgcagtgagcccagattgaaccagtgcattccagccttggtaacacagcgagacaccgtttcaaagaaaaaaaaaaagcactcagattaaaaaacaaaatgaaacacaatacaatactatatagtcatggctacatataattattaaaaatggactgggagaacacaagctaattctaattcataatagttgcttctggagaggatgagagggtaataggcttgagagtagaaaaaacaggtaagtttaacttttattgtattatctagcttttaaaaaataagcaaataaatcataatgccagtagtcaatttagggtgatgggtgtacagtatttacaatattctccgtattaagtgtcacaaaataaaaatgattatttttaagtaaatgggatgcctgtggatgatgtagataattccctgtaattttctgttggtcccaatgtaaagctgacttttctagacgttctgtgggctcacaggccatcctagttccattcaccagacagatccaggcggacgcccagaggcgtgtgagctggggctacaggcttgcaaggtatcgagttcaccggctgctgaaaaatcagttatgaaggtatacgtaggggtgggacagtgaatggtgtataaaaaggagggtaaggcagaagctggggccgcaggatgtgggttagaaaagtgtgccgaggtgtgtgaactggcatgacagcctaagtaagacgcggaatgtgggtgccctggaggtcccgcaaggctcttcagctctcagtttcgggagctcaagccgcaccgctgctttcacagctcatcgggaacaggctgctcagttcatttccttgatggccaccctcctccctctcggccactcccctccccatcaacaaatcccaacgcccctcacccgggaccgtggacctcgaggagccaccgttgcctcggatctcggaccaccaaacctattctcccgccaattcggccttctgaccttcgccttctgaccccgagagctactcttccgtcttccgtagcacaggaatgcgttctggggcttcaagaagctgctgtttttgaaaatgagtcctaccgaggcaagatggcaggtgctgcagccaggaaaatacatttccgtgtgttttaatatttattttcactcactacaactctttcgtggagggagcggaatttaaacttccgggtcagcctcagtgcagcttgggaaacgtagttcctagtccccacgtctcgctccttggagcccagactgagggagcgtcgcgaaagttgcccgttttggaacgctcccatttggctctccaaagggaagaattggttaaatagttgcactgaaaataatgcgattcaaatttctcattttccaagaacgctcccttgctgaagcttgcaagggcacggtactcccctctccttgaccctgaaacgtgcagcaagtagataacctcctgatccctgacagtctccgcctgtgttgatgccccgccccctctgctggagtccgagccgccgattggctaggagcacttgagcagcggaagcagctggctcgcgcggggactgcggtgagggggcgagccgtgaagatggcggcagtggtggaggtggaggttggaggtggtgctgctggggaacgggagctggatgaggtaagcggagttgagagacgaggagagactcaacctgagactgaggggaggggcagtgaggtatcgggaggtgggggtcttaggagagaagggaaagatcctgagagggaag

SEQ ID NO: 7806 - DNA, 2300 bp, Homo sapien
tagtgattgggaggtagaagactacaacacttctttaaaaatccccctgctgtgatcacctgtcaatttctcagtcccttcctcccaccttaatgatcccaatcaggtaatccaactcctccaactcatcccactaccaggcaacagtcttattgcttcccaagtccacttctccctttctctgaacctcatcttcaatcatccccaatcctccccactcttcccacacccaacacacagcaaggggcctctaagattctgacccctcagagatctcactggttctatctctgacaaccaatccccttcctcctattcctgtgatgtctttgcccatatgctggcatgtgcaagatcacaaacaccactagctatcaatgtctccatggcttcagaatcttttcacctctgtctctgcttctctgccctgtcccttcattcctttcacactcaacatctccttcctcctagtgattccttcaaggaccactggtattttaatacaccagtctttaaatgcctattagataggtaaagggaacatacaatctcaaggagctcaccttcaaggaactcataaatccagaagaagagagagacacttatttatcgtttaaaactcagcaactccgggaagccttccctatcccaagctgaaatgttgcacacttctcagtgccaccattatatctctaatgcaatgactagtcttcttgtctgtctcccaccactagactgtgggctcttcaacggaggggccccttgtctccctagcacctggcccagaacccggagcaaaagtcataatgtttattaagtgaataaatgcatgaattccggcatacaatcatttattcatccacttgttccttcattcgttggccaaaactttactgagcatgcattagatacaaagtcttagaatggaacgataaataaaacagttccaactttaagataactcaaagctatactactagtggattagcactctttcccggtctgtgtccccaacccccaccctaggcttagacagagtcctctcccacagtagaagcccagccttcccctgaagaaattcacgtccctccaactcaaactacctcttagcccttcggtcctaccctaagacacccagctagtaatcacaaaatcttaacacccccacccctccgacctctctctctgtcctccatcttcacccttgaggctaatgcaagtcttctactcccaaggccgcctcggagtccccaagtcaggagtgcctctgacttcgctctccacgcacccgccccctagtcagctccttccctctcaggatctttcccttctctcctaagacccccacctcccgatacctcactgcccctcccctcagtctcaggttgagtctctcctcgtctctcaactccgcttacctcatccagctcccgttccccagcagcaccacctccaacctccacctccaccactgccgccatcttcacggctcgccccctcaccgcagtccccgcgcgagccagctgcttccgctgctcaagtgctcctagccaatcggcggctcggactccagcagagggggcggggcatcaacacaggcggagactgtcagggatcaggaggttatctacttgctgcacgtttcagggtcaaggagaggggagtaccgtgcccttgcaagcttcagcaagggagcgttcttggaaaatgagaaatttgaatcgcattattttcagtgcaactatttaaccaattcttccctttggagagccaaatgggagcgttccaaaacgggcaactttcgcgacgctccctcagtctgggctccaaggagcgagacgtggggactaggaactacgtttcccaagctgcactgaggctgacccggaagtttaaattccgctccctccacgaaagagttgtagtgagtgaaaataaatattaaaacacacggaaatgtattttcctggctgcagcacctgccatcttgcctcggtaggactcattttcaaaaacagcagcttcttgaagccccagaacgcattcctgtgctacggaagacggaagagtagctctcggggtcagaaggcgaaggtcagaaggccgaattggcgggagaataggtttggtggtccgagatccgaggcaacggtggctcctcgaggtccacggtcccgggtgaggggcgttgggatttgttgatggggaggggagtggccgagagggaggagggtggccatcaaggaaatgaactgagcagcctgttcccgatgagctgtgaaagcagcggtgcggcttga

SEQ ID NO: 7807 - DNA, 2300 bp, Homo sapien
gcagcctcatcctcctaggctcaaccaattttcccatctcagtctctgtagtagctgggactacaggcatgctccaccttgtctggctattttttaatttttatttttagtagagacaaggtcttactgagtttcctaggctggtctcgaactcctgagctcaaagaatcctcccacttcagcctcccaaagtgttgggattccaggtgtgagccattgtgcctgccctcaaagcacttttgtgaacatccttatttatacatgtagcatttcatgaacatgtattatataccaggaaatgggctctgtacaacccagtaaaaaaggtagcagggttttcctgttttacaaagaaaatcacctctcttgtctcaaagaggtgatttgacttatctgaggttatccagctactaaaacatcacttaatccatattgagttttttgacctaaaatttcacatccttttcaccgtgtctctctcttttgtgatcagtgcaatccctggagaatagagctgtgtgtgttctttaagacaacactagaaggaagatatttgggacctttccctagcctgagaaaccatcactgcttgcctggccacagcaaggaggcatgggcagggaaggaccttgactttcctccctagggttcagcagggttggtagtaacctagtcagctctcaggaaccacacaggcttgtgctggttattcagacagattactaaattgttcattagctcccatcacagatagaatagtggctcctgatgacagggacctactcttgtagcatttaaaaggctctggtttggccaagcaccagtggcttatgcctgtaatcccagcactttgggaggctgaggtgggaggatcccttgagcctaggagttctagaccagtctgggcaacattgcaagaccccatctctagccaaaaaaaaacaaaaaaaaaggccctggttccttcagggaaccatctttcttgctgagtctagtagctgggatccaccaattaggttgtacactgtcttcattggctcctggggcacactactcctccttcaggagcatgaacaaccccattctacttcaccaccaccacacactttcatccaactcaaaggtacttcttaagtgcctctctcccttctccctcagaagaaaattcatttcagaagcaaattcattacacatcatttctttcatttttggcctgtggataggagcaaagctgtattcagactaaccgggcccaggtacaaacaacctgtagctcattctacctctgattcatctcttgaattctgtttctgaacaactagccttccctgcctgttaatcttctgagcatagttgtgtttaatactttttacttcctcatttgaggtgacatagctgtctaaggtcagctgtgctccttctttgaggcagaaactgcctttttaggaatcttttccttggtctgaaaccatgaaaatacaaagcatagctgggtgtggtggctcacgcctataatccaaacactttgggaggctgaggcgagtggatcatgtggtcaggaattcgagaccagcctggccaatatggtgaaaccccgtctctactaaaaaaaatataaaaattagccgggtgtggtggtgggcacctgtggtcccagctactcaggaggctgaggcagaagaatcgcttgaactcaggaggtggaggttgcagtgagctgagattgtgccactgcactccagcttgggtgacagagcgagactctcatctcaaaaaaaaaaaaaaaaaaaagaaaaaaaatacaaagccctagttcttgagtatatggaggcatttctgcagttaagggagtgagcagctttggatagtaactgaagttgctcagtaagtcctgagcaaagaccctggtgtccccattgatgtgagaataaaggattctggtgatcaggaccattaaggccagaatctctgtgtcagctgcactaaccttctctcctttccccaggttggtttataagtggttcctgctaatctataaaatcagctatgccactggcattgttggctacatggctgtcatgtttaccctctttggtcttaacttattattcaagtgagtaccctttgtttttgtttttgctggagtttggggaggagtgactgttgagatgtacctcttgttgcaagtcgtggttattaacaggagggacgtaatatccaggataggagacttgggtgctgtggggggatgggagaagacaggctctccatgatttgttctggcagaaagcaaggaatgt

SEQ ID NO: 7808 - DNA, 2300 bp, Homo sapien
tttaggacaagtaaaaataaatcctggccaggtgtggtggctctcacttgtaatcccagctatttggaaggctgaggcaggaggactgcttgaggccaggagttcaagaccaagctgggcaacatagtgagactctcaactcttaaaaaaaaaaaaaaagaaagaaagaaagaaaattagctgggtgtagcagtgtgcacctgtatccccagctactcaggaggctgaggtgggagaattgcttgagcccagaagttcaaggctgcagtgagctatgattgtgccactgcactccagctcaggtgacaaagggagacccccatctcgaaaaaaataaaaataaataaatcctattttatatagtgagagtgcactcatgaaattctttcttctaggggtagtacaggctgaaggaataaacaggctcctgaagggtttagaggaattcatcactgtagagtcaaacacatcttgtcaaagaaaacagatatctcctggtaactttctaacctgtatggttaaaaaataaaataaaaatcaagattctgcattatgggattctgcattatggttttttgtttgtttgtttgtttgtttgtttgttttgagatggagtcttgctttgtcgcctaggctagagtgcagtggctcactgcaacctccacctcccgagtagtggggtcaaatgattctcctgcctcagcctcctgaatagctgggactacaggcatgagccaccacacccggctaatttttatatttttagtaaggatggggtttcaccatgctggcgaggctggtttcgaactcctgacctcaggtgatccacctgccttggcctcccataagtgttaggattacaggtgtgagccaccacgcctggcctctgcattaagttttaaagataattcttctataattacagtttctttttacttgcctgaactctacaatgaggaaaacagaattgagaatcttgatcatttttgtgctactgatcaaattaagtggtgtaagatcaatgatttctagtgagttaaatattcagggttcataagcaaatgcagctttgtatataaatataatttataactaagcacatacatacggttctttgtacaaatattttaacagataattttctataacaaagatttatagactcaaggttgcaaattatcggtccttggaattattaaaacaaaccttctgatgttataggcaagatctttatccttcttgttaaatagacttggaccaaaatttaactttgatgatatgatacagattatttatatttgtagtttataattttatagtaactgctatatattaataaatatttactaattttatctttttttcttaaacctgtgtttgacaagctgtttctgtaaaggtccaaatagtaaatattttaggtcttatgggacaataggccaaatctaggatatcatgtaggtacttatataacaagagaaaaaactcctaccctgtcccaccctctttgcctggggaaggggccaggtctcaggtagtgggcatgctttgtgctctgttgtcataagctgagacaatctcagaaagaggggcatgtggccaccggagtaattttcagtctctgcaccagtgacacccagattctggcatgccctttcctccttatggatggctcagctgtttcaacttgagtggctagctggaagagagacagctcagcaaggcagctcacttagtgtccagaagttaccaacagtggagtccccactatgtaggtcccgatgagcataggtcctgggtagctgcaagtcattgtcaccagttaggggaggcaaggactaagagcagagtgaggaaaaggggtaggaggggatactgtagcttggtcttcacagcctacagtgctagctagcctcctcaagaggtgttcatgggccatataaaaatagacagcagactggatttggtcatagtttgcccgcacttgctctagcctttgggccttctcgctttgggccctgccttgtgtgtcccagagtagtaatccatagaagatatgtctcagggtgggtctttctagctctaatgcttcccttgcaggatcaaaccagaagatgccatggactttggcatctcccttctcttctatggcctctactatggagttctggaacgggactttgcagaaatgtgtgcagactacatggcatctaccataggggtaagttcatccgggttcttaaatactgcttcttgacacctccaaattgctcaagttgatgtcacttgtttaatggaag

SEQ ID NO: 7809 - DNA, 2300 bp, Homo sapien
tagtcatggggaactaggatttatctctatacctctctcagggctgccctgcctccagtaccagtcccctctatctgcctcccaccttctctgcattcagctctttaccccaacagacaggctgtgaggaggaagaggagggggagggcaaagttgggagggctgcctgagtaggaagtgaggctgggcccttccagaaagcagcctccattcctctaggctgtggagcagctggaaagtggggcagacccagggagccccaccacccatgctagatcactcctggcagctcttgcacagagtctcttttctttaacacactgacagctgggagaggcctcacgtcatgtatgggcaactgctggactggcttcgatacttggtagcctggcagcctgtcatcattggtgtagtccaaggcatcaactacatcctgggcctggaatagtgatgaagagcatcagtggaaaacccaccccacacgccatggacctcagggcactctcctccctgcccacaaagacctcctgggtgggaaagactcaaaggggtgcttgggccactcaggacccctctggctgtgtcggactggggagggatatgatggagagccagccagtggggctgtcagcagtggggggctttttaaaagaaaactattttgatgaatatatttaaaaaacctttttttattgtggagcataggaattgcccccctccaggcttcaccctccctgcctaagcagggtgggggcagagccatgacatttttggtttaaaggagccttctcatctctggccgagaacactgctgggctcccaggtagctgaaggcctcagcccacccactcccttcttccctgtgtggggctcaagcctggtgcacttagtatagaagagctaacgtactcaggcttgtgccacgggtgagcactgaggccccaggtgtcctccctcccccactgtctgggacacaggacaggtgttgcgtctgactctgtctccccctgtccaagagctataggctggttgaggcaagtggaaccttatcagtgacttggccaacaagggaagccttggggcctcagaattcattgaagatttgttttgggacaactggaagaatcagcaccatggatactcgcccgtgggcagggctgtggtcagccaagaatagaggtcatatagttgggccatggggcaattgttggcagccatgactgacggccccttgtgcaagctcattcttcagtggatccttcagtggagtggtgacacgtgccagcggtcactctgccacatcacttccttcttgaaagcctaagagtgcgtatgcgtgtgtgtgtgtgtgtgtgtgtgtacgtgaggcagaagaatatgacagatgtcagcttctccctgtgtcagatgatatgtccttgaagctggcaggggattcccagtccagggaatatccctacatgatttttgtcattcatgggtcctccctgggcctgacaacgggagtggtgggtgggtgagaacaggttctgagagggggcttctaggaaggccccagccctagtcctaggcgacttgaataaagtgggaggtcaaacatgggccttcggcattgggtttctagggaatatggctcagtagggcctgccccttcaagggcagcaagaacgaagcaggatgttgtcactcccgtctgaataaagctccatgagctgggttggaaagctgaacatttatcttgctttcttcttcccacctctttccctggggtccccaggggtgtcttgcctttgttaacccccatcggagacctgagggtctgggggtggttgggcctgcctttctgctgttcccagctgttcccctgctgacatccctaggagtggtggaatgccaggctcctgtcctgtggcctgggggcctggggcatcattgggcctgccttcagactgaggttgctctatgttctcactgcctgaggacagtgtcccgccaccacctgccttcctgaggaccacactcaggctcggcttctcttccccagctgtggcttcccatggtaccctgctgcttatgccacctgtggggctgttcccctcctcagagaggggaatggggctggtcagaggacctagggatcacccttccttttactttttccccccacccccctgtcaggctcaggtgagaagccgaggccaggctgtccaaagctcttttcatgtgtaacagttctgagtcccttgacctccccccttggcctgactctggtctcggttccactaagacagagtcctgtc

SEQ ID NO: 7810 - DNA, 2300 bp, Homo sapien
ggtgagcactgaggccccaggtgtcctccctcccccactgtctgggacacaggacaggtgttgcgtctgactctgtctccccctgtccaagagctataggctggttgaggcaagtggaaccttatcagtgacttggccaacaagggaagccttggggcctcagaattcattgaagatttgttttgggacaactggaagaatcagcaccatggatactcgcccgtgggcagggctgtggtcagccaagaatagaggtcatatagttgggccatggggcaattgttggcagccatgactgacggccccttgtgcaagctcattcttcagtggatccttcagtggagtggtgacacgtgccagcggtcactctgccacatcacttccttcttgaaagcctaagagtgcgtatgcgtgtgtgtgtgtgtgtgtgtgtgtacgtgaggcagaagaatatgacagatgtcagcttctccctgtgtcagatgatatgtccttgaagctggcaggggattcccagtccagggaatatccctacatgatttttgtcattcatgggtcctccctgggcctgacaacgggagtggtgggtgggtgagaacaggttctgagagggggcttctaggaaggccccagccctagtcctaggcgacttgaataaagtgggaggtcaaacatgggccttcggcattgggtttctagggaatatggctcagtagggcctgccccttcaagggcagcaagaacgaagcaggatgttgtcactcccgtctgaataaagctccatgagctgggttggaaagctgaacatttatcttgctttcttcttcccacctctttccctggggtccccaggggtgtcttgcctttgttaacccccatcggagacctgagggtctgggggtggttgggcctgcctttctgctgttcccagctgttcccctgctgacatccctaggagtggtggaatgccaggctcctgtcctgtggcctgggggcctggggcatcattgggcctgccttcagactgaggttgctctatgttctcactgcctgaggacagtgtcccgccaccacctgccttcctgaggaccacactcaggctcggcttctcttccccagctgtggcttcccatggtaccctgctgcttatgccacctgtggggctgttcccctcctcagagaggggaatggggctggtcagaggacctagggatcacccttccttttactttttccccccacccccctgtcaggctcaggtgagaagccgaggccaggctgtccaaagctcttttcatgtgtaacagttctgagtcccttgacctccccccttggcctgactctggtctcggttccactaagacagagtcctgtcatctttccctaccatcccccactggactgtctctctcagaaaccccaggcagccttgcctcctgacctaactcctggagatgctggtgttcttgggaggaatttctcctgcatcttacatgctagaagcccctggggcaggaggtagggggaggaattgagaggaggaaaaacatgaactagacacctagagaagaaggatgtgacttgtagtatcctatgtctaaattaggaatatgaatctggtttttctacaagaagtttgagatcacagctgactgtgttcctgatgcatccaccaaacccagttccatctgtgggcctccctggctctgtcaccagccgttgcaccctcccaatcacaggagtcacaaacctcagacatgcagctcctgtccacacttaatatatgcatgcattggatcacccagccctggtctttctgcctccatggataactgcatgaccctgagagaaaacctccttagatttagcatcctaggttcctcacacgcctcaccctgaatcctggccctcccgcagccccagcgccatttgtcccatcagtgacaagattcatattctgatgtagactctgttgccagagccagtgttgagccagtccgcctcttccccgggaagtgcctgcccttccctcctgttagggttggctctcgagcttgtgtgccagttcctgggttggccgtgagagttctacagacaaggaggaagtgctctcggtgtatttcctgtggtgggttcacacgcagctagacacagctaacttgagtcttggagctcctagagggaagcttctggaaaggaaggctcttcaggacctcttaggagccaggtaggagtctgggactactagtgaacctagacctgtggctctggccagaggggctaggatgagagacagaggg

SEQ ID NO: 7811 - DNA, 2300 bp, Homo sapien
aatcaggccctgctcttaaggagttatggtctggacaggaggcagtgtgggcatcataaataagcccccatgggcttttggagttaggtggaccaaatcttactctgccatttagtcactgttactctggtcaatttgcttaaatctctgaactcagtttcctcctctgaaaagagggtgaagtgacttctcagagtggctttgaggagaaacaagttcccctgtcctaagagagctcacatgccaagtgccttagagtaaggctctgcacctgggtgttccctgaggattggttcccttcctcctacgggagattgtgcatgcaaagagggtgtgacactttgtgtctggtctcaaagaaggcaaagatagggcaggagctggtcagggaaaggccactacggatgtggactgaagggcatgtgggcttcaggtttagtagactgtagtcgggcagagagtatttggggtggtgtggttttcttccgcttcctaagaaagtgcaggagtctgaagcacctgtggagccccagtggctggtgcagataagcggacttgggtagagcggccagaccagctttcctgagtggcctttcttctcaggctgtccaggctcagggaggcgagagccagcaggaggcccagcgcctccaggcccagctgaatgaactgcaagcccagttgagccagaaggagcaggcagctgagcactataagctgcaggtaaggagcccagccccagcccatgccaccttcctcctgcccttcaacctctaccccacccacccaccctctctgcccacagatggagaaagccaaaacacattatgatgccaagaagcagcagaaccaagagctgcaggagcagctgcggagcctggagcagctgcagaaggaaaacaaagagctgcgagctgaagctgaacggctgggccatgagctacagcaggctgggctgaagaccaaggaggctgaacagacctgccgccaccttactgcccaggtgcgcagcctggaggcacaggtaagaatttggctggcagactcacctcactcctattccactggacccctgtgccctctcctcctaggccactgctgccttaggcttttcttcactctccccctggccctctccttctcaggttgcccatgcagaccagcagcttcgagacctgggcaaattccaggtggcaactgatgctttaaagagccgtgagccccaggctaagccccagctggacttgagtattgacagcctggatctgagctgcgaggaggggaccccactcagtatcaccaggtcaggaggcagccttcctccctatgtctgtttatggagtgcctgctgtttatcaggctgtatcctagtgagataaataagatgtgatctaaatttattcttagagaagaataacgaaaaacgggtattataccagatatctatttagggcacagttggaataaaaagcaagtggtcaagaaaggcttcgtggaagctatcgctcctgctgagtcttgaaagcatccataggtgtgtgtgccaggttgacgagaagagcagtgtgaacagaggctgtgaaagagcctgactaagctgagatgtgaggccaggaaggcccattggagaccgactattaagacttgatcctaaaggcattgaggaaaccttggtggctgtaattgaaaggtttaggagaaaaaaaaaggaaccttggaagaatttgaaactgaagagtacatggttaatttgcatcttaaaaagattattctaatagctagtatagaagttaagactggaaaaatgtttttattaaacacttacatttacttattttgtgctagacataaagcactcatgacaattatacctgatttgtcccccaacaaccctctgaggtaggtttattctgtctcctttaacagatgaatctggggcatagaggggcagtcacttgcccaaggttccccagtggtagagctggggtttgaccctgggcagcctggcctgagttcttggcttgtcaccactcatcttcctctgtcagtgccatgatgagtctaggtgagaggagatgaagcagaccagggaaaggacatgagcatggagtggggtgtggttaggagctgttcaggaagcttggtgattgggctcgccaagcaggacgacattggattatgcccacgttcatggcttgggggcctgagtggggggcgttcctattcactgaaatgggagatgcaggaggaagaacagagaagtgggcttagattgggacgtgtttgctgtgaagcagcca

SEQ ID NO: 7812 - DNA, 2300 bp, Homo sapien
aggccgacctgggatgggtgggatgaggcctgagagagcccagcacaccacactcctgggcagcctgggcctggattccatggcttgaccctgcccccttcacaaacagttcacaacaggagctggcggaggcaagctgcagccgggctcatgcaccaagactggtcaccgtttaagcagccagcatttagcgaggacctcaggcattacctgcttagtttgctctctctgaaatacctctagctgctccacctgtacatgggggaggagcaacagagacagagtgagatgaggccaaagaagcaccagccctgctgccaggctgacctcactgaggctctgatactttcccctaaggagctagattgacagtaagtttaaaaatgccagttaggctgattctaatccccagtggctcctgaggcatccagtgcaggtgtgcctctgaacaggctggtggtcatcacaacttgactctctagtgacagagccttcaggggaggggaggccactgacattttctttaggatgacaggggcaacagacttgaactccaccagccacctctccttttctgccacccagtgaatgaggaaaggcaagacactccagtgtaggagctagaggccctggacacagaggatcgatgtccccgcgctctcagctcctgatctttgggagggtggttgggctgagtaccttacctgggcagtgagtttctgcctctcttcctggaaccgctgcctctcctccaggaccttgaccttggcaccctcatacttggcagtcatcacctccagctcccgggcagtgctctgtgcttctcgctgcacctcagccagacgggtctcagcatcagcacgtacggctgccaactcttggacatacttctcccgggcctggtccaactccacttccagaaactgccggccaaggttggcccgctcacccagcccccggttctcctctgccagcaggccatgcgccttcttcagcatgctcagctgctctgcatagctggccttctctgcccgcagctgctgagctgttcgctcctgctctgccaccttctgccgcagaggaatcagctccccaagctcccgctgggcccgcagcagctctgcccgcagtcccccagcggcctgcttgctctgctccagctcctcacggtggcgtttctcggcagcggcctgctcggcctgcagctgctggcagaggtgcttagctggcagcagctcactcaccagggcctgtgtgctggtgtgctcgagctgcagggtggagagggcctgctctttctggaagaacttctcctgccacgccttcaattcttggcccagctcctccgcacgctcagcctgtgaggtcagctcctgccgcaggttctctgaagccacccgctgtttctcagcctcctcccggaggctctgcacctcctcccgcagagcagagctgcgttctgcagctctggcactgttgctggctgtctctgcctgcagcaggcgcagcctctcctccagcttctggctcttctctgactcggccatcaccagccgcttcaactccttgctctccccctccttctccaggacctggcgattcaggatggacacctcctcctccaagctgctgatgaggctatttttcctctcagcctcttgccggccccgggccacctgggccttccactcatcttcagccttgctgtggtcttgtaccttggtgcggaaggcagccaactcccgttgggccgaggctaaggcactctgactgtgccctagctcctgggccttctcctctaactggccctgcagagtctccagagcactgtcccgctcagcccgggaggcccgctcagcctcgaggctgcgttccaggctgtcagcctgctcctgctgcttctggcattgctgttccagcttgctcacctctgcccgcagtgcctccagcttggggcctgttggctctgtcctgccagcagcctcagattgggctcctgagccagatgcgtgctccttttctttcttagccagctgttccttcagttgcttcacggtttgccgaagttcctccagctcttttatctgggctgcctccagaccacgaagcttggccaactcctggtccttgccttccttttccgtcagggcatgagccagtgcctcttgcagggtagcgaactccacacgctgctcgttgagggcgttctgcagccgcatctcaagctctgctctggccgccttctccagggcaaggtcagcctgggcacggccccgctcctgggtcagccgcgccacctc

SEQ ID NO: 7813 - DNA, 2300 bp, Homo sapien
acttcgaagaagaaaagcagcagctgtctagcctgatcactgacctgcagagctccatctccaacctcagccaggccaaggaagagctggagcaggcctcccaggctcatggggcccggttgactgcccaggtggcctctctgacctctgagctcaccacactcaatgccaccatccagcaacaggatcaagaactggctggcctgaagcagcaggccaaagagaagcaggcccagctagcacagaccctccaacagcaagaacaggcctcccagggcctccgccaccaggtggagcagctaagcagtagcctgaagcagaaggagcagcagttgaaggaggtagcggagaagcaggaggcaactaggcaggaccatgcccagcaactggccactgctgcagaggagcgagaggcctccttaagggagcgggatgcggctctcaagcagctggaggcactggagaaggagaaggctgccaagctggagattctgcagcagcaacttcaggtggctaatgaagcccgggacagtgcccagacctcagtgacacaggcccagcgggagaaggcagagctgagccggaaggtggaggaactccaggcctgtgttgagacagcccgccaggaacagcatgaggcccaggcccaggttgcagagctagagttgcagctgcggtctgagcagcaaaaagcaactgagaaagaaagggtggcccaggagaaggaccagctccaggagcagctccaggccctcaaagagtccttgaaggtcaccaagggcagccttgaagaggagaagcgcagggctgcagatgccctggaagagcagcagcgttgtatctctgagctgaaggcagagacccgaagcctggtggagcagcataagcgggaacgaaaggagctggaagaagagagggctgggcgcaaggggctggaggctcgattacagcagcttggggaggcccatcaggctgagactgaagtcctgcggcgggagctggcagaggccatggctgcccagcacacagctgagagtgagtgtgagcagctcgtcaaagaagtagctgcctggcgtgagcggtatgaggatagccagcaagaggaggcacagtatggcgccatgttccaggaacagctgatgactttgaaggaggaatgtgagaaggcccgccaggagctgcaggaggcaaaggagaaggtggcaggcatagaatcccacagcgagctccagataagccggcagcagaacgaactagctgagctccatgccaacctggccagagcactccagcaggtccaagagaaggaagtcagggcccagaagcttgcagatgacctctccactctgcaggaaaagatggctgccaccagcaaagaggtggcccgcttggagaccttggtgcgcaaggcaggtgagcagcaggaaacagcctcccgggagttagtcaaggagcctgcgagggcaggagacagacagcccgagtggctggaagagcaacagggacgccagttctgcagcacacaggcagcgctgcaggctatggagcgggaggcagagcagatgggcaatgagctggaacggctgcgggccgcgctgatggagagccaggggcagcagcaggaggagcgtgggcagcaggaaagggaggtggcgcggctgacccaggagcggggccgtgcccaggctgaccttgccctggagaaggcggccagagcagagcttgagatgcggctgcagaacgccctcaacgagcagcgtgtggagttcgctaccctgcaagaggcactggctcatgccctgacggaaaaggaaggcaaggaccaggagttggccaagcttcgtggtctggaggcagcccagataaaagagctggaggaacttcggcaaaccgtgaagcaactgaaggaacagctggctaagaaagaaaaggagcacgcatctggctcaggagcccaatctgaggctgctggcaggacagagccaacaggccccaagctggaggcactgcgggcagaggtgagcaagctggaacagcaatgccagaagcagcaggagcaggctgacagcctggaacgcagcctcgaggctgagcgggcctcccgggctgagcgggacagtgctctggagactctgcagggccagttagaggagaaggcccaggagctagggcacagtcagagtgccttagcctcggcccaacgggagttggctgccttccgcaccaaggtacaagaccacagcaaggctgaagatgagtggaaggcccaggtggcccggggccggcaagaggctgagagg

SEQ ID NO: 7814 - DNA, 2300 bp, Homo sapien
cagtggtattgctgcccagaggatggtgggcagctggtggtgatttggataatctaggactcaagacttatctgaggaagggtatacggtaaggaaatttgaagtaaactcagcagccttggggaagtagtaagcaggttacattatgactttattgtgccttagaactaggtctagagaatcaggtccctcatgctcccagttccatggtttctgcttttttctaggccagggcaaaaggagatcttggtaacaagatgatgggccccatgtttgctgatgtttatgagggcttgtgtggtaatctggtgcctgttccccctctctgttcacatgggtctcatttactcccagaaatgccttgaagagaagaacgaaatccttcagggaaaactttcacagctggaagaacacttgtcccagctgcaggataacccaccccaggagaagggcgaggtgctgggtgatgtcttgcaggtaggaatgcacagaaagacctgtgtgctgctggttggtgtggactcacattcagtacatttgggttcctggtgttcctccatttccagaggagtcttgatgactgaggagtcatgctgatcccagtttgtctctttataccaccagctggaaaccttgaagcaagaggcagccactcttgctgcaaacaacacacagctccaagccagggtagagatgctggagactgagcgaggccagcaggaagccaagctgcttgctgagcggggccacttcgaagaagaaaagcagcagctgtctagcctgatcactgacctgcagagctccatctccaacctcagccaggccaaggaagagctggagcaggcctcccaggctcatggggcccggttgactgcccaggtggcctctctgacctctgagctcaccacactcaatgccaccatccagcaacaggatcaagaactggctggcctgaagcagcaggccaaagagaagcaggcccagctagcacagaccctccaacagcaagaacaggcctcccagggcctccgccaccaggtggagcagctaagcagtagcctgaagcagaaggagcagcagttgaaggaggtagcggagaagcaggaggcaactaggcaggaccatgcccagcaactggccactgctgcagaggagcgagaggcctccttaagggagcgggatgcggctctcaagcagctggaggcactggagaaggagaaggctgccaagctggagattctgcagcagcaacttcaggtggctaatgaagcccgggacagtgcccagacctcagtgacacaggcccagcgggagaaggcagagctgagccggaaggtggaggaactccaggcctgtgttgagacagcccgccaggaacagcatgaggcccaggcccaggttgcagagctagagttgcagctgcggtctgagcagcaaaaagcaactgagaaagaaagggtggcccaggagaaggaccagctccaggagcagctccaggccctcaaagagtccttgaaggtcaccaagggcagccttgaagaggagaagcgcagggctgcagatgccctggaagagcagcagcgttgtatctctgagctgaaggcagagacccgaagcctggtggagcagcataagcgggaacgaaaggagctggaagaagagagggctgggcgcaaggggctggaggctcgattacagcagcttggggaggcccatcaggctgagactgaagtcctgcggcgggagctggcagaggccatggctgcccagcacacagctgagagtgagtgtgagcagctcgtcaaagaagtagctgcctggcgtgagcggtatgaggatagccagcaagaggaggcacagtatggcgccatgttccaggaacagctgatgactttgaaggaggaatgtgagaaggcccgccaggagctgcaggaggcaaaggagaaggtggcaggcatagaatcccacagcgagctccagataagccggcagcagaacgaactagctgagctccatgccaacctggccagagcactccagcaggtccaagagaaggaagtcagggcccagaagcttgcagatgacctctccactctgcaggaaaagatggctgccaccagcaaagaggtggcccgcttggagaccttggtgcgcaaggcaggtgagcagcaggaaacagcctcccgggagttagtcaaggagcctgcgagggcaggagacagacagcccgagtggctggaagagcaacagggacgccagttctgcagcacacaggcagcgctgcaggctatggagcggga

SEQ ID NO: 7815 - DNA, 2300 bp, Homo sapien
ttctgtgatggcctcaatgaggagtgaggtaattgcctgcttttctagatttcctgtggtgtgacaatgtgagttttggagaaacctcttattccctaagaatttcctactatacccctcatgagctgcagcaaagtggactctgtctgattgctgacctccaaatgcccagtttccttaggtagtgagcagatacctaaagtaatgagtgcctattatatctgtcacagagctgagtatataaaaaagtatataatacaggatttccctccttactaaattattttattttgaaaattttcaaacctatagatattttgcaaaataatgtaacaaatacttatatacttctcatttagagtcactattaacattttgccaaatttgctgtctatttatccttcattttctgaatctttttgactgttagatgtaaatatcatgttatttaatccctatttcagcaagtatttcctaagaaaaaggtatcttcctatataactacagtactattaacactcaggaaacttaacattgattcaatacatccagtatataatacttgttcagatttctcatcttttcccagtgatgtcttttattgagttttttaaaattcaggattcattgaaggatcatgcatgtatttatgcacttagttgtcatgactatcatgtctttagtctgctttaactttgaacagttcttttttaatctgaatgcctttttgtctttcatagcatttgtctgattcttcttgattagattcaggttaggcatttttggtagaagaactatatagattaatacaatagtttgattgatgaggctgacactaaaatacatagaagcagtatctgattttgcaagacagtatataatttagcacttatttgtgttgtctaatctataaaccctataggaatttacagaagaaggaattcagtaggacttggataactaggaatgaaatactttggcagaaagatggggtttggaaaatgaacagaattggaggcagttgggatatggttagataagctgtgatttgggcttcccatcctactattaaggttgtgtatcatgaaaagtgactttgagggttctgtatcttccatggtgtttgcactgctagaagcctaatggtgtagagctcttgctttggcatcagacaggtctagagactgtgcccagcattttgccagttacctaaccttggggaagttttctcatttgcaagatagagtattaataactatttaaaaggttatcgtgatgctcacagtgagacactacataaatatttgaattaaaatatttgaatgcctttaggggggtgcagcgtttcctagatctgccatgtgccccactggatcattcattttgttttgtttggatacgtggtttcgctctgttgcccaggctggagtccagtggcacggtctcagctcactgcagcctcccaagtgggtgggacccaggcacactccaccacacctagctaattttttgtatttttgtagagacggagttttactatgttgcccaggttggtctggaactcctgagctcaagcgatctgcccaccttggcttcccaaagtgctgggattaccgctgtgagccactgggccttgcctggataatttgtttctgttacctgcctgacccctgaagatgtttgaatttaccactcctggataattgaaagcagggaaatgagaaaaggcttggctcacgcagagagaagtgggaagactggcttgatcaattcagagtatattctgtagaatagtgggaaataaggttgaataaatgacttgaggccatataatggaggatttggaaagttaagccaaagaatttagatatgatgctttagggagaagaaaactggaagatttttgagcaggaggagagacacttgaaaatgagagtggtgtggggcctcctgaggaagaagttttctggcttaaagactgaaatcctaacagggcagggccttcacagtgctgaccaagtgtgggtgtggcttggcagtcttgccacagaaggccagaatttctgccccagtgactcttcctgctctgccactgactcaccccgttgacctggcctgcatggcttcccttctgcttgctgtctgatccacagaacgctggggttgcccaggataatgtgaggctgagctcactaagagtgggtgggttaggggaatgaataatcattcctgtccctttgccccttccctaggtggaaactaattctaagccagactgctggagatcaccctgttctagt

SEQ ID NO: 7816 - DNA, 2300 bp, Homo sapien
aaaataccacacagaaagagggactgaggaaacataaacccatctgtgctgacagaaagctaccttacatgatcctcatgttcgccccaggttcccatatattcacagcagtaaagatctccacaaagcagagaggcccaactcccttaccattaaagctttaacgaccagacaacccagaagtttggaaacatagaaccaggcaacagatactagagagagggaattatgtattaaagcaagaaaatatcatcacgttttcaagagggagtgccattccagtaaagaggacagcttaatactgaggttcaaatgccactaaatgaaaacgggaaagcgaaattcctgtgccctttcagcccaagaaattattccaaagcatacatttattcccattacatgtcgcaaatcctgcctagccattaggatacagtgacgaaaaagtctctcgttatctagaagggcagacaaacacgcagacttttaaaataccagatggcaggccgggcgtgatggctcacgcctgtaatcccaagcactttgggaagccgaggcgggcggatcacgaggtcaagagttcaagaccggcctggccaagatggtgaaaccctgtgtctactaaaaatacaaaagttagccgggtgtggtagcgggcgcctgtaatcccagctactcgggaggctgaggcagggaactgtttgaacccgggtggcagaggttgcagtgagccgagatcgcgccactgcactccggcctgggcgatagggcgagactccgtctcaaaaaaaaaaaaaaatgacaagtgctaactcagaggtaagcaaaagagagtacccagaggcggcagcatcaacccagtgggctcccgcccacccacaatcttcacacagtcacaccacttatagtcataaatttgtactctccgaggtgcgtgtatgaaacatgttatctgtgagagtccatggatgaaaaacaaaaacaaacaaaaattaaaaaaaaaaaaaaaaaagacttaacctgttttgaccaggacaaccaccccaggaagtaggtaaggcaggtaaggtcattgtttacatatatgaaaagtgaggctcaaaatacactgaccagtccaagacaacgcgcgcccccacaaagcaccttccccgtccccatttatgcccaacccataaacccaaagtagagccaacctcgcactggctacgtaacccgggccaagctaaacattataaacctcaggctccccatctttaaagtataacaggtggttagaagattaaaaagataaacatttggcaggtcattgtggacggtgtagctcagaaaatgctgactactgcactaccataactactgctattgttaacgataaaaggcaaagactttccaggacccgacccctcgcttacaagcctttcgggaacttgccctatacccccgaccccagtcaccttcagatttaattccacagacacgcccccaaacagaccctcccctttaaggcaccccccccccccccggctcctccctctcaggcgcctctcctcacaaaccttacccccatagattctgccctttcggactcggttatggaggaggccttccgctcgcagcggcctctccagcaccccttttaggcctgagcacccgcaggggtgcccaggccgcacgccaaacgcgggcccgcgccggttacctggctgcgcgctcccgctctgcctcgcgattctccggaatcgtacctcttcgtgggctcgcgccagcgctgtgagcgcacaattagtttaaactatggccccgccccctcgcgctgccctctgattggcctctgtcggcggggcccgcttaaggacccgggaaaaggaagtttgagggccactgggaaagagaaggggtatcaccgcttccggaccccggcctgtacttgaaggcaaagagaactacaaatcccagcgtcacccgcggccttgaagccccgcccctgacaaactgaaggtcccggtaagcatcgcgtcagtacttatggcgcctgccgggttgtggtgacgaaagcagttgccatggagttgctctgagtaaccctgaggcagtgggacgccaagactggagaggaagcgactgcgggtgagtcgggcgggaaaacaggaaacccgttctaggggacaagagatctatggagaagggaggggcactcacagaacgactaagaaccttcctgctcggggatctgagatttcccccaccgaccctcatcacctttcacagcgaacaagatacaacactcacatgggacagac

SEQ ID NO: 7817 - DNA, 2300 bp, Homo sapien
tagatctggagcttagagatgagggctgggcttgagatacacacttgtgtacatttgcatacaggtggaaaatgaagttgtgggtgtggaggggtacccaagaagagaatatagagtgcagtggcaagagggcgtaggaccaaacctgggagaactttaaggtagtaagtggaccagtcagggccagctagtcaccagctagaaaccagctaatcatggtcacttcagacatgggtgctgtgttagcccttctgtttcctgtttagttaaaaatgttcaagtctcattgtcttagtctctctagttccttttccccattaaaagtttcaggggaggatctgaaattcattccagctgaagtgtaaataatacaaagtaggccacacaggttccttttccctggggcagtttaacttgttccttggaacaagtccttccgctatagaggcagtaggctgaagctaaagagacttagctggaagtcggagaactggagtctagttctagctctgtcactaatttggtgtgtggccttgggcaagtcccttttctctgggtttcagttttccaatctgtgaaatgaagataaatatccttgactcacagagctgttaagagtatcaaaagagagactgtgaaagcactgggtaggttactaaatgtaatagatctgtcgtgagtactaaaaaaaatgaagctctaactgtagagctttgagtagcggaccacggagaaggtgtggggagaaaagggaatctggggacagattgagaaggggttttactccttggaagaagaaggaatgaggcacttcacgccccaggaagtttcctacatctctagaattagggtagcgactgcgatttactcaatctaatgctaaccgcatgtcttggaagagggtctcagttcctcagaggaaaaccaaccccatttctgagggcgtttctgatctcccaggttatgcctggaacttgaagcatccgattttgggagctttatgtttgcgttgggggcggggttcgttgttttgttttgtttttgttttgtttcgttttgttttgttttgagatggaggtatcgctctatagcccaggctggagtgtagttgcgtgatcacggctcactgcagcttcaatctccgggctcaagcgatccttctacctcagcctccctagtagctggggccactggagcgcgccaccaagcccggctaatttttttatgtttttggtagagacagggttcgccatgtttctcaggctggtctcgaactcctggccttaagtggtccgcccgccttggtctcccagtgttgggattacaggcgtgagccaccgctcccggccctgggggtggttcttaagcatccccaaatctgtatggatatatatctcaacgcctatccctccctctgctccccctcgcccagtctgtcccatgtgagtgttgtatcttgttcgctgtgaaaggtgatgagggtcggtgggggaaatctcagatccccgagcaggaaggttcttagtcgttctgtgagtgcccctcccttctccatagatctcttgtcccctagaacgggtttcctgttttcccgcccgactcacccgcagtcgcttcctctccagtcttggcgtcccactgcctcagggttactcagagcaactccatggcaactgctttcgtcaccacaacccggcaggcgccataagtactgacgcgatgcttaccgggaccttcagtttgtcaggggcggggcttcaaggccgcgggtgacgctgggatttgtagttctctttgccttcaagtacaggccggggtccggaagcggtgataccccttctctttcccagtggccctcaaacttccttttcccgggtccttaagcgggccccgccgacagaggccaatcagagggcagcgcgagggggcggggccatagtttaaactaattgtgcgctcacagcgctggcgcgagcccacgaagaggtacgattccggagaatcgcgaggcagagcgggagcgcgcagccaggtaaccggcgcgggcccgcgtttggcgtgcggcctgggcacccctgcgggtgctcaggcctaaaaggggtgctggagaggccgctgcgagcggaaggcctcctccataaccgagtccgaaagggcagaatctatgggggtaaggtttgtgaggagaggcgcctgagagggaggagccggggggggggggggtgccttaaaggggagggtctgtttgggggcgtgtctgtggaattaaatctgaaggtgactggggtcgggggtatagg

SEQ ID NO: 7818 - DNA, 2300 bp, Homo sapien
tatggctgggagggaaggcaggaaggatgtgatggtagctaggacctatataaaagatattcaggaagtaaagctgataagacttagtgatagatgggaaatggaagaggtattaagtaaatggaagaggtactaacttgggttttgggcttgggtatattgtggataaaggtaggagcactggaagagatccaggcttggaggaaaaggttgggatacacagagattgtttcaatttcagaaatgtagagtttgggttgcctttgaggtatcctaaaggagatgttgaggcaattggctatatagatctggagcttagagatgagggctgggcttgagatacacacttgtgtacatttgcatacaggtggaaaatgaagttgtgggtgtggaggggtacccaagaagagaatatagagtgcagtggcaagagggcgtaggaccaaacctgggagaactttaaggtagtaagtggaccagtcagggccagctagtcaccagctagaaaccagctaatcatggtcacttcagacatgggtgctgtgttagcccttctgtttcctgtttagttaaaaatgttcaagtctcattgtcttagtctctctagttccttttccccattaaaagtttcaggggaggatctgaaattcattccagctgaagtgtaaataatacaaagtaggccacacaggttccttttccctggggcagtttaacttgttccttggaacaagtccttccgctatagaggcagtaggctgaagctaaagagacttagctggaagtcggagaactggagtctagttctagctctgtcactaatttggtgtgtggccttgggcaagtcccttttctctgggtttcagttttccaatctgtgaaatgaagataaatatccttgactcacagagctgttaagagtatcaaaagagagactgtgaaagcactgggtaggttactaaatgtaatagatctgtcgtgagtactaaaaaaaatgaagctctaactgtagagctttgagtagcggaccacggagaaggtgtggggagaaaagggaatctggggacagattgagaaggggttttactccttggaagaagaaggaatgaggcacttcacgccccaggaagtttcctacatctctagaattagggtagcgactgcgatttactcaatctaatgctaaccgcatgtcttggaagagggtctcagttcctcagaggaaaaccaaccccatttctgagggcgtttctgatctcccaggttatgcctggaacttgaagcatccgattttgggagctttatgtttgcgttgggggcggggttcgttgttttgttttgtttttgttttgtttcgttttgttttgttttgagatggaggtatcgctctatagcccaggctggagtgtagttgcgtgatcacggctcactgcagcttcaatctccgggctcaagcgatccttctacctcagcctccctagtagctggggccactggagcgcgccaccaagcccggctaatttttttatgtttttggtagagacagggttcgccatgtttctcaggctggtctcgaactcctggccttaagtggtccgcccgccttggtctcccagtgttgggattacaggcgtgagccaccgctcccggccctgggggtggttcttaagcatccccaaatctgtatggatatatatctcaacgcctatccctccctctgctccccctcgcccagtctgtcccatgtgagtgttgtatcttgttcgctgtgaaaggtgatgagggtcggtgggggaaatctcagatccccgagcaggaaggttcttagtcgttctgtgagtgcccctcccttctccatagatctcttgtcccctagaacgggtttcctgttttcccgcccgactcacccgcagtcgcttcctctccagtcttggcgtcccactgcctcagggttactcagagcaactccatggcaactgctttcgtcaccacaacccggcaggcgccataagtactgacgcgatgcttaccgggaccttcagtttgtcaggggcggggcttcaaggccgcgggtgacgctgggatttgtagttctctttgccttcaagtacaggccggggtccggaagcggtgataccccttctctttcccagtggccctcaaacttccttttcccgggtccttaagcgggccccgccgacagaggccaatcagagggcagcgcgagggggcggggccatagtttaaactaattgtgcgctcacagcgctggcgcgagcccacgaagaggtacgattccg

SEQ ID NO: 7819 - DNA, 2300 bp, Homo sapien
cactgtgccctgcctcagtaaaatgcaatcaaaataccccatagggtgttagagtgagatgtcctctttcccaccccaggactctccctctgcctgctcttccctgaggatgggaggagtctttgattctttaataattctccagccccatctcctctccgctgtattcccctcttctcctgtgctgtctcagaattcccttcacaaatgtgtacatacacataacacacagcacacattttccctctactcagctcttctctccagggacctatggggaatgggcctctcctcccatgtcctggaccattctcctcctcatccagatctgacctccttgccggccttcttgcaaggcccctggtgatggcggggagtaaaaatgaaagagtgtatggatgggtgtgaataggtgagtgatgcggtgggcttgaactggtgagcttgggaacccacaatccagggccctgcttacctgggctggaggaccagagcacaggacaggtcggggagtccagggcctgctgcgggggataaccctgaggtaggaggctggaatggctttcaattattcatgctgaggctgctgctgtcacctgagacctgcagttcaagttaccagccccagggacgagcttgagctgcctcctacccttcaggaacctcaaaagatttacagaacctcagggtcttgatttgaggggttataagaggtatgagatctggtgacttctccaatactttggatcagaagatggggcatggggtgagccaaggtgatggggtgactgtaacatgctcattgatatgcaagttttctgtaagcaaggccatgccttgggctacagggaagagtcagaacctgtcactgtgctccaggaactcccaagtttggtaggtgagactgacccaggaacagagaatacaatatagtgtgatcactattggatgttccatgactacagggactttggctgttttgtgaactgctgcatatccagatataacaatgtgtggcacatagtagacgctcagcaaatatttgttgattcaataaatgcatgaattaacactggatgaggattaagcatagggagctgggcatgtccagagaatggagtcagagaaggtaatcaggaggacattgtactgagtctcgaagacagtaaagacagtaggcagaccaggctgcatgtacaaagtccagtagatcaatcaggaaactacattatttctctatgtccagtgaaacacattgctgacccctccacccctcaccccagaacatgcagtgggagaggtgtcaggctcttgttatgtcagacgggtaatgtgccaaaacaagatttgagggtggcacatttgatacatgctggtgaacacccaatcacacgctcatgaacaacaaatggatcactatacaatcttggacggacttggacctgtgttcagggcccaagggaagacatggagcgggggttaggaaaagagaactgatggtcagctttgtgcgttcgattacaatgggtgctgttaaaaaaggcagaattaaagataaaagcctgaaagcagagaggtcagtgaggtggcttctatctcctctaccaggatttatctccgctgcgcgtcagcatgtgaaggtagtataaggtcccttcttcctgtaagtcgcagatccccagcccaggtggagaatacaccctctgtgtattcacccccagcccagctgggcgatacaccctctgtgttccccgactaggtactggtcatctggatcatctgtgtgtgtgcacccagaccgtacgatctggagcatcaggcctggatcccagtcgcccctcgcatggcatttagaagagtatatcacaagggcatacgagggcatttggtacgagttcgctcaatggcccagaaaagtggcctagtggccacgagaacgcataacacaattcacgatggccactactgccagtttagagactggaaagatgaagtcatgtgatccgccccgccctttccccgcatcacgtgcttgcgtgtacggttacgccttcccattggttgacaacgatcacgcgctagcgggcgggaccggaagccggggtattgactgaggcggccaagcggctccgggacagggggtacggggggtgggggcgggtggttgcctgcgggaggccgccgcgggtcatgtgaccggaagggctcctcacggacgccgtccctcctcggcgcggcctgagcgcccggcccgaccccggccatggggtgctgctacagcagcgagaacgaggactcgg

SEQ ID NO: 7820 - DNA, 2300 bp, Homo sapien
gctgcttttcctagtttcctcaaattctgaatattggaggaaactattttccaactacattcactcccttggtgatctcatccagtctcatgactttaaacaccatctacatgccaatgactcccaaatgatctatccagcccagatctctgccctgacctgcagactcatatgccttcctgccgccccaacatctctactctaatgggcatctcagactcaacacactcaaacctaagctccctgtcaaaaaaaaaccaaacccctcatcacctccccattccttcccaactcaaaaaagtggcaacaccaatcttctagtcgttcagcccaaaaatcgtggctcctttcttattctggcattgtccatctgttagcaaaccttgtagtctctaccatctaaataaattcagaattcaaccacttctcatccactacctctagattatcataataggctcccaaatggtctccctgcttctgccattgtctcccctaccccagtctatttggagaacagccagagtaactcagttaaactgtaaatcagattgtgtggaccctgtgctcacaaccctccactggctccccaactcctcatctcctacctattactctccctagaggacactatgcccaagccattctaggccctctgcacttgtattctctctctctgaaatgctcttccacaaatatcagaaggctctctgctccttcagacctttactcaaaagtcaccttcccagtgactttggccccccagtctgaaataaaacacctcccctgcaaatattttattcccacttctcagatttattttttctcttatttactgcaatcttacaactacatattttatttatctatcttctttattgtttacctctctcagaatgaaggctgcatgaaaagagggacttttttggtctgttttgtttactattgtatacccactactaagaatagtgatggacatatactaaggcactcagtaggtatttgttgaatgaatgaaaaaggtagtcatttccaagaggcaaagtttactctttaatgaaaaactataacaaacagtgctatttggcaatataatcacattcaatatgcacagtacacgacctcttgaacaattcttatccaatcttcacatcagcccaggatagaaggaaggctgggcagagattatgatgctggttgacaaagaagctgagtccagagagaggaaaaggaattgccaaaactcacacatctggccaggacagtactggaaatgcggataactgctgtccctgaaagaggctggtaagtgatggagtttaataggaattgggtttgaaggacctctgttgccagaaagcatgagtatctctaaaggcgaagctgagtcagaggttactagaacagaggcatcagcaaaggatgggagaggtgacgagggcgatctctaagtgtacttggcccaggcctgaggagggcagctgattcccccagcaacagaatgctgtgcctgaggctaactagtcattcaagtctgtacataatctccaatgtcaaaactcaacaagcaaccttaagagagaccactaagtctactgcatgtctgcagggtttggcttccctggactgtgaggtcttccagggaagcgaccatattcctagatttatccccagtttctagcaaggcctggaatatagtaatattgtaactctaatatttttgttcagagcaaaaataaaaaagaatgaatatgctcaaacgggaaactgtagctgagagagcacagataggaggggcctaacatcaaccagcaattctgaagtagtaacagattagttttctgggatgcagcaggacgaatggccctcgcactaaaaggttgctgtcagctcttcttcagaaggggttaacaagcaaatggtgactggcaacaaaagggcaggggttaaacggggcagtggttaaacgagaccgtagtgctggcgccaggatggagacgccgactggctgagactcaaggcggggcagataggtaggcgcggcacacttccttccctaacaatgtgactaaggtaggtcaacgtcacatccggtttagtgggcgggagcggggaaaacaaaaggagacgaaggacgcatgcgtttggtgagtcccggattctggtgggttcttccgctcaggctgggtgaagcgcttccgggtcgccgccggcagcagcctcccggcgcggtaagtacagacgcaaggctgcaaccgtctccttgccccttcattcctttttcccccagagaaacccat
